United States Patent Application Publication US 2005/0228172 A9 - sequence listing, part 104

SEQ ID NO: 480117 - DNA, 612 bp, Homo sapiens
tcttaatctagtgagtttgtaggcttaagacttaactatgttcagtcacccaactaccattagaattgctcctgccaaaacatcatgagatatctctactcagggaaaccactggaccctgtgtagtccccaagccacagctcatcctcctctctgccgaggtctccctttcaaggttttcacccaaccaatgctcaccttcaagtcaggaggcctgccctgagttcagccctgctggacaactgtgtcccaaggacatatttcagagtaatgagtgcctgtttggtgtcagtattattctctacaaatgtgttctgactagctggtcaggctctcaataccctctcctggaagacccatgggcttgtcaagaccttagacactgtagccatccaagctgtcacccagagttggcccctggtatagtgtccccgatttttatctatctgtcctggtgggcagggcccaggtragattccagcccattcttttctctctcttctgtcatctccttggagccaggggcagagcatcatgccttaaagctaaggctcattatttgtgaagtaggtgggacaggtagatttcattaattgtctccattttcaaaaa

SEQ ID NO: 480118 - DNA, 504 bp, Homo sapiens
ttcacatactcatgagcaagaacaaatgtttactgttttaatccacgagtttcagggtgattcttaacacagtgatagattactgatacatcatcacagttctgaaactcttcacctgagaaatacagatttatgccttcttctccaccttcataatttaggctttcctttcttgttcaggttactgcaatatagtcttccaacttgtctcccgcttgttgtcattccccacctccatgcacactgttgctactaagactatattccttaaagtcagaaattatattgtcataatttatgtactctcatcacctagcataatgcttggtacctgattggtgctcaatcttsttcgcagaatgactgctactaccagattcttttaacagagctctgaccacatcagtgtcccatgcagagctctactggcatttataccacacactaaatccactttccacttggtctatttaattctaggacccctgcgatccggacccagcc

SEQ ID NO: 480119 - DNA, 570 bp, Homo sapiens
cttcaaatatatgttatattaccacaaaccacatgggatgtccacaaattattaagtgatagggaacagcttagggctttttgcctgcatagcatcaatacttcattctttcagtaacaggaatctgtctcccactcccattggatgcggtctttggcaaggggccggggggcggggggcagctatcaatcaagggtgccatttccaatactgatccaaggtgatagtgaccaaagttggaataataactatttccctggaatttaaaagttgtgctgagaaactatgtgaccaacaacttttgaagctggttctcacagcattaatttgaagagttttccagatctaccaagtctccccaaacctcaagagctcacttagctgctgacctttatgcacataaaccagaaaatctagaagaaatggctaaattcctggactcatacaccctcccaagactgaaccaggaagaarttgaatccctgaatagactaataatgagttctgaaattgagacagtaacaaatagcctaccaaccaaaaaaagcccaggaccagatggattcacag

SEQ ID NO: 480120 - DNA, 539 bp, Homo sapiens
tggtttctccagatctactctcctgaaagcaaagaaaaaaaaattaagcctgatggaatagattgatgaccacacagaagacatgcaaggttccaaattagtcccccccaacaaaaaaatwcagcgagttacaggttgaggggatgcctgacctgggactggcagacaggctcctttccctaacagccggctcccattgtggctgctgctcccccttctctggctggagcaccacacacgcaccccagaggctcaactgtggcccctccaaccaccctactttaagtggggtgggctcctaggggtacagaacgtgacctgcaggtatgagctccatccaccttgggtgccattaacgtgtggaaactgtggcctccgctacaacagtggatccaatttatccaccaaatatatgccgtgggcctaccaagtaccacaatggttgctacggcttaagtaaaagtctggtagttccaccgtcctcaaagccttggtttactggtttgataggcagaaaactgaaagaccaaaaagagaaa

SEQ ID NO: 480121 - DNA, 635 bp, Homo sapiens
ccattgtcataagtgaattaactcatgaacagaaactaaataccagaatctcacttataagtgagagctgaactttgagtatgcataaacataaagatggcaatagaccttggggactactagaggaggggtataggggagtaagtgttaaaaagwtaacctttgggtgctctgattggcacctgtgtgatgggatcattaatagtgccaacttcagcatcacacaatatatccaggtaacaaaactgcacatatataccctgaatctaaaatagaagttgaagaaagaatatatttttaaaaacaaagcatgaaagctgggtctaatttggttattcaccagttcatttgttttgtataaaaaacaccactatcctcatttttgttctgaaaacagcaattgaggattgacagtgatgtgctgttgacagacactgcacttgcccttaaaagctccatctgatccatggcagaaaaggttaccttttagtacaattcatcttggctttatgtcaatgaatgccacacaccaccatctaccagaaactctccctccaaagtcccagtgttgaaaattacctgtagtgtgtcactgaaggtaatttttaaataaataaataaaatttttattattt

SEQ ID NO: 480122 - DNA, 610 bp, Homo sapiens
gtaaaataatgacatcagtagactatgataagttatgtatgtataacacaatacttagaacgatcactgaaaagtggttatttttcattatttttgacataaagaatcaaaatacacagcagcttccttcaattttacatctttmtttctatatgaatgtcatctacagccattaaatcgtacaatgcataaagtctgattttaaccaactgatgaagaaaattcaattcaagcaaagaaatgacaaattcccatatcaatttgaattgttaaaatgatataacagcaattatttgcataactgttcatttgttttatgatgtttccaatcccatctttaaaagagttctaactctgatcatttatgaaaccagcaaaaattacagggtacaatcttgattctacctcacctgaaaaaatgttgatatggtatattttaatatccaaacaatatttatatcaatattaacaaagatattgtaatcacatgaatagaaagtaatgttcattattatttgcagaaaaaatgctacaattgcttccaattaaaatatatcaaaataacagtctctcttggcaaataaaccaattctagatgctagtttatagt

SEQ ID NO: 480123 - DNA, 475 bp, Homo sapiens
atctcttttctcctttttggggggacatctctttgttttacattcacattatctctatatctcagtgctatttctcttgtcttcattgatttcaagtatcttaggtcaggagttaaaagttaaatagtcagagccaggacttgggtccccagccatggcttccccagactctcatggaccttgtggtaggtaagcctccatggtgatgagctaaaagtcaacagttttcattctgccktccttgtcatgtctaagcctactaggtaaccaaagtatatcctgcatcccctcggcttgccttggttctaagacatgacctgcagactagatgcaagaatgctacaaacctgtgccccttgaccaactaatagaccccaatggagggaaatgagaataaatgtgagggagaccacagtccttctacaggacatgtgattttgagagagaaaaggatggatggaatgggagaatgtgg

SEQ ID NO: 480124 - DNA, 625 bp, Homo sapiens
ctccaatagctgttatccactgagtgaatgttgagtcccttggtgcatggagttgacatctattcatttttctagcagtataatgaatccaaatgatccttcataaaataattctcctaggctttcagtcactggaaagcactcatttaaagtatattaaaagtatgtgtgtcctatgtcctcaagaagttatagtcactgtatttgtttatctgccatttcctctgtgcctttgtagagaacagggaaggagttctgatcacattatcagatgatacgaattatgtcatgcacagtcaataacatgttaccttttggacatttttatatctttcacagaattcccaacttgtgagccactaacccaattcgtatgcaaaagtggaagatgcattagcagcaaatggcactgcgactctggcaagtaccaaatgctcactgtmtagcactaatttgatcgggggcttggcggtctggactgcctggctttcttcagaggtactttgtaggggaatcttgcagagccaagaaaaacggctaaaacaagtggtgagcgggcagctagcagcacatcagtgggaattagcattaaagataatggaactcaatatttgccccatgggtg

SEQ ID NO: 480125 - DNA, 607 bp, Homo sapiens
ttaagtgcaggaattattaatacatagtgattcacagaaaagctaagaacagagcaaggactgacacatggtgattataatggggagctctgtgcacatccaatatacagtgctttttaattttcaaagcactttacaatgaatgacaagttaaaggtgtaaactccattaaaataatcgaaaaagaaaaagacttctccctcagactggcctcacaatttaaatattccattgtatttgcagcaacattcttgrctgttttctaagggggctttaacaatttttatataccaaaaagtatattctgaataaaaatatttatatcatatgtatgatttttgcaatactaattttcatttttttaacattaggaaaacagttttttttctgtcactgtacagttgctagtcttctaactataaatatttagtcacagtgaattcatttaaatattggaataaattctactagcagttgccatatttccttcagggctctgtatttacttatttatcagagtccccaaattgtatgcttggtttaaatagcttcggggcaaaaatacaataaaattgtattagttaaaaatataactggcatcagcaac

SEQ ID NO: 480126 - DNA, 607 bp, Homo sapiens
ttaagtgcaggaattattaatacatagtgattcacagaaaagctaagaacagagcaaggactgacacatggtgattataatggggagctctgtgcacatccaatatacagtgctttttaattttcaaagcactttacaatgaatgacaagttaaaggtgtaaactccattaaaataatcgaaaaagaaaaagacttctccctcagactggcctcacaatttaaatattccattgtatttgcagcaacattcttgactgttttctaagggggctttaacaatttttatataccaaaaagtatattctgaataaaaatatttatatcatatgtatgatttttgcaatactaattttcatttttttaacattaggaaaacagttttttttctgtcactgtacagttgctagtcttctaactataaatatttagtcacagtgaattcatttaaatattggaataaattctactagcagttgccayatttccttcagggctctgtatttacttatttatcagagtccccaaattgtatgcttggtttaaatagcttcggggcaaaaatacaataaaattgtattagttaaaaatataactggcatcagcaac

SEQ ID NO: 480127 - DNA, 587 bp, Homo sapiens
aagacagttctcttccaggtgaagaattttaaggcaaggacagccagatatctttattgagacctgagatatcttcttccagttgaggatgagtttgatgacctgcagctctcctactaygtcaggtatacttcagatctggttcttggaaagatccaccacatccggtggcctaggctacaaagttgggtgatagcgctcccagttggttcccagagaggctcagggtcttgagggtagagagttgcccaaaggtagatggcagctctctcaggtgactgccatttaggcgtagcatctctagaatttttttaggattgcataatctcattaggcagaccagtttatgttgttcagggggaggttcttcaacagagtgaacttttgtatcagcaaaagtggtaggttgtccatcttgttgttggacaaatcgatggtcctgggattgctcattagtgtctacaattctaaggagaacttggtcagcccacggtccttaaactgggagacaccagtttagtgtgcccattccacttgagtaccgagggcaccatttcctattttagtgcttcagtctacatccctgc

SEQ ID NO: 480128 - DNA, 514 bp, Homo sapiens
tgtgagccaccatgcccggcctccctcccctacttaagcttataagcaacttccctttgcacatatttttacagacctagactaacatataaaacaggaaaactgttcctatttcctgatccagcaggttgaattataggttctaagagaatgctgtacaactaaccattacaaaaataggagtaacttgtcccaacacwgagaacatatatgaagtgagacatacatgtacatgtcatggtggagttctaaatttttagcattgaattatcctaatatttgcttaaagtttggcacattgtgatttcagggtcagttattattttattgaatgtgtctttattgagcacttactatttgccatgactgaatatccaaagacgcagtttctcttcaacctaaatttggtagaaggatttggaggggaatggagaaaagagtaatcagtaatccatataaatgcatcaaacacctatgctttcaagtctattgaaaatttaaagtcagacatatt

SEQ ID NO: 480129 - DNA, 514 bp, Homo sapiens
tgtgagccaccatgcccggcctccctcccctacttaagcttataagcaacttccctttgcacatatttttacagacctagactaacatataaaacaggaaaactgttcctatttcctgatccagcaggttgaattataggttctaagagaatgctgtacaactaaccattacaaaaataggagtaacttgtcccaacactgagaacatatatgaagtgagacatacatgtacatgtcatggtggrgttctaaatttttagcattgaattatcctaatatttgcttaaagtttggcacattgtgatttcagggtcagttattattttattgaatgtgtctttattgagcacttactatttgccatgactgaatatccaaagacgcagtttctcttcaacctaaatttggtagaaggatttggaggggaatggagaaaagagtaatcagtaatccatataaatgcatcaaacacctatgctttcaagtctattgaaaatttaaagtcagacatatt

SEQ ID NO: 480130 - DNA, 627 bp, Homo sapiens
gtttagcaaattttataagcatgattaatatgcttgtgactctagggttgtgctgttcaatacggtagccacttgcctcrtatgccttttaaatgtaaaattagataaaattaaaaatcatttccttagtcacactagccacatttcaagtgctcagtagccactggtggctagtgactgccatattgaacagcacagatatagaatatttccaaaactgtagctagttactggacacctctgctgaaggccttgggtagggcagctcacgcatgtgaatataaatatagtataggtaatgttcaaattcttgaactgttttttaattagtccaatctagagaataaattattaattgtgttagcataatatattaaatttgctcatttgtgcattgctcatttcagtttgtacatgagaaggaaattatggcagaagatgatcaggtgtttcttatgaagctacaggtatgaaattatatcagaagcagacttagtatggttaatgggtaaactgttcttgtgtgtattttctttaaaaatacaccagtatatgctatgaatgtctaaactaggattcttttttttttttttttcagtcccttttagcaaagcaaccaccaactgc

SEQ ID NO: 480131 - DNA, 512 bp, Homo sapiens
catcctctccactttgggctccctccacactccatctctgcagttgtctcccaagtgtggcctttattgtccatgttctccccgacactgagctgccccctagcacctcatgcaacctggcataggataggtgcaaaataaattcttggtgaacaaatctcaggagctgggcccacctcagcctgcactctctcttgaagacatatcctatggattccacggcctcctggctattgcagccccacctgacattcccattccaccctacatactcatcacactctgcattccctttctttttttcctttctttctttctttctttctttctttctttttttttttttttttttgagacagagtttcgctcttgtagcccaggctagagtgcaatggcatgatcttggctcactgcaacctccacctcccgagttcaagygattctcctgcctcagcttcccacgtagctgagattacagggcaagaacctctgtcgccaaagcccagcccagc

SEQ ID NO: 480132 - DNA, 423 bp, Homo sapiens
ttggtaaatgacaaagccaggaatttcggaaccaaggaaccaaactccaagttaagctttattgatcctatgtgggtgctgtaaggatttcctaggataatgytagtgaagtgttcggtacaatttctgttatataataaccatagaaatagtaatagtagtagcagtagtactaatcacagccatagtggtagcaatagtagcaataacagagcagtagtagtagcatcagcatcaatactactagtaataatactagcaacagcaataatagttgcagtagtggtaacaagatagatagtagtagtagaagtagtaatagtcatagaagcagttgtcatagaatcaacagcaacagtagtaataatagtagtaacagaagcaatgccaaaaagtagcagtcatagcaccagcagcatcaat

SEQ ID NO: 480133 - DNA, 531 bp, Homo sapiens
actaactctacaaattattgagtgagacactgaaggaagaaattaattgcagaaagatgactaagtatacctatgatatatttttctttcatttattttaataggtggtggagaaaaatgcagatccagagacaacccttttggcctacctgagaagaaagtgtatcctgactttggagtgggagtgayggagaaggggggcaatggtgactgattctgtaggccttacattgtttcctagtgactggtggggtggccttgaggtgtggaggaaagagcactggattaggacttgggacacttgcattttagttgcacctgtaatctgaaattctcagctactgaatgagaggattgtttgtggtgatcttcgaggtgtctccccgctaagactctagtaatgccaaggtttaatccagggcctgtagaaaggtcctcattagccttggtgagcttcatggtcattcctctgtgggaagaggggggccttccttaggtgacatttgcttaatacataaatggagttcctgg

SEQ ID NO: 480134 - DNA, 627 bp, Homo sapiens
tccatattgtgagttcattcctgtcttacagtttgatatccaaggcccctggttggacagttaggagcacctaagagttcttcaaacttgaaaagactaggcaacttagagatarcttgcttacagaatgacctagagccagcaagagatagagttataaatgctggagccattagggtttcacttcttcccctcctactgttccagtaacctgcaccactccatccccttcctcatcactgtgatggcatcagcatcaagatacccacaggatctttatcttcaaaccctgttatctattggctttttcctctcaaaataaaaatatggttcccattaaagaacaaaaacaatcaaactctttccccggtgccaaatccttgctatttttgtcattactcataaattcctcacagtcaagatttatgaaagaattctacatttccttttccaatttcctcttttctaaatcactatttagcccaatgtgtcctggattccaccccattgctctactgaaatggctgttgctgtattaggtgtctattgctatgtaactaattacctctaatacttagcaatttacaataacaaacattttctggggatcagaaatttgggagagac

SEQ ID NO: 480135 - DNA, 549 bp, Homo sapiens
ctggaaaggtttggataccatgataataaagcacatacaaatggacttaggtgacctctgagtcagatatcaacaagaaaatcccttcattgcttagactttgaggtactcttccttgattttatctctcttcacctttcctcacctgggaggcagaagatagggagtcgcccaaggcaaggggatcaaaaaatctcctctacctgcttttgatgtcagaattagccctgtctgaagctgagcgatcagcccagctcaccaagtatttgagagaaaaactggaatagtacatacaatgtgtttgcctggagtttttctctgcatagttacctgtgatggtcaaagtgactaaccttcagggatcctgggagctggcaaaagatcatcacagtcgaacaaatagctgacctataaattgattctcattccctagtctcgtgttcattattacaatacaaacaccatgaagacaaaaaagccgtgccccaagccccttagagttgtccrgctctcttcccaagcactttttttccttgtctatgccagaag

SEQ ID NO: 480136 - DNA, 480 bp, Homo sapiens
agggctctgtctctggttctccctatagctctgaaaggaaattcccctctcaattctgacttctccctagcatatccatatctcttgttcacctactgtttggctcagccaagctcaggaagggggagggaggcaggaagcctcatctctgcaaccacagaatgaagcctatgagtcgtggagtgcrtttcccagggtgccccacagaccaccttcatcagaagcacctgaagagctgggctacatcccagacccatgtatcagaatctctgagggtggggcccaggaatctgcactttaacaagcactgctcctcccaggcaactctaagcgctaaagtttgaggcccactgcactgacacagtgagagtctggctgccctgctttcagatgaaagctccatcctacgggcctcgcttgcttctgagagcgactcaccgccacagacttgacttgcttcccagcaaaccagcgcagctg

SEQ ID NO: 480137 - DNA, 618 bp, Homo sapiens
agtgtcccccagcatgtcacctccacagtgagggtgttggacctgatgacctcttctagatccatttttaaacatttctccaagtgactttagcactacccagtagaggtttctacaacgataggaatgttcactaaaggctaccctgtacaataatggcagccactggtcacgtgttgcctttgagcacttgaaatgtgaatggtacagkgcagaaagacttatttcatttaattttaattaatttaaatttaaggagccacaaggggctaacggctaccatattagacaacacaggcctaggctactggattctgtatgtttaaaactgtgtgttccatccattctatctagaaattataccacatccacccatgtctcttcatttccacagtatccaccttaagctgagccaccaacatctctttcttaggaaatgacaatatttactccttggtttcctttctctaactttagctccctctgatccgtttgctacagtgaaaagtgatcttaaaacaaaacaaaaacaaaaattgaccaagttactcttctcctcaaaatccttcaacaacttccccactgcagtaaaattgaaaacccctcatgaggcctgca

SEQ ID NO: 480138 - DNA, 549 bp, Homo sapiens
gtgatttaaaattgctggtctttttggtctttaatgataatttatatttgtttcatcactatcaatttgttttctatgggtgatatggttcaccctacagtatgtaggcaagcaggttggcatcagtataaaccatggcctacacattcctaataactagaacttaaggcacgcagcttgctgttcaaatataaataacctcaaagccaaagcagatgtgtgtatacgtaatcccttcaaaatctgcatgagattgatatttcatcatagtaagcgtgttcatttcccacatgaaattgtaaaggcagtggstaggatagtggtgccagcagagacatttaagcagccctgagccaggctctgagcagagctcttgtcatttttccttttttttttttgctttgggaagaaaaagatatcttcccctggcaccctaggcccacctccttcaggcagaattgccagttcctctggcccctgcctcacccccttccagagttctctctacttaactccaccctcaggctccacccttgaagggcacagccc

SEQ ID NO: 480139 - DNA, 540 bp, Homo sapiens
gttagggagagttcaccaaggaggggagaatggagggcaagtttgagtagttgttgagggaagaaaaggatttgcacatatatagaagaggaaccacataaataaaggtgcagaggtgtgggagatggaagaattgagagagatttagctcttgagtgtggctggggtggccctcgtgtgctgcaaaatgccagagagactgtggtccttaacatcaggcatttgctctataggcaataaggagccgtggaaagctctagagtagggtagtgacatgcacagtgtggtatgttaagatggccactctggctgggctggggagacaactcaagggaggaagaccagttaagaggtgactacagtgttccaggcttcagataatgaggacctggtgcaggtggtgccagtgacaaygtgaggtaaggtatggaaatgggagtcactagtaaaatgagttgattggcttccagaggaggtgagctcctgaaagcttagtggcaggtcagggttcctgaaaacctcacttcccctgcctgatgg

SEQ ID NO: 480140 - DNA, 527 bp, Homo sapiens
aaaaacttgtggggtttaaagatgttgtgggtcaagctgtacgtgcatagggaagggggtgtgttcatgttaatacatgtgcagtaccttctctttcctctcccagaacacccaatctgggctacagctttgagactaactcagggaaccccttccactacttcagctatggggtggcttgctctgaagtagaaatcgactgcctaacaggagatcataaggtaagaagtttgcaaaactttagkacttagtgggaaagagaagagaaacaactgagttgtaatacctagagctgatagagacaagatttctggttggaaaaataatgccttccattaaggataggcaaacatcctataaagggccacagagtaagtgttttagacttcgtgggccatacagtctctgcctcagctactgaactctaccattgaagtgtgacagcagtcatagacagcttgtaaacagataagtgtgactctgttccaataaaatatgatttatagacactgaaatttgaatttgaa

SEQ ID NO: 480141 - DNA, 591 bp, Homo sapiens
attacaatcatacccactttacaaacaaagaaactgaggctcggggagaagatgatggtgcagacaagagcactacctgtgaaatcaactgatgtgtttcagtctttgtctcccacttagctgctgtgtgatctcgggcaaattgctgaaatctttacatttctacttccttgtctgtgaatgagatcatggtggtactttcatggggttgtggagaggatggcatccaaaaatgcagggaaagcacaaaacctagtgcctggcaaggaagcttctactcttatacagcgagagtacacctgaggagtgttaactaataagaaaaccaamactgcacagccgcaaacaaaagagaagatgttttaactggggtcttgggaattgtaatgagcaagcagctaaattgtgtcccatccaggtgaggttgggtaggggcttataaaggtttactgtaagtttacctatctggaaggttctagcagagtctttaattgatgatggctggtcacagcttaggatgtgtctgatgatcaatccagtttggcatagctgtttctccaggaggttaatgatcaggtccaatagaaacag

SEQ ID NO: 480142 - DNA, 625 bp, Homo sapiens
atctctaagaatacaacagcaaaaagtagctcctgtataaagatttttaagttattaaatgggggagggtcactaaaggaaaattcraagacctttgttaaacatgaaccatttaagttataatgccaggttaatcaactcaactaggctattattttgtcgtagatttatgaattatctgtgcttttaagaaatctgtattatctgcattttttatttttaaaaaatctaaacatttgtttgacagataattgttttatgtatttaaagtgtacaacatgatgatttgatgtacatatacatcgtgtactgcttaccacaatctatttacatctgcatcaccacaactaattactatttttgtgtggggtggggtggtaaggaccattaaaatctgctcccctcaaatttcaggtaaaacagtattatcaacattagatatcatgccatacattaaatccccagaacttattcatcttactactgaaagttggtgacttttgatcaaactccctcatttcttctatccccaagtccttgccaaccactgttctactttctgcttttatgaatttgatctttttggatggtacatgtaagtaggattacacagtatttatgtttc

SEQ ID NO: 480143 - DNA, 631 bp, Homo sapiens
ctgcgctcctgcctcgggacccttgctgttcctgctccctgtgcagctcctccctagatatctgcatggctcacctttacctctttcgggtctttcctcagatgttaccttctcagtgagtccctttctgaccacactatttaaaatgcccactccacatttcctgtctgcctttctttattttcctccacagtgtaaatccctcataccatatatttgactccccccattttaaaaaccaaaacttacatgtggytaagatatagataacaggacaaagattattttgttagtttggttcattcactgctgtgtctttagcacttaaaacagggtaaggtgcatagtaaatgctcaataaatatttgttaagtgattgaatataaatatgtatatgtatctgtatatgtacatgttcaaatgttttttactcatgaagtactcaaacaaagaaaagagaaacacttctataaacagctttcattttacactgggatgtcaaatttccattcaaacaaaattaagagaaagttttctgccctatgaaaagataaaagatcacatattgtcctattttctggttatattttccctctttttaaactgtgcttttggttgtgaggatggttag

SEQ ID NO: 480144 - DNA, 631 bp, Homo sapiens
ctgcgctcctgcctcgggacccttgctgttcctgctccctgtgcagctcctccctagatatctgcatggctcacctttacctctttcgggtctttcctcagatgttaccttctcagtgagtccctttctgaccacactatttaaaatgcccactccacatttcctgtctgcctttctttattttcctccacagtgtaaatccctcataccatatatttgactccccccattttaaaaaccaaaacttacatgtggctaagatatagataacaggacaaagattattttgttagtttggttcattcactgctgtgtctttagcacttaaaacagggtaaggtgcatagtaaatgctcaawaaatatttgttaagtgattgaatataaatatgtatatgtatctgtatatgtacatgttcaaatgttttttactcatgaagtactcaaacaaagaaaagagaaacacttctataaacagctttcattttacactgggatgtcaaatttccattcaaacaaaattaagagaaagttttctgccctatgaaaagataaaagatcacatattgtcctattttctggttatattttccctctttttaaactgtgcttttggttgtgaggatggttag

SEQ ID NO: 480145 - DNA, 551 bp, Homo sapiens
tctgatcagctgtttgatcccaacgccgttttcgttttgatggaggctgggacgctgctgctccattgacgacttttagttctccagctttagctttttctgctagctgttgcctaatttctcgctgaaaaaaacagtgagtatttacctttaaaatgctttcaatgtatttttctaccattagcgcaatcacttccacttaacatcctattttatactttgctcattctcytttctatgtactggtgatctcctttctacgctcgctggttccatagtctgtgcgtctttatttcgttttacataatgcctttctaaacaaaagataagcaagttcagaattcgtaacatagcacactgtagtttatatactggaggtgaagtaaaatcttcagtcaacaatggagaaccataatgcttccactgaaaaatagggttttcttcaaaactcatataaatagcaattaagactatggaacaagatagaaaaatggtaaaagataaaaataataaaattgttttatttatactgacaaattatgtaaatatgc

SEQ ID NO: 480146 - DNA, 551 bp, Homo sapiens
tctgatcagctgtttgatcccaacgccgttttcgttttgatggaggctgggacgctgctgctccattgacgacttttagttctccagctttagctttttctgctagctgttgcctaatttctcgctgaaaaaaacagtgagtatttacctttaaaatgctttcaatgtatttttctaccattagcgcaatcacttccacttaacatcctattttatactttgctcattctcttttctatgtactggtgatctcctttctacgctmgctggttccatagtctgtgcgtctttatttcgttttacataatgcctttctaaacaaaagataagcaagttcagaattcgtaacatagcacactgtagtttatatactggaggtgaagtaaaatcttcagtcaacaatggagaaccataatgcttccactgaaaaatagggttttcttcaaaactcatataaatagcaattaagactatggaacaagatagaaaaatggtaaaagataaaaataataaaattgttttatttatactgacaaattatgtaaatatgc

SEQ ID NO: 480147 - DNA, 647 bp, Homo sapiens
gaacccaagaagttgaggctagagagagctgtgattaagccactacacttcagcctgggcaacagagtgagacagtgtctcaaaaaaaattaaataaaaatgaaaagaaaaaatataaaaatattggggggcaaagtggctcacgcctgtaatcccagcactttgggagactaaggtgggtgggtcacccgaggtcaggagcttgagattagcctggccaacatggtgaaacmccgtctctactaaaaatacgaaaaaattagccaatatggtggcaagtacctgtaatttcagctactcaagaggctgaggcaggagactcacttgaacccaggaggcagaggttgcagtgagctgagatcgcgccagtgcactccagcctgggcaacaagaatgaaactctgtctcaaaaaaaaaaaaaaaaaaaaaaaaaaaaaaatatatatatatatatatatatatatatatatacacacacacacacacacacacacacacacatacatacacacacatatatatatacgtatatatatatatacacacacacacacatatatatatatacatatatatgtataaacattgttgagattatcctgccaagtaccaggtactgaaatgccaactgctcttacattatatta

SEQ ID NO: 480148 - DNA, 647 bp, Homo sapiens
gaacccaagaagttgaggctagagagagctgtgattaagccactacacttcagcctgggcaacagagtgagacagtgtctcaaaaaaaattaaataaaaatgaaaagaaaaaatataaaaatattggggggcaaagtggctcacgcctgtaatcccagcactttgggagactaaggtgggtgggtcacccgaggtcaggagcttgagattagcctggccaacatggtgaaacaccgtctctactaaaaatacgaaaaaattagccaatatggtggcaagtacctgtaatttcagctactcaagaggctgaggcaggagactcacttgaacccaggaggcagaggttgcagtgagctgagatcgcgccagtgcactccagcctgggcaacaagaatgaaactctgtctcaaaaaaaaaaaaaaaaaaaaaaaaaaaaawatatatatatatatatatatatatatatatatacacacacacacacacacacacacacacacatacatacacacacatatatatatacgtatatatatatatacacacacacacacatatatatatatacatatatatgtataaacattgttgagattatcctgccaagtaccaggtactgaaatgccaactgctcttacattatatta

SEQ ID NO: 480149 - DNA, 533 bp, Homo sapiens
aaataattaaagaggcttttttgtttctcctcttaaatgcattcaattcatttagmttctcatttatatcatcactgacaaagaataaatgctagttgttgaggttaaaaaaatttttgttgttgatagctctagcaatttggttagaaaaattagggaaaattcaggactaagaaaatttagagactgtgattttcatttatccactccttcacttcattaattatgacaaaccataaaaatggattaatggataaaaggatgatcactttgtatcatcagaagaaaataattgctaaaaaattagagatttaaaaacaaagaggatgatagtgagctctgttatttaaaccaaagaatatcattgaaatcctaaataaacaagccatccaagagaggaatatatctatatttggtaagtgcatcctgctatgtataagttcaaaaaggaagaaggttagacagtgctgggagaggagccttgtatacctggatgtgctctattaaaagaggcgcttgattgctcagtaatt

SEQ ID NO: 480150 - DNA, 534 bp, Homo sapiens
acacctgtgacctctttggaagcaggagactgagtgtcattagggcccagctttccttgtgatggcactgttgagacctgcatgtggctcagcagcggctttgcttcccatcgcccttactcagcacagggcagcctggacgttccaaggcaaaggcagcgacggggccaggcaggagctctggcaacygcttatgagaagcagaacatcaatattagggcctgtctggagcacctcaaattgggtcaagagacacacccatgccatcagaatgggagggagtgatgaggaacaaggctttcagagctcctacagggcagccgcctcctgggctgcacttgctgactgcaaataaaggggagctgctatgcctttaacaacttggaccccacataactccagcaacctcaggaaggccaggaacacctggagaggatgtccaggtattacccaactctagcatctcagccctctcatgcagacaggcagatgtgtaaacaattttgatgcaacacaagtgccggataaaggtaa

SEQ ID NO: 480151 - DNA, 615 bp, Homo sapiens
cctgtgacctctttggaagcaggagactgagtgtcattagggcccagctttccttgtgatggcactgttgagacctgcatgtggctcagcagcggctttgcttcccatcgcccttactcagcacagggcagcctggacgttccaaggcaaaggcagcgacggggccaggcaggagctctggcaactgcttatgagaagcagaacatcaatattagggcctgtctggagcacctcaaattgggtcaagagacacacccatgccatcagaatgggagggagtgatgaggaacaaggytttcagagctcctacagggcagccgcctcctgggctgcacttgctgactgcaaataaaggggagctgctatgcctttaacaacttggaccccacataactccagcaacctcaggaaggccaggaacacctggagaggatgtccaggtattacccaactctagcatctcagccctctcatgcagacaggcagatgtgtaaacaattttgatgcaacacaagtgccggataaaggtaaggatgggatgccgcaggagtgcagaggagtcatacaaccttttgctaaaaatctgagccgtgtctggaagagcaagatatacct

SEQ ID NO: 480152 - DNA, 490 bp, Homo sapiens
  misc_feature (1)...(490): n = A,T,C or G
agaccccagtgtgtgatgttcccctccttgtgtccatgtgttctcattgttcaactcccacttatgaatgagaacatgcagtatttggctttctgttcctgtgttagtttgctgaggacacatgcacacgtatgtttattgcagcactatttacagttgcaaagacttggaaccaacccaaatgcccatcaatgatagactggataaagaaaatgtggcncatatacaccatggaatactatgcagccataaaagagaatgagttcatgtcctttgcagtgacatggatgaagctgggagctgtcttaagttgaggtccctgaaaggaaaatttgaggtagagattctggtgtaggtgattgattgagagatttcccaggagacacctggaagggagaggggagaggatggaaaaagggaaacagagcaaaggtgtggcttctggtgaaatgggactgaatcaaatyccaaggggagctgttctggagca

SEQ ID NO: 480153 - DNA, 655 bp, Homo sapiens
ggctgcgctatgcactgttcacgtttagagtccaggctcttgttaraaagttcatggagcaggtatttggagatttgattcccatccacaggcactaattcactcatttttctttatatttcctcatgcctccttttaaaatatttattttattatcttcccctcccatctcgctaaatatttctacacttcattttttaagttatacttttacttaagttggtttctctttctctattttatcttctctttctctctcgtatttgttctctaatgattccccttgcttttctcttatctcttctattttttctcctttgttgtttttacttctcaatgttcttgcagtttccaatatttttccactctctcttcttctctattcatttctcctttattagatctcatgtttgccttcccattaattctgagaagcatcactattgttttcttttgaaacagtagtaaggacagcacatgaagtttcttcactccaatttttgtaagggttaaaaatacctaacccatctttcagtactaaattactttccttgaatagtatcctacttaaaatatactgtgtaaatacttttaaattatttcccattacctcaaatattttgtctgtttataactgatcttaataaaagtggca

SEQ ID NO: 480154 - DNA, 662 bp, Homo sapiens
cttacccaatcacttgtgcagcatttctctcagggttttgatgatgcataaagattgcggagagtttcttccctttggcatccaggaatgtagaagtcttttgcataccaaggttagaagctatggcatggttgtaaactcataaaatactatctttgtgagggagagagagagaggagagagagaaagagaaaacaaactcaagaccactttttagactgtacaagaggaaatgtggcatgtatataagagaagcatcattatataaatctgtcttttagtgtgcgtatcttggtatcaatcacatttttatttcaaaggcttttctgatccaagatctcggattgttcaaatccatgaggtgggaccacactcaagaaaaagtccagggtaagctttccatctagaatgataccttaaccaccagtgaaagaagcaaggtcaattttcattgattcaaattatattcaaaggtaaattctttacttctgtaaattattcacctgctttacaacrtctgttctagtaattaatttaagaattagtatattacaatttaaagtgtgtatcaatataatttcagttggaatttagtcctaggtttactaggtttaccaccatcagtaaacttagataatttaattccctctcttgaccttatt

SEQ ID NO: 480155 - DNA, 570 bp, Homo sapiens
cctttctgtggccccaatgaactggacaacttctactgtgatgtcccacaggtcatcaagctggcctgcatggacacctatgtggtagaggtgctgatgatagccaacagtggtctgctctctcttgtctgcttcttggtcttactattctcttatgctgtcatcctgatcaccctgagaacacacttcggccagggccagaacaagttcctctctacctgtgcttctcacctgacagtggtcagcctgatcttcatgccatgtatattcatctatytgaggcctttctgcagcttctctgtggataagatattctccatgttttacacagtgatgacacctatgttgagccccctcatctacacactcagaaatgctgatatgaagacagctatgaagaagctgaggataaaaccatgtgacattccatttccttgttaaagaatgagcagaaaaggtgatttgaaaaacatactctttcttggaagactcttaactcatcttgtacatgtctaaaaaccattttgatgactttggtataaaaaagaagatagcctaaagattataata

SEQ ID NO: 480156 - DNA, 387 bp, Homo sapiens
ttttaccctcaataggttctccagcccttatgagataagagcaacatcaaacatttgtaaagatatggaaataatattttaaatagcctcaataatgcaatgaatataagcctataartatctcaaagggtgatggagaagtcctgaaagctgggatgagggcgactcagctaagagccttgaatttagggagagttagttctacagaagttggagatccattgggtgtccatttactggagtggaatttgaaggaattgtttgaggagatcagtatgtctctgagttaaaccagcccataattaagttctattgaatggggcctaagaggcatgaagttctatcaagtggctttttctgtatccagcattgtgtgttttgaaaagt

SEQ ID NO: 480157 - DNA, 634 bp, Homo sapiens
ttgtcattagtaatttaattttttatagactgtcagtctaatttttaaatatcataaaacataattctcaaacaaatacataatgaacacatcaaaaactgtatttaattaacgagggatagcaggataacaaagtcygttccaaaaagaatatgaaaagtgtgattttacataatcacagcaaaaaaatgaacactaaaataaaattgttaaatttgatgtaatccagttaatgtctcatgacacagatttacctatataacaaacctgcacgtgtacctctgaacttaaaagttaaaaatatcaacataacaaaaatattcatattttttcatacagctctaaaaaggggcaatacgaccttaatctttgggattatcttttctaccacactaaaaagatacaatgcagcagttttctataacatctagctatatgtaattatacaatgtctgagattccataattcatatatagtaagttaaacaaaatcacatttgctagagagtcagatgacccttagctgggcttgctaaacaatgttttttgttttgttattttttatttctgtgggtacagagtaggtgtatacatttatagagtatgagatatttgggtacaggcatacaataca

SEQ ID NO: 480158 - DNA, 651 bp, Homo sapiens
aaaaggaaatgtggaggcgtgggcgctcccggcctgcatcctgcacctcttacactttggttttcccacagactcctgaagaataggtcagaagaaagggttaaagccttaaaaggggaacaaccattgcggggctcagggaggaggataatgttctttrggctgccgcaccctgatccccggggtcccgaaccctcccgtccctggccaggcctgccagccacagggtgagggcccccttccgccgcaacctgccactctcacaccaatgcgggaccgccttctcttccttccccaccccccaccccaccctgccgtcctttctcccccaatctccgcctctgattggctgagcccccggctccccgctccccctctcctccatccccggtgaaaactgcgggctccgagctgggtgcagcaaccggaggcggcggcgcgtctggaggaggctgcagcagcggaagaccccagtccaggtgggaactggagccggtgggacctggggctcggggaccgccgtcaggcgcccatgcaagacttcccaacactaggcttcgggccacggtccgagggcgcccagggaagaagggcgcagagcttagggaggggcctgctttccaggcaggggcgggagggggatgcttctgc

SEQ ID NO: 480159 - DNA, 522 bp, Homo sapiens
cgtgggcgctcccggcctgcatcctgcacctcttacactttggttttcccacagactcctgaagaataggtcagaagaaagggttaaagccttaaaaggggaacaaccattgcggggctcagggaggaggataatgttctttgrgctgccgcaccctgatccccggggtcccgaaccctcccgtccctggccaggcctgccagccacagggtgagggcccccttccgccgcaacctgccactctcacaccaatgcgggaccgccttctcttccttccccaccccccaccccaccctgccgtcctttctcccccaatctccgcctctgattggctgagcccccggctccccgctccccctctcctccatccccggtgaaaactgcgggctccgagctgggtgcagcaaccggaggcggcggcgcgtctggaggaggctgcagcagcggaagaccccagtccaggtgggaactggagccggtgggacctggggctcggggaccgccgtcaggcgcccatgcaag

SEQ ID NO: 480160 - DNA, 651 bp, Homo sapiens
aaaaggaaatgtggaggcgtgggcgctcccggcctgcatcctgcacctcttacactttggttttcccacagactcctgaagaataggtcagaagaaagggttaaagccttaaaaggggaacaaccattgcggggctcagggaggaggataatgttctttgggctgccgcaccctgatccccggggtcccgaaccctcccgtcyctggccaggcctgccagccacagggtgagggcccccttccgccgcaacctgccactctcacaccaatgcgggaccgccttctcttccttccccaccccccaccccaccctgccgtcctttctcccccaatctccgcctctgattggctgagcccccggctccccgctccccctctcctccatccccggtgaaaactgcgggctccgagctgggtgcagcaaccggaggcggcggcgcgtctggaggaggctgcagcagcggaagaccccagtccaggtgggaactggagccggtgggacctggggctcggggaccgccgtcaggcgcccatgcaagacttcccaacactaggcttcgggccacggtccgagggcgcccagggaagaagggcgcagagcttagggaggggcctgctttccaggcaggggcgggagggggatgcttctgc

SEQ ID NO: 480161 - DNA, 446 bp, Homo sapiens
acaaaattagtcagtggaaaaactgggctttctaatccaaacacagtgctctttccccacaccaggcaaacatgcttaaaatattattgccagcaagaattgctagacaacaggataacagagtataaccaaacacttaaattgcaaacccagtgtattacaaaaattttagctgagaagagatgaagacctgtaggggagcaggtttccatccaatgcttgctraataaatgctgagaatagcctacacaagtgttttactcagagagcaggcttattgtgaatgtttattcatcactggagagatataactctatattctaatgagacagaacatgtcctatagatcacacacacttgtcaaataaaccagtttggatctctcctgcattaaaaacctgacatgcatcagtggacagtaatcgctacacatttttaagcatccg

SEQ ID NO: 480162 - DNA, 446 bp, Homo sapiens
acaaaattagtcagtggaaaaactgggctttctaatccaaacacagtgctctttccccacaccaggcaaacatgcttaaaatattattgccagcaagaattgctagacaacaggataacagagtataaccaaacacttaaattgcaaacccagtgtattacaaaaattttagctgagaagagatgaagacctgtaggggagcaggtttccatccaatgcttgctaaataaatgctgagaatagcctacacaagtgttttactcagagagcaggcttattgtgaatgtttattcatcactggagagatataactctatattctaatgagacagaacatgtcctatagatcacacacacttgtcaaataaaccagtttggatctctcctgcattaaaaacctgacatgcatcagtgsacagtaatcgctacacatttttaagcatccg

SEQ ID NO: 480163 - DNA, 466 bp, Homo sapiens
taactgctgtttttaactttaattgctttgctaatctattgtaaaagtactattttttcttttgtaattaaaaactgactcatggggagatactttgaggctatctaaataatcttaatttaattcttactcttttttgtgctgttttaaagaattaatctaactatactttatccctttcattttattcaatctctcagatacgttttcycagaattacttttgaaacattagatgaacttaggaaattttattatggtcagtcagaaatcattaaaaatgtatatatatattggcagttatgcttcattttaaccagattgatttgggtcaattaaaggcttaagttcttttaaacctaaaactttcaaattggtaaatttggatttttgaccccgtttactataacacattggactttttgaagtggaaatttagttgtatttatagccatctaccatcccta

SEQ ID NO: 480164 - DNA, 466 bp, Homo sapiens
taactgctgtttttaactttaattgctttgctaatctattgtaaaagtactattttttcttttgtaattaaaaactgactcatggggagatactttgaggctatctaaataatcttaatttaattcttactcttttttgtgctgttttaaagaattaatctaactatactttatccctttcattttattcaatctctcagatacgttttcccagaattacttttgaaacattagatgaacttaggaaattktattatggtcagtcagaaatcattaaaaatgtatatatatattggcagttatgcttcattttaaccagattgatttgggtcaattaaaggcttaagttcttttaaacctaaaactttcaaattggtaaatttggatttttgaccccgtttactataacacattggactttttgaagtggaaatttagttgtatttatagccatctaccatcccta

SEQ ID NO: 480165 - DNA, 412 bp, Homo sapiens
tgttcacatttactgagattactgatatatctacactttttctactatatgttttttgtgtttattatgccttttcttagcttatttttctttttcctgctccttattagagcaatctagtgttcttccttttttaaaaacttttattttaggttcaggggcacatgtgcaggtttgttatataggcccactcctgtcaccagggtttgttgtacagattatttcatcatcctggtactaagcctagtacccaacagttattttttctggtcctctccctccccactccctgcccycgacaggcctcagtgtgttgctcctgctaatgtgtccatgtgttctcatcattcagctccacttataagtgagaacatgcagtgtttggttttctgtttctgtgttagtttgctat

SEQ ID NO: 480166 - DNA, 517 bp, Homo sapiens
tatagattaggtttggacaaaccgacatcttacacatattgaatcttctaatccatgaacattgaatatttatttaggttattttaaatttgttcatcagtatttcgtaggtttttgcataccaaggctgtacatattttgttggtttcacacctattttggagtggtactgcaaatttttagggtcgtttttaaaaaatagactttatattctagtacggttttagattcacagcaaaattgattcccaaatatgatcacacatacatagcttcccccattattaacatctccaccagggtgatataggtgttaccattgatgaacctacattgatatatctttgttaatagagtccatagtgtacataggtttcactcttagtgttgtagattatatgggtttggacaagtttgcaatgagatgcatccaccattataataccataaagtttagttttactaccctatctgtgctgtgtattatcattctccyaatttttttttaaaaaaatcaa

SEQ ID NO: 480167 - DNA, 497 bp, Homo sapiens
tttgtgcttaaaatccagggccctggtggcataggcactggaggaattctcctggcctgccagttgtgaagaacatgggaaaagtgtgttatctgagccagagtgcaccgttcctcctggtacagtctctcatggcttcccttggctaggagagggaaatctctcaaccccttgcacttcccaggtgaggtggtgccccaccctgcttcagcttgccctttgtgggctccacccactgtccaaccattcccagtgagatgaaccacgtacctcagttggaaatgcagaaatcacccaccttctgcgttgatctcactgggagctgcagaccggagctgttcctatttggccatcttgccagcctcycctacattagaaagaagtatgtttttatagattgatgtaatatttaaataatatttaaagcagtaagaaaactttaatgatattttgttagtggcaaggtcagcagtagaagagaaaaaaagcattcagaa

SEQ ID NO: 480168 - DNA, 514 bp, Homo sapiens
actcttgaagcaaggcatgccaagtrtgagaagggactgctaatcactatcctcggtactttctaatcaacagcatgttcttgaccttgcccttcttagagtgaaaaaaaaatctgtaaagtaattcagaaccatgtcacttcagtcttgtcatagaactcattttgattctgggatcagaatccttaagtgctcgacaccattggcattaaaatcttcaagacttgaaactctggaatcctcttgtcctttccagttgtggacctgcacttcctctaatcactcagctggctaatgatccctttccggcaggtgtaaatgagttttcacactccaacctggcttttgtcaagcctttattgtaagtagctaatgagtgctattgctctgagttttctcctgcgaaagaagggtatgtctaactagtgatataatgacaaatgcacgctaatgttattctgttcggtggtgctgaagagcactgagaatttaagaaagatgaatctctcaaaca

SEQ ID NO: 480169 - DNA, 536 bp, Homo sapiens
taaatgagttttcacactccaacctggcttttgtcaagcctttattgtaagtagctaatgagtgctattgctctgagttttctcctgcgaaagaagggtatgtctaactagtgatataatgacaaatgcacgctaatgttattctgttcggtggtgctgaagagcactgagaatttaagaaagatgaatctctcaaacaaaggcagactaaaaacatattaagcagagctgtgctgacagcctaattccattacttctacatgatcttgaatccactcaagcatagcgaagatacttcggaggtaagaggcaaggaggcaatatcytcattaaaaatgtgagcagagcctgaaggcaggcccagcatggtaaattagcccagctggtgaggagaatccaagaagacaaaattgatcagaccaaacattgttacttcagcatttcagggcacggacaagtgcatagatttgacattctgccaaataggactgcagatgaataatcttctgcaggactcttgatgttctttctattca

SEQ ID NO: 480170 - DNA, 553 bp, Homo sapiens
gaaaaaatatttacccaaaatttacttttagtgtgttcaagtagctgtaacaaaatactttatactgggcaatttattaacagtagaaatttatttctcatggttctggagtgtgggaagtccaagactgaggtaccagcagattggcatctggtgagggcccactctttgcttccaagatggcaccttctagctacatcctcacatgactgaaagggctaacaagctccttgggcctcttttaaaagggtgctgctcccatgcacagaggtgaaaccttcatgaccaaattatctcccaaaagccctatctcttaataccattgcaytggggagtaggtttcaacatatgaatttcaggggacacaaacattcagaccatagcactgactcatgaacagaaagcctgctctaatgatttcacacaaaaatggaggctagaccatttgggctgtgggtggatactgcaagaagacacgtgactctaagttgtatctcagtagttcttccgggaggtctgcatccaatgttcacggtgtagtgtgtaaccacca

SEQ ID NO: 480171 - DNA, 553 bp, Homo sapiens
gaaaaaatatttacccaaaatttacttttagtgtgttcaagtagctgtaacaaaatactttatactgggcaatttattaacagtagaaatttatttctcatggttctggagtgtgggaagtccaagactgaggtaccagcagattggcatctggtgagggcccactctttgcttccaagatggcaccttctagctacatcctcacatgactgaaagggctaacaagctccttgggcctcttttaaaagggtgctgctcccatgcacagaggtgaaaccttcatgaccaaattatctcccaaaagccctatctcttaataccattgcattggggagtaggtttcaacatatgaatttcaggrgacacaaacattcagaccatagcactgactcatgaacagaaagcctgctctaatgatttcacacaaaaatggaggctagaccatttgggctgtgggtggatactgcaagaagacacgtgactctaagttgtatctcagtagttcttccgggaggtctgcatccaatgttcacggtgtagtgtgtaaccacca

SEQ ID NO: 480172 - DNA, 555 bp, Homo sapiens
gtacttactagacaaaagaatttatgatgaaataatcttggggatcagtgacttaaacaaatccaaggagatgttctctgctacagggcttctcagagcatttatatgctaaggatccttatttatctccaagaaggggctggagtgagcaaagtttcccaaacacatctgagcatggaatctttcagtgaagtgcagctcaaagaaccaatggtctgtgaaacacccttccctagcagagtggtttttaaacttttaaaaagccatagaactcrttcttcagattattttctgcaagaaatctcaatttatgtgaagcggacacaaaacagggatgaaacagaccaaagcacggatgggacaacacagataatgacagtgataattctctggccttcccagtgtgccccctaagaaggtatctcagaactcctaggggcctatgtggcaccatttgaagaacacagtttcctctgccttatcttttttcccccctgcaagaacaggatgcagatgagtcccaggcactcccaggattccctggagcctcacagc

SEQ ID NO: 480173 - DNA, 576 bp, Homo sapiens
gattctcagtctcacctcacatgccccaaccccgacttggcccagaagagagaatgcattgttgggacatcttggtggaggaatggaaggtccaggctggaaggggcagtaggtggcaagcaggccagcaagaggccagrgcacagggcagggaggacagtctgccagacagcactgagatctcagtggatccctgtgctggccccaccctggagagcctgtccccatggcgggtgcgtgccccatcacagggcagtgagtattgagtgagcacctactctgcgtcaagccaggcagaccattacggggctaggggtatgtggaaaccagagacaaaagacccatcccagcccttgacaccagacatagtgacacagcggggtcagggaaccctgggcccagtacagactggctccctcaactgcatgcctctcctgcattgcagtgcttcatcctggagggtcctgtcagtctgattaaatgtcacctttccctcaagggcagggacaaagctcatttcttccattcatttagcaaaattcccccagggcctctctgtaccccaccacagggagg

SEQ ID NO: 480174 - DNA, 618 bp, Homo sapiens
cctcacatgccccaaccccgacttggcccagaagagagaatgcattgttgggacatcttggtggaggaatggaaggtccaggctggaaggggcagtaggtggcaagcaggccagcaagaggccagggcacagggcagggaggacagtctgccagacagcactgagatctcagtggatccctgtgctggccccaccctggagagcctgtccccatggcgggtgcgtgccccatcacagggcagtgagtattgagtgagcacctactctgcgtcaagccaggcagaccattacggggctaggggtatrtggaaaccagagacaaaagacccatcccagcccttgacaccagacatagtgacacagcggggtcagggaaccctgggcccagtacagactggctccctcaactgcatgcctctcctgcattgcagtgcttcatcctggagggtcctgtcagtctgattaaatgtcacctttccctcaagggcagggacaaagctcatttcttccattcatttagcaaaattcccccagggcctctctgtaccccaccacagggaggggtgccctggccttgcctctcctgcttctcttgagtgcaaatcctggctctgccac

SEQ ID NO: 480175 - DNA, 605 bp, Homo sapiens
ctggattctcagtctcacctcacatgccccaaccccgacttggcccagaagagagaatgcattgttgggacatcttggtggaggaatggaaggtccaggctggaaggggcagtaggtggcaagcaggccagcaagaggccagggcacagggcagggaggacagtctgccagacagcactgagatctcagtggatccctgtgctggccccaccctggagagcctgtccccatggcgggtgcgtgccccatcacagggcagtgagtattgagtgagcacctactctgcgtcaagccaggcagaccattacggggctaggggtatgtggaaaccagagacaaaagacccatcccagcccttgacaccagacatagygacacagcggggtcagggaaccctgggcccagtacagactggctccctcaactgcatgcctctcctgcattgcagtgcttcatcctggagggtcctgtcagtctgattaaatgtcacctttccctcaagggcagggacaaagctcatttcttccattcatttagcaaaattcccccagggcctctctgtaccccaccacagggaggggtgccctggccttgcctctcctgct

SEQ ID NO: 480176 - DNA, 289 bp, Homo sapiens
cttggatgtaaccacccttctatttctccatggagctgaggaggccccactccctcgatgccagaagcaggcaaaagacctgggctgccactcagtgccatccacatcacaggcacggcgagtggttcagagatgggcttgagacccatgctcacatacccggccctctttccatcartgtggtaggatgaggacctgggctaccctcaggctccactggggacagcctgcccgagaagggagccaacagaggagggtagggctgaagggtgaatagggacagcagcag

SEQ ID NO: 480177 - DNA, 373 bp, Homo sapiens
acttctacccacttgtattagttcacatcctcctcctctcycagctacccaagtcccagctaggaccacaggaacaaatcaaatccctctctcgaaggacacatgtcatccagatacttgagactagactacatctccagggtaacttttcgggctcctgtgcccgccccttggggtgctgtgcagacctcttgccatgctctttaaggtgtgaaatagccccttataataaggtataaatgcatgaattggacccacatcttcctgtcctctccaggtttcccacatgagatgttggcaaatgctttgctagaatacagatacaccagctcagaggctgcatcccagtaccctgataggaaatgagggcgct

SEQ ID NO: 480178 - DNA, 609 bp, Homo sapiens
tgtaggccagggcgggtgtcatgggaactggctctctgcttttgaggagagaagggagatctgacctcagaggccttgcctggtgccagtgttctttgctaacagactttggaccatttccccagagccctctctggctttatctatcatcttcccaagagaagcagaacctcaggtcagagctgactgtgcagtgaatatgggggaggaaatgagctgtggattctagagaagtgctaaagacgagttatgccactttggtttcatccgtattggagctcagtccagctrcagcccttgtcaccccagcttggatcaacctatgagaacctttcaggaagttcaccaacagaaacaactgtgagcttcattccttgctttgttcttccaactgaacaattaggaagtggctgtggaaggctgttgtgctgttgtgtgctaaaaatgtgcatatggtgtgcgagggcagcttttctaacactggaaaatattccatgtggactttatctcaggcaggcttcagagaaatgtctggggcagtgtgtcttcctctgtcccatcaccctgctttatcttcttcattgactcatcactatccaaaattatttc

SEQ ID NO: 480179 - DNA, 316 bp, Homo sapiens
tatgatttattcacaaaaagaacttcaatatgatcccaagttcatataatacatttttgttcaaatatgtgtggtatgttttttatagcttcattgtatgaatgggttttttcttgagcataaaaaaatatgggctcactgtagatttggaaaataggggawagtaaaaagataataaaggtctgtaatctaatctatataattgtatttcgtaacgggtacgttacatgtagttgcctgtattttggcctgatagagtagagttgtaggggagcagctctgccattcagtctctgcaatgctttagggcagcagc

SEQ ID NO: 480180 - DNA, 316 bp, Homo sapiens
tatgatttattcacaaaaagaacttcaatatgatcccaagttcatataatacatttttgttcaaatatgtgtggtatgttttttatagcttcattgtatgaatgggttttttcttgagcataaaaaaatatgggctcactgtagatttggaaaataggggaaagtaaaaagataataaaggtctgtaatctaatctatataattgtatttcgtaacgggtacgttacatgtagttgcctrtattttggcctgatagagtagagttgtaggggagcagctctgccattcagtctctgcaatgctttagggcagcagc

SEQ ID NO: 480181 - DNA, 637 bp, Homo sapiens
cttgggaaccaagtgtgatatgaatcactaatttattataacataaaaaattttcatgtttttggatatactaaatttggtgcagagttagtgaaacctaacgatgctagcgatctacataagtatacacttcatagttaacaaagtatatgtataaacacttggactgtataatctctctgtgaagttatttataattatgtatattatgttaacattacttggagaagcaattctaatttagagcattgwgaaggtccttaatctttcagtttgccaatttgaaccatgaatttcacacagagaggtgggaggatggatctgtaagtaggtatgtagagagatataactcatttgagatttaatatatatacaaaccaatgactgggcctgcagatgatcagattgaaaggacttggaagtatgcatataaagatctgaaacagtcagagaagcatgatcagaaaatacacacaataagacattaagaatatactcatgaggccgggcatggtggctcacgcctgtaatcctaccactttgggaagccaaggtaggaggatcttttgaggtcaggagttcgagaccagcctgaccaacatggtcaaacccagtctctactaaaaatagtaaaaat

SEQ ID NO: 480182 - DNA, 521 bp, Homo sapiens
gtatctgtataacagagacctgatgagttgccagcacataacaagccagaaccctggatccagagagcatttgtgacattcagccaacacagaactgctttcccacccaaagggtggtctccaaatctgttgtagcttttggcaagatttttatatcacaattgaaaacagatgccctttctgccctttcccttgytgtctgagttactaccgttcaagagattgcaagccatggcaatctctcatgcaccttcagaatgcccagcaagagtcctcgttagacattcctattcagaagtcctgctgtgacacacttcctctgcaagaagagaacagattcaggaaggtgccaggattgtgaggttctggtagtctgcagggtgtactgtgaatgctttttgtcaaaatcaaagcaccagtcctgggtttaatagaaaacatctctctggatagtttctattttaaaatatttaatcctaaaataaaatatttaatcctaaagaaatatgtaatcctaaagg

SEQ ID NO: 480183 - DNA, 529 bp, Homo sapiens
tcttacattgtcttagtcagtgagactagataacctgtgaacataagtgatgctgtcagctttcagtgatattctgctgacttccacatttgagatatagaatctttattttgttgattctctctcactcttattctttcttcttccttcattcttacctcccccaatatctgtgttactcccttcctaygtatttatgggtgattaggtcaagggttggccatgtagtgagaggattgtggttaggtccaagggtggccacatagaaaatttgtggtcattatttgttcttgggcggtagttaaactaatgttgttttaccagcctggtcaaattttgtgtttaatggcttctgtttggtgttatttccagggtttcattgtctgctactttttttttttctttttgagaccgagtctcaccgtgtcacccaggctggagtgcagtggtgtggtcttggctcactgcaacctctgtcttccaggttcaagtgattcccatgcctcagcctctggagtagctgggatta

SEQ ID NO: 480184 - DNA, 626 bp, Homo sapiens
ctgctcctgtcaacaccatcatattgctttttgttgttctttaggaggagtgagatggcatcatcatttctacacaaaggttaagggaatcattttattaaggatgaagctttttttgggaaaatgatcatctttaaaggcaataagtgagagagtgcatccttgcacatctagcgggaatttggaaagagctcagtcacctgatctgtgtctgtgatgagaggacagataaaaggtactgggatgtgcaccaaccttggccctaactagtgtgaactgcaatacatacacaacaacacagaagaattacaatgggaagggagggatatggttttttttttttttttgagacggagtcttgctctttcgcccaggccggagtgcagtggcgctatctcggctcactgcaagctcygcatccccggtccatgccattcttctgcctcagcctcctgagtagctgggactacaggcgcccgccatcgcacccggctaatttcttgtatttttagtagagacggcatttcaccgtgttaaccaggatggtctcgatctcctgacctcgtgatccgcctgccttggcctcccaaagtgctgggattacaggcgtgagccaccgcacccgg

SEQ ID NO: 480185 - DNA, 626 bp, Homo sapiens
ctgctcctgtcaacaccatcatattgctttttgttgttctttaggaggagtgagatggcatcatcatttctacacaaaggttaagggaatcattttattaaggatgaagctttttttgggaaaatgatcatctttaaaggcaataagtgagagagtgcatccttgcacatctagcgggaatttggaaagagctcagtcacctgatctgtgtctgtgatgagaggacagataaaaggtactgggatgtgcaccaaccttggccctaactagtgtgaactgcaatacatacacaacaacacagaagaattacaatgggaagggagggatatggttttttttttttttttgagacggagtcttgctctttcgcccaggccggagtgcagtggcgctatctcggctcactgcaagctctgcatccccggtccatgccattcttctgcctcagcctcctgagtagctgggactacaggcgcccgccaycgcacccggctaatttcttgtatttttagtagagacggcatttcaccgtgttaaccaggatggtctcgatctcctgacctcgtgatccgcctgccttggcctcccaaagtgctgggattacaggcgtgagccaccgcacccgg

SEQ ID NO: 480186 - DNA, 580 bp, Homo sapiens
tccttaactatctcctctaagtctgaccacttagaaatgcccaaatgctgcctaaaatgctagaataaatccaacccgtgaaaaaaactcttttctcagtacttcactgctatattattgtgctatcttgaaatctgttcctgctctggatttcctaacatgttttccagctccctggtaagtaagtcttctgctttgtaatttagatcttaggacctggccttcatacttacctacccatcacttctgaagttcctaccagatccttattctgacaagagctggctttataacacaagcttctcatcttcccctttgctgactgtccaccacctggacttccatagtttaaatttgatattatgaggcatgaagagattctttcccaaggggagaggaaaaagatgaagataatttgggagaagatctggaaaaaaatttccygacttatttaaatttcaagtgtgttagaataggtggttttcccaaatatacacttacttaggattatggtagcttgaaagcatcatttacacaaaaataaatatcctgcaaatatttttcaaaattatgtcataga

SEQ ID NO: 480187 - DNA, 580 bp, Homo sapiens
ctccatatgaaaagccagctgcaatgcgctgaaagtccttcttatgctattgtcactctggttctcttctgtctttattttctgagctgagaaacgttctttgctttaaagacttctgcgattatattgggcccttcagaatcatgcaaagcaaaaaactaacaacaacaacaacaacaaaaactcactggatctcaaggtttttttttgtttggttggttggtttttctyttttttttttttttttttttttgagatggagtcccgctgtgttgcccaggctggagagcagtggcacaatctcggctcactgcaacctctgcctcctgggttcaagccattcttctgcctcagcctcccgagtagctgggactacagtcacgtgccaccacaccagaccaatttctgtattttttagtagagacggggtttcaccatattggccaggctggtctcgaactcctgacctcgtgatctgcccacctctgcctcccaaagtgctgagattacaggcgttagccagagcacccagccaagatttttaacttaaatctgcaacatcactttcgctatgtatgtc

SEQ ID NO: 480188 - DNA, 532 bp, Homo sapiens
ttactttctacagtagatttaaattcccacttgttatctataattgttatcatagaagacttctgttttacrtatgaatctcattttttattatggtctttactatattacactaacatagtaaatattgcttttaataaaatatatcgtgacgtggtcatcttacatttaaaatattgtaatgatagtttaaaaatgacataaataagatctattcagttgattataaaataaattcaagattttatcacatgtacctcaatttatggatacaatctaaattgtttctagaatgtttcttggtcaattatacctaataattttacttatatcatttaacacttctatactaccctaaaagattttcatataatcagtgaaaattagtggtgatatttaaaggttatgctgagttatataaactatattttttaaattaaagcttcaaataggcaaaataaattggtaacataatttgttttgtattttcttgtttcaactatatatatttatgaaaataacattaacaatt

SEQ ID NO: 480189 - DNA, 671 bp, Homo sapiens
tatagattgaaatatagagtcactgggaaaacagatgtccataaagtcttaagagcagggtaaagtctactgtttgctggtttcaagctacatacctggagtccaactcagaagtgacatgctgctgggcttggcatgactatacccctaagccagtgaatgcctctactcagtttccaaaattcacaggtctaagcaggaagcctacrgcataggcctagatagagaatggtgtctcagtcaacaagtctttgcacatttttgaacaggttaagagccactggggcaaatctcaagtgacaaataagatcttaattctttggcagaagcactggctcttcatactcccttaaaccaacatggcacatgtatacatatgtaactatcctgcacgttgtgcacatgtaccctaaaacttaaagtataataaaaaaaaaaaagaaaaaaaaagggaagaaaaaaaagaaaaaaaaaaaaacaaacaatcctccctccaggcagtgttgtggtggcagcttagaacaatgctcagagggccccagcctcctgtcttccccaaggcagcaaaaaggctacagcaattctagggctgatggagagtgcttcccccaactcttgctagagattgtgtcattctattcttccctagaaagtagaggttttctgggcag

SEQ ID NO: 480190 - DNA, 582 bp, Homo sapiens
tgcctcgttccataaggtatgaggttatttcttttgtctgctctccactaatcccccctactcccagtcactttagaaggcaagatttacaagggacctttgttttgttcacggacatagctagaacagtgcacatggtaggcatttaatatttgcagaagagaaggaaagaataagaaggttgaaagtaagcaagcactcatagagcaaagaggacgcttaccaaggggactattattaaacctaggttactttaaaaaatcctactaccatggccatattgggatcaagaggaaagtctaarggcatcacagaatctctagtagctgagctcggctgtggtcctataacaagttacagatcctatgtgatgggcgctctggcctcctcctgcttagcatattcttggggcatcccaacctgaggatctgggttagagggaaatgggctctcaagaaccctccagagctgcagagtgcagggcagccctgtcaaaccagtgagggctgctgtggggtcatagtgggcagagtgggggagagagatcaagagatgaccgctttagggaatgctcatcttaaa

SEQ ID NO: 480191 - DNA, 606 bp, Homo sapiens
agaataatgcccacccaaagcaaggtgacatatactcaaaagtgtgggctgatatggtttggctgtgtccccacccagaactcatcttgaattgtagctctcataattcccacgtgtggtgggaaggacctggtgaaagataattgaatcacgggggcagtttcccccatactgttcccattgtagtgaataagtctcatgagacctgatggttttataagaggaaaaccctttcgcttggctctcattttcttgtctgctgccatgtaagatgtgccttttgccttccaccatgattgtgaggcctcttcagccacgtggaactgtgagttcattaaatctctttttccttataaattacccagtcttgggtatgtcttcatcagcagtgtgaaaatggactaatacagtggctgacaagtttcttacttcagcaagtatataaagtgtacagccttcaatgtgtcacctcaaaaggaatttggtgactcctccttctgtttaacacatttttccatctcattcaaacttgaatgcgtgatatacctcaatagaatctggttcacagctccgycctctcccagcagtgtgcccttgagcaagtca

SEQ ID NO: 480192 - DNA, 547 bp, Homo sapiens
ctaccacttagcctccacgtggagttccatgaaccccaaagccaaaatcacagcgagtttttaaaaagcatttaacacacagttaaaagaaccactttgtcaagccaaarcacacacacacacacacacacacacacacacacacacacacacacacaaacaaaaaacgcaaagccaaacctatctcatcttgttttctgtggtgaaggtgatggcagtcagttggagcgagcataccctaaagctctacaatgtggccaaggactttgactgtacattgttcttttttttaaataatcattccaaatattgcgagatgcattgttgcaggaagtcccttgccctcctaaatgccaccctacttctaagaagaatggctcagtcctctctggagtccacacaggggaggtgatagcattagcattgctttcatgtaaattatgtaatgcaaaattttttaaatcttctccttaaaactttgtttcatttgtgaccagctttcatggtcccccttttttgtcccccaacttgagatgtgtgaaggctt

SEQ ID NO: 480193 - DNA, 547 bp, Homo sapiens
ctaccacttagcctccacgtggagttccatgaaccccaaagccaaaatcacagcgagtttttaaaaagcatttaacacacagttaaaagaaccactttgtcaagccaaagcacacacacacacacacacacacacacacacacacacacacacacacaaacaaaaaacgcaaagccaaacctatctcatcttgttttctgtggtgaaggtgatggcagtcagttggagcgagcataccctaaagctctacaatgtggccaaggactttgactgtacattgttctttttttwaaataatcattccaaatattgcgagatgcattgttgcaggaagtcccttgccctcctaaatgccaccctacttctaagaagaatggctcagtcctctctggagtccacacaggggaggtgatagcattagcattgctttcatgtaaattatgtaatgcaaaattttttaaatcttctccttaaaactttgtttcatttgtgaccagctttcatggtcccccttttttgtcccccaacttgagatgtgtgaaggctt

SEQ ID NO: 480194 - DNA, 469 bp, Homo sapiens
gaacagcccgcagagcccccaggcttacctgtagcatgtggtgagctcgcctgaagacttcagacacgggtatttagtcgtcgcgattttgctctctgagcagatttctctatgaaaaagtgcagaggaaatgttcgattctcagcgggagagcggaggcgggcagcgcgcgctggggaatccctggcgcgtggggatcgccaggctccccgtcccggcgctctgggcaggggctggtccccaaacgcgtacgcggggcagactccggccacagggacgagccacgcgagggtcacgacgaagcgaaccagctccaggagaaaggaagcggggttcacgakctgtgccagccagtgtggcacccggggggaggcaggaacgcggggcgaagggtatccctgacgcgacccacggatggcagggcgcaaaggctgatacccgggagcggagggaagtgtcgcccaggaca

SEQ ID NO: 480195 - DNA, 599 bp, Homo sapiens
gctgacgcttggagctgccttggccttgtatctgattattcccatgcaagcaatgaggaaaaaattgcactagggtcctgtttgaagtcaaagctgccttttgctaccagacttacacaagaaaatgcaactcctaagaggggagggcrgtgaagaatggatcctcctctgcctgttgatcagtctttaactttacttctccctcagctcacctcttcagtattgtcctgatttgcctgagacagtgccagcatttgcctattttataattgtgattattaatagtgcccatgaatgagacagtcgcatgaattggatctcttctagccatccctactgccactcagcttatctcttgccctgaataatgccctctggtctcagcctctgaattgtcttccttctgactctcatgttgctgaaagtcatcttcctgagacagatcggtagagggtcagcagttcctcagtagaatgaggtgcttaatggcagcagcctggtttaaagggctacgagtggacatgactaaagggtttatgttgaagctacttaatgtgtatgtgtagtaggccctttgtttatatttagggctgaatgtt

SEQ ID NO: 480196 - DNA, 599 bp, Homo sapiens
gctgacgcttggagctgccttggccttgtatctgattattcccatgcaagcaatgaggaaaaaattgcactagggtcctgtttgaagtcaaagctgccttttgctaccagacttacacaagaaaatgcaactcctaagaggggagggcagtgaagaatggatcctcctctgcctgttgatcagtctttmactttacttctccctcagctcacctcttcagtattgtcctgatttgcctgagacagtgccagcatttgcctattttataattgtgattattaatagtgcccatgaatgagacagtcgcatgaattggatctcttctagccatccctactgccactcagcttatctcttgccctgaataatgccctctggtctcagcctctgaattgtcttccttctgactctcatgttgctgaaagtcatcttcctgagacagatcggtagagggtcagcagttcctcagtagaatgaggtgcttaatggcagcagcctggtttaaagggctacgagtggacatgactaaagggtttatgttgaagctacttaatgtgtatgtgtagtaggccctttgtttatatttagggctgaatgtt

SEQ ID NO: 480197 - DNA, 441 bp, Homo sapiens
ttagtcaagaccctccgctggtaacaatacctttattaaactacrcatggatataaagttttgtttttgatgaccatgtcactatcataaccactcctgcatttcaaagacataacacggtaagtgcggggaagagaaacccctaaaactccccggaggtggagccgaagactgctttctatttggtgactcacgtgtatcttatgtctcctttctaagggattgtcaaggcccctttcttaacatcattcgcaattcgctagctgaagtaaagcaagatcacttggcttatggaatcagggaacataattttacacagaaactgaagtccactttgaaataaagcatgaacacagtttctctcaattcagcagtcttctagttagttgaggttgttgaaagtgtgacttcagaagaacaggactccttgcacaatgctat

SEQ ID NO: 480198 - DNA, 683 bp, Homo sapiens
ctgcgttttcttccccttatgggaaggcagggtccaagcctctccgatattaatgctttctgtcctccacaccatcgagcctcamcgattttaatgctttctgtccttccatgccatcactcaccttttcatgtgtgcgtgttatccctttggacttttgattttgttccattcacctgtttgtctatttccttaccaatatcaagctattctgattactatatgtttatgtatctttggtagaaagtgatctctactttgtttttcaggaatattttggtggttcttggacatttgcacttttatttctaacttaggttcaggggtacatgtgcaggtttgtttatataggtaaatcttgtgtcacggggtttggtgtacagattattttatcacccaggtaataaggatagtgtacccaataggtagtgtttcggtcctcaccctcctcccaccctccaccctcaagcaggccccagagtctgttgttcccttatttgtgtccatatggacacgatgtgatgtttagctccctcttagaggtgagaacatgtaatgcttggttttctgttcctgtgttagtttgcttttagctccatccctgttgttgcaaaggacatgatcttcttttttatagctatgtagtattctatggtgtgtataccacattttttttatccatt

SEQ ID NO: 480199 - DNA, 683 bp, Homo sapiens
ctgcgttttcttccccttatgggaaggcagggtccaagcctctccgatattaatgctttctgtcctccacaccatcgagcctcaacgattttaatgctttctgtccttccatgccatcactcaccttttcatgtgtgcgtgttatccctttggacttttgattttgttccattcacctgtttgtctatttccttaccaatatcaagctattctgattactatatgtttatgtatctttggtagaaagtgatctctactttgtttttcaggaatattttggtggttcttggacatttgcacttttatttctaacttaggttcaggggtacatgtgcaggtttgtttatataggtaaatcttgtgtcacggggtttggtgtacagattattttatcacccaggtaataaggatagtgtacccaataggtagtgtttckgtcctcaccctcctcccaccctccaccctcaagcaggccccagagtctgttgttcccttatttgtgtccatatggacacgatgtgatgtttagctccctcttagaggtgagaacatgtaatgcttggttttctgttcctgtgttagtttgcttttagctccatccctgttgttgcaaaggacatgatcttcttttttatagctatgtagtattctatggtgtgtataccacattttttttatccatt

SEQ ID NO: 480200 - DNA, 442 bp, Homo sapiens
taaaaaaaatcactgagtttaaaacacatttaaaactcacttggaaccataagccaatgagatttggaagaaaattccaaacaaggataatgagatgtgaccagtctgaccagacaagaacaaaacactaagatcactttttaaaattaagtctttgttggctaaaatgagtacagttaaatggagccggataaatcatagaaagaactttacatctgagactttatatataatacacatattacaaaccartgaggaaggaagtattatttaacatgtacctttacaacaacttgctttctgctggccacagtggtgtgcaaatgtagtcctagctacctggggaggctgaggcaggacaactgcttaagcctaggagttcaaggttgtagtgtggcctgattgtacctgtgaacagtcactgtgctccagcctgggcaat

SEQ ID NO: 480201 - DNA, 585 bp, Homo sapiens
tacaaattttaatttcctcacaccttaactttgtcctcattcactttctcttggcccttttctggtgtgttatgcaagaattaatccacaaattatctgatcactcattcattattttaaaagcttttattttaccatgcaatctatccatttaagttacatatttcaacattttttgtatccaatatgttgaagtggttatgctttataacggcttcattgtccttcatatttccaytgtaattatttaagacttttttcatttatttaaatcttgtgttaagctatgaattttgcttctttagatatattttgttatcggttagctttcactcataatgctgaagctcctcagacatgttgaatttttctccttataaatacctttattgtctttattaccaatctgcagggtaagccaagcctcaagtgctaactaaatttatgtgtgtgtattgaaattggaggaaaatatacattgaaagagcctcttatgatatagtgcatgatttcctgctccctgttcccacttccagcagatattgtctgtcctccaggaaatattacagtatgtctacttcaata

SEQ ID NO: 480202 - DNA, 530 bp, Homo sapiens
ctgttcccccaaaattattttttgaaaagttcccttgaaaccagaaatcggcatttgtggcctcagaggggtttttagtttgtsatgccatgagttactcacaattcccaaagctttaatctactactttcctatttaaatgtttcagtctactactttactatttaaaagttatatcttcaactcagatttagtggcaatgcttaacaactaatattggcttttattatttaaataactttagtatttaatatatgtacatgataactattttgcactttttaaagtgacctttgttctcttgaattaacttattcactattatatgaaatttacaatattgttaaataataattccaattttattttcttttaggatcccgcttttactgctttgttaaccacccagttgcaagtgcaaagggagattgtaaataaacacaatgaactaaggaaagcagtctctccacctgccagtaacatgctaaagatggtaagaggcagtgctgtaaggagatgggtgtgaatca

SEQ ID NO: 480203 - DNA, 544 bp, Homo sapiens
actgggtgattgagctatacaaaactcttcaggctcctgtgtatggctttcaatgagctgatgaggatacaacagcccagatgttagagcattttcctaaagtcagccagaaggtgtctaatagaaccaggccttgaacatgtgaatctcgaattagattatactgattgtattttcctataacacctggaaggaaacacatgtctcttaaacacttagtaattagcaattcaatcaaacagcatatgtttatagaaagctcttatgagctcaacaaactagcagacattgcaaaagataataaaaacatgaataatttccgtttatttgtattatgtgcataatgtgtttattgtatyagaggtgttacatacattgtcccttccagtcttcaaagcaaaaacctgtgatataaaaatctacattttacataagaaaaacactgaagcttggcatagatttcccagacctgatggtttccaaagaatgcacccgtaaccaataagctacaggtagttgataattagaaagtaaaaatcataga

SEQ ID NO: 480204 - DNA, 661 bp, Homo sapiens
aaatactcaccaaatgccagactattctatattcacttgaaattttccccaaattcaacttggaatcagtcaaaatttgaagaatcctttttttttagggcacttataaaggagatggtttttcatttcttctccttacctgtgtataatgtccaaccactgmgttgggagtctttggccctacaccaaagtcaaaatcattgtactcatcaaaccagctttggattgcttgtgaccatgagctgggggcacttgacatgtagagattctcaccacattttagacctaagaaggaacagaccactcatgaggaaagcaataaagcatgcaatggcaaaatacacacaaacacacacacactacacacagcagaatccctgttttttaaatacagtccccagtacccaccgttaatgaatattgactaatacataaggagggtgcctcagatccttatcagctataagctgaatagaagccagatttgcccaatacttgaggctggtctcaacatgcaaaactttgagtagatggagaagccttttttctttaatgtctgctctccctggattcatttatttacacattgaattcttcacatgtgtgtgccttatgagctttcagctttgtaatgtgagcttgctgaagacagagatcaact

SEQ ID NO: 480205 - DNA, 606 bp, Homo sapiens
agccagtagtaataacagtggttcttaggctccaacatgttaaagataaaatatgaataggtttactgtgtattctgggacattcaagaccactctcacttctgataccaacttcaagttagggttcccaagatcaccttcagttttaataattctctagaaggattcacagaacccacagaaaacagttaatcttggttgcagcttattacagtgaaaagatacagcttaaaatcagccaagggaagaggtgcatagggcagagttcaagaaacatccacacacacacttcccagtggagttatggacagtgctaacttwtcgggtaatatatgttatgatacacatggagtactgccaaccaaggaagctgacctgagtcttggtgtccagagttttgttggggctcatcacatagacatggttggctttccatgtggctaacccaagtctccagcccctccagaggtcaagctggtaccatgggccccaaatccctcaccataaatcacactgttaaactatctggctgggcccaagcccctaataaacaaaaacactgttatcaggcatgatattccaagagtttagagattacctcaacag

SEQ ID NO: 480206 - DNA, 606 bp, Homo sapiens
agccagtagtaataacagtggttcttaggctccaacatgttaaagataaaatatgaataggtttactgtgtattctgggacattcaagaccactctcacttctgataccaacttcaagttagggttcccaagatcaccttcagttttaataattctctagaaggattcacagaacccacagaaaacagttaatcttggttgcagcttattacagtgaaaagatacagcttaaaatcagccaagggaagaggtgcatagggcagagttcaagaaacatccacacacacacttcccagtggagttatggacagtgctaacttatcgggtaatatwtgttatgatacacatggagtactgccaaccaaggaagctgacctgagtcttggtgtccagagttttgttggggctcatcacatagacatggttggctttccatgtggctaacccaagtctccagcccctccagaggtcaagctggtaccatgggccccaaatccctcaccataaatcacactgttaaactatctggctgggcccaagcccctaataaacaaaaacactgttatcaggcatgatattccaagagtttagagattacctcaacag

SEQ ID NO: 480207 - DNA, 606 bp, Homo sapiens
agccagtagtaataacagtggttcttaggctccaacatgttaaagataaaatatgaataggtttactgtgtattctgggacattcaagaccactctcacttctgataccaacttcaagttagggttcccaagatcaccttcagttttaataattctctagaaggattcacagaacccacagaaaacagttaatcttggttgcagcttattacagtgaaaagatacagcttaaaatcagccaagggaagaggtgcatagggcagagttcaagaaacatccacacacacacttcccagtggagttatggacagtgctaacttatcgggtaatatatgttatgatacacatggagtactgccaaycaaggaagctgacctgagtcttggtgtccagagttttgttggggctcatcacatagacatggttggctttccatgtggctaacccaagtctccagcccctccagaggtcaagctggtaccatgggccccaaatccctcaccataaatcacactgttaaactatctggctgggcccaagcccctaataaacaaaaacactgttatcaggcatgatattccaagagtttagagattacctcaacag

SEQ ID NO: 480208 - DNA, 606 bp, Homo sapiens
agccagtagtaataacagtggttcttaggctccaacatgttaaagataaaatatgaataggtttactgtgtattctgggacattcaagaccactctcacttctgataccaacttcaagttagggttcccaagatcaccttcagttttaataattctctagaaggattcacagaacccacagaaaacagttaatcttggttgcagcttattacagtgaaaagatacagcttaaaatcagccaagggaagaggtgcatagggcagagttcaagaaacatccacacacacacttcccagtggagttatggacagtgctaacttatcgggtaatatatgttatgatacacatggagtactgccaacsaaggaagctgacctgagtcttggtgtccagagttttgttggggctcatcacatagacatggttggctttccatgtggctaacccaagtctccagcccctccagaggtcaagctggtaccatgggccccaaatccctcaccataaatcacactgttaaactatctggctgggcccaagcccctaataaacaaaaacactgttatcaggcatgatattccaagagtttagagattacctcaacag

SEQ ID NO: 480209 - DNA, 606 bp, Homo sapiens
aatctgaataaagtatgaactttgataacaatgtgtcaatattggttattagttatgacagatgtaccatgctaatgtaagctactaccaataggaaaagctgggtgtgggatatatggaaagttctaaataccactaaataccttaaggcagaaggatccttgattggtataaatatctactataaaggcttttgctgtttaaaaaagcaaaacaaaataaaaaattaccaactactaaaattaaaatacaagtataatgaaaaattgaaataataaaaaattgctagtggcagttcaacataaatagcatggggaatgtggtgtattctgaaagattaattcatcagataattctataacgtgttccatgatacaggtttttttttcagtttggtgtttacaatcatccagaaagcttgtgttcctccagccccaatgggttactgaggcagtccaaagaaagggyatgacaaaaatgagtgaaagttgaaaggactaatatcctgggaaggggtcaagggttcattcatagaataaatactctgcctctcctaaaacccaggagaaaaatcagatcagtccactctttaggtcagcaaaagtg

SEQ ID NO: 480210 - DNA, 564 bp, Homo sapiens
catctgggatgatggtgggaagatagctgtacctactggtattaaccagaagttattttcttgatgaaaacaaaaaatatatatttaaagtaaacagcacagtaattactcatttgaattaatcataagaytgctttaagaaatggaatgttgtaggaaacccagtgaacaaattctgaatgcgtcagcatcatttaatgccatttccaaatttaaaaaatgtgagcactaatactgttttttcactatatttatcttttcatgcccagcacataacaattcttgagctcattttcaaattttgtaagtgccacacactttataaggtgctctacattatttcacaaacctctaagaaacgagcctgatcactactcaaaatgcatctatctacttcattaaagagtatataccaacatggcggaaagaaaaatacctaccacgtgggttggtgaaggccagttagttctggaaccatttaaataacacagatgtgaatttcgtttacttaggtttctgaatatacagcatatgctgattttgaaatctaaacactggaagagc

SEQ ID NO: 480211 - DNA, 628 bp, Homo sapiens
agagaatttgggagttttagaattccattcagatcactaatacaagatgcaaccaattgagaatctttagccaggacacactgatagagacctactggttacttacatcgttaaataatgtcatrcccattgataacagaccctgccccaaattcctctacagctcccttatttactctggcccctccaatcaaatcctgtacctcctattatcaagcaactaaggggttaatgcctagcacagtaggggacatctgatcctacctatctgatatggtttggatgtgtgtcccctccaaatctcagtgtcatgttgaaatgtgattgaggtggggaggatccctgatgaatggcttagtgccgtcccactggtgaagagtgagttctcactccatcagttcatgggcaagctgtttgtttaaaggagcctggcatctctcttgctcccactctcaccatatgacaggtctgctccccctatgccttctgccgtgattggaagcttcggaggccctcaacaggagcagatgccagcaccatgcttcttctacagcctgcagaaccatcagccaagataaacttcttttctttacaaattacccggcctcaggtattcccttacagcaat

SEQ ID NO: 480212 - DNA, 525 bp, Homo sapiens
aaaaagaaaaataatcctgtggtactaggggaggagaaataattaccctaggctcagatcattagaagcctttgctatttggggaagtataaaatcactgagaaagcctcaccccaagattcagtgacatgaggtttacctaggatgagggcaggaacaggacaaaagaaaactttccaagttttgtaacatgcaagcaagctccaagtaacaagcacaaataatcactactactgcagaagaaagaggctgaacaaataatcctgccatcatgcaggcacagaaggaagaccaaaagctgagactgaagcaggcacattgagaaaaagactccgctacttccaccccaccctatacccmaccctaattataagatacagatgcttctcaacttatgatggggttatgcttacataaactcactgtaaattgaaaacacctgaagtcaaaagtctatttcatatacctaacctactgaatatgatagcttagcctagactaggctcagaacatttacagtggcct

SEQ ID NO: 480213 - DNA, 525 bp, Homo sapiens
aaaaagaaaaataatcctgtggtactaggggaggagaaataattaccctaggctcagatcattagaagcctttgctatttggggaagtataaaatcactgagaaagcctcaccccaagattcagtgacatgaggtttacctaggatgagggcaggaacaggacaaaagaaaactttccaagttttgtaacatgcaagcaagctccaagtaacaagcacaaataatcactactactgcagaagaaagaggctgaacaaataatcctgccatcatgcaggcacagaaggaagaccaaaagctgagactgaagcaggcacattgagaaaaagactccgctacttccaccccaccctatacccaaccctaattataagatacagatgcttctcaacttatgatggggttatgcytacataaactcactgtaaattgaaaacacctgaagtcaaaagtctatttcatatacctaacctactgaatatgatagcttagcctagactaggctcagaacatttacagtggcct

SEQ ID NO: 480214 - DNA, 525 bp, Homo sapiens
aaaaagaaaaataatcctgtggtactaggggaggagaaataattaccctaggctcagatcattagaagcctttgctatttggggaagtataaaatcactgagaaagcctcaccccaagattcagtgacatgaggtttacctaggatgagggcaggaacaggacaaaagaaaactttccaagttttgtaacatgcaagcaagctccaagtaacaagcacaaataatcactactactgcagaagaaagaggctgaacaaataatcctgccatcatgcaggcacagaaggaagaccaaaagctgagactgaagcaggcacattgagaaaaagactccgctacttccaccccaccctatacccaaccctaattataagatacagatgcttctcaacttatgatggggttatgcttacataaactcactgtaaattgaaaacacctgaagtcaaaartctatttcatatacctaacctactgaatatgatagcttagcctagactaggctcagaacatttacagtggcct

SEQ ID NO: 480215 - DNA, 664 bp, Homo sapiens
gtccctccattcaggatccctgacttcccacaacacatccacacccactggacaaatacaggactccacttatttttgtaccacctgtgaacyaaaaattgtttttccatttttaaatggttgaagacaattgaagtataatgttttgtgaaaagtgaaaattatatagcattcaaatttcaaatttcagtgtcggtaaataagttttatcagaaaacagcttactcatttgtttgcatgttgtctatagctgccttctcaccataagaacagaggtaaatagttgcaacagagactgtgatacccataatctggtcctttacagaaattttgctttataccagaccaccagtatctaccttcccattacatcatagcccagccaggccacagtgggctcaggaagcagcattgttgtgggacagatgaatatttcactcgtatacatggtcctatgtgtactgaaggcaggttacattttttgaaaatggaaataaactgaatatcatttctgtaaccttctggtttgtgaataaggaatcatccagactttatccttagggagaactgtctactttggccaaatactgtgtatgtgagagatcttttatttataatctcatttactcttcacaacaactttgagaaatgttattatagccat

SEQ ID NO: 480216 - DNA, 664 bp, Homo sapiens
gtccctccattcaggatccctgacttcccacaacacatccacacccactggacaaatacaggactccacttatttttgtaccacctgtgaactaaaaattgtttttccatttttaaatggttgaagacaattgaagtataatgttttgtgaaaagtgaaaattatatagcattcaaatttcaaatttcagtgtcggtaaataagttttatcagaaaacagcttactcatttgtttgcatgttgtctatagctgccttctcaccataagaacagaggtaaatagttgcaacagagactgtgatacccataatctggtcctttacagaaattttgctttataccagaccaccagtatctaccttcccattacatcatagcccagccaggccacagtgggctcaggaagcagcattgttgtgggacagatgaatatttcactcgtatacatggtcctatgtgtactgaaggcaggttamattttttgaaaatggaaataaactgaatatcatttctgtaaccttctggtttgtgaataaggaatcatccagactttatccttagggagaactgtctactttggccaaatactgtgtatgtgagagatcttttatttataatctcatttactcttcacaacaactttgagaaatgttattatagccat

SEQ ID NO: 480217 - DNA, 550 bp, Homo sapiens
ggaatggaaataacagtttcggggcaccatggtgtgtgcaggggcyagcagagcagccagcttggttggaggataaggtctttggaattagatgagagcagatggagtggggcctggatgccagtcaggggtggggtaggtgagggtgttggaatttcttctgtaggcagtggagagttatggaaggttcatgagcagggaatgttctgagtccagtgtatttggtgaggtcttgcctaagaagttcctgggggttcccaactggactttatggcctatgaactccagcaagaataccagggtctatttaccaaaatagataatggtcaaagccgtgaccagttcctgctggaactgacttgccagctaccctgtcccctgacttagagttttgaccctcagtgcagtgtggtagaaactgaacccttttagaagccaggaggccctggttcttagctcattcctcactctgtaaccttgtagaagccacatttttttctgcagagtgaagggagagtggatatagccatctctaaggaaggcttgatcc

SEQ ID NO: 480218 - DNA, 460 bp, Homo sapiens
gcttgagagaatcacctatgaaggtcatggttactgagagaatgacctgctgaaggtcagttatggtgccagcagaaatacagcaccctaacaaatggaagagcagtacattctttacatcagcaaccaatatatgacattattttctctacagcagggacacacaagcatagaaaggaggagggtggagtaagagaggcccctctcatgaatgcatctaataatccagttaaagaatatttgcttcttgtccccactgtcttattccttgcaggtttagaagccttagttgctaagggagaaaatgcttccaatagggaacatagttgcagactcgttaagttggaagctaagactgctcagttgccattttgttttcctcatgccgctgagccaataggcagagatgtgggttactctatmggctgggataactaattctaattattaaggggaaagt

SEQ ID NO: 480219 - DNA, 606 bp, Homo sapiens
atttgtagaaacaaatgaaatcactccttattatttcctacctccccaccccaaataccaggccgtgtcaggcawcgccacttaatccagcaggagagactgtgggattgctggctgcagggccctagcagtggcccaaacagttaaagaggagatggagttcactgctcttcttctgaacagaaagtcagggcttcaagatttcaacaaacattagcattactcatttagagctgagcctaattcctaaacgtgatcggcactagcttgacatgcgtcacaccaattttaaccacacttcaatttggagggaagtaaaaaacaaataacatcttaataatattgaactgaaacataacttggctagaaaacgaagatgttactagagattttatacatatatacatatttctatgaaacagagatatgtagaatttcaatgttaaacttctttaaaagatgagccttacgaatggccaccgcccatccagcctcacagaatctttgtgaataacacttggaggcaattaattctcaactggaagtactgtcatcaagttttaattaccttctggatagcaaatctcagcagacacttttcggtcc

SEQ ID NO: 480220 - DNA, 569 bp, Homo sapiens
cacgtttgtaactttgttatcatcagcatttgtttgctgactttgagagtttgactcccctgccttccctgtcccaagcgctcctgccccttcctataaagacccacactttttggcctgttcctctattgtcttatgattgttcctgtattgttacttattagatctgttttcatgagagtagttgaaaaatccctggacttagagtcgagagcattccatccatctttaacgtaggctttttaccacttgtctgatgttagtgaagacatrgcaagccccactgcttccattttcccaaatgtaaactaggaaagtgatattggcctggcagtattggagaagggttaaatgagatgagaaatgtaaagcaactgagagagcaatacatagcaggccaaaaaaaaagaaaaaagaaaaaaacagttagcttcattgtctacgaagtttttgtgaggattcgtgagataatgtgtgtgcaagtgactttttactctcaagaagataatatgagtataaatgatgcttgcatagaccttgtttccccagtgaggttgtagaagtatatg

SEQ ID NO: 480221 - DNA, 401 bp, Homo sapiens
aaaaagaaaaacatccctggtgggaagaatacatttacctaatttccccaggtttaacctgtagagttccatgaaaaattcttgatgtttccaagttgaaaaaggtcacagaaggacccartatggagagctatgctctttccactaaagagcagattcaagcccttggtgcaaggctagtgggatgataggagaatggtggtagtggcagaatatgtctgttctgtgagaatgtctttaagttgatttttgtttgggcgttaatctttaaaatgtacttgcgttagagactttttctccagatcacagacgagggacagagtccaccaggtgaatggaatagcaggagctgccccacctcccctgaccaactcagcgaacctgggtttgaagaagatgga

SEQ ID NO: 480222 - DNA, 541 bp, Homo sapiens
gctgcttccttaggagtaaataatctgatgtatagaaagtttttgacaaaatgctcgcctcatctttcattgcagcttcaagcactgatgaccatctgttttagcccgagttgcctatgaaacagagcgttatgcagaagctgaagtactaatgccttgttagaggatgcaagcccagggaagcaagagtgagaggtaaagaaagagataaaggaggaacaaccaatggacaggggtgcattaccaagatggccactacttcattacaaaaagaactgatagatccatcctgtggcatggctcagagaggctacaggaaacatggcatctcagagcatcatttaggaaaggaagggtgagcagattatctgtggaactccccctcgctcctggtgttattttggaccctggcagcatccaggaaatccaacacctccatatggttggccactrgggaaggtctggttatggtcagcggatctggtttggagcataaactgagcatggtatttatccatagtaaaatccctgtttagtgggt

SEQ ID NO: 480223 - DNA, 511 bp, Homo sapiens
ggcccacgtgatcggtgcctgcgctgctgtccgggtgagccgcctgggcaggacgacactgagagacactcttccctgagcctggaagttgcacctcacctcacctggagatttggaaattggggcctgaatcatccccccgatcttcatgtcagcctgaagatttccatactgaagcaggaagctacrttcacgaacacttcataacctccttggggtcggagcaactttatgaataccaccatcccaggtgggaaacatctttaggcaatatttagagatactgtaaacgatttttatttttatcataaattcctagtttcctgtgcaatctcagtattttaagatgcttgttggacgtaagttaaagctggagatgatgccattaatatggaccacagtggaccttccatcaaggggctgctgtcctcttggtgacaccaggcccaggttctcgcagaaaggctcgagagcagaccctcgtgggcccagctacccggcctcattctgc

SEQ ID NO: 480224 - DNA, 511 bp, Homo sapiens
ggcccacgtgatcggtgcctgcgctgctgtccgggtgagccgcctgggcaggacgacactgagagacactcttccctgagcctggaagttgcacctcacctcacctggagatttggaaattggggcctgaatcatccccccgatcttcatgtcagcctgaagatttccatactgaagcaggaagctacgttcacgaacacttcataacctccttggggtcggagcaactttatgaataccaccatcccaggtgggaaacatctttaggcaatatttagagatactgtaaacgatttttatttttatcataaattcctagtttcctgtgcaatctcagtattttaagatgcttgttggacgtaagttaaagctggrgatgatgccattaatatggaccacagtggaccttccatcaaggggctgctgtcctcttggtgacaccaggcccaggttctcgcagaaaggctcgagagcagaccctcgtgggcccagctacccggcctcattctgc

SEQ ID NO: 480225 - DNA, 634 bp, Homo sapiens
gtcaacgttgtgttttgagcccaagccagtccagttaagtccagcttgacttgctttcgaggcagggccccgcagcagcagtgtgaacacatgctgcagaacctgcggcaacccaagtcagcctcatggaaggaaagtgttccatgttctgggaataacgtggggcactaggtgccacrctcaccttgtcatcagaagagaaaggaccatgactgacctgcggtgcttatggaagcaatgccctgtctgaactctggtctatactatgaggtcctttcttccgtgttcttttgcatctgaggacaaaatctgcttttagaacccttattcatgcagaagcaaagctacgcaattgccagaaatgccccttttctgaaaacatggaccctcctcctttgtctcatcaggataaccatggtttcctaactgtcaggatgcaaactcctttttcctggtccccaggctgtgcaggcatctgctgtatcaacctgccagatccattaacactgtgcacacaggacttagccacctgctgcctgtgtaattcacccactttgccttccagagagcaaggtaacacaagggcagtaggatgctgggaagaggggaggcggacattgttggtccagggtca

SEQ ID NO: 480226 - DNA, 634 bp, Homo sapiens
gtcaacgttgtgttttgagcccaagccagtccagttaagtccagcttgacttgctttcgaggcagggccccgcagcagcagtgtgaacacatgctgcagaacctgcggcaacccaagtcagcctcatggaaggaaagtgttccatgttctgggaataacgtggggcactaggtgccacgctcaccttgtcatcagaagagaaaggaccatgactgacctgcggtgcttatggaagcaatgccctgtctgaactctggtctatactatgaggtcctttcttccrtgttcttttgcatctgaggacaaaatctgcttttagaacccttattcatgcagaagcaaagctacgcaattgccagaaatgccccttttctgaaaacatggaccctcctcctttgtctcatcaggataaccatggtttcctaactgtcaggatgcaaactcctttttcctggtccccaggctgtgcaggcatctgctgtatcaacctgccagatccattaacactgtgcacacaggacttagccacctgctgcctgtgtaattcacccactttgccttccagagagcaaggtaacacaagggcagtaggatgctgggaagaggggaggcggacattgttggtccagggtca

SEQ ID NO: 480227 - DNA, 354 bp, Homo sapiens
ccgtgttcttttgcatctgaggacaaaatctgcttttagaacccttattcatgcagaagcaaagctacgcaattgccagaaatgccccttttctgaaaacatggaccctcctcctttgtctcakcaggataaccatggtttcctaactgtcaggatgcaaactcctttttcctggtccccaggctgtgcaggcatctgctgtatcaacctgccagatccattaacactgtgcacacaggacttagccacctgctgcctgtgtaattcacccactttgccttccagagagcaaggtaacacaagggcagtaggatgctgggaagaggggaggcggacattgttggtccagggtca

SEQ ID NO: 480228 - DNA, 371 bp, Homo sapiens
agctgtcagccgtctcccaatctgaccagccccactttgtctttaggaatttattgattattccagctttacttgtcatagtggtgtctatttgcatctgtcctatgtaagtgcatctgtcctctttctccttgcaggtgcttgttttccctcacattttgactcagttcttggcaacctcgttgctataaaaataaagtcatgactttgaggttagtttggttctttcattgttgtcaggttaggaaccctattccatcccagatctccaaaacccagactttttggggggttgaaattttaggctttctctttgaattgtagttttatcttctttcagttrccatttgcattttcataatgattaatga

SEQ ID NO: 480229 - DNA, 460 bp, Homo sapiens
ttgctgaaaagtgtaagacatgcaatggggggattatgtgcatcttcccgacaccaacatgatgctcaggaaggagacttcttgttttctcttaggattcttttactaaccaagattttrcctctactacatatttccctttgctgattgtccctcccttttgacagaagatggcccagggcattcactactaagtctcaacctcttacccaaagccctcagtctagtgttgctctttccttcatgctatttttgtttgtttcttttcttgtaatcatcttggcaataaaataatcacttttttctttctacctattaaagatgttaccttagttaattacagtggtttccttcagaatgataaatggtctttcaaaatgatgtaaagagatctaaatccgtgtgctccagaagttgaatgaagatctgtctagcacgggtgccagtgactctcccagag

SEQ ID NO: 480230 - DNA, 460 bp, Homo sapiens
ttgctgaaaagtgtaagacatgcaatggggggattatgtgcatcttcccgacaccaacatgatgctcaggaaggagacttcttgttttctcttaggattcttttactaaccaagattttgcctctactacatatttccctttgctgattgtccytcccttttgacagaagatggcccagggcattcactactaagtctcaacctcttacccaaagccctcagtctagtgttgctctttccttcatgctatttttgtttgtttcttttcttgtaatcatcttggcaataaaataatcacttttttctttctacctattaaagatgttaccttagttaattacagtggtttccttcagaatgataaatggtctttcaaaatgatgtaaagagatctaaatccgtgtgctccagaagttgaatgaagatctgtctagcacgggtgccagtgactctcccagag

SEQ ID NO: 480231 - DNA, 460 bp, Homo sapiens
ttgctgaaaagtgtaagacatgcaatggggggattatgtgcatcttcccgacaccaacatgatgctcaggaaggagacttcttgttttctcttaggattcttttactaaccaagattttgcctctactacatatttccctttgctgattgtccctcccttttgacagaagatggcccagggcattcactactaagtctcaacctcttacccaaagccctcagtcyagtgttgctctttccttcatgctatttttgtttgtttcttttcttgtaatcatcttggcaataaaataatcacttttttctttctacctattaaagatgttaccttagttaattacagtggtttccttcagaatgataaatggtctttcaaaatgatgtaaagagatctaaatccgtgtgctccagaagttgaatgaagatctgtctagcacgggtgccagtgactctcccagag

SEQ ID NO: 480232 - DNA, 460 bp, Homo sapiens
ttgctgaaaagtgtaagacatgcaatggggggattatgtgcatcttcccgacaccaacatgatgctcaggaaggagacttcttgttttctcttaggattcttttactaaccaagattttgcctctactacatatttccctttgctgattgtccctcccttttgacagaagatggcccagggcattcactactaagtctcaacctcttacccaaagccctcagtctagtrttgctctttccttcatgctatttttgtttgtttcttttcttgtaatcatcttggcaataaaataatcacttttttctttctacctattaaagatgttaccttagttaattacagtggtttccttcagaatgataaatggtctttcaaaatgatgtaaagagatctaaatccgtgtgctccagaagttgaatgaagatctgtctagcacgggtgccagtgactctcccagag

SEQ ID NO: 480233 - DNA, 529 bp, Homo sapiens
cttaacgtggggacggtgggcaagaaaggtgatgtggcactagaratttatccatctctaaaggaggagtggattgtacattgaaacaccagagaaggaattacaaaggaagaatttgagtatctaaaaatgtaggtcaggcgctcctgtgttgattgcagggctattcacaatagccaagatttggaagcaacccaagtgtccatcaacagacaaatggataaagaaaatgtggtgcatatacacaatggaatactattcagccatgaaaaagaatgagaatctgtcatttgaaacaacatggatggaactggaggacattatgttaagtgaaataagccagacagaaggacagacttcacatgttctcacacatttgtgggagctaaaaattaaactcatggagatagagagtagaaggatggttaccagaggctgaggagggtggaggggagcagggagaaagtagggatggttaatgggtacaaaaacgtagttagcatgcatagatctagtattggatagcaca

SEQ ID NO: 480234 - DNA, 611 bp, Homo sapiens
ggggcagctggtttgattgacccagggaaggctggaaatcaagactgggggatcaagacgtagattcagtgtggccaaggtcaagtctctgaggtttagggacatcagatccccagcttaggttctgtacctcggcaaggtgaaagcgttggcgcccactgatgaggcctgctctgagattgtgggtgtgggttgagttgggtgggcataggcaagtcctcttgtaagaatcttttggcaaagatgggcctgggaggcttttctcacttcctggggcccaggctttgcaataagtattccattatactgtggtaccttggggctacctgagaatcctctgtctcgcccctgttgccttgccaaagagtttgctgtccaagaattcctttcctgtctccaggtgccatgctcctgccacctctgccaggttcyctgcctgcccagatggctcccaactgagtgtgaggaggaatttgagacaggttttgagctttctgggttctccagttaggaaactttctgtaagcatgcagatagaatgggcttcagcaaaatacaaactcgaacaacttccatgtatagtcccttaattttctttgcttttttcatat

SEQ ID NO: 480235 - DNA, 611 bp, Homo sapiens
ggggcagctggtttgattgacccagggaaggctggaaatcaagactgggggatcaagacgtagattcagtgtggccaaggtcaagtctctgaggtttagggacatcagatccccagcttaggttctgtacctcggcaaggtgaaagcgttggcgcccactgatgaggcctgctctgagattgtgggtgtgggttgagttgggtgggcataggcaagtcctcttgtaagaatcttttggcaaagatgggcctgggaggcttttctcacttcctggggcccaggctttgcaataagtattccattatactgtggtaccttggggctacctgagaatcctctgtctcgcccctgttgccttgccaaagagtttgctgtccaagaattcctttcctgtctccaggtgccatgctcctgccacctctgccaggttccctgcctgcccagatggctcccaactgagtgtgaggaggaatttgagacaggttttgagctttctgggttctccagttaggaaactttctgtaagcatgcagatagaatgggcttcagcaaaatayaaactcgaacaacttccatgtatagtcccttaattttctttgcttttttcatat

SEQ ID NO: 480236 - DNA, 617 bp, Homo sapiens
acacacaagcacagtcctaaagtttgcaaagtgctaaaaaaaaaaaaggggggggttgtaattagcttgaataaaaccttgttgatttactatagagttaagagtattttagtgatagttggccaaattggtacatattcttttggtggattggaaacacatgattataataattataaataatacattaccaattttacactgttataaatgtaatcactgttttcctattttaaaataatcaaatataggttcccatcaactgaaatttgctgttcaacttgcttttagaaatggagtggatctgcataacgtagagagatctatcctcacactggtttgtttaaatgcatcctcactgcagttgccagttcctcttggaaagcatggcatatcctaactgttttctgtttctcctcctgtagctctcagtaaattatggagactactgcaaaattcaataaatgctcgcaccrgaaaggacagtggaaaatcccaaacttttaaagcttgcccaggaataggaaagctttcttccaggcggttagtctcatggcttacccactaggtcccattctccattggggatatagccactgatatctgcctcctgcatc

SEQ ID NO: 480237 - DNA, 617 bp, Homo sapiens
acacacaagcacagtcctaaagtttgcaaagtgctaaaaaaaaaaaaggggggggttgtaattagcttgaataaaaccttgttgatttactatagagttaagagtattttagtgatagttggccaaattggtacatattcttttggtggattggaaacacatgattataataattataaataatacattaccaattttacactgttataaatgtaatcactgttttcctattttaaaataatcaaatataggttcccatcaactgaaatttgctgttcaacttgcttttagaaatggagtggatctgcataacgtagagagatctatcctcacactggtttgtttaaatgcatcctcactgcagttgccagttcctcttggaaagcatggcatatcctaactgttttctgtttctcctcctgtagctctcagtaaattatggagactactgcaaaattcaataaatgctcgcaccggaaaggacagtggaaaatcccaaacttttaaagcttgcccaggaataggaaagctttcttccaggcggttagtcycatggcttacccactaggtcccattctccattggggatatagccactgatatctgcctcctgcatc

SEQ ID NO: 480238 - DNA, 505 bp, Homo sapiens
tctttacccacaggtctgctgccttggtgattcttgatgtggcctttctctctgcatagcatctcatcctctcggatctcttcatgtggcttttctttctccaagaaggtagccaattcttatttttggcttccagaagcacagaaatggagctgccaggagttcttaaggcttagacctggaacaggtccagtgtcatttctaccacatgctataggttaaagtgagtgttggggccaacccagattgactatgggatgggcctgtctgaggacatgatgacaggaggtatggctcattggagaccaactcccaagatggagcatgagttctaagaactttttcttctctgattatttcttattcatattgttttgttttatacatgtaatatattcacaagtgtctttatgaagtgattttgatactctccgtcttctccctggcatctccttgttctttaataatytttttcttagtttattttggtcttatttttcttttt

SEQ ID NO: 480239 - DNA, 467 bp, Homo sapiens
aggccacatcagctacgcagcgacgcagccctggaggaacgagcccagagcctgggctgtatctcatgttgcagatttctggcatcttgaatcttcttatcctgacctctccaatcgctgccacccttcatctttgatcccattggtgggcttgtgcaagtgtgcaggatggaacctgagttccagccccttacgctgacaattrcagtagttgcttaccagcatcctatgtctgggccctcttcccctcagaggcaggttgcctggaaagaacagaaagaacaaagggatccatttctgtctttctccgagggactgtctggagcatctccaaagatggggactacaaaatgcgatttgcatcacagcccacagcaaacacaaaactgcacacatctgtgtccagtggcgtattagccatgtggctccacctccagaggaggatatctgatcagcctccagggctt

SEQ ID NO: 480240 - DNA, 619 bp, Homo sapiens
gaaatcaggccgggcgtgatatcataagacagaccttttaccttctcatcagtgactggaatgaacgcctgtaatctcagtactttgggaggccgaggcaggtggatcacctgaggtcagcagtttgaaaccagcctggccaacatggcgaaaccccatctctactaaaaatacaaaattagcagggcgtggtggtgcactcctgtaatcctagctacttgggaggctgagacaggagaatcacttgaacccaggagccagaagtcgcagtgagccgtgatcatgccattgcaccccagcctgggcaaaaagagcgaaacyccatctcaaaaaataaaaacaaaaaacaaacaaaaaaaaatgtgatatcataagacagaccttttcccttctcatcagtgactggaattaactgcccatgtggaacgggttgtgggtgttggttcctttactgggtcatctggtaaactgcaaggtttctgctgtgacattgaaggcagacatcaaccctctaagacatttttttcctatcctctgggaatattactttttggacaatcttggtccattggtaagctcatgggaatttgtcagagtttttttgtttcttttggctcat

SEQ ID NO: 480241 - DNA, 619 bp, Homo sapiens
gaaatcaggccgggcgtgatatcataagacagaccttttaccttctcatcagtgactggaatgaacgcctgtaatctcagtactttgggaggccgaggcaggtggatcacctgaggtcagcagtttgaaaccagcctggccaacatggcgaaaccccatctctactaaaaatacaaaattagcagggcgtggtggtgcactcctgtaatcctagctacttgggaggctgagacaggagaatcacttgaacccaggagccagaagtcgcagtgagccgtgatcatgccattgcaccccagcctgggcaaaaagagcgaaaccccatctcaaaaaataaaaacaaaaaacaaacaaaaaaaaatgtgatatcataagacagaccttttcccttctcatcagtgactggaattaactgcccatgtggaaygggttgtgggtgttggttcctttactgggtcatctggtaaactgcaaggtttctgctgtgacattgaaggcagacatcaaccctctaagacatttttttcctatcctctgggaatattactttttggacaatcttggtccattggtaagctcatgggaatttgtcagagtttttttgtttcttttggctcat

SEQ ID NO: 480242 - DNA, 575 bp, Homo sapiens
agctctaaatgtgtatatacagtgcagatttatcttctgaagctcaggttcatgtatcctattgcttattcaacacctctacttggatatttcatgggcacttcatactccgtatgcccacaaatcagttctttattccaatcttctaaacattttttctcttcttatttgacttatgtgccaaagaaaggcaaaataaaacaagaaaactacattttccctatcaaaatagcaaattagttttatttgaaartaatgaaaatgaaattaaatgaatattttcatgtagcatggataggagagtaatctgatacaatctctttgggagaaaatacctagcaatatatatatcattcactcaaattcagtagttctacaaatatattgtttttaaaactaaaatatacaagtgaaagttaatgaacaagactcataaccatgtcattgacaaaatccaaaattttaaatggcttaaatcccaatcaacagagattggtagtatctagcctatagtatatccatatgagagaatattatgctttcaacaaagttcgataatttaagaattgcttaaa

SEQ ID NO: 480243 - DNA, 683 bp, Homo sapiens
gggagtgctgacatcagcgagagaaacaggcagagtgcaatgcagggtatcacatggcaggatgaaggccttcgggtatagagtactgggtcacagacctacttggattataatgtttacrgccatctccatgctccactccacaactatgcaggacaaaataagaggagctaccaccactcaagcctgtcccccacttcccagaaaggaggtaacctaaggaaatgtcaatattcagttaaaacatggaagcggtagtctagaatctaggtcagaaaaagctaccgtgtttaaagaccttgtgtgaatcggaagctgagaatgtttcatgcttattgagggtctaaagataaaatattgttctcttgttttaaataaaatgtattaaaagaagggcttctgtatttatgggaaattagactatattccaacttcaaatctatatttttattatgctatgatgtcatcataaacagcaagtgacattccctttgggtgaaagaataaggcatggcaaactcaagttttcacaagttaataggtaaattaccctcacagtgggataactgagaccaaagagaagggaggcataaagaagttaaagaaaataacaagaaagaacaaatcatttagatggaaggggggatggagggaagggatctgaaattgaggcactagagcag

SEQ ID NO: 480244 - DNA, 558 bp, Homo sapiens
tccatatactacttttcataaattatcctggatgatgctagatacattattgatctaatctgtttttaataacatcaatgaatacttaatgatatttgaatcctgagtttacagagctcttttctttcctagagtcttattttctcaaaaggtcattgtgttttacataaaacaccactgtaagctagaagtcggcatccattattgtcagcattttaaaggagaggcttggtcctgagtaactgacttatctaaggtccatcatttttcagatatagacttgggatgacaacccgggctccttccagctccarccagttcttcactgtaggacatgctacttcaatgttgtgtgatctgggagtgcttctgcggcactgtgctgtcaattcatgcatgaatcacttttaaagaaatcatttagtttgataactaagccttttggatttggtcacagatgaaccaattttacaccgaatgcatcctcatagtgagaggaaagggtcatggctccaaaggaaggcctccttatcctcaattaccagctctgagcaagtt

SEQ ID NO: 480245 - DNA, 539 bp, Homo sapiens
agctcttaagaaaaataatgcatttatgatgtgtctctatgtcctttttttatctcctttgttttgtacttgactcttagaaaagaaaagggatatatcttaaaattatagaaaaaactaattgaaaatcttcaagggaggaaaaatacaagaattatgtgtgaaacccaccaaggtcaaacttctgattgactaagcamagataaaccctggagttgggtgagatgccacagagaaattgtccttcagtgctttctgcttttgagactaaggaaaacatattatgggaaatgcaacaggtagtcccagtaatggccaaagcaggtagtgcacagactaggaactgaaaagaaaaacagacagaaaaagacccatttctaaagtgcaagtagcctttgaatctgatgtttttgttccacctggttcacgggtgtgtggtgactttctgtggacctgtttgtctgtcgctaggagataaagaatcaaagctctgcccacggctactctccttaaaactacaccttactgaagtttttata

SEQ ID NO: 480246 - DNA, 625 bp, Homo sapiens
gaaaaaacaatgcagatctcatggcctatttggtctgagcctatctgaggccagccctgcttaagaaaaggaatcctccacatggagcagcagcctagctcacttaagtttgctggagtttctctccaaagctcaggtaataaataatgcggtgttacttcsactcattcaacaaggtgtttttttttttttttttttttagctcccattcttctaggtattattttaggcactaaggaaacagcatttaacaaaacaatttttccttcaaacatgcaatgcacacttactgagaccaactctgtgccaagcactattctaagccctagggatataacattagaaatatatatatatttttattatatatatagcattatttattatacataggattagaaaaattatatatatttctgaagagatatatatatagctttttcatgggcttttattctagttaataaagacctttataaacaaaaaagtaaaatgtaagaacatcaaataggttatagctatggagaaatgaagcagggtaaggacatatgtggcgggggcagttaagattttaaacaagggattatgaaaggccttctgaaaaagtaacatttgcttaatgatc

SEQ ID NO: 480247 - DNA, 492 bp, Homo sapiens
tgttgttggggagctgtcatttactgctcattaatgattgatttttttaaccgtctaaattgttttcatgagaacagcagattaactataaagaattcattattggtcattaaggaatattaaaatggaaaacctttacaagatgtgtcctgtcttgctatgttcagatggggctgaagcactcttgccaatatgggagagaaaacaaaaaaatctttctgccagacctctggcaaggagayaaagctgaggaaaggtggggtgaaaagagaaatcaagaaaaagatctctttttgttgaaataaaacattgattacattttacaatggcaataatgtaccccaaataattacttcagctattgtccagcttgtttaagcactgactgagctgtgggtaccaatcgattcagtgcagattgttaataatggactattttgaaaacttatagctgtttctccatacctcccatacacaggaagacactaattt

SEQ ID NO: 480248 - DNA, 492 bp, Homo sapiens
tgttgttggggagctgtcatttactgctcattaatgattgatttttttaaccgtctaaattgttttcatgagaacagcagattaactataaagaattcattattggtcattaaggaatattaaaatggaaaacctttacaagatgtgtcctgtcttgctatgttcagatggggctgaagcactcttgccaatatgggagagaaaacaaaaaaatctttctgccagacctctggcaaggagataaagctgaggaaaggtggggtgaaaagagaaatcaagaaaaagatctctttttgttgaaataaaacattgattacattttacaatggcaataatktaccccaaataattacttcagctattgtccagcttgtttaagcactgactgagctgtgggtaccaatcgattcagtgcagattgttaataatggactattttgaaaacttatagctgtttctccatacctcccatacacaggaagacactaattt

SEQ ID NO: 480249 - DNA, 604 bp, Homo sapiens
tgtgtagttaagaatgccaatttatttttaaaatggctctgtgcagtcagctcgattgtttaggaaaatgggagaaaggagtgactatgataatcaaagttcacgtgcaatttcaaacctcatttaaacgagctgtttaacctgctctctgtctgctagtgggaaggagaaaaagcaaatgagtcagacagtggacccactagatactcaggatattgagattcttgggtgtgagagaaaatgtttcttagttttataaatgtttactgagttgtttacactgatttgataagtatatctgggacttggtgcaggtaggtgtttcaaaaatttgaatttacttcaccctcaatggttcctgccttatttatatatgtatgctggatgcrtttattcacattgatagtccctgcatcccaaattctcagatgctgccagacattctctctctcacagccccttgttccccaacacgctccactttaggttctgtgcacaaaggtgtcactcttacaaccctaaacactacccttctgtcctcttcttgtctccttttgtccccatgtttttcacttgttatttctatgtagtagagggcttggcc

SEQ ID NO: 480250 - DNA, 515 bp, Homo sapiens
tacagggacagtagtactgttgctgtttccaatccagtccattttggcattgaatgagatgtaatatcattggagtctgattgctgaatcggagagaattgaacctatttttgttctcaggaagggagaaatttgaaggttacactgagataaggagtaacaggaggaggaagaataagaaatttttgtttctggattttccaaatccagtggcccatataactacaccaactgttttcaggtggtcagtcccacattgtggatgtatgtcgccatccaccakaataattctattatttttttgtcatctttataaccaagtatggaagtactggcatgctttgacctctcctggcttgattattacattaatcaagatgtaataattgtctgataggcatccaaggttgggctcccatagttgtggtaggggttgtgttcttactacttccagcacatcagtttggcatatcagttatctgcttcctctaccctgctaaccacagtacactgta

SEQ ID NO: 480251 - DNA, 559 bp, Homo sapiens
agtgagttaatacatataaagcaactaaaccaatgtatgcatatactaaatatttaattaacatcagatattattagtttttgattggctctagatctggtagtaatcaaggccttgcactatcaaggcctattataaaagactacagagaaagaataataaccgctcgcttgttgagtgcttactgtgtatcagacacttttcaaggcaccttttatgtactaaagaaaagggaatttataggcacagaaaaattgtttttgataaacatagagaagaaattttccctgtgtctgaaagatcctctaaattggcgagagagaccatgggtcctaggaaaagaatgggtttgggtcatgcttcctaacagcacagccccgagagaaagttgggggttggtgcttctgggacaatgggatcataggcacttttgtaaagaaaaattcctgatgagaagatttctrtcatggaaacaaaggtccatcaagaatagactatgaagagtagtgtcattgtttcagcacccagaatctttgtggttcttgtattgacctgcaat

SEQ ID NO: 480252 - DNA, 605 bp, Homo sapiens
ccgagagtctcattttagccgtggggatcacgtggcatggcatgtctataatgtcacttgtagagataccgttaccggtttgcccctactgtccagtgaccccactccaaaagcaagcatcacgcgctgtgtgtgcggttcagaataagaggatccaagcagagggctttgcctgcagtaaatgtttcagacagatgtgaacaaggcagtttctccgtgttcactgacaaatttggccataatacccatgtcactataacgcacatcacattttcccgagagtaagtgataatagaataaaaatccccgctctgaatatcaagagcttcaatgatcccacaaatccccctgcaattttatccagactgccatcccagcagtggaagcagggattttagaaacccatttttctacctaggaacatcactttaggacaatcatctttatttcactgctattcagttccagacccataaacataaagagggaaatacagaaatagaatcagaagggcaggggaagaaaagagtggaacaaaatactttttaagagctrcatggacttaatggaatttcctttctatataatcctcaggatcattaaaa

SEQ ID NO: 480253 - DNA, 553 bp, Homo sapiens
acttcaagagagaagagcaaaattttgtgattcagaatgaaattaataatttggcatttttaactggagacagcaaaagcaagatgtcaaaagtaagtccttagaaatcaattccaaaaactcttcaaccctaacctcagccatgacttggatctgtttcatactttctggggattaacaccgtactgcatttaggtcaaactacatgaccaacagtctctgctgctgtttctttgagaacgagccagaagaaactgctctcaaataagcatggtcatcacattttatgaataaatagctgcttgtatgtcaaaaagcttaagtttcaagacttgcctaaggcatttgagaggtctccaaaacaaaagctgctgttagtgattttaaaatagaactwcttcctgtgtagtgaggatacagcaatacacatgcctagaaccaccttttgatagctaggaaaaaattaccttgctttgtagattttgacagcacgtactcttacatcatgcttgttttcctcctatctgtaatatccaatacctgttttatttca

SEQ ID NO: 480254 - DNA, 561 bp, Homo sapiens
atgaacgcagcttccttctttgtgtctcaccaacctacccttattattgcctcaacatttgctttctgtggtgctaatcctttctgcttccttgccaccatttcgtcaacttacaaacactctaccagccccgtctgacttgtcccatgttgcatgtctctgtaatccacatccctcttctctctcactcctgcttcctcctccctccctccctgtctctgcctctccttctcactccccatctmtctggcaagatgaatcagaaccgctcagagcatttattatgaacaaataaatgtagcatatgtagcagtttattgcctctctccatggcaacacatgagggagaccttcaggaggtatttgaggctgattagagtaacatttgcagctttaacttaaatcatgtgtatctaaaattttcaaggctgtcacatctgcctcctctcttctggaatgtgctatttaacctttcatttttccccttttgactctggccttacgggaggagagagttcctgggagggctgcaatttgacagtaagatgtccattcctgtgt

SEQ ID NO: 480255 - DNA, 516 bp, Homo sapiens
tgaatgtagattgtcagtggttcacaactctcactcactcatttttttcttacaattactctggtctttaaaaaaaaaaaacaaaaacaaacaaacaaaaacaatggaaaggcatattgctctttctctgattgcttgtttctgcttttcaacttctagtgatcaccccagcctctttttgttcatttgtaattgataccagacttatatccctccctcagagcccagaggagtctccaggcaataggttggcaggtttcaagtgttgaggctgaggatggtagtcgggttaatgtgcttttaacaacagattgttctgtaaaataaccagaaagcatatactgagtgcccgctsttagtgcagtacttgctgttaataaaagccttccttcaggaagtttacaatctgctagtgagccgaaagcaaaaagaatggactataaaataatacaaaatagtctgtcacgaagagctaaggggtgtggcataggccatgtgtgcatgagaggttcgagg

SEQ ID NO: 480256 - DNA, 589 bp, Homo sapiens
gtgtcaaatgcattaatggaggatgtgatgagtgtttgatttgttttggctttgtggccaaatagcatcatttctcaaggatttggatatgtgtttgtgactaggtgaaactagtaagtcatgttcacctggagggtcatttatggggtctggatgcactctgggaagagacaggctttgctgtggacacatctaggaagatcactcatgcagggtgctccagatcccaaagaggccatagagcatgtgctgtttttgagtccacagggktgtattattttccaaaagctaatagtaatgtgatttattttcatgtaagtgaggagtaaggaatgtaaaaaattgaacaaatctaaatcattcatggcctcttctaagtcagaaaaattagtttttcagatgctgtctactgtttagtttttttttccattgatgatcttgagtatgaatgctagttaatcctaagacattacactgtgataaaatttatgttatttctacttataaattctatttagctagtttgttccaatgaattattaattaaaatgatatataagtagtaatatggctttaaaagtgattaaaa

SEQ ID NO: 480257 - DNA, 589 bp, Homo sapiens
gtgtcaaatgcattaatggaggatgtgatgagtgtttgatttgttttggctttgtggccaaatagcatcatttctcaaggatttggatatgtgtttgtgactaggtgaaactagtaagtcatgttcacctggagggtcatttatggggtctggatgcactctgggaagagacaggctttgctgtggacacatctaggaagatcactcatgcagggtgctccagatcccaaagaggccatagagcatgtgctgtttttgagtccacagggttgtattattttccaaaagctaatagtaatgtgatttattttcatgtaagtgaggagtaaggaatgtaaaaaattgaacaaatctaaatcattcatggcctcttctaagtcagaaaaattagtttttcaratgctgtctactgtttagtttttttttccattgatgatcttgagtatgaatgctagttaatcctaagacattacactgtgataaaatttatgttatttctacttataaattctatttagctagtttgttccaatgaattattaattaaaatgatatataagtagtaatatggctttaaaagtgattaaaa

SEQ ID NO: 480258 - DNA, 613 bp, Homo sapiens
tgcctggagaaaactctgagggctaaggggtggacagagctacaagaccgagaatcttgaatccctaaaggatgacatcaaaggccacttgtcagctagacacacccaactggactctatttaaatgagaaataaaattcagctattttaagccactgagatggagaggatattctgaagttgtgactagtataatttaccctaaaaaatataccgcactgaaaaacagaaaggttactgttgcctttttcacgcccacaaagccaagaagtatcttagatagtgtggtgtagcaaaaacaacataaatttgggattaaacatgtttgggttcgtatcgcagttccgcagtctactaaatgcatgactttaatcaagtaatttaatttctctgtatttcaatttcctcatttaaaamataaggatattactgttaactgtatggattgtcatgaggattaaacaaaatacattacatgcccttggcacttagtctgtgctgccactgtgtaagtctcatgggtacctaagaatgtggagctgcacaggtcatgtgacccagtccagcctacttgctgtagctctcaccaaatggacccactgagatgggaagt

SEQ ID NO: 480259 - DNA, 613 bp, Homo sapiens
tgcctggagaaaactctgagggctaaggggtggacagagctacaagaccgagaatcttgaatccctaaaggatgacatcaaaggccacttgtcagctagacacacccaactggactctatttaaatgagaaataaaattcagctattttaagccactgagatggagaggatattctgaagttgtgactagtataatttaccctaaaaaatataccgcactgaaaaacagaaaggttactgttgcctttttcacgcccacaaagccaagaagtatcttagatagtgtggtgtagcaaaaacaacataaatttgggattaaacatgtttgggttcgtatcgcagttccgcagtctactaaatgcatgactttaatcaagtaatttaatttctctgtatttcaatttcctcatttaaaacataaggatattactgttaactgtatggattgtcatgaggattaaacaaaatacattacatgcccttggcacttagtctgtgctgmcactgtgtaagtctcatgggtacctaagaatgtggagctgcacaggtcatgtgacccagtccagcctacttgctgtagctctcaccaaatggacccactgagatgggaagt

SEQ ID NO: 480260 - DNA, 613 bp, Homo sapiens
tgcctggagaaaactctgagggctaaggggtggacagagctacaagaccgagaatcttgaatccctaaaggatgacatcaaaggccacttgtcagctagacacacccaactggactctatttaaatgagaaataaaattcagctattttaagccactgagatggagaggatattctgaagttgtgactagtataatttaccctaaaaaatataccgcactgaaaaacagaaaggttactgttgcctttttcacgcccacaaagccaagaagtatcttagatagtgtggtgtagcaaaaacaacataaatttgggattaaacatgtttgggttcgtatcgcagttccgcagtctactaaatgcatgactttaatcaagtaatttaatttctctgtatttcaatttcctcatttaaaacataaggatattactgttaactgtatggattgtcatgaggattaaacaaaatacattacatgcccttggcacttagtctgtgctgccaytgtgtaagtctcatgggtacctaagaatgtggagctgcacaggtcatgtgacccagtccagcctacttgctgtagctctcaccaaatggacccactgagatgggaagt

SEQ ID NO: 480261 - DNA, 445 bp, Homo sapiens
agagctgttggacacaagaaaacagatttatagctgcatctgctcagctattcctcttttagtggtatattggggttaggatgtgaggatgaaaargcttgcacggaaaatgtttctgtgcactctttttcctgcacaaaccccaattagtgactttttctctccaaattatcctttttagtttgttgtgagtgtttctgccagcaagggttgtagagttgcagagccagccagctaatgtgcctggacccacacctgagggttttcattggcaattagagtggaaataatttctcttctctttaaagggcttgtgtaatggtgtctctaactctccctcaagaatgccatgtcgcatccctactcattagagtggattaatctgagggtgtcacttttctgacagcaaatttcacacatttgaactaacaagcttcaagttgtg

SEQ ID NO: 480262 - DNA, 445 bp, Homo sapiens
agagctgttggacacaagaaaacagatttatagctgcatctgctcagctattcctcttttagtggtatattggggttaggatgtgaggatgaaaaagcttgcacggaaaatgtttctgtgcactctttttcctgcacaaaccccaattagtgactttttctctccarattatcctttttagtttgttgtgagtgtttctgccagcaagggttgtagagttgcagagccagccagctaatgtgcctggacccacacctgagggttttcattggcaattagagtggaaataatttctcttctctttaaagggcttgtgtaatggtgtctctaactctccctcaagaatgccatgtcgcatccctactcattagagtggattaatctgagggtgtcacttttctgacagcaaatttcacacatttgaactaacaagcttcaagttgtg

SEQ ID NO: 480263 - DNA, 445 bp, Homo sapiens
agagctgttggacacaagaaaacagatttatagctgcatctgctcagctattcctcttttagtggtatattggggttaggatgtgaggatgaaaaagcttgcacggaaaatgtttctgtgcactctttttcctgcacaaaccccaattagtgactttttctctccaaattatcctttttagtttgttgtgagtgtttctgccagcaagggttgtagagttgcagagccagccagctaatgtgcctggacccacacctgagggttttcattggcaattagagtggaaataatttctcttctctttaaagggcttgtgtaatggtgtctctaactctccctcargaatgccatgtcgcatccctactcattagagtggattaatctgagggtgtcacttttctgacagcaaatttcacacatttgaactaacaagcttcaagttgtg

SEQ ID NO: 480264 - DNA, 409 bp, Homo sapiens
gcatgcttttcaagatcagttgtatgcaaaaattggatgtgctctatggataataaatagcatgtgttaaaagtaaaagataagtatgtttagtctagtctagactaatcacttgttaactctctgtcaaggtgacaatcgggctgcagatgtgtgtgtatgtgccatacacatttgaacaagtctgaaaaaataagagctaagttgaaatgtgatagactgcacttaagagctgaatttttccagcaatgaggcataaggaggttaacacagggtagggatgccggcatattacaaaaagtgctggccaaaggctgggtgaattaaaagccatccatctcttagctgctgaggagctcagctycactgtcactttacgaccaaaatgctgggagttcactgtttccag

SEQ ID NO: 480265 - DNA, 409 bp, Homo sapiens
gcatgcttttcaagatcagttgtatgcaaaaattggatgtgctctatggataataaatagcatgtgttaaaagtaaaagataagtatgtttagtctagtctagactaatcacttgttaactctctgtcaaggtgacaatcgggctgcagatgtgtgtgtatgtgccatacacatttgaacaagtctgaaaaaataagagctaagttgaaatgtgatagactgcacttaagagctgaatttttccagcaatgaggcataaggaggttaacacagggtagggatgccggcatattacaaaaagtgctggccaaaggctgggtgaattaaaagccatccatctcttagctgctgaggagctcagcttcactgtcactttasgaccaaaatgctgggagttcactgtttccag

SEQ ID NO: 480266 - DNA, 409 bp, Homo sapiens
gcatgcttttcaagatcagttgtatgcaaaaattggatgtgctctatggataataaatagcatgtgttaaaagtaaaagataagtatgtttagtctagtctagactaatcacttgttaactctctgtcaaggtgacaatcgggctgcagatgtgtgtgtatgtgccatacacatttgaacaagtctgaaaaaataagagctaagttgaaatgtgatagactgcacttaagagctgaatttttccagcaatgaggcataaggaggttaacacagggtagggatgccggcatattacaaaaagtgctggccaaaggctgggtgaattaaaagccatccatctcttagctgctgaggagctcagcttcactgtcactttacgaccaaratgctgggagttcactgtttccag

SEQ ID NO: 480267 - DNA, 538 bp, Homo sapiens
caagagaaaggtttgtgtgccaggagaaaacctgaggcctgccacctatagcttccaagacatattggggacaattgtggtctgggtagggtttgctttcccaaaagctcacaggtggtcacagcagcaccagacyttatgcttctcttgttgcaacctctcttctaaatgcctggaacagtgctgggcacaaaatcatccaagcatagttattgatggcttgattacaatttcctagcaatgagatgcacacagtttacaaaatgtctgcaaatgtggtgattcttaccttccaagtctcatgatatcacaaactgaatagcagttttgcctcacatccttttccaaagaggtcgccaatgttgattcatccctttcttggtgaagtttgcataaatgagggtgggactcaggagaatgtgtcaaggaactggcccaaggtctctctctgttttggccccattgtgcctctctgatggccttttgggaagactctggcctgagacccaggccttcccctgcatctggggaggcactg

SEQ ID NO: 480268 - DNA, 383 bp, Homo sapiens
aacctctcttctaaatgcctggaacagtgctgggcacaaaatcatccaagcatagttattgatggcttgattacaatttcctagcaatgagatgcacayagtttacaaaatgtctgcaaatgtggtgattcttaccttccaagtctcatgatatcacaaactgaatagcagttttgcctcacatccttttccaaagaggtcgccaatgttgattcatccctttcttggtgaagtttgcataaatgagggtgggactcaggagaatgtgtcaaggaactggcccaaggtctctctctgttttggccccattgtgcctctctgatggccttttgggaagactctggcctgagacccaggccttcccctgcatctggggaggcact

SEQ ID NO: 480269 - DNA, 505 bp, Homo sapiens
ctctccttgcccctccctgcctcctagagttccacccttgctcatgcctccttgtgggtctgcacacacctgggccccttgagaaggctctggaggggattgctggctgcattcccttgaagaccaacacctctctccaggtcaggaaggccttaccctcaagaactycagctcagcatcctctccccacagtgcagagctgagccggtgcatctctgagacttcaacctggacccgtagagcggtcatcctctcgatcagactcgctgggatgtaatcttcaacgtgaaagtatggcttactctccacctgctggaagtaagatgtagaagggaagggcacaatccagacactggccgggggactctgagaggaatgaaaacattatctgtagtcacaattccaggagggcgccagagaaagacacttcctcgaggtgcccacctgggatattattttctactatattaaaaacggggccaaaccctaggacatgaacagaaaa

SEQ ID NO: 480270 - DNA, 275 bp, Homo sapiens
gtacctaaataacaggccaaaataagagtaaattatcaaatagttgatgtgtatctacttaggaaagggcactggcttctactgaacttggctctgtgaggagaaaattgtgccagaccaatttaatttcctctcctagtacrgggacaggttatgtccaaccaacaggaagcaatagtaaaaagaatgttacaataggtcagccatgagaacaccaaaatctggaatgcaaatttgataagggatttgacaaggtaaggatatatgcgggtaca

SEQ ID NO: 480271 - DNA, 608 bp, Homo sapiens
agagaatgctgacaaagtggtacatgggtgtgtgaagccgggagtccaggcagaccaccaggaatatcagcaggtttcccaacacagtcatgaggtaaatgagaagcaacaagaggaagagataaatctggacaccctggagatgggggaagcccaagatgatgaattctgytacctggctccagttccctgtgtccattgctcaccattcatgtccctagatgtgaagtgtggaaggataggaaagaaagttgaactatagggttctaacaagaaggcaaccctcaaattactattgccctcccttctctcacctccagagtaaagccctctaagtaaatgctttgagaggtcaacatttcaattccatccctccctgcccttcctgtcaacagcctccttcagactattcacctttatgtttagtcttccctgattaacacagctcatttttggccttcctaatccatcctgtaacccagttgactttctcaatagaatctatatagattttagaaatttaggtatttctaatccaaggtatatattaacatttatacatattgttcatctaaggtaaaaatcatcatttatactgataatatatt

SEQ ID NO: 480272 - DNA, 608 bp, Homo sapiens
agagaatgctgacaaagtggtacatgggtgtgtgaagccgggagtccaggcagaccaccaggaatatcagcaggtttcccaacacagtcatgaggtaaatgagaagcaacaagaggaagagataaatctggacaccctggagatgggggaagcccaagatgatgaattctgctacctggctccagttccctgtgtccattgctcaccattcatgtccctagatgtgaagtgtggaaggataggwaagaaagttgaactatagggttctaacaagaaggcaaccctcaaattactattgccctcccttctctcacctccagagtaaagccctctaagtaaatgctttgagaggtcaacatttcaattccatccctccctgcccttcctgtcaacagcctccttcagactattcacctttatgtttagtcttccctgattaacacagctcatttttggccttcctaatccatcctgtaacccagttgactttctcaatagaatctatatagattttagaaatttaggtatttctaatccaaggtatatattaacatttatacatattgttcatctaaggtaaaaatcatcatttatactgataatatatt

SEQ ID NO: 480273 - DNA, 493 bp, Homo sapiens
cacttgaatcattttctagctcaagtctgtcatttttttcccctgaccatctaagttaaatactgttctttcacacttctaaattctcagtagtactttctcactgtccctccaattatatcctgtaatgcactgcaattattttccaggcatatgtcttatcactccaaggcaactctcygtgagctttttgaaattaatgaggaaacttcataccatgtcctacctcctagagtacttagcacaatgcctgatatatccgagttatggtgggtaatgaaaaagagggcaattgagatgacttgtgcagctctttagctcatcagttactcatctactcctattcctgatattggaatcagggctctcataaaacctaccacatatacaaatttacatttatcttacttaggtccattgaaatcatagtttattcccctaattctagaaagcttttagaatatatgccttgcattcttttcttcagatacca

SEQ ID NO: 480274 - DNA, 518 bp, Homo sapiens
cccgtctaggatgtgaggagcgcctctgcctggccgctgcgcaaccttccaagtgtgaagtgacagccttgtgtgtgatcttttctgtcttccccaagtttgcattttcaatattaaagtttactttttaattaaaagttaaaaataaatwaattaattaattaattaaaaataaataaaaaatgggcaatggacctgaacagtcatttctccaaaaatagaggccaggtgtggtagctcacacttgtaatcccagcactttgggaggctgaggcaggaggatcacttgagcccagaagtttgagaaaagccttggcaacataacaaggcccctgtctctacaaaaaagttttaaaaatattagctgagtgtggtgccatgcacctgtaatcccagctacttgtgaggctgaggcaggaggatcatgcatgcccaggagtttgacagcagccttggcaacataataagaccctgtctctacaaaaaagtttttaaaatattagctgagtgtggtgcca

SEQ ID NO: 480275 - DNA, 695 bp, Homo sapiens
tgtaatatatatatatatatataaatttttctgtctcaatggttgcagaacactggtggaaatgggtgagtccatttttgaagagaacaaaccaactgatgagctacttgaaagcggaaatgctgctttgaaaaccctccagtgcaagaaccaccttcccttacttttgtggcgacagcagttctctatgcagctatgtggagattttaatggtgtttatctgggacactttccagaagtgtcttgcagcagaaccttgctataaagttaaattgtgtgaaactaacaatgatttttatacgtgcaagggagattagaaatatcccagacataacaaaagcaaaatgagcacaatctgcttcccatctttaagatagtttcaattccagagggaatttaaaagtttggagtttaaaaagccaaamagatcttttatcataggtctaatgtattagtggccacgtgtacgcaattgatcaaagcaccctggctatttttataactcgctggtagttcctacctcaattgaggtaatacaaatgatcgttcggctctggtcattatgttcacagagatatggtgatattttttaacttctcaccttagaattggttttaatttcaagagttgtgtttccaagatttctatattcctctaccacccacaaactccacaattcccactgtaaacaacag

SEQ ID NO: 480276 - DNA, 695 bp, Homo sapiens
tgtaatatatatatatatatataaatttttctgtctcaatggttgcagaacactggtggaaatgggtgagtccatttttgaagagaacaaaccaactgatgagctacttgaaagcggaaatgctgctttgaaaaccctccagtgcaagaaccaccttcccttacttttgtggcgacagcagttctctatgcagctatgtggagattttaatggtgtttatctgggacactttccagaagtgtcttgcagcagaaccttgctataaagttaaattgtgtgaaactaacaatgatttttatacgtgcaagggagattagaaatatcccagacataacaaaagcaaaatgagcacaatctgcttcccatctttaagatagtttcaattccagagggaatttaaaagtttggagtttaaaaagccaaaaagatcttttatcataggtctaatgtattagtggccacgtgtacgcaattgatcaaagcaccctggctatttttataactcgctggtagttcctacctcaattgaggtaatacaaatgatcgttcggctctggtcattatgttcacagagatatggtgatattttttaacttctcaccttagaattggttttaatttcaagagttgtgtttccaagatttmtatattcctctaccacccacaaactccacaattcccactgtaaacaacag

SEQ ID NO: 480277 - DNA, 643 bp, Homo sapiens
gcttgaaaagatatactgtagttgctttagtataagcaattactaaaaaattaattgatataatttaaaattttaggcaaccttaaagcccacaaatagtaatcatacatgaaaatgttgtcttgactatattttttggggaaattcatattctatataggttgattcagcttttactcagaatatttattttctgtactttaaatcattatagccaaactgcttctagattcttacccccagtataagcaggaaaaggattaaaggatacatgtaaagatcataaaggacactttaatactatacttttttactttgttcctaaaccaaataatttaaaaagaaaagaaaaggaaaaaaagataaaaagcaagctgagaacatgcaacccaagctattctaagcagttcccttttttataaaggaacaggaaataygtatagtaaagctgggagacagtaaacatgtatttctggctggcatttgtttagggcatcagtaacgtgtccaggcattcagacaagtccccataactggcacatttcagacaactctagtttgccaaataacatttttattgtttgctggaaccttttaggaatgacaaggaactatataattttcattgaacaacctctaaaga

SEQ ID NO: 480278 - DNA, 610 bp, Homo sapiens
acaactaatcataactaaaggattttcaagttcttttctgagttttgttactttcttttcttttaaatgatacagaaaaacatatattttattctcccacataattatttcacactgtttctttgaatgatgattctttgacagttttacttaaaattctttgttgcattttcattggcagtatcatgtctaattttatgtgacaacttgttcaggtgataatgccagggtcccctaaaatagttacacatgctttctcctggggataatacagtttatagaaatgtccatagaccttgatacacatgtgttcatccaggcatcttagatagtttcaaagactggaagtctaccacaactaccactgagggataagaaaacctaccatcttgccttattctgtccatcactctggaatggagacatttccttcattcccctcttagttgcttgtagaaaaggaacattgcatccccarggagagggttacatattcttaagactcctaagaccgagccatgggctggattttcctcctccatgactggaaacccatatgttggttattttctgaaccattccttaccttgcctttcccttatagtactgg

SEQ ID NO: 480279 - DNA, 496 bp, Homo sapiens
ttgggtagagcaaaaattaataaaaggcaattttatttgaaggacagggagcgagaataaaaaagagagcgagcaatgctctatcagacactgacaatattgacaatggtccaaagtaacctaaattataatattttgtcttttctatttaagagatgtcatataaatgataaatatagcatgtcatatcataggtctattaaattttgcagatcatagtaaatttcctgaaaatagatttagatatagaaccatagtaargattgaaaattgcaaaatcaatatacatggaaggcagattacttctatataacatattctggaattcacatggatcatgtcacattcatgatgtataatcaatgatagggtggcagaattatttggaatttcattagaagattctgatgtgaataaaatgaattttattccttgtgggtactcaaggaattgagaaattgagcaaggactccagatccttagaattttattgtca

SEQ ID NO: 480280 - DNA, 226 bp, Homo sapiens
gctgttggctacctagaaggaaccaccatggcagtctctccatctcacaatgaacccatgttaacwcagaagccaagcaagacagaatgaggaaggaaatttctgctgcagcaaatgtgagagaatacaatctgaagacaatgtgaataatctctctttctttgaatcagtcatgcaactgttcctattagcacatgtaattgagatggggatgtgtatgcaaatg

SEQ ID NO: 480281 - DNA, 490 bp, Homo sapiens
aagctatacagtctgataatcattaaaagtttcaatagcatagtaagtcaagaaatcagttgcaaatggttaagaaagctccatgtcaccttaatatgagccttcttgctgtctgctcattgtactccttcataactayaaaaacaagttaaataatgtagactatgattagagactccccagaaatgataattttcagcatttcgggtccagaaggataatttggcaaacgctattgattggtctaacacatctacaggcccttacccagtcctcagaataaattcccattccaaatgtaggatgacagcagagttccgctcctcaacccaaacacagaagaactcaaagaggaaatgtttttccccttaaataaatggcacctttgatgttttccagcaacttctgtggttggaactatttttcaaatagttggatgacagcagctctttatgaaacttaaggtatgacaatcaggtttattttggga

SEQ ID NO: 480282 - DNA, 646 bp, Homo sapiens
actttgggcagttaggatgtgataacatagattcatcagttgtaacaaatgtacccctttggtgggggatgttgttaatggggaaggttatgcatgtgttggagtagtgggtatatgggaaatcattgtacctttctctcaattttgctttgaacctaaaactattataaaaatactctttaaagtaaatattctttacattaaataatctactgttgtgaccttaagacacattctaacaatgagacaaagtagtcaaaattagaccatttcatgtagctcaattcaattacacaaatatttatctgtgggwaatattaccaagtaaaagacaccttgaacaagttacaatttagtagggagccaatcaggttaatagacatctatctgcctcatttagcctcaagtaccttaggaagtatccagactaactatagataatatacacattatatagataatatataattatagataataaaaaacatatatgtaatcaggttagaacaaattaagtcattcaaatatggagtatagaaagaaggtgttttctatttttcttttctgttgcccatgctggagtacagtggcaccaacatggttcactgcaaccttgacctcctggggtcaagaaatcctcctgcgt

SEQ ID NO: 480283 - DNA, 629 bp, Homo sapiens
aaaaggttcgccacagcataccggaccaagagcaatggtaatcacctgcttgaagttgcttcagcaccgtccatattacctttaatgctagcctaaagtagagcccttactaacttgtctagaaatgtagaagcatagaattytagaaccagagtgaatacaatgatattgagataaggaggttcataaaatctcaataacaagattcataatgagatattaacaatataatgaaattcatagaaaattagagaaagcagaagaaatttctagggaagagaaagatattgcttactcttaaaatactggcatcatttatgaatatgttgaaaaataagccagtcaaatttggtttagaaaatgtcatcttgttttgcatgaagaactcgttttctgtgttccagagctttatataaatttatcatttatatgacataaacacaaataatggccacaacacaactaagcatattgatttttttaatattgaccctgctctgttttttggaaagatcccctgaattaaggttatcagatgtattcaatctgaatgataatctaggttgaattcatatcccatgcaaatccctgccccacatgtgtaccttatcacatcaaaatgaaaagag

SEQ ID NO: 480284 - DNA, 629 bp, Homo sapiens
aaaaggttcgccacagcataccggaccaagagcaatggtaatcacctgcttgaagttgcttcagcaccgtccatattacctttaatgctagcctaaagtagagcccttactaacttgtctagaaatgtagaagcatagaattttagaaccagagtgaatacaatgatattgagataaggaggttcataaaatctcaataacaagattcataatgagatattaacaatataatgaaattcatagaaaattagagaaagcagaagaaatttctagggaagagaaagatattgcttactcttaaaatactggcatcatttatgaatatkttgaaaaataagccagtcaaatttggtttagaaaatgtcatcttgttttgcatgaagaactcgttttctgtgttccagagctttatataaatttatcatttatatgacataaacacaaataatggccacaacacaactaagcatattgatttttttaatattgaccctgctctgttttttggaaagatcccctgaattaaggttatcagatgtattcaatctgaatgataatctaggttgaattcatatcccatgcaaatccctgccccacatgtgtaccttatcacatcaaaatgaaaagag

SEQ ID NO: 480285 - DNA, 513 bp, Homo sapiens
gcatcaggcaatatggtatccttgtagcagcataaggcagataggacatggaaaggaatcaaaacctggacagagacccatcagcagagcaaaacagtagtgaaaaaaaaawtctcgttaaatggcatacaggtagcttcatcattatatatgggacacagtagtaatcaatacgtgtttaataaataaaactgagaaaaagtatattactataaatattagcctgaaattttcacagataagaaaaaactcatctgcaggccatggaaagtttagtaataaatatttgagaggccagggtgaacagcaaaaagacaacagagttttgagcctaagtctccagatctaccttacccaaatgacttattttctgcacatctgacttttttgacttgcaaaatgaaaataactgcattagtcagatgtctattgcaacgatgcattttaggaaacaatgcaaaaatctcagtggctttctacaataagtgtacatttctcagtctgcaggtcctc

SEQ ID NO: 480286 - DNA, 629 bp, Homo sapiens
taaacaaaggaacattaaacagtagttgcaaattctcctatggcatcttcayagtgcatcctatatttattggaaggggtaaagaaacataagacccattgctcaagaagaatttttaaaaccatagttgattaattatttctgcttcccataaaaataaaaaagaaaacaataattgcatggtgttttcaaaggacatcctattacaaattccttgaaaacacattgcccatgaatatatgataatttgtcatgcagatggccataacttattcacccgtttttctatttagttaggttataaattttgttgcaagtctgcaaatacagtactgtgtgggagaggagtgatatattgcctcacccattgctgggttcatggctgggaccctaaaacaatagacagattaacaaaacaaaaatgtacacatttatttaaaatcagtttcacaagacacagaaggtttcagaaataatgacctccccaaacagggcgcgctgcatttttatgcacagtcttgcagggtactattggaggacaaaaggatatagtataaaggtaataaactgggaggacataaataagatctgtttgttcagactctttgtgttcccatgtgacacttctt

SEQ ID NO: 480287 - DNA, 589 bp, Homo sapiens
cataaaataaactagagtcatatgctgattgcaaaagttgttcagaaagggtagtagagtagcatgtgcaagataagcctcctgtggcatatactgtggtcatatttgtctgatccaccttctgtttaaaatgttagtcttaggggaagataattgaaaatgccctctttttttcctcctcttcctcctacctgttcagtctgggagttatttctctgaataaatatatagaaagagaaagaaaggtaccaagttgatcttgagagacgacttttgatgtggcataaaatttcactcttgtaagcttagaacattgtccctacccaggtaaatggtgggtgctattttgttgctgttaggtctattttcttcatctgttatttcgcatmacagtaaaacagatactcagatgacttatataactttcattagtttcattaggtggtgtctatagcattagatgctctctgaaaaaagaacctaaaacaaggtgtatgtaaagacattttatttgagaaatgatttcaggcagcagttaagtgggagacgggtaagatgaaacagagaagggcaaagcaatgggccgctg

SEQ ID NO: 480288 - DNA, 637 bp, Homo sapiens
ttatttaggctgtgtttggctacagtgagtcaataacaaacagcttaagatgagttcatgacaaaattctatgacatagcacctttctctttgaaaagaagatgaaagagagagagagagaaagatgagtaagtaaagaaatagagaaaggctggttggaacaatctcggttatctaatacctgaagaatgtcaagtcaaaccaactttgaataatcaatctgagcatgacacaaatactttgaaaataccttgccaggaaaaaccattcgggttttttatggtagctgaccacagaactacttttactgcttagccaagcaactcctccacactgctacagagagagcaggcaattctaatgcagaaaagattattccaaactcaarttgcttttttgtctctttgagatatggattttgatatacagttaaagtataaatgccaaaatataagtaaggttaaagtagcatggggatttatgtgggtgtgctcacatgcacacttgcaaactagaaaaatttttaaaaattatttagtcttgagcatcccatacagaagatatttataagaaatatataaatatatttagatatttatgtgtatactttcagagtatcaagagtatctttgatttt

SEQ ID NO: 480289 - DNA, 438 bp, Homo sapiens
atgcccacccagctttctactccagtgttctcatgttcctcatttgttgcttcactttctctggtacaaaaacaaaaacaaaaatacaggtgtgacagcagaagcccagacagcaaaagcaagaaaagacaaatgggattatatcaaactaaaagtttctgcagagcaaaggaaacaatcaacaaaataaaaaagcaatctatagaatgggaaaaaatatttwtaaaccatatatcaataaaaagttaatatccaaaatattatatgtaaggaactaataccactcaacagcaaaaaaaaaagcaagttacctgattttttaaaaatgggcaaagaacctgaatagattttttcaaagaagatatataagtgaccaacaggtatatgaaaaggtgtatgacatcactaatcatcagggaaatgcaaatcaaaaccaca

SEQ ID NO: 480290 - DNA, 438 bp, Homo sapiens
atgcccacccagctttctactccagtgttctcatgttcctcatttgttgcttcactttctctggtacaaaaacaaaaacaaaaatacaggtgtgacagcagaagcccagacagcaaaagcaagaaaagacaaatgggattatatcaaactaaaagtttctgcagagcaaaggaaacaatcaacaaaataaaaaagcaatctatagaatgggaaaaaatatttttaaaccatatatcaataaaaagttaatatccaaaatattataygtaaggaactaataccactcaacagcaaaaaaaaaagcaagttacctgattttttaaaaatgggcaaagaacctgaatagattttttcaaagaagatatataagtgaccaacaggtatatgaaaaggtgtatgacatcactaatcatcagggaaatgcaaatcaaaaccaca

SEQ ID NO: 480291 - DNA, 438 bp, Homo sapiens
atgcccacccagctttctactccagtgttctcatgttcctcatttgttgcttcactttctctggtacaaaaacaaaaacaaaaatacaggtgtgacagcagaagcccagacagcaaaagcaagaaaagacaaatgggattatatcaaactaaaagtttctgcagagcaaaggaaacaatcaacaaaataaaaaagcaatctatagaatgggaaaaaatatttttaaaccatatatcaataaaaagttaatatccaaaatattatatgtaaggaactaataccactcaacagcaaaaaaaaaagcaagttacytgattttttaaaaatgggcaaagaacctgaatagattttttcaaagaagatatataagtgaccaacaggtatatgaaaaggtgtatgacatcactaatcatcagggaaatgcaaatcaaaaccaca

SEQ ID NO: 480292 - DNA, 605 bp, Homo sapiens
ggattctggaagctattatttttgtgtctggaagctttgtcatcttaattattctgataaaagcatctcttttcctcgtgagaacgccatgcccaatcctagagcttcaggggatggactggcaaaaaaaaatttatgaatgttggaatgtgtggcctttattaaagtcctacaagtaaagggacttggcccatctgcacacagaaacaggacagcacccatctttgtcaagaggggccctcactgcctggtcatcagcaatccaagatggctgacagtcaggtaacccgccttgcaccctgctgaaaagccaagtcctctacccttgttgcagttggtttgagcagaggtaaaaagatgaaaataagatcaggagagaagcagacaaatggaggaagcctaattccccaggcccctcccaratatttcctgcacagtattctctactgacaggataaaaaattccccattaaaaagtgctatccagtggaatccttagggaagcaagtttatgctggcacttcctcaccatgccagttgattgttttatgctgctctgaggcggggagaggaggtaaagggttaaactgatactgtgggctaag

SEQ ID NO: 480293 - DNA, 557 bp, Homo sapiens
gctggataagaacccagagatacaatgcagtcttctcttagagaggtctcattgacttgcccagcctgcacagaggagcaagggcaaacgtgtaactgacaccaaagactctaggggggtccagtcttaataattggagctaatgccacgctggactagactgatggtcactccaacctatcatggcatttgcaaaagcatctccaagagttatttggaggaggtgaggtagctgcctcctggaatgctgaattcaatgtttggggaagtattcccgacacagaacaactgctggagtcacttggtaagagctgggtatagcttstgagcctcagccatttgcttcattgctcaagctgctctgcctccaacattcagcagtcaatgggggtataagaattagtcaccgcatgaaaaaccagtggatctgcatggggcatagtaagctattaattagctgatgcttgtagagcactttgaagaacaaacatgttatgtaactgctaattataattaccatcctcagcctgctacctttcacaaagtctgtggctcca

SEQ ID NO: 480294 - DNA, 538 bp, Homo sapiens
cgtgcccatgagcacaggtgagttgttgcaacagatactgtgagaaaaagtttgctgacccctgagctagagggcagagatgagagggagatttacgttcattttgcatctttcamtttcatattattcaatgaaaaacactctgggcaagcttctggggactcatcgagcatccatgttccaggcctctgcactgagggactaacattattcaccacaggtcattgaccattagcatgagctattcctgcttctgcattagccctgctccggatgaggctgcagcactaattccattgtgtttcttggtagttcagaaggaagaaattttccagttaatcactggctgtaaagtcaccctaccctggctttcatggaaaaccatgagaatggctgaactggaaaaggggaattctgctggtttgtttccgtgggcctctgaaaagatctttttaagcttggaaaagttcaaagagaaccctcttctcccaatcttcaaatcagacggattgccagattgaggtgttgtgtttctctt

SEQ ID NO: 480295 - DNA, 538 bp, Homo sapiens
cgtgcccatgagcacaggtgagttgttgcaacagatactgtgagaaaaagtttgctgacccctgagctagagggcagagatgagagggagatttacgttcattttgcatctttcactttcatattattcaatgaaaaacactcygggcaagcttctggggactcatcgagcatccatgttccaggcctctgcactgagggactaacattattcaccacaggtcattgaccattagcatgagctattcctgcttctgcattagccctgctccggatgaggctgcagcactaattccattgtgtttcttggtagttcagaaggaagaaattttccagttaatcactggctgtaaagtcaccctaccctggctttcatggaaaaccatgagaatggctgaactggaaaaggggaattctgctggtttgtttccgtgggcctctgaaaagatctttttaagcttggaaaagttcaaagagaaccctcttctcccaatcttcaaatcagacggattgccagattgaggtgttgtgtttctctt

SEQ ID NO: 480296 - DNA, 577 bp, Homo sapiens
tttctcttttagaaattctgacaaagattaatgatgtatcactgtttaatgatacctgtgtgagatggcaaataaactcaagaagaataaaccccaagatctcatatgtggtaagtaaagtgatctactttttcctgctaggacagacacgtcacccatgggaatatgagtcagagggacttgcttccgtgagagcttctcaatctaattgctgtttttttttctttttttcttttattttttttgtgagacagtctcactctgttgcccaggctggagtgcagtggtgggatcttggctcactgcaacctcagcctcccrggttcaagcgattctcctgcctcagcctcctgagtagctgggattagaggtgtgcactaccatgcttggctaattttttgtattttcagtagagatggggtttcaccacgttggccaggctggtcttgaacttctgacctcagataatccacctacctcggcctcccagagtgctgggattataggcatgagccaccgcgcctggcctcaatctaattgctttctgatcccattgtcatttaaaaagagtggatgg

SEQ ID NO: 480297 - DNA, 577 bp, Homo sapiens
tttctcttttagaaattctgacaaagattaatgatgtatcactgtttaatgatacctgtgtgagatggcaaataaactcaagaagaataaaccccaagatctcatatgtggtaagtaaagtgatctactttttcctgctaggacagacacgtcacccatgggaatatgagtcagagggacttgcttccgtgagagcttctcaatctaattgctgtttttttttctttttttcttttattttttttgtgagacagtctcactctgttgcccaggctggagtgcagtggtgggatcttggctcactgcaacctcagcctcccgggttcaagcgattctcctgcctcagcctcctgagtagctgggattagaggtgtgcactaccatgcytggctaattttttgtattttcagtagagatggggtttcaccacgttggccaggctggtcttgaacttctgacctcagataatccacctacctcggcctcccagagtgctgggattataggcatgagccaccgcgcctggcctcaatctaattgctttctgatcccattgtcatttaaaaagagtggatgg

SEQ ID NO: 480298 - DNA, 658 bp, Homo sapiens
taatcaaagaaattatcctgaggctaaacatatagagaatggttggattaatggatttaataaacatattttctgctacagattcaagccacactcttcacccacattttgacaaaaggcataatcacagcactgtgtgcrctcatgctgtccttggtaggtatgccaaacgataatctaaatgggattttgaaatatatacacgctaaaaaaatgtatatttttggtctatctctttcctaaaagtgtatatttttggcctatctctttccaatgaaaatagctaggagattatattaaaatatgcatacaataaaagagtttatattaataaaagaaaagagacctatcattcaattttcttcgatttccttgtattcagggaatcaggtagactcgcacaaacacacatccatacaaatacatactgttaaagtgaaggagagttgaacaggaactccacgactgaaaggttagaagactgtgctaaaggatagcatattggaaaatacaaagggcaaaggaaaaacaagagtcattggaaaaccgatgttaaaactgaggacatttacttttaaaaagctaaaattgaagcaaactgttaaatcttcttctctgctatggagaatcactgaccattggcagagaacgttgaaaa

SEQ ID NO: 480299 - DNA, 486 bp, Homo sapiens
atgggattttgaaatatatacacgctwaaaaaatgtatatttttggtctatctctttcctaaaagtgtatatttttggcctatctctttccaatgaaaatagctaggagattatattaaaatatgcatacaataaaagagtttatattaataaaagaaaagagacctatcattcaattttcttcgatttccttgtattcagggaatcaggtagactcgcacaaacacacatccatacaaatacatactgttaaagtgaaggagagttgaacaggaactccacgactgaaaggttagaagactgtgctaaaggatagcatattggaaaatacaaagggcaaaggaaaaacaagagtcattggaaaaccgatgttaaaactgaggacatttacttttaaaaagctaaaattgaagcaaactgttaaatcttcttctctgctatggagaatcactgaccattggcagagaacgttgaaaacagctgtcc

SEQ ID NO: 480300 - DNA, 658 bp, Homo sapiens
taatcaaagaaattatcctgaggctaaacatatagagaatggttggattaatggatttaataaacatattttctgctacagattcaagccacactcttcacccacattttgacaaaaggcataatcacagcactgtgtgcactcatgctgtccttggtaggtatgccaaacgataatctaaatgggattttgaaatatatacacgctaaaaaaatgtatatttttggtctatctctttcctaaaagtgtatatttttggcctatctctttccaatgaaaatagctaggagattatattaaaatatgcatacaataaaagagtttatattaataaaagaaaagagacctatcattcaattttcttcgatttccttgtattcagggaatcaggtagactcgcacaaacacacatccatacaaatacatactgttaaagtgaaggagagttgaacaggaactccacgactgaaagkttagaagactgtgctaaaggatagcatattggaaaatacaaagggcaaaggaaaaacaagagtcattggaaaaccgatgttaaaactgaggacatttacttttaaaaagctaaaattgaagcaaactgttaaatcttcttctctgctatggagaatcactgaccattggcagagaacgttgaaaa

SEQ ID NO: 480301 - DNA, 481 bp, Homo sapiens
cctcttctttacatctccataaatgggcaacagcaaactggctatctgaatagatgctattttcttttggtttctcagaataatgtcttctattacccactagttgtaggtttttcccctaaatttaaataaatcatgccccctatgctccacctcctactgatttttcaactgggggtcacatgatacatctttatagttaactaatgattctgagccatttctgcccctgctgtgtcactagttatatctaaaagccagagttcacataaaattattaatgtcctttattatatagcaagataaataaaacttctattaaacaacaaaaagaggcaagttctrtggggttttttgtaattttatttttaattttatgtttgtaaaattactctagcagcagtttgtgggatccttcaagaagggacagatgctgaaacccacttaatagatattaacccactagttgggatgctaacat

SEQ ID NO: 480302 - DNA, 493 bp, Homo sapiens
aagattgtgagacttttaaagaccaagtctggaagtggcttaaatggctccagctcacacatcaccaccagatgtattcacacagacacatctagttgctaggagtctgggaagtaggttcttcctatgtgacagtaaggtgtgggcaatgaagatggttcaggggccacatgacattacttcctccacatttgctcaacctcaagaccattcaratataaatgccatgttgacatttctcagacttcacaaatgttatgcatttctattgccacatctcccagcttatacctctatagcacttttaacacacagttcattaatttcattacacacttctctgcacttttccagaagccctccaatatcaagtacagtctttaattactctttgtattttctagtttgtaatacatggtaatacttctaaaatgcttgttagatacactcactcacttaatattactaagcaattttttaccattttcctaga

SEQ ID NO: 480303 - DNA, 538 bp, Homo sapiens
ctggagtcaagttcagagttagtcactgcttctctatgagaccttctatgggacccttcaccactctgggctcagtttcctcatctttgtaaaatggggaggaaatcagcttctttgctgggtcataggaatccaagaacaaaatgtgtataaacattctttgcaaactgtaaagcacaacagaatgatgagaaatagttgtcctgacctcaaagccatctcctccaggaggcctcccaagattgctccccttctttctctgtcttcctaaagcacttagcttgcttttcctcagttgcttaccacagaacaggcactggccctcttgaccccgttttctatccttgagtgccacaagcccaggattatgyccccattcatccccaaagaccgcttctcttggagaaaatatattaatgggcacagtgttccaattttatgttattgagccatgcatttttcttaaattattttgcaccttcaacttcttatccgctaataagaggtcacaggcaccaaataagtgaccaaggacgct

SEQ ID NO: 480304 - DNA, 538 bp, Homo sapiens
ctggagtcaagttcagagttagtcactgcttctctatgagaccttctatgggacccttcaccactctgggctcagtttcctcatctttgtaaaatggggaggaaatcagcttctttgctgggtcataggaatccaagaacaaaatgtgtataaacattctttgcaaactgtaaagcacaacagaatgatgagaaatagttgtcctgacctcaaagccatctcctccaggaggcctcccaagattgctccccttctttctctgtcttcctaaagcacttagcttgcttttcctcagttgcttaccacagaacaggcactggccctcttgaccccgttttctatccttgagtgccacaagcccaggattatgtccccattcatccccaaagaccgcttctcttggagaaaatatattaatgggcacagtgttccaattttatgttattgagccatgcatttttcttaaattattttgcaccttcaacttcttatcygctaataagaggtcacaggcaccaaataagtgaccaaggacgct

SEQ ID NO: 480305 - DNA, 420 bp, Homo sapiens
ccccatgcctgtgggcagggaaacaaggcccttgagcaaaccccttccaaagccactagcccacagaggccctgtcgcccacagaaggagccagagcagttggcagagccccttcctcggctgttccgcttctgtttactgggtggcttttgttccctagcttcccatccagctaggctggttaatcagattctctgaggggagggctggggcatcagtgactttactgacacccagaggaattgcttcttgggaagcaattacytgtgacaggtgcacactcccagcggctgagcttgtctgtggctgaggatgccgtggagcctggggggacaggtccttgttgctggcttgtgctcagcagggacaccaaggtccactgctcctccatggttttcttggcctctgcaggaggaaaga

SEQ ID NO: 480306 - DNA, 578 bp, Homo sapiens
caatttagtcttatgagccacagctcagcttagactcaggctccaggaataggtccccaagacactctcattccccagtggttcccagcagtattgggacaaccaaaatcagcctcaaactgctcaggccttccccagggatatgacactyagcagctcctggggctgcccaggctgagaactacctatccccagccccagggagagagccccaagtctggctgtaagaacaaagtgaagccaaagactcaaaagcaggtccttgcctcccgtgactgcaggcacagcccagtgaggggcagcagggctgccaatggtcccctgaaggggcacccacttcctgggtttagcaccactgtggcctcaagaggccctaaaggagggttgtcatggcatgcaccatgggttcctcacatagttcttctggcccaggggaacacgtgtcctagaggcagctgctcctggcgtcactgttggtaggtccagatgaaggacaggcctctgcctgggagtgtcaggatgcagagaggctgcctcattcctgctgcggcagccagggtccccacacactcacactc

SEQ ID NO: 480307 - DNA, 521 bp, Homo sapiens
ctgcttttccacttcctattctgatatttcttacaaaagagaagacaagaaatagcttagtttcctagcttccaaaaataggaggtccacactgagttagaagaaaaaaaaccaaataatcattgtttttcttaagactgctttggaataatttgatttatgcatgtttttgtgacccctccagaatccctagagaaaacacagggcctgtctgctttactagagtatgatactgaaagtctgaggctggctagagagcagcttgtgtaggacaaaggacattgcattagcaaacccaactttggttgataatcacagaagcaagtagtatgaaacaccaccaggggatggagaaacacctggacaaagaattgatttattgaggggaagataagattagaagaattcaaagcccttgtaagaatactctcactgcagagagcttgatgatatggttgtgtgagctagaaayagaaggcagtcctggtaccagagggagtgtctctcctgtaaaataaaca

SEQ ID NO: 480308 - DNA, 572 bp, Homo sapiens
ctcctctttgcttgtactgattctgattattgcctaagaacagatatagattcaactctcagggaaatattttgctaggatccaaagtatttttctggagtttcctgcccatgcatcctggggtcattccttaccttctaatcctcctgtcacaagccttcctgaaaagctttgatttcctctttccattcatttcatttcatttcattttgatttcctctttcagaaagtctctgaaggctgtgacatagtcayggcaggcaaaaccctcttacaccgtctcccaggtcacagggtctcaatagtggccctacagttacataaactgtctctacagatggaaaaactgaagcaagagagagacaaggagaaaatcatttaaatataccatacctctattcccaagaagatggagaaaggatttgcttttctatacagttcttgagagaaaacctcagtttatcaactccatttaagtatcattatttatggcaataaataactttggcaaaacttgctaatacacatgtgaccttagaatgtgaaattattaatttatatcagtgtaattc

SEQ ID NO: 480309 - DNA, 572 bp, Homo sapiens
ctcctctttgcttgtactgattctgattattgcctaagaacagatatagattcaactctcagggaaatattttgctaggatccaaagtatttttctggagtttcctgcccatgcatcctggggtcattccttaccttctaatcctcctgtcacaagccttcctgaaaagctttgatttcctctttccattcatttcatttcatttcattttgatttcctctttcagaaagtctctgaaggctgtgacatagtcatggcaggcaaaaccctcttacaccgtctcccaggtcrcagggtctcaatagtggccctacagttacataaactgtctctacagatggaaaaactgaagcaagagagagacaaggagaaaatcatttaaatataccatacctctattcccaagaagatggagaaaggatttgcttttctatacagttcttgagagaaaacctcagtttatcaactccatttaagtatcattatttatggcaataaataactttggcaaaacttgctaatacacatgtgaccttagaatgtgaaattattaatttatatcagtgtaattc

SEQ ID NO: 480310 - DNA, 552 bp, Homo sapiens
tggtaccaagtacactgtgagagctgatactggagttggcagatgccctggggcaggcrccatgcagaacacacagaagtggggttagtgaaaaggtcccttcgaattccatttcgtttcccttaaaaaacaaaaacaaaaaagcccatactttgcaaagagacaggacgagaaataagaagttaaagaatttaaaatgtctccctttttctcagagccaattgtaaaaaagtgctcagggttccccacccccaccctgcatttctttagtgtaggtccttttggctttgatggaagcagcagaaacagagctgggtccctcgcaatgggaaatttatttcctgaagttggagccacagggagtgtaagaggtactgtggttccaccatccatgctgggtccagctcctctgaagagctattccaagaggtcctgaaaaagacatgcaccatattaccgacagaccacaacactcctatttcaaaagcaatcacctagtttctgggcttgccaaatcttatggtcattaagtcgccttggccctggcatatc

SEQ ID NO: 480311 - DNA, 500 bp, Homo sapiens
ttacaataatctactctgctaagatccatccatgtcctgccctagtcaaatcagaaagctatatggggatacaaagctactatatgcttccaacacttaatttatcactaatctttgcagtttcctcatgaattttagattggtttgattaattctttgggaagaacctagtgaaagccctggaatatcactgcccccctcccaagatctagataaattcgtctccatttaaatgtatgttctcaccctccttgacctagcaccccataatccattacccaatcatattccacagatatttttgctaacataaagtaggaaaaaatattctttttttttagaaagccttttcctttgatatttgactttgtaactgccccacsaccaccatatacacaggcatgttggcattttaattatggcactgtggaaaatgaaggaaattaggaatgtggaagtaaagaattgacatgtcccttgtagagtaagtcctcagagag

SEQ ID NO: 480312 - DNA, 641 bp, Homo sapiens
ggttttgctcagagaggtatttctaaatccaatatttataaaaagaaaaaaagtttctagttattttttatttcattttcgcataactttgatccaaatggaatttattttggtgtgaaataggacttcaactttacccccctctaatgaattgttcactttctgggggctgatcttaagcttttagttttgaaaaaagctgcataaaatcaccacacggaactaagtcacacgtgttcatgttgaacgggtgtttttgttgcagtgacagtgagaagcagtcgtgatttcatgggatttctccttcaggctcgaagagtgtccgatcrtcaaatcgctggcactttcgttctcattcctcctcattccaaactgatgacttgttttcaagaggctgatgcagtcacccactctgacaagtccctgaagagaaacctgtcattcgtgtggaaggccccagcccagcctgtgggggacattaagttcctgtaagagagtgaagtgctgtttcttagaaactgagccttctactttggagagaggggagcttctctttgccctgacttcatattccctttccccctccttatgtggccaccttatagcaaggacagggtcatggatgctgcctaaactggaga

SEQ ID NO: 480313 - DNA, 639 bp, Homo sapiens
ccttcgcgctctccagcttcctcttctagctgagcttctgcaagaatgagtagttccaagggaagccaaagggcttgccttgacatttacagagcctgtttccgaggaaatgcaagacgcagcatcctgttcacaccgagccgcgagtccagcgcacagcagatgctcagtaaaacgtgatgtaggagaggtgaactgattgtagccccagccccaccgccagtgctgtgggaccctgttggaatccctcctccttcctgggtcttggtgtccttctctacaatggggctgatgatgatgacacctacacagggctgtttccaggatgtaatgaggtcactcacatgactcagtgatataaactctaaagggtgacacaaatgtcagagataggaaagttgagtgctgtgtatcaaacatgctccagaaataaggttgtcgtggctacaaagtagttataatttctctgttgacatttttctattcatcaagtaagaaatccaagttgtaggaattatctctccttcccaccaccaccaatggaactcagtatatctattttcttcttgggtgaaaaaatatatatatatatwttttttttgagactgagtctcgctgtcgcccaggctggagtgcagt

SEQ ID NO: 480314 - DNA, 610 bp, Homo sapiens
ggtagctacatttaaaattggctgcagtttcaccttgatattttacttttttttttctgtaaagagaagccattagcatgagtttttacaaatctgggcaaagacataccagctagcgtttgattccatttagcaaaagtgttttctgacaatcagatttctgtatttccttaggtataactactttatgaaaggttactgtagaaccaaagtataaagacaaatctgttttcccactctgtaataacatccggtcaaataaccactttcctgtagcctagagcattgccgcagattggttaagtctgttygctgagtttgggcaacataaattcctggaacaatggtgactctctaaatctcaaggtttgtagggaaagctgttttgagcaagaaagaaacaaagaggttactgtgcacattcagaaaaagccaaagccaaagagcagcaacaagagcaacaacaataaaactaaagcaagtttttttctctgacaggcctttatgcacttcagatatcatagctaactgttttcagtttggaaaagaagaaagccaattctccaagaactgtgccaaaatagaggaaacaatttgttctttttaagta

SEQ ID NO: 480315 - DNA, 488 bp, Homo sapiens
aaccccttgattttagcccagtgacacctgtgtcagacttcaacctacaaaggtgtaagattataaattggtgttgttttaggtcattgaatttgtggtaatttattgcagcagcaataggaaactaatacagagtattttgcagttaataggcaacwcattcaacttcacagggcatataactccatttttgcaaaacataattttttagcatttatttctaccaagaaaatgcacggccttctctttataaaaaatcatgtatgctattagaacataaggagttcatccatcttctattttccaggaaataaactcaaggagtattctaaggtactgaaaccaaaaccactgaacttcggtcctcaagcttcaataagttcccatatttccttaaggtaaaagattctcagaattttctaacagttagtaatttctgatttctctgaaatcttggattcaccaccaagttacaaggaaagcaggtg

SEQ ID NO: 480316 - DNA, 625 bp, Homo sapiens
tttttgagcttgactagttccctggccgcctaaacagcctttaattccatcaaaggaagcaaaagctccactgccatgacattaaaaaaaaaataaaaaaaatctttacctcwtgcaggtatttctgaatccaataattatgaaaacacaaaatcacatctgtttgaaagagctgagtaagccaatagcaatgttagacatttccaataaaattcagtaattgaaaataagttttattaggaaaacaccatttctggagtttcactcagtaaggcagagaaattactctgacagggtcaaatcccaaggagattttttttccccttgtgtccttaatggatttatggatcctttataggatgtggggacatttcacatgtccagtgacacagaccgacatcagtgtattgaaacaaaaacacaaagaccaacttagtgtagaatttatggtaaaaagcttgcatggcagagccaaagtgaccaggcaattaaatagcaagcacaaaaatatgaacaacttctgtgcacagacttctgcagctagtttcatgtaagagcttttgttttttaaaaaatgagctgttaaacactaaaaaacaagagataaatacacaggacaaagatc

SEQ ID NO: 480317 - DNA, 628 bp, Homo sapiens
tgacttctttgcagaaattgaaagctaattctaaaacacatatggaaaggcaagggttgcagaatagtcaaaactctcaaacaaaattggaggattcacacttcccaatttcaaaacttacaaagctacggtaattaagacagtgtgttaccagcgtaggtggaatagaatttaaaatcctgaaataagtccttatatttatggccaattgattttccaaaaacatgccaggggttggaatcctccctcacaccatacacaaaaattaattaaaaatggatccaaggaagacttaaatgtaaaagcctaaacgataaagctcttagaggaaatcatagatgtaaatcttcatgaccttggattagacaataattccatagatagatatgataccaaaagcacaagcaacaataacaaaataaataaattagatatctactctttgattttttgtttgtttgttttctgttgttctctctgtttcatctgccttatcttcctatatattttttwacaggttttagaattccattttttggattcagttgcgctgagttgaaagaatagggaaaaatacagctactgcatcttcccagaagcagaagttctatatataagttttattggg

SEQ ID NO: 480318 - DNA, 175 bp, Homo sapiens
ccctgctctagcaccttcctttcagatcttctggtcctatagatgcctgaaggtcacaggcagaaatatacraattctacactaaaagaagttgtacaggaacctttaaacaacagcatcaaaagcatctgttaaagtaacgctttccactgagtgccttgctagacatggtaca

SEQ ID NO: 480319 - DNA, 491 bp, Homo sapiens
gggactacacacatgcaccactatgcgcagctaatttttttttatttttatttttttgggacagagtctcactctgtcacccaggctagagtgcagtggcaccaacacggctcaatggcaacctcaatctcctaggctcgagtgaccctcctacctcagcctcctgagtagctgggactacaggcacacaccaccacacaattttgtttttttagtagagacggggtcttgctatgttgcccaggctggtctcaaactcctgaactcaagcgatcctcccactgtggccttccaaagtgctggrgatataggtgtgagccacggcacccagtcagaaccacagctcttgacagctctgaccttgtgtgtgttcagccttgtcacctatgagaataggactgtgtttgagttgctccctcagtcccttaccctggtgccaaactgcagtttgaaaaatcctggagagggattccaggcctggggagaagtaa

SEQ ID NO: 480320 - DNA, 491 bp, Homo sapiens
gggactacacacatgcaccactatgcgcagctaatttttttttatttttatttttttgggacagagtctcactctgtcacccaggctagagtgcagtggcaccaacacggctcaatggcaacctcaatctcctaggctcgagtgaccctcctacctcagcctcctgagtagctgggactacaggcacacaccaccacacaattttgtttttttagtagagacggggtcttgctatgttgcccaggctggtctcaaactcctgaactcaagcgatcctcccactgtggccttccaaagtgctggagatataggtgtgagccacggcacccagtcagaaccacagctcttgacagctctgaccttgtgtgtgttcagccttgtcacctatgagaataggactgtgtttgagttgctccctcagtcccttaccctggtgccaaactgcagtttgraaaatcctggagagggattccaggcctggggagaagtaa

SEQ ID NO: 480321 - DNA, 537 bp, Homo sapiens
ttcaacatgcaaattgaaaagggggacaaatattcagtccataacaatgtctgatcccatctaaggccttttctcacttgtccctcttgcctggcatgtcccacccctccccgcgggcctggctcagcgttcatctcctccatgcagcttctgtgaatgcccaagcccctggtgagctcctacctctgcatgcctgtggctctggagctctgacttggtgggtgctcccacgtatagggaagcaacacatgcaccaatcattaaccctccarttagccatagccccgggagggcagtgaggtggcttctttgtaccttccaccactcagtagataatcagtgctcaataaatggatgcaaaatgagtttcatgacagctttgtccctcaactttccttcctttggaacaagcctgaggtgtctttgacctgatgttccccttggtgagttgtgttcactcaaggagagggacagagactgacccatctgtgttctctctccagcccagccgacctaagtacagaccccctccgcaaa

SEQ ID NO: 480322 - DNA, 635 bp, Homo sapiens
gttttatgctctccatctaggaaaagcctccacgggagagccaagcrgggaatgcagagcaggtgaaagtatctccccatttagcagatgagcaaactgaggacccagagacaggaaaatcaaccagccagaggcatacagtgaggcaggggtgttacccggggaccttcaaactgcactctcaagtgccccacaggagtcccaccagagacaggatgtctggcccccacccctgcctccaccgacgcaggtccaaatcagtccccctgcctccatcaggttcgtattatctccgtagtccatctgtcaagttttcaggtccaaccaacattttgaggcacccacaccaaattgtggtacattaatcctcccaggcatgtggcagtaggttgtgttatcctcattttgcagatgaggaaactgaggctctgagaggttacgtagctcatccagtatcacaagctaatcagaggcattgctgactggcctcaaactccagtactccttccttgccctgccaccccaaccctgaagcccaggtgaccagcccatggggacaactgtggcagcccaggttctaggcctgcctccctgcacacatacaccgcatgactgggtagcttccaagttcctgc

SEQ ID NO: 480323 - DNA, 638 bp, Homo sapiens
tgtacactgtactcactgtgtaatttctcatccctcaactcttctaccctctcacccatcctagtcatcaatgtctattattccactctttctgtctgtgtatacattatgtagcttccacttataagtgagaatgtgtgatatttgtaactttctgtttgtgagttattttaattaatagcccacatttctatccacgttgctgcaaaagaatgattttgatgcaggatttttttctccttatttcagataaatctaggttcttgtctcataaccaggaaaaattagacatgccgacaaattgaaaggtgagcagggtggaattgattaagtgaaacgaaagttctcaacaaaaagagaggtcttgcacacaggtttccacctcacaaattgaataccaggccacacacgtgagttgaagaggccaggctcctcccttgcataaggcacatatttctggtggctccactctattctcccagtccatgtggggtatccccctgtgcaggttcccctatctkcccaggtatctgtctgcctcctgcccctctatcaatttcatccttttttatggctgaatagtattccattttgtatatataccatattttatggggtccacctgtaaccagcagctt

SEQ ID NO: 480324 - DNA, 642 bp, Homo sapiens
ttattagacattagtaaacaaagaacagttttctcagtttcgaggttataagccttatgtatttcaggggtatctctaacttttatgattgttaatcctggaataaacatgaccttctgtgatatatctcagtatttccctgtggagaacagactgtcaagatgttactcttctgttcccaaatggtaacattccaagtttttattcctttttccccccctgtttggttatcagtcaagtttctttgggtcttggagcaataactagtgcmtcaggggataagatactttccataaatgcaggttttaccctaggaccaaagcatagcatgctttggaatgcattcttttttttttttttttttttttgagatggagtcttgctctgttgccgaggctggagtgcaatggcacgatcatggctcgctgcaacctccacctctcgggttcaagcaattatcttgcctcagcctcccgagtagttgggattacaggtgcccaccaccatgcccagctaagttttgtatttttagtagagacagggtttcgccatgttggtcaggctggtctcgaacccctgacctcaggtgatccgcctgcctcggcctcccaggaatgcattcttttcctcagttaatgctag

SEQ ID NO: 480325 - DNA, 398 bp, Homo sapiens
ctgcaaaccagcaaactcctgggaccaccagaagctggaagagatgacaaaggattctcccctagaccctccaggggagcatgctcctgtcaccaccttcatgttggactactcatctccaaaactatggcagaatcaacgccagttgctttaagccactcagtttgtggtaatctgttacagcagccttagaaaaccaagacatacctttatcataaaaagtggggaaacattcttccctcgccactgttttgtgcaacacacaagtgatagaaaaggaaagagatgaagcccacaaggaggtaagaaaagatctcaaatgatggggtatggcaaatgttcagaaggatggcrgagggctgcacttcaagggccatgctaggaaatagaataccacc

SEQ ID NO: 480326 - DNA, 671 bp, Homo sapiens
gtgataggtctatctggcaagttcaggcagtttcactcacatttctgcacttagtggggagggctgggaggctgtgttctgctgggagcctcttcctttttatgcagcttcacagtctctctatggtctctccaacagagtggtcagacttattatttgtggctcagagttctgtcaaagaaaggcacttggaattgccaatctataaggcctgaaactggcaccatatcacatctgccatgttctagtggtcaaagcctcaaaaagaggggacaccaatcccacctattggtgggaggaatgtcaatgaatccatgaccatgttttctgcactgtacacagtattttgtgagcatcttgaaagcaagaaatatgccttattgatctttgcattcccacgtcaaaaaatccagccagaaatacagtgatgaaagatggagaagaaggacactcagaatctgrattcttgggttatcttttttttaagagacagagtctcactctgtctcccacactggagtgcagtggcaccatcatagctcactgcagcctcaaactcctgggctcaagcaatcttcctgcctgagcctcccaagtagctggaaattcagctatgcaagaatctggattttttaagacatccttgagcagctctactattcctcgattac

SEQ ID NO: 480327 - DNA, 598 bp, Homo sapiens
tgctggaaaagcatcttctagtggtggctgtttcccttaaagaatattttagagggaagggtggcaaaagtgttagagcaggttagactcttttcacaggttttcccatcttccttcgctaaggtccaaatgtctcactggcagtctggtaaatgaaaattcaaaagctacaaaagaaaattctatcactcacctagaaacacagagcwtatgttgaaatttcattttccaaaaacagtgctgtcatagaatattcttaggatctgaataagaatttgaacattgttggtataatgtagactaaaaaaattgagactatatgcatatttttaaaaatagctttgaaatgtttgaaattttgccttagcatgaccctggtagctatagccactttttagtagttgttataaaaattaaaatcctgttttagaatctcatactctgctaccatccggtcatgacctaaagaaattcaacagtccttgtcatcttcaaaaattaatgtgacataagggttgaaagttctcactgagcaaataagtataatttcatttttataaactgcaaagatgaacacttttgagattaaaaagagttt

SEQ ID NO: 480328 - DNA, 501 bp, Homo sapiens
tgtgcatgtgatcttcgtgcctgcttacatggcaatttctcttgccttccttttaattaagttggttggtataattttttgttgttccgataagtgaggcagtgttatgtgagatgctaacattaggggaagctgggtgaaagktatatgagaagtcttgtactatcttatttccctgctgtaaatctaaaagcatttcaaaataaaaagttaaaaagtaaatggtagaggacgtagagcctggtgactcctactgtgaatctttaggcacaccatagctctgccactaattagtctatgaccttgcttttccttttggagcctcagattcctcatctgcaggaggctgtcagaatgacaacagttatatatgatcattttgtgaggattagattaaataatgaatattatgattttagcagactacctagtaagtgttcaaaaaattatagctctatcattattattactgtaaatagaggcctgtatctgaatccatgg

SEQ ID NO: 480329 - DNA, 588 bp, Homo sapiens
tcagtcaagagaatcaatcacaattagtgttttcctaaaggaaatcaataaaaaattgagcagaatatttcagaaacctctggtactccaaaccttttctagctgcaggactctcaatggrtctcattgctcaaagacacttctacattcctttgccaaggaatatgaactcaagtttgaggcttcatagtcttttaccactttccggatgggcaattttaaggaatgattatgctgataaattttgtaattcctgggaagatgaaaggccagtgcagctttctggcaaagctttgcaaacagtgaagtttgaaaaggaatactgaggtttccaaagtcagtaaattcacaggaccttgtttcattctatgcccgctcactgtgcatatgcacaaatgggctgtgtctcccaaagagcttgacagctttgcttatactgctcataggtggcagaaaaggctggtctctttttcagaccaaaaggcaagtaaagtccacaccttctccctctctggtttcctggacaattctgatcatttcactcccaggatttcaaccaccacctgcaccaaataccaatccatatct

SEQ ID NO: 480330 - DNA, 558 bp, Homo sapiens
ctgggactacaagcgtgccaccacgcccagctaatttttgtatttttagtagagacggggtttcaccatgttggccaggatggtctcgmtctcttgaccttgtgatccgctgaggtgggcctttctgattggatgagatggtgacaaactcagggagtggtgctggggttcaggaagtcagggagcagaaaaggatggatgtatttaggggtcaaacagtttgctgaagggggagatgcccattccaagcagaagaaacaaattatagcctcctactatctgaccactttctaccagggagacaattcttgaccttcatctatacctccattgcattgatctttccattttctatccactgcacccccttatccagaatgtatgtcgttcctttgaaaaattctcttgtcccttcctgcacttttttctgacaaaactcttactctggatgaagtcaaccttttgccctctttgtacctgcacccgtgggcctgaactttgctggaaaaagtcctgcacaaactgatgaccgtataaagtgaaaatggccaaactctt

SEQ ID NO: 480331 - DNA, 563 bp, Homo sapiens
ctcatcttcctattgtccacattgcccagcgtgaaattttggcccagtaggaaggctatacatttgttgaattaatttkgatctgtaaggcatattcttccacgaaaaggacattgcacaatcacaatattctccataaacaaatggacactcagaaagaactgttgtgttcttttatctgccttccatgaatgtgcagtttccttaccacttctccatggacctagttatcttgcatagtgcacacattagaagattatgtgataagagtagaaagctaggtttcctttgggtagggctagactatttcctgttcagaggtgaagacttctgaaatcagaatcaattttctaaaacataccacattaaaataagaccatagacacgtttttctgtctataagtctttttattttgatggtagaaaatgttgtaagattatttcattatcttcttattgttaactgttttggggaagaatcaaatcaggagagactgagattggagtctttttatcaaattctctatagactacatgatccgtgccaataccacagcagtcag

SEQ ID NO: 480332 - DNA, 563 bp, Homo sapiens
ctcatcttcctattgtccacattgcccagcgtgaaattttggcccagtaggaaggctatacatttgttgaattaattttgatctgtaaggcatattcttccacgaaaaggacattgcacaatcacaatattctccataaacaaatggacactcagaaagaactgttgtgttcttttatctgccttccatgaatgtgcagtttccttaccacttctccatggacctagttatcttgcatagtgcacacattagaagattatgtgataagagtagaaagctaggtttcctttgggtagggctagactatttcctgttcagaggtgaagacttctgaaatcagaatcaattttctaaaacataccacattaaaataagaccatagacacgtttttctgtctataagtctttttattttratggtagaaaatgttgtaagattatttcattatcttcttattgttaactgttttggggaagaatcaaatcaggagagactgagattggagtctttttatcaaattctctatagactacatgatccgtgccaataccacagcagtcag

SEQ ID NO: 480333 - DNA, 572 bp, Homo sapiens
ggaaactgtaagttaatcttgcatgacttttatttctaggcattacagcagaagttctggtggtgacctctttcgatgaactgcagagaagggcctcagaagcaagagggaagattgttgtttataaccaaccttacatcaactactcaaggacggtgcaataccgaacgcagggggcggtggaagctgccaaggtkggggctttggcatctctcattcgatccgtggcctccttctccatctacaggtttgtcacaatgttcatttgaattcctttcaaaaacaagggttttccgtgaaggaaaagtccttatgaagtaaaaacaaaccattcaaatgaaaatacttattgttcatggagtttcccccccaaacacacacacccattccacatttggtcatttgtttgtaatatcttctttggcttttctggattccaagcatcacttgtgcattcctttaaaaagctttaaggcttttcacatccacagtgatcccattacattccttatataactaatatattatgtattttcattggaggaagaactgcgttcatgtctgcatttcat

SEQ ID NO: 480334 - DNA, 572 bp, Homo sapiens
ggaaactgtaagttaatcttgcatgacttttatttctaggcattacagcagaagttctggtggtgacctctttcgatgaactgcagagaagggcctcagaagcaagagggaagattgttgtttataaccaaccttacatcaactactcaaggacggtgcaataccgaacgcagggggcggtggaagctgccaaggtgggggctttggcatctctcattcgatccgtggcctccttctccatctacaggtttgtcacaatgttcatttgaattcctttcaaaaacaagggttttccgtgaaggaaaagtccttatgaagtaaaaacaaaccattcaaatgaaaatacttattgttcatggagtttcccccccaaacacacacacccattccacatttggtcatttgtttgtaatatcttctttggcttttctggattccaagcatcayttgtgcattcctttaaaaagctttaaggcttttcacatccacagtgatcccattacattccttatataactaatatattatgtattttcattggaggaagaactgcgttcatgtctgcatttcat

SEQ ID NO: 480335 - DNA, 516 bp, Homo sapiens
ctgagtactttgttgccaccaatgaaattagggttttactactaatgaaaacaaggaatctgaaatatgggaacaaartaagaggcaatttaagatggtctaggccaaaaatgtggtggttaagactaggttagtaccaatgaagtgttgctacatgggacacatgttgaagatccagccgacggggttcactgatggggtggtcataggaggtgaaagaaagaagtcatggatgcctccatggtttttggtctgagccactggatgtatacaattccagtaagtgagatggagaatttcctcaaactttgatttgtgtatatgttaatatctatgtgatcgcaatatgtctcagacacaaatgatctgcccttcacctcctctccgctctccaactctaatcttacacaactgacaccaagattaccccagtatacattcggcctcactgccagcatcacttattttagaaccagaagttttagtcttttacatttactttctaattatttttct

SEQ ID NO: 480336 - DNA, 613 bp, Homo sapiens
aatctcagcctcttccaacttcataaaccctagagctatatagccggttttgcaataagaaagcctatttatatgactttccatgggaccaagaagtcaaaaccacaacagggtaaaagcaggaagacatggctttcttggcagggtatttcaaaggcagcaacgttaaccaatttcagggcattttgctatattgtgggggctgtcctggataagcatgactaaaaagtgcttgaataaagaagcatattctttgagaacactgttaaccttcttgtttttgaaaaattaaactaatcaagctctgtgcttataatgagtccaaagaaaggcctttcactttgaaccctctgaccacttcttcctttacatagtaaaatttcagtttggtctgaggataaattgtcaactaagttctggaacttatccagaaagtttccctcctccatcccccctacaagtgatataatcatatagaataatattaccaacctacaaacttcacacacctttaatgtgcartaagttgaggatgcttgtgttagtgtccagcagaagcaattggccattctccactgtgacgttgtcgccatcttgtggcagcctttcagga

SEQ ID NO: 480337 - DNA, 512 bp, Homo sapiens
ggtgggttttatatctgcatgttactcctcaactaacttacaatttatgttgatggaaagttttatacttttttcttgtttttattccttgctatttttcccccaaatagctaactgattgtcttcataccattcattaaataacatttattctcccaattaatactcttggctattttaacagttgaattataatgttcaatgacattaaacctwttggccaattaaaatcccaaatccttttgtatgagctaatataaaggcgtttctcccaaataaatgtgacctcatccttgttcttaaggtacttatattatcatttagaaaaatacaaatagccagataattaaagtgtgattgattcaataattaaaggcataaccaagatgctatgggagttcagaggattagatggctgaccacagtggagatggccttgcaggggaaatcaagtgcattaaacatcgttttctctttttaatctggacacaacagatgacacaggctgagat

SEQ ID NO: 480338 - DNA, 400 bp, Homo sapiens
cagtgacatttcaaaagtgtattgtagtgcgctgagactgctgtgtgacactgggtgatctttaagcctctctgggcctcagtttctgctgggtgcgtaataacctggtgttgttgggatgcttagatgtgcaaatgcttgtgaaagagggagaggcaggctgacctagtgtttaagtgcatggactttggagctagactgcccgggtttgaatacatcacttgcttcttgggggactttaggcaggttctttaaaccctctgtacttcagttttctsatctgtaaagtagggtcaataatagttcccacttcatagggttggtgtgcgccactgagagctgcatctcacacatggtaaatgtccaatgttagccattattggcagtgctagttcactag

SEQ ID NO: 480339 - DNA, 510 bp, Homo sapiens
tcacttgcttcttgggggactttaggcaggttctttaaaccctctgtacttcagttttctcatctgtaaagtagggtcaataatagttcccacttcatagggttggtgtgcgccactgagagctgcatctcacacatggtaaatgtccaatgttagccattattggcagtgctagttcactagtcatagtgctagaaaatgatatgaatttatttttctatagtgcttgctgctttgaccagatcatttcacttcttagatttatttaatttcccatcatctcaaagtctaattttgattttttttagggcttaaatgcctcactcatttaaaaatccttatgtgacatacatttgagttccaaccatgttcaaggttmtctaccatgttctgaaggagatttaaaaaatatatggaaagagaccccacttttaagagatatttgggaagtgaggccttatgtggaagtagttaagtttcaaaaaagggtacatagagtcaattcatcac

SEQ ID NO: 480340 - DNA, 285 bp, Homo sapiens
ttttgctggcttccttaacttggcctttccttcatcaagacttgtccaggaacatcttcaaagatggagggatagattaaggcccatgcttagctggtgatctatacaggagaatccaatctagcctagtatataaattctatactgccttttttttttttaaacaaaaggaaattccagcaatgatccatgcttcaccccctctctaagcaggcaaggcragaatctagataattttgtattcatttgggaagtcattctgatcatgagggaaaactagtatat

SEQ ID NO: 480341 - DNA, 511 bp, Homo sapiens
aacccctgttctaacccaattacccgtgcaacctcgagcaagtaactcaacctctctgagcctcagttcctcaactctaactccccagcatccttggtttctaactcagttaaaggcaaagctgttgccacaagaagactttagagcaggagttttcagcctcggcactatcaatattctaggggctggataattctttgtcataggggctgttctgtgcattataggatgttcaacagcttccctggcctccacccaccagatgccaatagcacttccccagttgcaacaacgaaaactgtctccatacattgccaactcttccctggggggcaaaatcacctccactgggcgcccctgcagamgagatgaggctgaagaagggaggagctcaagcctgaaacatttagccccaactcccacagcagcccaactaggaaaagactagaaactactgccatgagctccaccactccagcaaaactcactctggttcccaaagggcaaatca

SEQ ID NO: 480342 - DNA, 507 bp, Homo sapiens
  misc_feature (1)...(507): n = A,T,C or G
tnagcaaccctaatttcatctgcaaccttatttctcctttacggtgtaacctaacatactcagtttccagagattaagacacagacatctttaggggagagagggcatttttctgcctanctccaataatatctcasttgttctaactgcagtcttatgaagtaggcatagaaaatattccagtattacaggcttagagaagtgaatttacctggagtcacatggattgtaaagacagaattggtaccagatcagagtcttctgtttctagtattttattcatctatctaccatgctacctttagaaacacaggtgaagattctagcttcacgtaagagttgaaacagctttcacaaccagccagtgaatatgcatctgattaattcaaagctggacgttcgggggcctcggccatatagatattttccaagaaggacaatcaggcagcttaccagggcgggacccaccagcattgaaatcacatgtgaacaaagaggttcaaaatg

SEQ ID NO: 480343 - DNA, 507 bp, Homo sapiens
  misc_feature (1)...(507): n = A,T,C or G
tnagcaaccctaatttcatctgcaaccttatttctcctttacggtgtaacctaacatactcagtttccagagattaagacacagacatctttaggggagagagggcatttttctgcctanctccaataatatctcagttgttctaactgcagtcttatgaagtaggcatagaaaatattccagtattacaggcttagagaagtgaatttacctggagtcacatggattgtaaagacagaattggtaccagatcagagtcttctgtttctagtattttattcatctatctaccatgctacctttagaaacacaggtgaagattctagcttcacgtaagagttgaaacagctttcacaaccagccagtgaatatgcatctgattaattcaaagctggacgttcgggggcctcggccatatagatattttccaagaaggacaatcaggcagcttaccagggcgggacccaccagcattgaaatcrcatgtgaacaaagaggttcaaaatg

SEQ ID NO: 480344 - DNA, 590 bp, Homo sapiens
gctgctcacataggtatcagcttgaacctcattctttttacttgctcctggtcagtgtctacttacattttgtctgggtctgtttcaaacctttactattctctccttaagctgtctttcccattttgctcttctcctgttcatgtggcacattaggtcctattggatttgcaagaaaaaaaatagaagtcttcatactaaaatatttttaacaaccttcccttatttgcaaacgtcactgtatctgtcttctgatttgaaatactgtaaaaatttcccttcctgtgccccaaagctcattcatttatctgttatatttttggtataggggtttggttgtggggggtctctttgtttttaagtgacagagcacagatccccaaccgtgctacatcgaagtttccaagttctytttttaagacttcatttttttctgattgcaaatgtagcctatatatgttatttaaaaatgaacgatgtagaaaatgtttaacatgaacaactgaatccagaaactcctgtaattgcagtgtggcagagacctctttgttgactacatagtaagtcatcctcactgctctctacctgcc

SEQ ID NO: 480345 - DNA, 646 bp, Homo sapiens
cccaaatgtgttattggccacgagtttgaaaataaaacaagaggatggatgcatgtattctcaccaagggagaaccaccaggactgggttacagatgggagaaatattataccatgggaaggaggtatcaaagccccatccagtgatagaagtgaagaatctcatgttggatgtaaatctgatggtactagattgtttgggaatatggaagttaatactttgattgtatccaagttctaaagggaattacaaagtgaattacaataattagcttgaatatatmaaatataactagatggcttactatgggattatatctagtgtcagcagtgtggatgaacacacagcagacctgggaattcttatttacagctcagttcttaaggttaattttcttagaagtctctaaatttctgagtttaggtaggggtggggataagttaaattgaaaagccccaagtactaaaaatcccatatccagagtctaggagttggcacttctggtaaggtagcattcacagggtagtattgttaaggatggcagagatttggtaaggatggaatccccaacagaggaagagttggcattcctccttgggcccaataagccacaaacctagagctccaggttaaggaaggataagga

SEQ ID NO: 480346 - DNA, 562 bp, Homo sapiens
tgatgttttatttggaatgtttgggaaatgttctaatagagattaaaatccatcttattttgtgggtttcctgatactgtattttggagaaccagatctggggtggcatttcttgcaaaaccaaagccagttttgaaatccagtctcagagtcatctctgaatgtttctggattgttacagccagggcatctcctgccagatttctgctccatcccatatgacatctactttaacctgaggccttatgcacagatagcaacactgaagtgcccccagaagacccaaagagggcaagaccactacaaaagttttgaggatgatggaagtttcaccccggaggackggtttttcccactggtccctggccctgcctggggcagcccgtgtatcaggctggaaggagggcatgggtgacagtgcaaggttctgccttcaccttctggctcagcagccaaacttcagtgtgaagccagaacaaagctattgccaggtcagggctaaggagctcgagcctgtcttggggtggagccaggacccagaaaccactgccatgagccacca

SEQ ID NO: 480347 - DNA, 580 bp, Homo sapiens
ctcagaattcataatcacgtaacttcctattctcagataaataaaataacacagctcagtctgctttggtgtaaaggaaacaccgaagttccttcctctgaactttggaactgtttgtgacataaaaacaaaaggtccaaaatacttttgtcctttcctttgtcatgcaggctgagttcctaaaacatcataatttaacaaagttaaagtatttgctttctttttctaccaacatcacaacttctgctgtattgagtccttagcacagagtttgggttttaagagaatctacagattrgttgtttggatgtttctcttatggaaaactcatgagtaaatttatattccatgcttttaacatcacaaaatagaaagctctagtcaatttgttgttcataacaccaccaccactgccactatcttttcaaaggatgaattagtcatctttgttgcatgacaaatcaccccaaacttaaaacaataataattctctttcacagtttctctgggtcaggagtatggagcagtttggatgggtgttgtggttgggggtctcttgcgaggttgtagtcagatgtca

SEQ ID NO: 480348 - DNA, 589 bp, Homo sapiens
gtggagtgtcttctcaacaaggggccagattctcaagaagtcacctcagtttagacctaagtttccaggccagtctagaaaaagtcttaagatacttaatgtctttttcctagattattctattggcagcctcggtgctacatctctagtttcccttcactagtccagcatctgcctaacttttagattccacaaatagttaacaattaaatcaagcaagaaggaaaatcttatttacacctgagtcaatttcaatctctcagatattttttcacatattgtaggaaacctcgattttccttaaacrtaaaatcaactacacacacacacacacacacacacacacacacacacacacacacacacaccagaatgtggcctcttctgctggaacatctctgatttctgccattaggataaataattttagcaaggacttttgtgatccgcccctacaccaattcctggagccccctcatcccatctaaagcaggtggcctattattctctctcaaagttgtatgtttaattccttcctggtacttcattaatcatctcggtgattttcttgggttttttttgtttgttt

SEQ ID NO: 480349 - DNA, 526 bp, Homo sapiens
tggagtgtcttctcaacaaggggccagattctcaagaagtcacctcagtttagacctaagtttccaggccagtctagaaaaagtcttaagatacttaatgtctttttcctagattattctattggcagcctcggtgctacatctctagtttcccttcactagtccagcatctgcctaacttttagattccacaaatagttaacaattaaatcaagcaagaaggaaaatcttatttacacctgagtcaatttcaatctctcagatattttttcacatattgtaggaaacctcgattttccttaaacataaaatcaactacacacacacacacacwcacacacacacacacacacacacacacacacaccagaatgtggcctcttctgctggaacatctctgatttctgccattaggataaataattttagcaaggacttttgtgatccgcccctacaccaattcctggagccccctcatcccatctaaagcaggtggcctattattctctctcaaagttgtatgttt

SEQ ID NO: 480350 - DNA, 547 bp, Homo sapiens
ccagtctagaaaaagtcttaagatacttaatgtctttttcctagattattctattggcagcctcggtgctacatctctagtttcccttcactagtccagcatctgcctaacttttagattccacaaatagttaacaattaaatcaagcaagaaggaaaatcttatttacacctgagtcaatttcaatctctcagatattttttcacatattgtaggaaacctcgattttccttaaacataaaatcaactacacacacacacacacacacacacacacacacacacacacacacacacmccagaatgtggcctcttctgctggaacatctctgatttctgccattaggataaataattttagcaaggacttttgtgatccgcccctacaccaattcctggagccccctcatcccatctaaagcaggtggcctattattctctctcaaagttgtatgtttaattccttcctggtacttcattaatcatctcggtgattttcttgggttttttttgtttgtttgttttttcttaacttgtttactgtctc

SEQ ID NO: 480351 - DNA, 547 bp, Homo sapiens
ccagtctagaaaaagtcttaagatacttaatgtctttttcctagattattctattggcagcctcggtgctacatctctagtttcccttcactagtccagcatctgcctaacttttagattccacaaatagttaacaattaaatcaagcaagaaggaaaatcttatttacacctgagtcaatttcaatctctcagatattttttcacatattgtaggaaacctcgattttccttaaacataaaatcaactacacacacacacacacacacacacacacacacacacacacacacacacaccagaatgtggcctcttctgctggaacatctctgatttctgccattaggataaataattttagcaaggactttygtgatccgcccctacaccaattcctggagccccctcatcccatctaaagcaggtggcctattattctctctcaaagttgtatgtttaattccttcctggtacttcattaatcatctcggtgattttcttgggttttttttgtttgtttgttttttcttaacttgtttactgtctc

SEQ ID NO: 480352 - DNA, 631 bp, Homo sapiens
ttttccttcatattgctagacatatttgttccagtgtctctcccactctgtgggagcagggattttgttttgttcattactatggatgcagtgtcccctgatagagtaggagttcaataaatatttgctgaatgaatgaatgaacagcagttctgaaaaatacatcgctcatgtctggagyagttagagaagatgttagaagtggaacgtgagttatgccttggttaaaatgttgaattcagtggtgagtgtaaaggtcattcaaaataattattctcaaaggcaaagaggtaagaatgtagaaagcattttagagaaaagggatcagacaaatcagattggtagaaaaggaccctaaaatgggaacagtgagataagggtcaacggaatcttaaaatgggaacaatgagagaagggtcagagtgaagagtacctcccatgcaaggttaaagaaattggtcagtatcctaaaggcaaagagaatcagcaggacttttctgctagggcagtggttctcacagtgaggcccccaaacccacagcatcagcttcctgtgttaacatgttagagaagcaaactctcagactacagccagacccactgaatcagatgctagggctggagagaagcc

SEQ ID NO: 480353 - DNA, 550 bp, Homo sapiens
aagtgaaaaataaaagtttattcaagaaaacatgaggcactattcattaagaaagcaaycacatgaagctttaacaagaaaatgaggcattactgacacagtagtaaacataaatgtggcaatactgatgaattatggaaggcacaaggtctatgcctgaatgagtgcaccccttggagggccatggaagcagtctgacattgctgccattatttcaaaacattttttgaacttttgcttttggattgctttcagaagcaaatcacaagctattcaaggaaataaactcaactggttcagaaccacataaataaatactgaccttttggattaagagttattttgtcttcagactggctaattccaaaaattgtaactatcattaaggaataaatatttgccatgactgagattacttactgtaaataataatgtggcctttgaaagtaattccaagaaaggcaataaaaaaatgctttaggaaatcggatctcaagtgagctatttggaacagtaaatctcacttggaagtatgactgccagacattca

SEQ ID NO: 480354 - DNA, 550 bp, Homo sapiens
aagtgaaaaataaaagtttattcaagaaaacatgaggcactattcattaagaaagcaaccacatgaagctttaacaagaaaatgaggcattactgacacagtagtaaacataaatgtggcaatactgatgaattatggaaggcacaaggtctatgcctgaatgagtgcaccccttggagggccatggaagcagtctgacattgctgccattatttcaaaacattttttgaacttttgyttttggattgctttcagaagcaaatcacaagctattcaaggaaataaactcaactggttcagaaccacataaataaatactgaccttttggattaagagttattttgtcttcagactggctaattccaaaaattgtaactatcattaaggaataaatatttgccatgactgagattacttactgtaaataataatgtggcctttgaaagtaattccaagaaaggcaataaaaaaatgctttaggaaatcggatctcaagtgagctatttggaacagtaaatctcacttggaagtatgactgccagacattca

SEQ ID NO: 480355 - DNA, 540 bp, Homo sapiens
ctccagctgtgggctgctgcctcggtttccctttctttgaaatgaggcgctggtggtggatatgctggtgtctgttccctgtacttttctatagttttaaaacttcaagcataaaaaacaaaaacaaaaacaaaactcacaaaggaaaaccaagggaattagttgggggaaaaaatatttaacaaaaaaggtgagtggagttggagagggtggcagtctyttctgtattaggacagtgtgggcccctgggcctgctgtgggcccctgccaggcacgaggttggggttcacattcacaaacccaccccatcccttagaggacagcccagtggcgagtgctggattctatctagccttggtctcttcccagagcccacttgctcgggccccgcaggcccttgcctcaggtttccctctggcctctgggaacccccctggtctccagctcaccctggtccaggaaaccgcttggggaccttgcagctctgggcccagccagaggtcagcctggtccactcccacccatgccccactccagcac

SEQ ID NO: 480356 - DNA, 352 bp, Homo sapiens
ttgggacaatgatgaaatttgaatatggactgaatattagaaaagagtactgcatcatggttaaatttcctgattttgattatgatgctgtgtcccgaaagagaaagtccttgtcttgttaacaatgggcgaacctaagtacagggcccacgggaatccattgtcctgttcttgcaactcctctgtaggtgtgatgttattttcaaataaaaagttagaaaggccaagtgcctgttatagtccttacaatgccattcgtgtcatttacagagaggaaaggsagaggagcgagattggtggtggtggcctggccgaggactccctcggggaggaagcaggggccccgcgccca

SEQ ID NO: 480357 - DNA, 491 bp, Homo sapiens
ttcccctgtccctgtttcagtgaccagctgctcctccctcctcctgggcatgctccactaaggyaggcatgcaaaggccagtagggaggcggcccctggactttcccaggcagacagcagtcccagaagagcgtgctgaaggagggacagactgactgctgcgtcctgggtcacccccacccaactcagcccacctcccaaagctggagcccctctcaatgtctcagccatcagggcccaagagctggggcagcttctcgaagctcaaagctggcaggggcaatgccaggctttgctggcaccagagggaccctgtgggtgtagcactgacttcccccgaagccagccgctgtgtccacgcagcctgaggacccaaggggaccttctggctgtcccagcaggaatccccacatgagtactcttgagccaggtgcccagccagcctggagatcacccaagatcctcaaaggttacagagggagttctgcctc

SEQ ID NO: 480358 - DNA, 589 bp, Homo sapiens
agcatccagggcctgcatctgtgtgggggtcaagtgttcccgtgatcctactgcctgagcagcgggccgtggcatccctgctcttccttggcagggcagacagacccagctctakccatgtgcagggcaacgtgggcagggcccagactgcctccccagcaaagaaagattttcagggtgtggatctccatgtgggttcagcctctgtgaatggtgtgtccgggaaggggccacacgtgcaagaattgctgaccctgcctgggccagtgcaggagagtgaggctgggcttccaggcactgggctcgggctgtgccaggtaggccaacgctcctcaggaggccagcagatgcctgcagggtggcagtgagggtggtcccagcccttggggcctccatgcagccacctgcatctgtggccacgggtggaaaaggtgagcccacagcaggtgggatggccaaggctgagcaggtccacaaggagcagagatggaagccagcagccagctctgcaccaaggcagggcctctgggcaccgcctgggaagaagggagtgggctctggagtcctgtatgctgtgctagaatcccag

SEQ ID NO: 480359 - DNA, 567 bp, Homo sapiens
cagacaagggtcaggctaactggtgctgataagacaccagcccccatgcacctggtgtgatagggcgttgctgcctgccagtgtcactctggagcagatcagcaggggtgagggcaagggcaggggccgggaggaggctgcatgacccagggtggggaggccgacctagagaagcagagtggggcaggtcggggagacagatattctgaggggcccaggacctccacgttctgagacgctccgcacacagcttctggaaatgttatgtggaatgaaccatcatctggtctttcccttcttttttttttttttttttttgagttggagcctcgctctgtcacccaggctagagtgtagtggcatgatcttggctcastggaacctccacctcccaggttcaagcaattctcctgcctcagcctcctgagtagctaggattacaggtgtgtgccaccacacccagctaatttttgtatttttagtagagacagggtttcaccttgttggccaggctggtctggaactcaacctcaggtgatccacctgcctcggcctcccagagtgctg

SEQ ID NO: 480360 - DNA, 441 bp, Homo sapiens
gctcagacatctgcagctcaggggcactcagactcacaggccccaaagccagttccagatctctctctagccctgcccacagccctgcctcatactggtcagccacttggcccaagaccttcaccatgtggagtggccctgctcgccactcctgctaccgcctgcctgagcaagctctccttgggctgtggcaagacccaccatccacrtggcagccaccgtaagtcagaccactgtgctcagagccccaggctcccacctcagtgaagcagcacatgcagcctgtgtgtccggccctgagtcctcagactgtcctcccagctccccgctgcacacatctctgggtcaggaccttggcactcactgtacctcatgcctagggtgttcctttcttatcctgggagctgcgcggccagccccatcagttgttcacagccctct

SEQ ID NO: 480361 - DNA, 591 bp, Homo sapiens
catcctggctgcaggccccatacaatttgatgacatgtgggtggttgacctgcttcaggacgttgaactctgacagcaggtctcgmagctcactcggggaggcgttctctgaaatgcagcacagagcaggttgcaaacgatcgctcctggaagccccttccatgaccataccaggtcaggatggacctgcatcgccttgcccaagttcagacagagaggcctgcaaagacgatgctgcttgaggcttctcccagcctttgggatcagtggacaggggcctcatccaccctgaggaagaagcaccctgaggagccagcaaccacacatgccggatctttccccagagtgtcccagggctgggccacctgtgtatgtggcattatgttcctgtagtcattgtctttagaagacagtcgtccacagaaattccccgcattaatcattctggaaaggtgaggggtacccacacacccacttgtcgggagaggccctggagaaggtggagagccataaaggaggtccacacaccgcgaccaggctccccatttcccgctcctgtctgagatggccagcctggagcccaggcatctc

SEQ ID NO: 480362 - DNA, 352 bp, Homo sapiens
acactgaaggggcaggccaccaccaggagagggcagaggcctgcctggccgggacaaggaggctccaggatactcggcacagcctggaggctctgagtagcacatgcagacctgcaggccaggctccccagaaaggcacccccttctgacttcrgtgcccctccatccacactgctgctcccctgcccgatgctgtgaccctgaccactgcctctcacctagatgggaacggcacctcatcacagtcccaccccacagactgtccccacacagcgccctatggaaatgggggcagaacacaggcctcgtctgcccagcgttggcagcccctcacaggatggcctctgtctcc

SEQ ID NO: 480363 - DNA, 352 bp, Homo sapiens
acactgaaggggcaggccaccaccaggagagggcagaggcctgcctggccgggacaaggaggctccaggatactcggcacagcctggaggctctgagtagcacatgcagacctgcaggccaggctccccagaaaggcacccccttctgacttcagtgcccctccatccacactgctgctcccctgcccgatgctgtgaccctgaccactgcctctcacctagatgggaacggcacctcatcayagtcccaccccacagactgtccccacacagcgccctatggaaatgggggcagaacacaggcctcgtctgcccagcgttggcagcccctcacaggatggcctctgtctcc

SEQ ID NO: 480364 - DNA, 621 bp, Homo sapiens
ctgcttgaaaccaaaagttccacagatggcgagaygggggcgggccagagcagggctgggctctcccaggcccacaagtgaccacagcaaaaaccagcctcctgggcctcctcactttcccctacaaagcccacttccaaatgctcatgtgactctcaaaattgttcagggttcctgtccctaattcacagctttacaaactggggagaaaggtgagaccacagtgaggctgaggctggactgggattcaggcccccgttgctcctgacagagggcaggtgacccaacttcagcaatgcctgctcttgccccgccccccatgagaccccccggggccctctgtcttgtcgcccctctgtctctgatcccactcccattaaaggccaaggaggtggtcggggagcttagatatgtccaagggtgggctccctcgtgggctggacacgggtggctgccaggagctgatgcgggcacagaaccacccgaaagaactggcagatggcccctgaagaggaggcgccacgggctgctctgcaagggagagcggcatgcgagaacatgcgtgctgcagtttcaagtcaacttaataagtgcttacgagaaacatcccagaaagaacac

SEQ ID NO: 480365 - DNA, 621 bp, Homo sapiens
ctgcttgaaaccaaaagttccacagatggcgagatgggggcgggccagagcagggctgggctctcccaggcccacamgtgaccacagcaaaaaccagcctcctgggcctcctcactttcccctacaaagcccacttccaaatgctcatgtgactctcaaaattgttcagggttcctgtccctaattcacagctttacaaactggggagaaaggtgagaccacagtgaggctgaggctggactgggattcaggcccccgttgctcctgacagagggcaggtgacccaacttcagcaatgcctgctcttgccccgccccccatgagaccccccggggccctctgtcttgtcgcccctctgtctctgatcccactcccattaaaggccaaggaggtggtcggggagcttagatatgtccaagggtgggctccctcgtgggctggacacgggtggctgccaggagctgatgcgggcacagaaccacccgaaagaactggcagatggcccctgaagaggaggcgccacgggctgctctgcaagggagagcggcatgcgagaacatgcgtgctgcagtttcaagtcaacttaataagtgcttacgagaaacatcccagaaagaacac

SEQ ID NO: 480366 - DNA, 431 bp, Homo sapiens
gcctcatgcctcatcttctttaatgaatatttattacttttatgccttctatttctaatcattattttccaaagacaaatataaatatacgctttctagcaaacctagttacaaaaagtaaaaagtggaagcgtttcctgcctccccctgagggcaccactgtggacagcactgtgatctctgcacacttgcagatccctgtcagggaagatctgcttttgcacaaagggagtcacgtgggaccaacatctctgcaagccactctcaccaatccaccaggaagattcttccgagtcaccatatgcagatttacccagyattgctcttgcatttttgaaaatacattttaaagataccaagaatggaaaggggaaaaaaagagaggcccaaggagcccccagccctgcccactgtgagctctcccaggcctc

SEQ ID NO: 480367 - DNA, 416 bp, Homo sapiens
tgcatggtgcggttctccgagatggagaggttccggttgagaaccagccctgcaggtaggggcacaacaatgaccaccaagctgctctggctgcttcctcatgtgtagcacacctcttcccagacacagccctgcacwcacactggtgcaaacacgcactttcacacatacagtgccatgcaacaggcctggggctggtcctaagttagcaccaatgttcaaacgttgggatttactgaactgaaagtccaaggaacccttctcaatttgaggcagcctgtgtgtgtgtgcatgtgtacgcattgtatggggtgtctgtgtgtatgatatgcttgcatggtatgcgtgtgtgtggtatgtgtaagtgtgtagtatgcatttgtgtggtgtctgtgcatagggtattggtgcctgtg

SEQ ID NO: 480368 - DNA, 416 bp, Homo sapiens
tgcatggtgcggttctccgagatggagaggttccggttgagaaccagccctgcaggtaggggcacaacaatgaccaccaagctgctctggctgcttcctcatgtgtagcacacctcttcccagacacagccctgcactcacactggtgcaaacacgcactttcacacatacagtgccatgcaacaggcctggggctggtcctaagttagcaccaatgttcaaacgttgggatttactgaactgaaagtccaaggaacccttctcaatttgaggcagcctgtgtgtgtgtgcatgtgtacgcattgtatggggtgtctgtgtgtatgatatgcttgcatggtatgcgtgtgtgtggtatgtgtaagtgtgtagtatgcatktgtgtggtgtctgtgcatagggtattggtgcctgtg

SEQ ID NO: 480369 - DNA, 325 bp, Homo sapiens
ctcccacggcccctgctgggtgggccggctgcaggaaggccgaggcccagcaggtggcggtcgcgctccaccagcgcgagccggagaagggcggggcgggcggcgccggaggtgatccgccttcccgtccttctccaatccccggctctgctcgtggtcactcaagggccctcccgttgggggctaactgctggtgggagggagtgccctcccggcagatgctccccgcccgggcagcgcgccgcgcccgcctgcagcggcacaagtatgccccagacgcgagccctcgggccwcgtcctggtccttgcctcccgaggcaaggcc

SEQ ID NO: 480370 - DNA, 547 bp, Homo sapiens
tggccagcagtgggccagggtcacccatgatactgcaagcagggaccttgcagcccggttgcgggcctggcaatcattgtctcaaccctctyctggcccttgctgtccttgtccctggagtgggagcctattgagagtttgtaaggctctgcctgtcttggattagtgagaggaggtgggggtaaggctttaaaccggtctcccatttttcaaatgtcttcacctttgcctttggtggagagagaactggagatgcctgggccaactgggcctccacagtggaagcattccctgtgcttagcagctcctgttcaccccgagtactccaggaggagccagggaccccaggctgctcccaactagggggcagagactcctggctttggcagaagcctttcccatgccttaaactgttctatgggctgctcctgcttcaggaagcagctcagtgggccgcctctgaaaaagccatgcttttcagacccagaagctcagtcttgagcctgtctctgcccttagcctcgtcctgcagcaggacagcccactg

SEQ ID NO: 480371 - DNA, 510 bp, Homo sapiens
agatgttatcatggataccatctcccatgatactctcccctccccctccccaaagcagggccctgccctgttatttaaaataaacaaaaaaaactttgtaagtgccaaaggttgatgcgtgaaataattaccatttttttctcataaaagttatatacaaaatggaccccaaccagtgaggcctcctcatctcaacccacatcagtcaaaatttaaacccagttagtgcacgtgcttcctctggcgtcgcgggctgcatccgcytcaggctctgttcagaagggtggtcctagagggggacaggacaagcagtgctcaggcccgagcagggcggcttgggtccaagccatcctcagcctcccaccaaacatgcaccagggaccctggaccagggacgcggcagtgcccaggctccctttccaggagggtaaccctcgtgcccaccctgagtcctccctcttccttacagactcccatgttcctgacgccctcctacctgagggtcttcca

SEQ ID NO: 480372 - DNA, 567 bp, Homo sapiens
ccctggtgccatcatcaccttctctgtgaccatgactgaggtgtgctccctgcctggtggtcactgcccagtccccgccccttgccacacacgcatgcggaagtcmctacacagggtctccttgactacggtctctccctgccatgagacagctctggagagtccccagccctagagcagcagggcaggagccgaggctccctcaggagtgctcccagcctgctgttgttactattattgttactgttattgttactattaagtcactctgctgaaaaataattgcagaggagtggggagatagagggcacagcagagaacggggagggagcataacctggcaccaggaagcagcctccaaagaaggaaggggggatggggggggcccacttctgggggaggggctcctgaagtggaaaggaagtgcctctgcaggaggggaggagggcagcagggagcatggggggctgcaccctgctttgcccctattccctggctttcttctcccaggctgtcctggaggatgggaaaaatgaggaggaaggccctgtcctgcatgaggaaaca

SEQ ID NO: 480373 - DNA, 611 bp, Homo sapiens
tggagcccgaggtggggggactcaccagtgggtgggcaggctcagggcaacctccctggaagccctccttagccccaccctggacccacaccactggcccagagaacgggctggagcaagccagagggccagggctggggagctcccgcatcctctctaccggttcgagtccataggctatgagaacctgtttcctcacctgtgaaatgggccaagrccatgacccttgcagacttgttggaaaagatgaagtgagtaggcacagcacaggggcagtgcactgtgagcccccatggggtgctactgctggtattagccttatccagttaagacgaggggacctagagggtcttcggccaggctgcagagggggaaggtctcaggggagatggcagcttccgggccttcccttccccttggcaccccaggttccattttaacagatatcataatttttaattggttttctcctccactggctaaaaggctattagctccccgctaggtgatcgcatcccattttcttcacaccaccaaggaaacagtgatttcctcagcctgtccctaaagtgattctgcagaagaaaggcaatttagtgaatcagctcaat

SEQ ID NO: 480374 - DNA, 611 bp, Homo sapiens
tggagcccgaggtggggggactcaccagtgggtgggcaggctcagggcaacctccctggaagccctccttagccccaccctggacccacaccactggcccagagaacgggctggagcaagccagagggccagggctggggagctcccgcatcctctctaccggttcgagtccataggctatgagaacctgtttcctcacctgtgaaatgggccaagaccatgaccctygcagacttgttggaaaagatgaagtgagtaggcacagcacaggggcagtgcactgtgagcccccatggggtgctactgctggtattagccttatccagttaagacgaggggacctagagggtcttcggccaggctgcagagggggaaggtctcaggggagatggcagcttccgggccttcccttccccttggcaccccaggttccattttaacagatatcataatttttaattggttttctcctccactggctaaaaggctattagctccccgctaggtgatcgcatcccattttcttcacaccaccaaggaaacagtgatttcctcagcctgtccctaaagtgattctgcagaagaaaggcaatttagtgaatcagctcaat

SEQ ID NO: 480375 - DNA, 611 bp, Homo sapiens
tggagcccgaggtggggggactcaccagtgggtgggcaggctcagggcaacctccctggaagccctccttagccccaccctggacccacaccactggcccagagaacgggctggagcaagccagagggccagggctggggagctcccgcatcctctctaccggttcgagtccataggctatgagaacctgtttcctcacctgtgaaatgggccaagaccatgacccttgcagacttgttggaaaagatgaagtgagtaggcacagcacaggggcagtgcactgtgagcccccatggggtgctactgctggtattagccttatccagttaagacgaggggacctagagggtcttcggccaggctgcagagggggaaggtctcaggggagatggcagcttccgggccttcccttccccttggcaccccaggttccattttaacagatatcataatttttaattggttttctcctccmctggctaaaaggctattagctccccgctaggtgatcgcatcccattttcttcacaccaccaaggaaacagtgatttcctcagcctgtccctaaagtgattctgcagaagaaaggcaatttagtgaatcagctcaat

SEQ ID NO: 480376 - DNA, 611 bp, Homo sapiens
tggagcccgaggtggggggactcaccagtgggtgggcaggctcagggcaacctccctggaagccctccttagccccaccctggacccacaccactggcccagagaacgggctggagcaagccagagggccagggctggggagctcccgcatcctctctaccggttcgagtccataggctatgagaacctgtttcctcacctgtgaaatgggccaagaccatgacccttgcagacttgttggaaaagatgaagtgagtaggcacagcacaggggcagtgcactgtgagcccccatggggtgctactgctggtattagccttatccagttaagacgaggggacctagagggtcttcggccaggctgcagagggggaaggtctcaggggagatggcagcttccgggccttcccttccccttggcaccccaggttccattttaacagatatcataatttttaattggttttctcctccactggctaaaaggctattagctccccrctaggtgatcgcatcccattttcttcacaccaccaaggaaacagtgatttcctcagcctgtccctaaagtgattctgcagaagaaaggcaatttagtgaatcagctcaat

SEQ ID NO: 480377 - DNA, 564 bp, Homo sapiens
atttgtccattatgagcaatttcacaaggtttgatcaaataataaactaaatggtgagaaggcagcttggtaaagtctaaatctttttggtccagttaggagctggggtggggtggaagggaactgatattccctgcgcacctgcagtatgtctgggactattaccagtcatttacggagcgcttcctctgtgccaggtactggattaggcacttcattaaaggctcagtgagaactgcgacctgcccatgctcatggaaaagagtcgtggggctggaattcaggtccagatcagcattaggaactagcttccaaatgctgagggctcccycgcgtcctcacacctagcgtggaagtgttccctggtgtacattctgctgggagggagtgcagcccctccatttaggaaaagcctctcctggcctgggttctgttccttccctttaatttcctctggggactgtcctgagaatgtaagctgcccaggtgccgtctgagccaccagatgggcctgggctcacccatgactcatggaccagactgaagccaaccctccattttcag

SEQ ID NO: 480378 - DNA, 619 bp, Homo sapiens
ctaaaacacaaattttatccaagagtaatcagttgaaacatgaacttgccggttgtatttgtccattatgagcaatttcacaaggtttgatcaaataataaactaaatggtgagaaggcagcttggtaaagtctaaatctttttggtccagttaggagctggggtggggtggaagggaactgatattccctgcgcacctgcagtatgtctgggactattaccagtcatttacggagcgcttcctctgtgccaggtactggattaggcacttcattaaaggctcagtgagaactgcgacctgcccatgctcatggaaaagagtcgtggggctggaattcaggtccagatcagcattaggaactagcttccaaatgctgagggctccctcgcgtcctcacacctagcgtggaagtgttccctggtgtacattctgctgggagggagtgcagcccctccatttaggaaargcctctcctggcctgggttctgttccttccctttaatttcctctggggactgtcctgagaatgtaagctgcccaggtgccgtctgagccaccagatgggcctgggctcacccatgactcatggaccagactgaagccaaccctccattttca

SEQ ID NO: 480379 - DNA, 438 bp, Homo sapiens
atattccctgcgcacctgcagtatgtctgggactattaccagtcatttacggagcgcttcctctgtgccaggtactggattaggcacttcattaaaggctcagtgagaactgcgacctgcccatgctcatggaaaagagtcgtggggctggaattcaggtccagatcagcattaggaactagcttccaaatgctgagggctccctcgcgtcctcacacctagcgtggaagtgttccctggtgtacattctgctgggagggagtgcagcccctccatttaggaaaagcctctcctggcctgggttctgttccttccctttaatttcctctggggmctgtcctgagaatgtaagctgcccaggtgccgtctgagccaccagatgggcctgggctcacccatgactcatggaccagactgaagccaaccctccattttcag

SEQ ID NO: 480380 - DNA, 578 bp, Homo sapiens
cttttctcctggcatcaggctggagatcaagaaatacataaaacatagtccctgccctcagttagctcagaatatggtgggggaatggagacagaagcaaatactggtgggacaagtgacgatgggccaaaatatgggcttaaacaaaggttgtgggagctcagaaaaggagcaactcactctgcctgaaagagtcatggagggctccacggaaaaagcaacatttgtgcaggaggagattagaacacagaggagraggatagcagcactccagatgaagggaaggaaatgtgccaagatttcatgggaatgagaagatgtaaactgctcaggaaaaaccatggttgaagctcttcacagtggctgaagcatggtgtgattgtcagttttgcttgtcaacttggtcaggctgtagtactcaactattcaaccaagcactgatctaggtattgctgtgaaggtattttgtagtcgcaattaacctctacaatcagttgactctatttaaaggacattattctgtactatctgagtggacctgatccacttcatcccaaaggtaaatgattctccaacag

SEQ ID NO: 480381 - DNA, 585 bp, Homo sapiens
tggccaagggatcacttatttttgacagtgacaccagaactatggcaacagcattagcaaagaatgctactgtccaggaggaccaatcaaatgttcttctttttatccccatgagacaagagtcaccagaactgggtgaacacccctggggtgcatcttctgagcatatcagggaaatatggctaaagagagacgcagaggaagaaagacagcatttcatcaacactagaatgaacactcagacacatttaaacatttaaaagaatatgctttttaaaagtrctccacattgagaaagtagaaaatagtagctacatacagaaaaggtatttactataatttagttgttgtttttcttgcatcctataaaacacggatagaacacctctactggagcagcacattcccagttctgcagacctgccttaagagtttagggaaagatgtgtgtaggtgacagctctgtgtatccagagtgtgacatacacaagcatgtcgtacagcagcaagtctgctttgcacttgaaaatccttcaggcaggacaggaggttctcaaggtacttctgaacaccctttgacatctt

SEQ ID NO: 480382 - DNA, 595 bp, Homo sapiens
tttccatgggagaaagatagaaaggggagcatttcatccaacttaaatgctatagcctcttacactgaacactggaaagctctgtcactcttaggcacagagaagctggggatcaccctgaagttgctatcacttttggttctactcttgacaaaactgccctttgtcaagtaaagaactttacwagctcatcaagtgatatcaacatctttggacatatttgattaaaaccaagggactgctaagcctctgataagttttctctcaggagaattatttggtagataaaatacataaggcaacacattgcaagccgcagaattaacaatccatgtaccggctctgacttaaagaggcagttgtggtcagactttccatcctcacctatttcaaactcagccaaccctccttagcagtatattagggaatgaaaatgtcctttagagattcgctgacatttgatgaagatggaaatctcgattagaaagatcatcatttgcaaactatcagaaagaaaacactgactttcttggtcaaaatgttttactggtgaaatgttttaaagtgtacctatggtaaaaagttcaacagtaca

SEQ ID NO: 480383 - DNA, 644 bp, Homo sapiens
attgaagactgaaggcccagtgggaarccgagtagtgctacagctacagatctcaagtgaaactaacagaactctgtaattgaaattacagatcccattctgatttataaaaccaataattatttggaatgatgaaaaagatatgtcctgaacatggtatgacagtaaaataaatcaaggaagaaccaacaaacaaaggaactatccagatacagtaatgtgatgagtaagatgttagagaaccagggtggaggaaaggggctgtattgtgaagagtctggcagctgccaatcacagttgtctggaaagacataaaggctaaaaggattcatggatatatcaccctgtgtccaaatgcactactttgaagcatggagaatctatccttgcctgcaatgctcctttattagatgacacaagaaaaacccatctcctttaaaaaaatgacagaacaacaacaacaataggaaactaatacatgatagtcacaaagactacaaaaacaaagaagagatgaaaaaacaaatgacaagaaagaatattccctaaatataaaaagtttttctggaagaaatataaattgtgacaaacacattatcttgcactcaaaaactaattcaggaataaagaaattgcctttacag

SEQ ID NO: 480384 - DNA, 620 bp, Homo sapiens
atgaataacagcccaaatgyccccgctccagaatagccaaagagcctccagaaatgtgagcaatggcctctgttgggctgaccacacatgcatgagtgaatgtagacaagacccaaggaatcattgtttaagccactgagttttggagtggtttgttacatggcaatgtctaactgatacaggtactatattatgatagaatataaggataggacattaagattggaacaggttttaaataatcaagcatctgatatttaaatttcttttgcaatatttctaacaactgagcacctaatttatttaaaagtctctagcagtaggaaacttagtatttacaaagacagttcttattattggaaatatcttcttatattggtcagaagcctgcctatacacaatttcttcaatgatccacgttctgtccaatgagaagctcaggacaatatagtcccttttataacctaatcttttgaatacttgaagacctctaacatgaattctcacttgaaccttctcttttctagattcagcgtgtatgaaggcaaagcctctgtcagcatggttccctgaacaactatgaagatcaaagtgcaccctcctcctcatatctatatgtt

SEQ ID NO: 480385 - DNA, 620 bp, Homo sapiens
atgaataacagcccaaatgcccccgctccagaatagccaaagagcctccagaaatgtgagcaatggcctctgttgggctgaccacacatgcatgartgaatgtagacaagacccaaggaatcattgtttaagccactgagttttggagtggtttgttacatggcaatgtctaactgatacaggtactatattatgatagaatataaggataggacattaagattggaacaggttttaaataatcaagcatctgatatttaaatttcttttgcaatatttctaacaactgagcacctaatttatttaaaagtctctagcagtaggaaacttagtatttacaaagacagttcttattattggaaatatcttcttatattggtcagaagcctgcctatacacaatttcttcaatgatccacgttctgtccaatgagaagctcaggacaatatagtcccttttataacctaatcttttgaatacttgaagacctctaacatgaattctcacttgaaccttctcttttctagattcagcgtgtatgaaggcaaagcctctgtcagcatggttccctgaacaactatgaagatcaaagtgcaccctcctcctcatatctatatgtt

SEQ ID NO: 480386 - DNA, 620 bp, Homo sapiens
atgaataacagcccaaatgcccccgctccagaatagccaaagagcctccagaaatgtgagcaatggcctctgttgggctgaccacacatgcatgagtgaatgtagacaagacccaaggaatcattgtttaagccactgagttttggagtggtttgttacatggcaatgtctaactgatacaggtactatattatgatagaatataaggataggacattaagattggaacaggttttaaataatcaagcatctgatatttaaatttcttttgcaatatttctaacaactgagcacctaatttatttaaaagtctctagcagtaggaaacttagtatttacaaagacagttcttattattggaaatatcttcttatattggtcagaagcctgcctatacacaatttcttcaatgatccacgttctgtccaatgagaagctcaggacaatatagtcccttttataacctaatcttttgaatacttgaagacytctaacatgaattctcacttgaaccttctcttttctagattcagcgtgtatgaaggcaaagcctctgtcagcatggttccctgaacaactatgaagatcaaagtgcaccctcctcctcatatctatatgtt

SEQ ID NO: 480387 - DNA, 637 bp, Homo sapiens
cagctccattttcttaatcttctgagtcagttttatgattattttgccaccataaatttaggaataaaatatgcctaaaagaaactatttataatctaccccaagaaaactatggtttaactaagcctggttgggaatatagatagtaaattttatcttaatttcatagatgctgtaccaaagtatatttcccactaaatgggtctggggttgtgaggtctcatagatccacacattgaagtagtcaccctgatgtctggtctttktagttaatatcaaaagctaacctaatgatcttatgactttctaagtagagaagatatcaagtgctcctgagactagagagagctggaggtaggccaaaattagataggcagtcttcttgaccacaggaagctaatggctcagcaaccacttcttgattcatgggttttagaaagttggcggccttgtggttaacagttttcctaattaagaaactctctgtctagattaagcctttgtgcataggacattatgtgcttgctctgcgtgaggactgcagacagtgtgctgaggactaacaggcatgatacaatcaagagtctgtgattaggcgtactccctgaagtctcacatgaggctcctttcgagcagc

SEQ ID NO: 480388 - DNA, 675 bp, Homo sapiens
tacaacttggtgaactatgagctattagcagcttcaggatgacagctccattttcttaatcttctgagtcagttttatgattattttgccaccataaatttaggaataaaatatgcctaaaagaaactatttataatctaccccaagaaaactatggtttaactaagcctggttgggaatatagatagtaaattttatcttaatttcatagatgctgtaccaaagtatatttcccactaaatgggtctggggttgtgaggtctcatagatccacacattgaagtagtcaccctgatgtctggtctttgtagttaatatcaaaagctaacctaatgatcttatgactttctaagtagagaagatatcaagtgctcctgagactagagagagctggaggtaggccaaaattagataggcagtcttcttgaccacaggaagctaatggctcagcaaccacttcttgattcatgggttttagaaagttggcggccttgtggttaacagttttcctaattaagaaactctctgtctagattaagcctttgtgcataggacattatgtgcttgctctgcgtgaggactgcagacagtgtgctgakgactaacaggcatgatacaatcaagagtctgtgattaggcgtactccctgaagtctcacatgaggctcctttcgag

SEQ ID NO: 480389 - DNA, 550 bp, Homo sapiens
ttccattgaaataatagaaaactatcatccaaccattatctctaaatgctgtctacagatccaaagcattgattcctgcgaaacagaataaaacccagataatccttgtatattgttagacacttgaaaacttttctctctaaagtatgtttttttctcttttacaaactgtggcctcaaagtcacagaaaccgtcactcttttgcctttgctcataccagttttcaataacttttagaataaaggacaaaatttcaatcctctcaagactcaactcatgtgttttaatggaaaatttcttwccaaaggatgtttttatagttcttacataatcatagaataaatataaagagactttgagagatgacctaatctattctcatgcttcctctaaagtaaacagcaaaaccaccctaaagtaatgggaatcatgctatttagtacaaaagcttgagaaaggactctactctgtgttacatatcacaataataattccctttaaactaacaggtgagttctcattctgcataaaagaagcagcatcaattga

SEQ ID NO: 480390 - DNA, 504 bp, Homo sapiens
ggcagaggcatcgagcgctggctgaagyttccggtgggaaatgggcagtgcctagaagagaaggaaacgatgcatgagaaggttccagatgtctatgaggaacatgacgtgtcctgtccactactctgcttttcctcgtccgcctccccaccactggaggaaacctagaagctggtgcaggaaatcctcctctcaacaacccaagaacactttgcacaagaggggtgcgccctcggaggttgctcttccccagaggcctctcctcgctggggtttcttgaagacagatacttggactcctgctgggaccaggcaggccacccatcctcaggggcagtgactggtcactcaccagacctccctgcatcccccttctctctcctcccccagcacgggctgaaccccgcagccacagattctgatcaggattagggtgtgggtgcaaatccaaggtccaccaaaatggaaaagaagtaaccgatgggaacacgtctccaccaagaca

SEQ ID NO: 480391 - DNA, 604 bp, Homo sapiens
aaatccaaaggcagtgagggtagttttcagcatgctttctttaggaaggtagttatttggatcaaatataagattcccttctattttggctgaggctgggtcaagtgatggaagagaaacagatttgtagagttgatagttccgagagaattttctgaagtccatgacagttggaagttgagattctttcagagcttctttcactaactttttcagactagataagaagaagtatattttgagctgacacaccatgttattatcctttgactcttgcaccccaagtaaatatggatttccaatcactaccaaaatgtctkgatttcattgaccctaagtctttgggtctagatctgctacacatttgcacaagtgtttgtttcagaagcaagggcagacagtggctatgccaaaacctagggttggaattccagctcagggccctcagtggtatatggggtgaatagctcttacttactcttggatatccaattcttctgagttcaagatattggcaatatgggaagccacaaagttcttcacttgctcattctgttcccatggtagaatttggacaattttgttaatatctgcctgtgaagga

SEQ ID NO: 480392 - DNA, 454 bp, Homo sapiens
tgactgcttcatcactgaggcctctcagctcagtaaccagcttattgaagagattagctctctggatattttgctcagagatggttagttttttcagttcctggagagtcttcaaaacagcttcggcctgctttggaggtgatgtggatttggtgctctcaaatgcgaggcccatcttcttaktacctggaagatggaaagtgtcaaaggaactctagctttcttcatctcaaccatatctttgtctactggaagctggaaattgtggagtatcagcacaggggaaaagggaaagaaactatcctgtattcaatgcctgctagatctggctctgccataggtgattgacttgttttcactgactcatcatcctatccctgtggggtggcattattgttcaatttaatgataaattcagccctgcttctgagacccacagagtttttgggccatg

SEQ ID NO: 480393 - DNA, 637 bp, Homo sapiens
tacatatgtatatatattatacatataataaaattacattggacaatggaaaaaggaactgagggctattaaagatacattcaactataacagaaaatgccaactcagtttaaatttaaattttwtatctctcataataagaagtttcgagatagggaagctacagccatggtactggcagggattgggctccacttctctatgaatgttaattcttctctctgctcttttggctttatgctcaggcagatagcaagatagttgcagaagttccagtgattgcattcaattatgataaagtccagacacagaaagcaaatgtactcttctgatacctcttataatctaggaaacctttcctggtagctccccagctaccttccctgaagtctctatgacaaggtttggttgcatatctacacctgcaaccaatcactgtcaaggagaatggactaccatgatgacagagtctcagacccagggtagacgttgggtaggcatccaacattatctgctgaatttgggataggaagtgctgaggggtagtgagagctatgttctcatccaccttggaagttagtagataacttcctaacatgatgaattaagatattaaaatataattatattatttaga

SEQ ID NO: 480394 - DNA, 637 bp, Homo sapiens
tacatatgtatatatattatacatataataaaattacattggacaatggaaaaaggaactgagggctattaaagatacattcaactataacagaaaatgccaactcagtttaaatttaaattttatatctctcataataagaagtttcgagatagggaagctacagccatggtactggcagggattgggctccacttctctatgaatgttaattcttctctctgctcttttggctttatgctcaggcagatagcaagatagttgcagaagttccagtgattgcattcaattatgataaagtccagacacagaaagcaaatgtactcttctgatacctcttataatctaggaaacctttcctggtagctccccagctaccttccctgaagtctctatgacaaggtttggttgcatatctacacctgcaaccaatcactgtcaaggagaatggactaccatgatgacagagtctcagacccagggtagacgttgggtaggcatccaacattatctgctgaatttgggataggaagtgctgaggggtagtgagagctatgttctcatccaccttggaagttagtagataacttcctaacatgatgaattaagataytaaaatataattatattatttaga

SEQ ID NO: 480395 - DNA, 648 bp, Homo sapiens
gcaaatacttcataactaaaacaccataagcaattgcaacaaaagccaaaattgacaaatgggatgtaattaaactaaagagcttctgctcagcaaaagaaactatcatcagagtgaacaggcaaccttacagaatgggagaaattttttgcaatctattcatctgaccgaggtctaatatccagaatctacaaggtacttaaacaaatttacaagaaaaaagcaaataaccccatcaaaaagtgggtgaagcacataaaattactttaaaattcaagcaaatattttcttaaaaataagattaataaggagagagaattgcctcaccagatgtaaaaatttactatacaaatatagtccatgtgatatgatatgactctgagacagaaatagaaaaatagaactttgaaagttaaagattagagggaaatagatccaartacatatataatgttaggattaagctttactccaagagacccaaaataccagtggctttaaaaagaaaatgttgctttcctcattcatctggagaaaaaaattaagtctggtatgcaatgctgctgtgtcagtgatattgactccttctatcttttttttgttatattgtgtggtctcaattctcgaggtcattcatgatccaaggca

SEQ ID NO: 480396 - DNA, 648 bp, Homo sapiens
gcaaatacttcataactaaaacaccataagcaattgcaacaaaagccaaaattgacaaatgggatgtaattaaactaaagagcttctgctcagcaaaagaaactatcatcagagtgaacaggcaaccttacagaatgggagaaattttttgcaatctattcatctgaccgaggtctaatatccagaatctacaaggtacttaaacaaatttacaagaaaaaagcaaataaccccatcaaaaagtgggtgaagcacataaaattactttaaaattcaagcaaatattttcttaaaaataagattaataaggagagagaattgcctcaccagatgtaaaaatttactatacaaatatagtccatgtgatatgatatgactctgagacagaaatagaaaaatagaactttgaaagttaaagattagagggaaatagatccaagtacatatataatgttaggattaagctttactccaagagacccaaaataccagtggctttaaaaagaaaatgttgctttcctcattcatctggagaaaaaawttaagtctggtatgcaatgctgctgtgtcagtgatattgactccttctatcttttttttgttatattgtgtggtctcaattctcgaggtcattcatgatccaaggca

SEQ ID NO: 480397 - DNA, 648 bp, Homo sapiens
gcaaatacttcataactaaaacaccataagcaattgcaacaaaagccaaaattgacaaatgggatgtaattaaactaaagagcttctgctcagcaaaagaaactatcatcagagtgaacaggcaaccttacagaatgggagaaattttttgcaatctattcatctgaccgaggtctaatatccagaatctacaaggtacttaaacaaatttacaagaaaaaagcaaataaccccatcaaaaagtgggtgaagcacataaaattactttaaaattcaagcaaatattttcttaaaaataagattaataaggagagagaattgcctcaccagatgtaaaaatttactatacaaatatagtccatgtgatatgatatgactctgagacagaaatagaaaaatagaactttgaaagttaaagattagagggaaatagatccaagtacatatataatgttaggattaagctttactccaagagacccaaaataccagtggctttaaaaagaaaatgttgctttcctcattcatctggagaaaaaaattaagtctggtatgcaatgctrctgtgtcagtgatattgactccttctatcttttttttgttatattgtgtggtctcaattctcgaggtcattcatgatccaaggca

SEQ ID NO: 480398 - DNA, 681 bp, Homo sapiens
actaaaacaccataagcaattgcaacaaaagccaaaattgacaaatgggatgtaattaaactaaagagcttctgctcagcaaaagaaactatcatcagagtgaacaggcaaccttacagaatgggagaaattttttgcaatctattcatctgaccgaggtctaatatccagaatctacaaggtacttaaacaaatttacaagaaaaaagcaaataaccccatcaaaaagtgggtgaagcacataaaattactttaaaattcaagcaaatattttcttaaaaataagattaataaggagagagaattgcctcaccagatgtaaaaatttactatacaaatatagtccatgtgatatgatatgactctgagacagaaatagaaaaatagaactttgaaagttaaagattagagggaaatagatccaagtacatatataatgttaggattaagctttactccaagagacccaaaataccagtggctttaaaaagaaaatgttgctttcctcattcatctggagaaaaaaattaagtctggtatgcaatgctgctgtgtcagtgatattgactccttctatcttttttttgttatattgtgtggtctcaattctcraggtcattcatgatccaaggcagctgcttctgtttcattcatcccacctggattacagtctgcaagaaa

SEQ ID NO: 480399 - DNA, 595 bp, Homo sapiens
gtagtagaggatcttcacttagtgcctgagtggctttgactctggagaggcggacccatggagagacacctcggagatttacagccattggggtggtaggaagaacttgatatggcccagtccagatggattctaaaggcctttcctcctatgcgagagttttaagatacacccagtcctcaggcatcagtttaggctgtgtgttctctggaaaagagggattgggttttagactatgaagattttggtaatgggtaatggttttgatggtttgtcctaagagatatcacatgctgtgtgaaataatgactttctggatctaacaagaggtctgtttgtaagaagggccttccataaagaacttcaaatgggctgagatgggtttctgaatttggggtaatgcaagaccttaagagggcaatagggagcacagcgggccgtgactgttcagtttcctgtattagctttgtgagatgcctttttatggtttgattagctttttctacttttccagaggattgtggataccagaatgcaagcaagtwgtatttcatttgaaggccttagcaacttcttgttttgagaaatgaaggca

SEQ ID NO: 480400 - DNA, 626 bp, Homo sapiens
agctgttagctgaaaatcactgagtgacctcagttgacatcatgtctcggtagagaaacacttttgtgaaatagtcactatttctgtggatatttatagtgaccagtaggtcgctatatctcagggggaagcagagttgttgaattttgtatacacaatggaatattattcagccataaaagaataaaatcatgacattgaaaataaaatggatggaagtggaggacattattttaaggaaaataagccaggcatagaaagacaaatatgtcatcactcatacgtgggagttaaaaaaaaaaaatgaactcatggagataaagagtagaaygacagttaccagaggctgcaaagggtagcagagaaggggggataaagtggggatggctaatgggtatgaaaatacagttagatggaatgaataagatctggtattcagtagcaaaatagggtgactgtagttaacagtaatatattgtataatttaaaatagcaaaaagggtagaattggaattttcctaacacaaataaatgataaatgcttgagataatgcataccccaattaccctgatttggtcattatattcctatatcaaaatatcacacttaccccataaatatatat

SEQ ID NO: 480401 - DNA, 626 bp, Homo sapiens
agctgttagctgaaaatcactgagtgacctcagttgacatcatgtctcggtagagaaacacttttgtgaaatagtcactatttctgtggatatttatagtgaccagtaggtcgctatatctcagggggaagcagagttgttgaattttgtatacacaatggaatattattcagccataaaagaataaaatcatgacattgaaaataaaatggatggaagtggaggacattattttaaggaaaataagccaggcatagaaagacaaatatgtcatcactcatacgtgggagttaaaaaaaaaaaatgaactcatggagataaagagtagaacgacagttaccagaggctgcaaagggtagcagagaagggggsataaagtggggatggctaatgggtatgaaaatacagttagatggaatgaataagatctggtattcagtagcaaaatagggtgactgtagttaacagtaatatattgtataatttaaaatagcaaaaagggtagaattggaattttcctaacacaaataaatgataaatgcttgagataatgcataccccaattaccctgatttggtcattatattcctatatcaaaatatcacacttaccccataaatatatat

SEQ ID NO: 480402 - DNA, 626 bp, Homo sapiens
agctgttagctgaaaatcactgagtgacctcagttgacatcatgtctcggtagagaaacacttttgtgaaatagtcactatttctgtggatatttatagtgaccagtaggtcgctatatctcagggggaagcagagttgttgaattttgtatacacaatggaatattattcagccataaaagaataaaatcatgacattgaaaataaaatggatggaagtggaggacattattttaaggaaaataagccaggcatagaaagacaaatatgtcatcactcatacgtgggagttaaaaaaaaaaaatgaactcatggagataaagagtagaacgacagttaccagaggctgcaaagggtagcagagaaggggggataaagtggggatggctaatgggtatgaaaatacagttagatggaatgaataagatctggtattcagtagcaaaatagggtgactgtagttaacagtaatatattgtataatttaaaatagcaaaaagggtagaattggaattttcctaacacaaataaatgataaatrcttgagataatgcataccccaattaccctgatttggtcattatattcctatatcaaaatatcacacttaccccataaatatatat

SEQ ID NO: 480403 - DNA, 626 bp, Homo sapiens
agctgttagctgaaaatcactgagtgacctcagttgacatcatgtctcggtagagaaacacttttgtgaaatagtcactatttctgtggatatttatagtgaccagtaggtcgctatatctcagggggaagcagagttgttgaattttgtatacacaatggaatattattcagccataaaagaataaaatcatgacattgaaaataaaatggatggaagtggaggacattattttaaggaaaataagccaggcatagaaagacaaatatgtcatcactcatacgtgggagttaaaaaaaaaaaatgaactcatggagataaagagtagaacgacagttaccagaggctgcaaagggtagcagagaaggggggataaagtggggatggctaatgggtatgaaaatacagttagatggaatgaataagatctggtattcagtagcaaaatagggtgactgtagttaacagtaatatattgtataatttaaaatagcaaaaagggtagaattggaattttcctaacacaaataaatgataaatgcttgagataatgcataccccaattaccctgatttggtcattatatwcctatatcaaaatatcacacttaccccataaatatatat

SEQ ID NO: 480404 - DNA, 631 bp, Homo sapiens
ctgcagttggacgtgctttgttaggtgaggctgtgtaggtaattgaaaggaccctggggctaggagtttgaagctgttgcatctggtttctaacactcagtttttgacttgagaataagttatttaacttgctgaatctcactgcccttgaccattaaatggaggtaatgccatctctactgttttcatcatagggtgattgtgaggcatacaatcagatttgaacatgaaggactttatttgaaagcttttaaaaacgttaacacataacatagtttctattctctcacagtcattgttttgagggaaatagataccattctcccttggtatacacaggaattggttccaggacccctgcatctaccagtattcgcccatactcaagacttacagtcggtccttcagaacccttggatgtaacaattggctctctgtatatgcaggttttacaccctgtgattattgatattttkgatccacatttggttaaaaaaaaaaatccccatataagtggacccgggcagttcaaatccatgttattcaagggtgaactgtatatgtacatacctatcacagcaatgcgctgagtacacaatcaaagcatgaacacatcacttgtagaacttga

SEQ ID NO: 480405 - DNA, 615 bp, Homo sapiens
ttgtgtccatgacacagggagatctcattagtgttgtattctgcgcagccaacttgcttaaaaagagcgtcagagcactggaaatggctttttgcttgttggttgccatcatgagaatcgaaccttttgttctccaattcattcggtatttcttgggtgcctgcttcacctgtccaggcaataaggacaccatggygttccaaacctagcatggtccctgccaccaggaagcagtatatggtgtcaagggggcagagatgtcaaccacatactcatgcagtgaaatctgagccttcactgtggctggctctacatagaagaggtttgtgtgctaaggggacaggtaacaggagaatttaatctagtcagcaagggtagaatttgaggaagggaggaactgtctgagatttaagttgagcacgtgttacccaggtggcaagggggaacaacagagttccaggcagaagaaaccacatgttggctttctggctactaagcagctttgcccggctcaatagctcatatagggctaatttttaaaagccaaggttgcttcccctcttccacagctccaactggactctgtcatgtgcttaacatgaattcatttgtgtt

SEQ ID NO: 480406 - DNA, 615 bp, Homo sapiens
ttgtgtccatgacacagggagatctcattagtgttgtattctgcgcagccaacttgcttaaaaagagcgtcagagcactggaaatggctttttgcttgttggttgccatcatgagaatcgaaccttttgttctccaattcattcggtatttcttgggtgcctgcttcacctgtccaggcaataaggacaccatggtgttccaaacctagcatggtccctgccaccaggaagcagtatatggtgtcaagggggcagagatgtcaaccacatactcatgcagtgaaatctgagccttcactgtggctggctctacrtagaagaggtttgtgtgctaaggggacaggtaacaggagaatttaatctagtcagcaagggtagaatttgaggaagggaggaactgtctgagatttaagttgagcacgtgttacccaggtggcaagggggaacaacagagttccaggcagaagaaaccacatgttggctttctggctactaagcagctttgcccggctcaatagctcatatagggctaatttttaaaagccaaggttgcttcccctcttccacagctccaactggactctgtcatgtgcttaacatgaattcatttgtgtt

SEQ ID NO: 480407 - DNA, 585 bp, Homo sapiens
ctttaagatcctaggaagggagaggagggaaggaacatacagctagaaaggagaagtaagaggctaatagtgggtcttcacattggcaggatgataaattaattgcccctttgaccactctctgattccctctcacttcacctcaaattctgagctgctcatttatggattcctcttacatttacatttagttgttatgtcctcctrtgccactaagaactgacccctaggtcctcagcttaaaaagacctgccctccctgatggagtgagacagcggatttccagaaagattgagtttgggtccgatgtttcttctcctaatactgctttgtttgttcaccttaagaacaccagccccttgtggtgaagtaaactcttattcacgaagggttcattcaacaaaaacttgaagtgcacctaccaaaggtcagacattgttctaggagtgaggatatagcaggaaacaagtaaaaagcccccagtgtaaagggatttacttagcgaaacacataactgcagaaggtttcagaaagtggttctatgccatgagaataataaaacaggctaggagagaggaggacaga

SEQ ID NO: 480408 - DNA, 585 bp, Homo sapiens
ctttaagatcctaggaagggagaggagggaaggaacatacagctagaaaggagaagtaagaggctaatagtgggtcttcacattggcaggatgataaattaattgcccctttgaccactctctgattccctctcacttcacctcaaattctgagctgctcatttatggattcctcttacatttacatttagttgttatgtcctcctatgccactaagaactgacccctaggtcctcagcttaaaaagacctgccctccctgatggagtgagacagcggatttccagaaagattgagtttgggtccgatgtttcttctcctaatactgctttstttgttcaccttaagaacaccagccccttgtggtgaagtaaactcttattcacgaagggttcattcaacaaaaacttgaagtgcacctaccaaaggtcagacattgttctaggagtgaggatatagcaggaaacaagtaaaaagcccccagtgtaaagggatttacttagcgaaacacataactgcagaaggtttcagaaagtggttctatgccatgagaataataaaacaggctaggagagaggaggacaga

SEQ ID NO: 480409 - DNA, 645 bp, Homo sapiens
gctgaagagcagcgagcaatggcaagaattaaaactatggcaaaatattaaaattaagctagagtctctccttccctactagcaccactacagscctcatgacctcagagatccttgctctctggtatactgccaaattcacactggccaaattttagtttgacaaaacaagaactaatttgtctcggataattagggaacacaggtctctagcacctgatgcccacgttcccacatgcaccaccctgatgggcctatgatgcccctttctccactccaagtcatgtgactggactcacctcagcctggcttcacaggctctgccttcctgtgctatccagcccactaatactctgcagaagagcaaagactgattttctcagaaacccagagaaatgagtgttctaagattttagagaaatctcatgaaaatggagattataaaaggcatctccttggtgttaagaaagaaatgtcatgagcaaataaggatttcagattttaattcacattttatgcatatttttctcatctattttgtttctttacatttaaaatgggatcatttttactaaatacctgttcagtcatcagataagtgtaggaggaaatgaattacaacaccatgctcttaagtagcctata

SEQ ID NO: 480410 - DNA, 645 bp, Homo sapiens
gctgaagagcagcgagcaatggcaagaattaaaactatggcaaaatattaaaattaagctagagtctctccttccctactagcaccactacagccctcatgacctcagagatccttgctctctggtatactgccaaattcacactggccaaattttagtttgacaaaacaagaactaatttgtctcggataattagggaacacaggtctctagcaccygatgcccacgttcccacatgcaccaccctgatgggcctatgatgcccctttctccactccaagtcatgtgactggactcacctcagcctggcttcacaggctctgccttcctgtgctatccagcccactaatactctgcagaagagcaaagactgattttctcagaaacccagagaaatgagtgttctaagattttagagaaatctcatgaaaatggagattataaaaggcatctccttggtgttaagaaagaaatgtcatgagcaaataaggatttcagattttaattcacattttatgcatatttttctcatctattttgtttctttacatttaaaatgggatcatttttactaaatacctgttcagtcatcagataagtgtaggaggaaatgaattacaacaccatgctcttaagtagcctata

SEQ ID NO: 480411 - DNA, 580 bp, Homo sapiens
tcctatcttggaaccttaaatccttggaagaaaactaagttgccaatgtagttgtagatgttgaatattgcctttctcctgagcaaattggtgaagacttatttttctacttaaggacatgtaagaaaatcgcaaagcatggtcgtgatgacataatagtaatatttttctatacccctctcctctaattcactgtgaagctctcaagagcaaagcggtatggggtttaccatttgctttcttatacctaacggttgccttctaatgcagaggagcttcgtggaatggacagatgaatgccgtgacaataaattgaaacagtsagactctttttccaaacagtagtatctggaagtaccccaggtcttagagaagagtcagattccatttgtagcagggacaaagtcaggagaccaaacagaatactcagtagggcaacagaagttaactgacacttgccatctgtacaggcctgtgtgttccccaaagccctgtgctttctctggcagaagctgtctcctagtcttctcttccatcctctggccctttgcctgctaccttgtcactattctcagaagcc

SEQ ID NO: 480412 - DNA, 615 bp, Homo sapiens
gacctcaaatccatgtgttccccttctacagtcttatcacactttgctgctgtaagataaacatttgtcaatgaccaccacctcaatatagattattctaccaaacktaatgcttccgtctcattgtccaccatatcttagttttggaactgataatacatgtaaatgatgcacacaaaaattattccacactctcacagagaaactattgcttcctagagagcctcaaatttatagctgctcagtcttttggggcctcctttgaaatgtgaatcagagggagaatttgggttgttttggccttaactgctaccagtacacaaaagtcccgttactctatatcttctttgtgtcaaatcccttgcattactgctagctgcctccaagcttgccagaatcaagaacttggataaaatctagctggcggaaattcaatccaggcaagacaaaagtgatgctgataggcagaagtatttagagtaaatagggagaagtgctgtttcgctggcaatcgggacatcatacccaccaaacataaacagctttgtggtgttactggactctgttgcttctggacttctaacagctactgtggctggaaatgccatcttccat

SEQ ID NO: 480413 - DNA, 570 bp, Homo sapiens
tccatatgcaattggctatacctttaatcctctaagtcataaaactatttatattattaattaatttttataatcaatgatgcccaaagaggccttaatttcttagtcccctttcactttcattatcagcatcagcaatttgttagggccattttggaggaatcctccctctctaaaaataaattctttgccacttgtcatcagtgtatcaattggagaaaggtctgttaagatgcaaatgctgagtggttggtaggcaccctcaccagaagctgttcactctaggcaacctcttagataaacagcctgacatagtcacttagtatcacaggcgtctcaaatttaacatctccaatattaattcttgatttggcactatcccaaactgctccttccccagtcttcmccatgtaatttaagggcaaatccaaaacaccagtaaaccctgctggctataccttaaaaacagaataatcatctcactacttctcaccatctcaactgctataccctagtaggtcaccatcatctctagattaccaacagattgctaacagatcttgtttctac

SEQ ID NO: 480414 - DNA, 596 bp, Homo sapiens
cctaggaattgccacattaacctcatttttgaagaaaatatatgccctatcccagatcattatgctactaccttgcctttgccaattactacctaagagatgtcaatgcaggaattcttcagagacttaacatctttactgtctcttctcagggaaacctctctgctttagattcctttaatggtattttacttcttagaatcctttctggagtttcaattcttcttcctgtctacataactcccttttccttcctgaggcagcatttacttttttcctgctctaaggtcataatggtagcaagaaatcatcagagaaaaacacagcaggaagtattttaaaattatcctttttacacataatttaactaatttaatctctgtgatagcttcgcagggttcttttcgcagaagacactgaggttcaaagaggttatatcacttccttatgtgatttaaccaagatcaayagcaaatctggtgttccactatggcaaaccacctcccaaggacctggcaggggacagacactgctgagctgttttccattcacaaggaactgcttttctgcctgggtaaccccagtacatagatctg

SEQ ID NO: 480415 - DNA, 670 bp, Homo sapiens
tggtctagttgggtattggaggtttattcccagaagtatttagaaactgagaggaacccatcaatgatacctgacacctggagtcagccatgtcctccaggcagagggcaattcagtgagtccatatgttctgtccatcccaactttctacccactgatttctttcctgccaaagtactgatggagtcacctcctcaatgtaccacataaaccctctcctctatcacaagaatctcaggagtgttttttggctaattcaacaaattcttggagccagcatacatcaactgcctttcttaacctcctatattacttaagcccctatkaatgaagtttctggtgatataatatgttactgaaacacattcttctttttaatacagacattcctccttaaagtggaaacacatgctagcaggagagctagttcaggcccatgatgggtatcctatgccctggagtccattatgaggctagaattactctcaggagatagacaggaaatatctgggcctaaaccattctgatatgaaattgggtttagaaatctgactcacttttattgaaatatctaagggaagctaccaaatcttaatgaagaaattttgttttctctcccacaagtttccctgcacaatagtcatttctctccctttatggctgtttgaca

SEQ ID NO: 480416 - DNA, 670 bp, Homo sapiens
tggtctagttgggtattggaggtttattcccagaagtatttagaaactgagaggaacccatcaatgatacctgacacctggagtcagccatgtcctccaggcagagggcaattcagtgagtccatatgttctgtccatcccaactttctacccactgatttctttcctgccaaagtactgatggagtcacctcctcaatgtaccacataaaccctctcctctatcacaagaatctcaggagtgttttttggctaattcaacaaattcttggagccagcatacatcaactgcctttcttaacctcctatattacttaagcccctatgaatgaagtttctggtgatataatatgttactgaaacacattcttctttttaatacagacattcctccttaaagtggaaacacatgctagcaggagagctagttcaggcccatgatgggtatcctatgccctggartccattatgaggctagaattactctcaggagatagacaggaaatatctgggcctaaaccattctgatatgaaattgggtttagaaatctgactcacttttattgaaatatctaagggaagctaccaaatcttaatgaagaaattttgttttctctcccacaagtttccctgcacaatagtcatttctctccctttatggctgtttgaca

SEQ ID NO: 480417 - DNA, 670 bp, Homo sapiens
tggtctagttgggtattggaggtttattcccagaagtatttagaaactgagaggaacccatcaatgatacctgacacctggagtcagccatgtcctccaggcagagggcaattcagtgagtccatatgttctgtccatcccaactttctacccactgatttctttcctgccaaagtactgatggagtcacctcctcaatgtaccacataaaccctctcctctatcacaagaatctcaggagtgttttttggctaattcaacaaattcttggagccagcatacatcaactgcctttcttaacctcctatattacttaagcccctatgaatgaagtttctggtgatataatatgttactgaaacacattcttctttttaatacagacattcctccttaaagtggaaacacatgctagcaggagagctagttcaggcccatgatgggtatcctatgccctggagtccattatgaggctagaattactctcaggagatagacaggaaatatctgggcctaaaccattytgatatgaaattgggtttagaaatctgactcacttttattgaaatatctaagggaagctaccaaatcttaatgaagaaattttgttttctctcccacaagtttccctgcacaatagtcatttctctccctttatggctgtttgaca

SEQ ID NO: 480418 - DNA, 597 bp, Homo sapiens
cttctctctttcattctcctactcttgaggtcagaaagccaggtacctggtttccagcttctcttgcagctgggaaaggccatgtgttctatttccggcaaatgagttgaaaggataagtttcatggggggtttctgagatagcttttctttcctgacaattggcaccatgtctttctctcgcttctttctgccttaagcaagaaaagcactaggacaaaaagccaaagctgagactaatacaactgaaagacagagtctggcttttgatggcatcattgattgatgaatcaatgccagcaaccacttgcctctttttaaaaacgactgttagactatcttgctgttgttacttgtagttggaagagttsttaactgatccatcaatatttttgtaccttctccttcaggcaaaaattgtcaggctcgttacatttagagcacatggccagacagaccctcaaaattatcaaatacaatctctaccatcaacattagatatataattcctgttagataaatgcttcatcctaatatcatcatccttttcctagagatttacaactgctaatggtgagcatgtaacttttacccatga

SEQ ID NO: 480419 - DNA, 584 bp, Homo sapiens
ctggcaaaacttaaaagctgaagttatcaaggaatgggctaactcataaaacacttcagccctctttacccctttttggtccaggwaacaccggtgatcacagtagctctttgtgtgcattgttaatgacaagagtctaaacatgcaagtctctctttttatccatgattttttttttcctgagatagaatcactttatcatgcaatgaagctatatgaaggtaagatgcctgagagagtgtttaccttgctagaaaatatttagacgtgtgttgaatgactgatttcgaggtccaactctgcatccttcttcaagagacctctcgggtgagagagcaatgaatagtggcccttggctaccgtgttgggtctgcacggctttcaggggagatggccactctttattgacaggcatttcccttatttaaccacatgttccatgcacagatggtatttatcttcaggagatgactcacgcccttgtcaacatacctttctatattaaatatccctatcacatacaaactggacctcagagtgggctgggtggtattagaacaatctcttccccctttttagaagct

SEQ ID NO: 480420 - DNA, 570 bp, Homo sapiens
cattgtgtgtcagtcctgttagccctttctccctctatgactctgcactcaactgggggctcactgccctgcagtgggttgcgacatggatcccttactagtttctctgctttcaggccyccttcagagtcattgtgtgtgcacagttgccagagtggcctttccatgacacagacctctgtgtaacacattctaacctaaaacacttcaatggcttcccattccccaaaagatagaggccacatttattgcctggctcatatggtcctccatgagctagtctttgtctgtctctccagccccatttcttggtcttccttcctccatacaccatgccacacacctatcaatatggatcatacccagatgtctcttgtctctgtctatattaccctttctcaacttgctttcacccatctgatttctaccataagacctttgtcatgaatttctttgcctaagacatcatctctggccattgtgtgctctgcccttcctcagcagaatgtgccttcagtgtttcccctctggggtcccgtaatcacttataaatatcatcactgcattttg

SEQ ID NO: 480421 - DNA, 570 bp, Homo sapiens
cattgtgtgtcagtcctgttagccctttctccctctatgactctgcactcaactgggggctcactgccctgcagtgggttgcgacatggatcccttactagtttctctgctttcaggcctccttcagagtcattgtgtgtgcacagttgccagagtggcctttccatgacacagacctctgtgtaacacattctaacctaaaacacttcaatggcttcccattccccaaaagatagaggycacatttattgcctggctcatatggtcctccatgagctagtctttgtctgtctctccagccccatttcttggtcttccttcctccatacaccatgccacacacctatcaatatggatcatacccagatgtctcttgtctctgtctatattaccctttctcaacttgctttcacccatctgatttctaccataagacctttgtcatgaatttctttgcctaagacatcatctctggccattgtgtgctctgcccttcctcagcagaatgtgccttcagtgtttcccctctggggtcccgtaatcacttataaatatcatcactgcattttg

SEQ ID NO: 480422 - DNA, 570 bp, Homo sapiens
cattgtgtgtcagtcctgttagccctttctccctctatgactctgcactcaactgggggctcactgccctgcagtgggttgcgacatggatcccttactagtttctctgctttcaggcctccttcagagtcattgtgtgtgcacagttgccagagtggcctttccatgacacagacctctgtgtaacacattctaacctaaaacacttcaatggcttcccattccccaaaagatagaggccacatttattgcctggctcatatggtcctccaygagctagtctttgtctgtctctccagccccatttcttggtcttccttcctccatacaccatgccacacacctatcaatatggatcatacccagatgtctcttgtctctgtctatattaccctttctcaacttgctttcacccatctgatttctaccataagacctttgtcatgaatttctttgcctaagacatcatctctggccattgtgtgctctgcccttcctcagcagaatgtgccttcagtgtttcccctctggggtcccgtaatcacttataaatatcatcactgcattttg

SEQ ID NO: 480423 - DNA, 624 bp, Homo sapiens
tagaacaccaggggatgccttgctgctataggagctgtggccaagcacgtttccttcacactgtattgtcagcaacttgcagataaggacctcatccttccatatccagcccaccagtgtttgttaaactaagtgatgaatacattcaatcaagtttgttaaattgagtagtgaatatagccactgatttaaaaggcaygttttcataggggaataagcacagaggattcagcatcaggagatctagaatgctggtgcctgggctttgccaccagctgtgttagttcaggcaaggcccatgcttgatctgcatcttcaattaaccaccaactcatcaataaaaaggacaaaagaaatcagttataaaagaccttccaactctgacatcctagaatcccataaaatattatctaggctttttttttttggcactggctaatgttaattattttagaaataccattgtatttgcaggtcttaagaaaattactctttaccacagtgatggccaaggtccttccaaatagctaacatgcaaaagcacagttagaggccattaatccacaggtccgtttcccagaaacctgactcattcaggaccttttgatcctgagctcatcaaaa

SEQ ID NO: 480424 - DNA, 543 bp, Homo sapiens
tcctctgaatgtatgagctgctttactcctaagtttgctgacattgttgcaaatgcttatcagaatggtaagtagaaactttatagacaattattgaacacaagcatgaaacttaaagctagactgggtactttgacatcatctagtaaatatttccatttgactgatggcgagcatggtggggattcttagtgtcttgagtcatggctagaactggatcgtcttgataccarcccagtgttccttacattgatcacaaatatgggcagtggtctttatttttccaaaaccccactcagggagtccagtaacattttgtaggtggttttaattatcttaacatagaacatttgagtagtttattaaggaacagctcaaaaagaaaacaccatttcggatcatttataaatcttttgtgtttgggtgtagatacctataaaggattctataaaatacagcagtgccttttgaggcctaaagaaattgctaacgcaggagggaaatgccataacatgtacatttctattaattttgttgctggtt

SEQ ID NO: 480425 - DNA, 499 bp, Homo sapiens
aggaaattactttgacacctgcaacgttaattaattaccatttcccaaagtaactaagggtgacattctgtaacaacagaactgacaagcatggccatgaaaatcctaaaatacaatacatcaaaggatatttttcttcatttccatagcttaattcacaaagcaaagaaacataatgcaattttttttttttgagacagggtatcactatcgcctaggctggsgtgcagtggtatgatcccggctctctgcaacctctgcgtcctgggttcaagcgattctcctgcctcagtctcccaactagctgggattacaggcacatatcaccatgcctggctaatttttgtatttttagtagagacggggtttcaccatgttggccaggctggtctcgaacccctggcctcaactgatctgactgccttggcctcccaaagtgctaggattacaggcatgagccactatacccggccccacaaggaaacataatgtaatgcaa

SEQ ID NO: 480426 - DNA, 499 bp, Homo sapiens
aggaaattactttgacacctgcaacgttaattaattaccatttcccaaagtaactaagggtgacattctgtaacaacagaactgacaagcatggccatgaaaatcctaaaatacaatacatcaaaggatatttttcttcatttccatagcttaattcacaaagcaaagaaacataatgcaattttttttttttgagacagggtatcactatcgcctaggctggggtgcagtggtatgatcccggctctctgcaacctctgcgtcctgggttcaagcgattctcctgcctcagtctcccaactagctgggattacaggcacatatcaccatgcctggctaatttttgtatttttagtasagacggggtttcaccatgttggccaggctggtctcgaacccctggcctcaactgatctgactgccttggcctcccaaagtgctaggattacaggcatgagccactatacccggccccacaaggaaacataatgtaatgcaa

SEQ ID NO: 480427 - DNA, 390 bp, Homo sapiens
cagctgccactgcccccgaggcctggcagatttgggtgggaaggagctatctgggtgccaggacctgaggggctggccatgccctcactccttactgacctgacctttagcagggcctctgagcattctctgatctagaaatgccacatgtacacgcatgygtgtgcacacacacacaaacacccacacactcacacccagccgctctatgacctgatgaaacagtctgggtgcagggctgaggcaggccagggaggagagttagactgagcaaaagcaggatgtgtgtggagcagcctcctggcctctctcccgcagaggcacttcctggtactggagggcaaagcggcccggggttgggaaagagaccggtgctgcttgctccctctc

SEQ ID NO: 480428 - DNA, 534 bp, Homo sapiens
acttgaatatgggctgtggattagagaatagtattggatcaatgctgagtttcccgtgtctaccatgcaggagttacgtaagtcttgcactgtaaaagagcatccttgttcttaggaaatacaccctgaagtatttagaggtaaaagggcatgatgtctgcaacttattcttaattgggaaatttcaggaaaaaattacacatacacacatccacattcacacacataaacatatataaagaaaaataaagtaaaaggggtaaaatrtaaacaattagtatatctgcaaaaaagttatactagagtctttgtagtattgttgcaactttttggtaaatttgaaattatgtcagaattaagttacccaaaaaaatgttagcagtgagttagcagtgagcctcagggttggttttcccttggtacattacctattttggaagtgtttgaagttttatgagcatgtatgatgtttgtagtcacaaagaagaaagaccaaaattacaaaaattaaagcgaaaaagaaaaggccatgaa

SEQ ID NO: 480429 - DNA, 611 bp, Homo sapiens
gcctctttctgtaaaccgctatgtgttgttggtctttttgtgattggtttatttagaatttcatttgtgttctacaacctatattagatcttaatctcttccagataatacaaaacaaaacaaaaaaatgctttytctctcatgtttcttttagtaatgagacttttatcaacagttaaacatttattcaccccaacttcattccccaaaccactggaggcagcctaccgcaaaatcaaataagtttaaaaggacagtaaaaggacgaaagtttaggaacaagaaaaaaatgaatcataagaagaaggctgcagcatgagaagaaaattagaacggtaatatagaaactgtaaggaactctaccaatggaacagcagagccacgcaattaatagactgggcttggaagtcaaagggaaggagccttgaccagctccactgcttttattcactgagtgctaagagcagctttgcataggatgctccacgaagagctgtgaaataagatgtagacctgaggactgccatagggtcccttgaggtaaatgcactaacgcgtgtctctgaagctgatttcctcactttagaacttctaaatccccgcaaatctcc

SEQ ID NO: 480430 - DNA, 611 bp, Homo sapiens
gcctctttctgtaaaccgctatgtgttgttggtctttttgtgattggtttatttagaatttcatttgtgttctacaacctatattagatcttaatctcttccagataatacaaaacaaaacaaaaaaatgctttttctctcatgtttsttttagtaatgagacttttatcaacagttaaacatttattcaccccaacttcattccccaaaccactggaggcagcctaccgcaaaatcaaataagtttaaaaggacagtaaaaggacgaaagtttaggaacaagaaaaaaatgaatcataagaagaaggctgcagcatgagaagaaaattagaacggtaatatagaaactgtaaggaactctaccaatggaacagcagagccacgcaattaatagactgggcttggaagtcaaagggaaggagccttgaccagctccactgcttttattcactgagtgctaagagcagctttgcataggatgctccacgaagagctgtgaaataagatgtagacctgaggactgccatagggtcccttgaggtaaatgcactaacgcgtgtctctgaagctgatttcctcactttagaacttctaaatccccgcaaatctcc

SEQ ID NO: 480431 - DNA, 611 bp, Homo sapiens
gcctctttctgtaaaccgctatgtgttgttggtctttttgtgattggtttatttagaatttcatttgtgttctacaacctatattagatcttaatctcttccagataatacaaaacaaaacaaaaaaatgctttttctctcatgtttcttttagtaatgaracttttatcaacagttaaacatttattcaccccaacttcattccccaaaccactggaggcagcctaccgcaaaatcaaataagtttaaaaggacagtaaaaggacgaaagtttaggaacaagaaaaaaatgaatcataagaagaaggctgcagcatgagaagaaaattagaacggtaatatagaaactgtaaggaactctaccaatggaacagcagagccacgcaattaatagactgggcttggaagtcaaagggaaggagccttgaccagctccactgcttttattcactgagtgctaagagcagctttgcataggatgctccacgaagagctgtgaaataagatgtagacctgaggactgccatagggtcccttgaggtaaatgcactaacgcgtgtctctgaagctgatttcctcactttagaacttctaaatccccgcaaatctcc

SEQ ID NO: 480432 - DNA, 422 bp, Homo sapiens
gcagttttatttggaaaattgatgagggcattaagttctgaagtcatgttgattctaatgtaaataaatggtgtcattacttcatagttgggagtgccactaatgcagaccttaaaattaagggttatcttgttgattgggggaaaattaaagtaatcaactttcaaggctttaataaatgagattgcacacttaaaaatcattttcaaaccagctttaaaagtagatgactagaaaatcaatagcaataatacatacctatggaaacagaatgggctatatttatttttaaggatagtttcttgtgttatttggtttgaatttattaataaggggcttaaaagtaatcatatraaatattaagtatattttcataggaaaataccaatggtattttttgtggcagttaatacacatagagc

SEQ ID NO: 480433 - DNA, 627 bp, Homo sapiens
cctttaaaaaagtacctgtaatattggttgaattcatcagtaaataaattcccaagccaatccagtgctaagggctaagccccatagtccaataaaacaagacctagggagtggagtttatcactctcctcaaaaytaacccgttatcttagttgaagttatttaactgctaaattaaatgactgctgtgccctaattaaacaccttatagctcactgtctgtgaagcacgtatgatgaaataagtttaaatctgtagtcaagaagtcatgttcaatgttgttttcgaagtttctagaatgttttgtgtcagaggccatttataacaggtgcagcttcaatagtttataaagataaactgactgaaatttctaacatcccccagatggcatattttggctgaaaatgcattttgagaaagagaatatttatttcttttctaaaatagacttggaatttttttccttctaattgggaaaaaaaaaaactgtctcccaactgatgactagatgctaaaggaggaggtggattttttctctaaaagtaaaccgcaaagctctttctaatagtgagagaagactccaaaaagtgtaaaatagttgctaaaggaatgacatatctacagcaa

SEQ ID NO: 480434 - DNA, 632 bp, Homo sapiens
cgtttaattctcacaaaacttttttaggtaggtgctattgttattccactttacagacaaggaaagtgaggcacaaagaggctaagtaacttaaccaaggttgcatagctgggcaatggcagaacaaggatttgagcccaggcagtctgtctctagagttatccatgataaaagttctatatcttgtcacctacagactacctccttaaacctggaggagaaaaaaatacaatttaaaacaccataaattaacatttcaaaatgtatgttcctataccaggagataagtgaattaatttcctaggcatttctagatggtctctctaccaccatggtactatatccacttacctcttcccagaagccactaactgggtgtggggggaaggacaagaaaaaacaaaraggaaaaagcaaatggaaaactcagttctggttcaaaaagattaactttgaaccaaagttttaaaccagaagtggctaagtcactttaaagcacagagatcatggtttaaactgtcagctaaaattgatggttgagttcaattttgaaaaaaaagaaagtttcatttctaaacatttgagctgagtaacatttttacctggtagataagttctttatcagatagtag

SEQ ID NO: 480435 - DNA, 518 bp, Homo sapiens
atgtagtggtcatgtggtggtgttgggaagaagaaggctcgtacaatgagatttgatgtccctgtcccacacagggatggttccactctcagaacgwggcccagtctctatctgccagaagttctgacagaagagcagagtttcagcactgtcttgtgccatagcatagaatgcatggatttccaaaggcaaaaaggactggcagacgacacccagtgagaactggaacccttcacccattctgcaaggtgtttcaggcagtggctggaggcagaggatgatgcacttccatcttagtgaatttctagtgtctcagagcctctgtcctgtccatagagcataactgtgcctgttgagggcatggctctagcacatctactttcatcctctccttcccaccaaacctggccctactctttgttgagatggtcagaggaacagaaaggggatgagtagaagagaaacagatgaggttttggaaatgaccaatgcatttgttaggtggactatgaaggtca

SEQ ID NO: 480436 - DNA, 496 bp, Homo sapiens
ctacatctgaaggcacacagggtaagagggggagagtagacactgaataaaattgaggtctcctaggaaggagaaaggygtgagagttgctcaacaaatacccaagagagtccaccacacctagcatttaagcatcccaaggagagctgtcaagacctgtgtgcttgctgggaagatgtcatgctgtcccatctctgaggtttttggtctttcctaccctcagccagctgatatggctgctcccttcttcctggcccaaaaagttgtgacagggtggcagggttgttttttctcaccacctgaggcatacactgttgtaacttttgcaggaaatgacttcataaagtgattttcctccaaagggaactacataactagcaggctcctaggggctttctggtggactgggtttcgaaaggttcagcgtcttactcaaggtcatgcactgctgactgtcagaacctgcactaggaacaggtctttccattacaccagg

SEQ ID NO: 480437 - DNA, 573 bp, Homo sapiens
atttcaatctctgcattggtggttcagattctagtgaagaaatgattggaggtgacttccaacaccacmcaatcaaaaactaccaagtattgaaaagggcagaaacatgacccatggtatcatgacaaatcaattaaccaaaaccaacttgaaacctacacggatgttagaattatcagacaaggaaatagaaacagttattataattatatctgtatatgttcaaaaagttaagtagaagatattttaaaagatccaagtcagacttctacagatgaaaactaaaatgtctgagatgaaaaatacactgactagaataaatgggagatcagacattacagaagaaacttgaagactcagcaatatgagctagccatgaggatacataaagataaaaagacattatagaaaaactaacagagtatcactgagctatgggacaacttcaagcaaccaaatatatgtgtaattgcagtcatcaaatttgagatgcaagggagaacagaaaaattatttgaagaaatactggttaaatttttttccaagtttaatgaaaactatatacccacaaac

SEQ ID NO: 480438 - DNA, 573 bp, Homo sapiens
atttcaatctctgcattggtggttcagattctagtgaagaaatgattggaggtgacttccaacaccacccaatcaaaaactaccaagtattgwaaagggcagaaacatgacccatggtatcatgacaaatcaattaaccaaaaccaacttgaaacctacacggatgttagaattatcagacaaggaaatagaaacagttattataattatatctgtatatgttcaaaaagttaagtagaagatattttaaaagatccaagtcagacttctacagatgaaaactaaaatgtctgagatgaaaaatacactgactagaataaatgggagatcagacattacagaagaaacttgaagactcagcaatatgagctagccatgaggatacataaagataaaaagacattatagaaaaactaacagagtatcactgagctatgggacaacttcaagcaaccaaatatatgtgtaattgcagtcatcaaatttgagatgcaagggagaacagaaaaattatttgaagaaatactggttaaatttttttccaagtttaatgaaaactatatacccacaaac

SEQ ID NO: 480439 - DNA, 598 bp, Homo sapiens
agatccaaatctttaccacattcttgaaaattaatggcacctccaggtttccatgctcaccaccgtgcaggggcttggtgccgaatgcgtttatccatttggtggtcttaggcacttaggcatggccaatgttggtcaccaraattggtgtgtattagggggtaagctggctgcatatttgcagcctggaccactgaaaagcaaagcttcaaccctgcctaacctcctctccaagccatttgtggattcggaatagaatgtgctggtggacagcaacaaaaagtccaggacagaacgttccagatttagagatcccttcttggtgggaagagacaggaacttaattccagcctggaatcgcacaaacaaatacatctgtaagacaggaatcccaagtacaaatatctgagctgtagggtgaaagctggaaaaaattagtgcttagagagacctggggcagaagagagaattgcaaatttgttctgtacttgccctgtaacttacggctggctgatgggataaggggtgggagggagatggggcagggaggcaattgtttagaagaagcagccagtgatattaggactgcaaacaaata

SEQ ID NO: 480440 - DNA, 546 bp, Homo sapiens
cttgtctcagtgtgaggaaagcatctaattagtcttagaggtcctcctgtccagaatttctaaagccgtgctcatgacaaatgtcccaggcttgaacggracatttgagaaactctgggccaagaggagcagcacagagccacccagaggatggctctataaaatggggttacaatagtgccttacccagaggatttgagataaaccacttagaacagaattcatgtgtggaggccaatacaaaacatcaccaaagttaagctgctttccctctcctcttcactgtagggtgctcaaagcctctactatgctaaggagaacagagagctccaagagggttggtagagttgcagcatttcccaggattatttgtccagtgaaacctcttgccatggagcatctagtggggtcagagttcctcaaatcatagttgggaaatattgctaatccaagccccttattacaaagggaagtggaagcctccctccccaagtccctagagccaactggggcacacggtcaggaggctgggctcctgctggggga

SEQ ID NO: 480441 - DNA, 554 bp, Homo sapiens
aaagtatacatatatgtaaagaaaacccttaaaaaaaagaaagaaaagaraagagggttaagagtgaaaagacctgggtaagagtcctataggccacaacacagacgagtgctcttgaacaagtcactttcctcttgaggcctcagtttttacatggtaaatgaggtggaaagggagagggggcaattcatgatctccaaggtccttttctgctctaaaattttgcgttccagagctgtgcagcaagaagcagttaaacgctggactctttccccagaacagccttcgggtattttgctcattaaagagattagctgtccatttgcagggatgtctctccaatgaggtagggacaaaatagcccaacacagttttagtttagattcactttatgaagtacatatctaattccctggcaagctaagtcaagcacgtcttctcatgtgttttaagaaccaaggcatttggctgagactgagagcaaatgcctcttattaatgtgtgacaaatccatatggggaaaaacagtgtttcttctttcccatatggcacag

SEQ ID NO: 480442 - DNA, 547 bp, Homo sapiens
aaggctggcttttctggccttgaaatggttccatggaccaggtgggtggtttatttcacaggctggtgacaatccagygtgtctctcccacagagatgggaaggggcaagaattcttctgttgtagcccagggctgtcagcaaggctgtgacataggccattggccttctgccaagatgaagggcagtggaactactgtgaggaagaacaggaggaaatctcaaaccactttggatcctggacctgaacttttcttgaaccccaagacctttaaagttttagcctcataaggacaaatcagctttctctctggaaaactctcaaaccactccccacctcagtctcaatgtaataggagtgatgaagccactggaagaaagggagaacatgggggaggcagttatctcacccaccttccaccttcaggtccaaaggctgaagacccaatggcttctggttttaacttggttttggacctctgcaagacatggtggattcactgtttcccctctaaggtttacggtacagatttttcaaaaagcataga

SEQ ID NO: 480443 - DNA, 547 bp, Homo sapiens
aaggctggcttttctggccttgaaatggttccatggaccaggtgggtggtttatttcacaggctggtgacaatccagtgtgtctctcccacagagatgggaaggggcaagaattcttctgttgtagcccagggctgtcagcaaggctgtgacataggccattggccttctgccaagatgaagggyagtggaactactgtgaggaagaacaggaggaaatctcaaaccactttggatcctggacctgaacttttcttgaaccccaagacctttaaagttttagcctcataaggacaaatcagctttctctctggaaaactctcaaaccactccccacctcagtctcaatgtaataggagtgatgaagccactggaagaaagggagaacatgggggaggcagttatctcacccaccttccaccttcaggtccaaaggctgaagacccaatggcttctggttttaacttggttttggacctctgcaagacatggtggattcactgtttcccctctaaggtttacggtacagatttttcaaaaagcataga

SEQ ID NO: 480444 - DNA, 547 bp, Homo sapiens
aaggctggcttttctggccttgaaatggttccatggaccaggtgggtggtttatttcacaggctggtgacaatccagtgtgtctctcccacagagatgggaaggggcaagaattcttctgttgtagcccagggctgtcagcaaggctgtgacataggccattggccttctgccaagatgaagggcagtggaactactgtgaggaagaacaggaggaaatctcaaaccactttggatcctggacctgaacttttcttgaaccccaagacctttaaagttttagcctcataaggacaaatcagctttctctctggaaaactctcaaaccactccccacctcagtctcaatgtaataggagtgatgaagccactggaagaaagggagaacatsggggaggcagttatctcacccaccttccaccttcaggtccaaaggctgaagacccaatggcttctggttttaacttggttttggacctctgcaagacatggtggattcactgtttcccctctaaggtttacggtacagatttttcaaaaagcataga

SEQ ID NO: 480445 - DNA, 547 bp, Homo sapiens
aaggctggcttttctggccttgaaatggttccatggaccaggtgggtggtttatttcacaggctggtgacaatccagtgtgtctctcccacagagatgggaaggggcaagaattcttctgttgtagcccagggctgtcagcaaggctgtgacataggccattggccttctgccaagatgaagggcagtggaactactgtgaggaagaacaggaggaaatctcaaaccactttggatcctggacctgaacttttcttgaaccccaagacctttaaagttttagcctcataaggacaaatcagctttctctctggaaaactctcaaaccactccccacctcagtctcaatgtaataggagtgatgaagccactggaagaaagggagaacatgggggaggcagttmtctcacccaccttccaccttcaggtccaaaggctgaagacccaatggcttctggttttaacttggttttggacctctgcaagacatggtggattcactgtttcccctctaaggtttacggtacagatttttcaaaaagcataga

SEQ ID NO: 480446 - DNA, 588 bp, Homo sapiens
gctcaggtagcatcatatatggaggtcctaacaggagcacaaccttgacctagacagagtcaagggatataacagaggaatagatgagatgcaaactctgccttcaaggtgcttacaatctactgagaaaaacaaggcaaggctccccaaactgcagtgtggtaaactgttgtatctgtaacaacaacaaaaaatacactaaaaaatgagagaagtttatctaattcactctgtagatggaggcttcagagaagctgtgactcaagactaatttttaaacagaaattttatatgagaaagatgggggaagggtaatccaggcagagcaggaaacctgcaaacgcattggaatattacgcccaggacacacygggggtcttcaggaagagggtggcatggggagcgcaaaagcatggtaactggcaaatggaatgagatgaacctgtaaatgtggagttctcaactagatgtaccattaactggccattagagctagggcaggaatccctctatatccttgagctgtaaaatggaggtaggtgtgggatgtagacctaacctacaaagctcatgtgattatagaactgg

SEQ ID NO: 480447 - DNA, 606 bp, Homo sapiens
ctgcaggtctcttggcttcctctaattacccgaagcattgtgtctactctcttgattatcttatattatactcaattttgaggtctgccagagaaaattatggagtaagggggcttgatgaagtctggatatgaaaaattttaaaattagaaagctgcaatttggggggttgtaagcagartttggattctagaatggataatggaatttggttgtgggtccataatgcctttcctcatttgttttagcagaaacacattttgtaagacttaatttgtcagacattgggagagtacctacctcctattccagaatagctacctcctaagccagcaaagtgtcacaatgctgatgcttccaaccaatgttaaaaatttttgttcagtaatttaagttggatatattgttaaatagtagctttctggatattggacattaggaaattcatttgtcccaacttcaatatccagaaagttgctgttcattttgggtgaaatatagatccttctttctaagcagtttctcacaggaggctaaacaactgcagtagtgatacgaactactagtagggagatgatgagatgaacatcttcatttcatgctgga

SEQ ID NO: 480448 - DNA, 485 bp, Homo sapiens
agaaaagacatagggctaaccccaagccaggacgcatatacccacaagggaacactaaaaactggccactgcactatcccccttcctgggcctgcagacaaatccrggctgactggagtctcaggaagacacgctgacataaaggattaaaagaaattatcgctaggaatgaattacaccatcaagggtaagaattagattgtggatcattcaataatgtgacaaacaacctagctactggggaggctgtggggggaggatcacttaagcctaggtgtttgaggttacagtgagctgtaactgtgccgctgcactccagcctgggaaactgagcaagaccctgtctcataataataataatgtgacaaacaattacatgaatatttttaaaatttccgtaatgttgcacaactggaatggtaaattaattggattgattttccagtttttactacgaccattttgggtaagagattctgactggc

SEQ ID NO: 480449 - DNA, 485 bp, Homo sapiens
agaaaagacatagggctaaccccaagccaggacgcatatacccacaagggaacactaaaaactggccactgcactatcccccttcctgggcctgcagacaaatccaggctgactggagtctcaggaagacacrctgacataaaggattaaaagaaattatcgctaggaatgaattacaccatcaagggtaagaattagattgtggatcattcaataatgtgacaaacaacctagctactggggaggctgtggggggaggatcacttaagcctaggtgtttgaggttacagtgagctgtaactgtgccgctgcactccagcctgggaaactgagcaagaccctgtctcataataataataatgtgacaaacaattacatgaatatttttaaaatttccgtaatgttgcacaactggaatggtaaattaattggattgattttccagtttttactacgaccattttgggtaagagattctgactggc

SEQ ID NO: 480450 - DNA, 632 bp, Homo sapiens
ggtttatatctaccctacatgcccatcctccaataggtctcaccaggcttcttcacacgccagtttgagggttccagagagcttaaactccagtgcataagccctttctaagcctttgattgtgtcacatttggtaagggcccactggctaaaacaagstgtatggccaagagtaagtatgagagagattagtcaagagaatggatacaggaaatcatgaataaattgggccattactgcaacagcaaacaacaatatgatagaatttctggaaaataaataaatcatatctttggaaaactcaagatattgaagcagagatttgctaggaaatgaagtattgaacagccacacataaagatgcttgttcatactgcaaccagtgggaagtactggaaatttttcaagttctaaaagttagaaaggaacccattaatccatatactagccatctctaagtgcaatctaagaatgcttgaaaaaaatactgtgtagtttaagttctgtttgggaagtaaggcagaataaactatattaagattatttttctgaaataaacagaagaaagactactcatttgacttcagggaagagcattcttatgtgcttaagttttgttataacaagaatag

SEQ ID NO: 480451 - DNA, 632 bp, Homo sapiens
ggtttatatctaccctacatgcccatcctccaataggtctcaccaggcttcttcacacgccagtttgagggttccagagagcttaaactccagtgcataagccctttctaagcctttgattgtgtcacatttggtaagggcccactggctaaaacaaggtgyatggccaagagtaagtatgagagagattagtcaagagaatggatacaggaaatcatgaataaattgggccattactgcaacagcaaacaacaatatgatagaatttctggaaaataaataaatcatatctttggaaaactcaagatattgaagcagagatttgctaggaaatgaagtattgaacagccacacataaagatgcttgttcatactgcaaccagtgggaagtactggaaatttttcaagttctaaaagttagaaaggaacccattaatccatatactagccatctctaagtgcaatctaagaatgcttgaaaaaaatactgtgtagtttaagttctgtttgggaagtaaggcagaataaactatattaagattatttttctgaaataaacagaagaaagactactcatttgacttcagggaagagcattcttatgtgcttaagttttgttataacaagaatag

SEQ ID NO: 480452 - DNA, 651 bp, Homo sapiens
atgaaatttttcacagaattagaaaacactattttaaaatttatattgratcaaaaaagagcatgaacagtcaaagcaatcctaagcaagaagaacaaagccagaggcagcacactacccagcttcaaactatagtacaaagctataaccaaaacagcatggcactggtacaaaaacggacacatagacccatggaacagaatagagaaccccaaaataaagttataaccatctgatctccaacaaagtcaacgataacaaacaatgaagaaaggactccctattcaataaaccatgctgagataactggctagtcatatgcagaatatttaaactggacaccttcttttcaccatatacaaaaatcaactcgagattgattaaagacttaaatgtaaagcctaacctataaaatccctaaaagaaaacctagaaaataccactctggaaatagaccctggcaaagatttcatgaggaagactccaaaagcaattgcaacaaaaacacaaatagacaagtggaacctaattaaactaaagagcttctgcacagcaaaagaaactatcaacagaatcaacagaaagtttattttgttctatagttctgcagttttgaaggttaagttgaattcacaggaattctggtttatt

SEQ ID NO: 480453 - DNA, 646 bp, Homo sapiens
cctgctcttctcctgcctgaatttgttgcttaacagatggaagcacaatacagcttccactagggctgtttctttttcccttttgttcctccaaagacttgctaccaaatgctgtgtcttcagcatctggaattgtttttttaccttctctctatgcagttaggtaagaaaggaccttggaaggattcaaatcccaattctaggcaaagatatgttaatagtcacatcccagtggcaatgctgtttaatgttagtgttttgaagacaaaatgcagattcctggccctggttgttctgcaggttgtagccttaataaactggttggtctgagtacataagttttcttgaggactgacaaaatgcaagaacagtgttagtaatggaagaaaggaataaaaatgataaccctgtccatctaggatgtaggaaaacagtatttgttaaggttttctacatctttgaaaaactggtaaataatatagttgcctaaaattcttaggatctttgttaattgcttcaatatttttccttccttagccttggattttttataagacagtagcracattaatacctgcagggctcctcatgtgaagactaaaagtgaatgcatagaccagtgcttctcagtgggggatgacttcat

SEQ ID NO: 480454 - DNA, 356 bp, Homo sapiens
ctgctcctgaccaactcaactgataagcctttgttgagggcatgcccagagctccatgcctcttggttggtcttgacgaccagcctcatcttaccatgagcctaggagttccagcagggcaggatttgtgctcctccctctggatctcccctcagtgcccaatacaatgggcagcacacacaggggaaggtgtgcgactcgctgattctgcttcttaggagtcaggagggaactagggaaagaaactgaagcagagacagaattccaggcccacactttgtaattttcctttaaaaatctcaaaggacacgtgtgtctctctstgtgtgtgtgtgtgtgtgtgtgtgtgtgtgtgt

SEQ ID NO: 480455 - DNA, 285 bp, Homo sapiens
agaatttccgcctagggcagactggctgcagctccactgaggtgcctgctggtgtccttctgtagggcttctttaccaccaggcagcctggcaggacgtcatttktttctctgccctcatcaccttccctggcttccaatttcatcttgtcatttttcagaatcatttacatggttctcctgtaggctttttttttttttttttaactttctccattcctgcataaaattctatagagaccagggagggaaacccaccatctctctctctctccccactaacccc

SEQ ID NO: 480456 - DNA, 594 bp, Homo sapiens
gtactgtccacacaggtcacacgtgttcggctgcagaatctagcgggagaaagaaaggaaaaaggagagaggatctttacaggtgcctgtagtggtggttactactatctttcagagtcatcgcttccttaacggcaaagtaatttaaaatacccttagcgctagaaatgaagtccatgtacggacaaagcaatccaccygcacagcaattctaacactaccattttactagccctattgccttgggtgaaaaccttctctgagtctctgtacaatgggactaacaatctcattttattcaaatagttgtaatgatcaaatgagatacatgaaactgcttggggattttttaaaatcactatattattcagcaaatattttcacaaaacgtagggcatactacatgcaaagcattgttctgcagtcgaatgctctatccctgagctataccccccgtgcaaagcattgttctaagcatggggttaaggagttaccaacccaggtagaatttatatttgagtgaggaaggggagacagttaaaaagccaataaacacaaatatttcaaatagtgaaagcgcttcaggatagtgga

SEQ ID NO: 480457 - DNA, 457 bp, Homo sapiens
caaaaccccttcaggtcttagatgacaaacttragttaggtgtaaacgttaatatctctacatcctacaccaaatgacatagaaattacgacataagtgaaagtatcttattatcttcaaaatttatttattcccagtgaactcacatgttttctgtaattataaattatgttataagacatcaatctttcccccaaatgaacgtatgccatattattatattctcattctcatgaaataaagcaagactggtagcattaagtggaaagcgtctatctcaattttaaatgttgaatctgtacttttccctggcttaagtctagagcaaccaggtagtatatatgctgtaaaacttctattttagtgttcaaagatatttaggaataaatcaattgacctctctattttagatgtgaaataaggaccagaaagcattgttcctctttccaggcagtga

SEQ ID NO: 480458 - DNA, 576 bp, Homo sapiens
tgatagacaaaaccccttcaggtcttagatgacaaacttaagttaggtgtaaacgttaatatctctacatcctacaccaaatgacatagaaattaygacataagtgaaagtatcttattatcttcaaaatttatttattcccagtgaactcacatgttttctgtaattataaattatgttataagacatcaatctttcccccaaatgaacgtatgccatattattatattctcattctcatgaaataaagcaagactggtagcattaagtggaaagcgtctatctcaattttaaatgttgaatctgtacttttccctggcttaagtctagagcaaccaggtagtatatatgctgtaaaacttctattttagtgttcaaagatatttaggaataaatcaattgacctctctattttagatgtgaaataaggaccagaaagcattgttcctctttccaggcagtgaaattcctgcctattcattaactggcaaaagagtagaggtgggagcccaatggtcttgggtggaatgtcctgcggaattccctgggattgaggaaccatgcagaaccctcaag

SEQ ID NO: 480459 - DNA, 523 bp, Homo sapiens
aaaagaggaatttatagagtcagggtttggaactatatttgctcacagtatctgaagccacactaacagcttctcattaagttttattggagtcccctttagaaaaataccccaaaaggaagttatttatttttacaccggacataaacattagcagctattrttctttgctctagtttttaacatcatgattatcagtaaatgtttgttgaggatcatgtgaatgaaagtgtcctagatagatctgagcaatgacttatagctgcaagatccagtgcctgccctttagtatttaaggtgtagtcaaagaaactggacataatgtttaaaaaaaaaaaaaaaaaaaaaagcccaagtgaggtactgcgaagtggcataatcaatgcatgctctacccagatccagaggaaagaacagtgcctaaggttgaggcagctagaggaggctcagggaggaggcaggaactgagctgggtttggagttgagagagcccttgacaagcaccaggaaggcgggggatggt

SEQ ID NO: 480460 - DNA, 523 bp, Homo sapiens
aaaagaggaatttatagagtcagggtttggaactatatttgctcacagtatctgaagccacactaacagcttctcattaagttttattggagtcccctttagaaaaataccccaaaaggaagttatttatttttacaccggacataaacattagcagctattgttctttgctctagtttttaacatcatgattatcagtaaatgtttgttgaggatcatgtgaatgaaagtgtcctagatagatctgagcaatgacttatagctgcaagatccagtgcctgccctttagtatttaaggtgtagtcaaagaaactggayataatgtttaaaaaaaaaaaaaaaaaaaaaagcccaagtgaggtactgcgaagtggcataatcaatgcatgctctacccagatccagaggaaagaacagtgcctaaggttgaggcagctagaggaggctcagggaggaggcaggaactgagctgggtttggagttgagagagcccttgacaagcaccaggaaggcgggggatggt

SEQ ID NO: 480461 - DNA, 598 bp, Homo sapiens
aagcctctttccttggtttgccaccttctcactgcgtcttcacttgaagactttcctctgtgtgagcacatgcctgatgtctcttcctctttgtatgaggacaccagtcaaattggattaagatctcacccaatggcctcattttagcttaatcacctctttaaagaccctatctccaaatacagttgccttctgaggtcctgagggtcaggaattcagcatatcacttttgcaggggacatagttcagaccgtaatactgtatgtgaaaacaaaagccttttctgtcscttgagttttctttgtgtttgtagaagtcaacacaccaagtaaagattttagaaagtctggcttttctatcatgaaagttacttaacattgaaattattcttaaaaagaaattaattctgaaaagtgtgacttcttaaaagttcattgcttgggttggggtggggtaggagggcaaggcccagcaagtgggtaggcatgtgatccgacactactgagagcccaactagtctgggaagccggacacaggcacagcagattctgatgcaggagatgactgaccacactgggaaactgctgctgagtccctt

SEQ ID NO: 480462 - DNA, 588 bp, Homo sapiens
caggcatgagccaccgcacccagccagaagtaacacttcttatagtggacagcagggaagtcggttgctggtgaggaggggaatcatccctcgaacccaccaaactatcagagtcacttggtgggaggaaaataggtcttcctacaaaggatgggcctactcagcccagggtagcctaacacaggtcacrcctttgaaaacagatgatttcgtatctatggaaatgcctcctttgctagaggactgtcatcaagaccatttgagtatgtggagctctcataatggtttggctttaccagtacaagcaatagtctccaccaggtaacagcgggtcaggtaaggctagaagcttactcgtatcagcttgaggtgatattagggatcacgaagtccctctgattctgagtgtacaagtgagccaagtcaataatagagcagcaccactggggcaggcagaagacaggaggtgatagatattcacagagcggcacaagggctggagcccaaagtgcaacaaccagttccaaagttgagccaaggacctaagggagcaggtggacatgggaggctggagccatagcagggttc

SEQ ID NO: 480463 - DNA, 626 bp, Homo sapiens
tcatttttgtaaatgcatccttccaaaagctgtttgtatttcttctgggggtccttattctctcctatttctcagccccttccccatctttccactttcactgcgctgtgttccattgtgtttgagatgcaaaaaatggcttataaagtgtcatcattatacaaaacctctgatccccaggttctgaaagaacgagtggagacacagaatggcagaaggtaacagatcctgttgggtggtagagagcacctggagtattaatcttgtgtgtaatttttagataggaatgactgccaagttgaatactgagttragtttaaaggtcaaagtggaaagagatgaagtcacctttaatctggagaaaaaatggtaaattttgtggggaggaacagtatggacacattcctgaactctctaaatagaagaggaatgaggctaacttcacaaatctctcttcttcctcaacataggcaggcctctcctccctgaatcccagataataccagagtggcactgcgggtcgacatccacagatgtctgagtgaccctggtttcagagggataaaatggtgatatataccaaacattcatgctagtggggaaaagaaagttaaactctgataagt

SEQ ID NO: 480464 - DNA, 640 bp, Homo sapiens
taaaatatcatgaatactaatgtatactctgtaactctaccagggaagggattgcctatgtgcctgattgattttttactctgccatttcaatttccctctatttcgtcatcagtcagaaggttggtgctgtttaaaggggaaaaaaaagctctaartgtccccttctcccaaaaaaaggaaccagaaaatgacaagaagagttgcatttgtctatgaaagtgcatagaaagcttttcctggaaaagaataaactgggaaaagatgagtccttgaagtagaaccctgtcatagtgcaacaaactgaatttaagaggcatctgttcccagcttatacaacatccagtaccagttccacagtaggtattcacattaccactcagattgttatttctcaatgctaatgagaagctactgctttgagactgtctaactagctagacacttaccagactttgttttgatattttctggtatgaattaggcttcctttctagttgcgttcatgcccagattttaatatgacatattttaagttaactcattgtattgttttgtaacctagagtggcttaaaaacagagtcatttgttatagtaggatatgtgttcgcacacacaaatatacgtgtgtgtatgtgtg

SEQ ID NO: 480465 - DNA, 473 bp, Homo sapiens
aggtctagaaaaaggccatcttcagttatagatagattcagggctcaaccaacaacaccagcacttggtttttctccctcttccaattcccattttgttggtcttggttttagaccccatgtggtcaaaggatgagtgcagcaggcccatcccctacatcctcaacagatctggttccagcctcatccctcagggatagagctcgcctcagcctacaartttccttgattctgatgatcacaagccatcaccagaagtctctagggccaaatgaatgcaaggctctgattagccagccttgaatcacatgcttttcctctgtctggaatgggagtgaatgcctctggatgcacatggtttgagagtgagcacgggatgattctccatacaaacaaatggacgtgattataagtagggggaatggttgctgagctgccaaaacacaacagaatacactgcagacttttccccaa

SEQ ID NO: 480466 - DNA, 591 bp, Homo sapiens
ttttaggcttgatgtgcttccaggctctcgatcattctttctctttctcagcattttctcactgtctcaagtcttctcatttcattgttattacatgctagggacttggtgctaccaggctacctgcttgctccatacattatttgttcaacatgatttgcatatatgggttactgatcaagaacctaggaaggtyaagtgagcaaacagatggaagaataagggggcggggacagtcataaagattgagggctattacagatcattctaccaaaagcttaatcacagtcaagaatccaaaagttctgtcacagtagttctcaactggagcttcacaccagaatcacagggggaatataatttttaaaaacatggatgccagggcccagccagactttactcaatcaatgccacaggaatcaggtccaaggcctgtattttttccgccagattctgcagattattctattgcaaattcctagttaagagcttctgatttagggaataaaccagaaattatgtcttttttttttaagagacgaggtcttgctttgtcacccaggctggagtgcagtagtgtgatcatagctc

SEQ ID NO: 480467 - DNA, 673 bp, Homo sapiens
tacctatgtagaattaaaaccaagcagtattgggaggtctgagcacagtcaaggaaactcacttccaaattcttctttcaacatatgttttggctgaaaacaaatgcactcatttttaggaagcagaactacttaagcaagatccagcctacgagcatgggtgttctacatcttgttttgttcctatttctgaagaccaaaaaaaaaaagcattattttcaaaggaagcactaggtggcacttgtgatgtattccayagttgcctccgatcctttttgaaaaaggtttgatagaaaaaaaaatgcaataaatattaaaatgggaaaatcgtcattacaataatgaagatcagcatgattgtgtttactatgttactatgtatgagcaatatctttatgcagtatttgcatttaaaatctgagctttgctttcttgataaaaactgcaagacgggaactgacatttctataacatgtgaaaaccccacatcgctaaaataataagtaaaaatgtaatgcctggtttgcaaaaagattgactataaatcttcttttaaatagtttctgtcttccatttagagtgtttgaatttgtaaaaacagataacagaataaatttttcaaggtccatctattgtgaaaagcaaaatttaaaaaatcataacttgaaataag

SEQ ID NO: 480468 - DNA, 673 bp, Homo sapiens
tacctatgtagaattaaaaccaagcagtattgggaggtctgagcacagtcaaggaaactcacttccaaattcttctttcaacatatgttttggctgaaaacaaatgcactcatttttaggaagcagaactacttaagcaagatccagcctacgagcatgggtgttctacatcttgttttgttcctatttctgaagaccaaaaaaaaaaagcattattttcaaaggaagcactaggtggcacttgtgatgtattccacagttgcctccgatcctttttgraaaaggtttgatagaaaaaaaaatgcaataaatattaaaatgggaaaatcgtcattacaataatgaagatcagcatgattgtgtttactatgttactatgtatgagcaatatctttatgcagtatttgcatttaaaatctgagctttgctttcttgataaaaactgcaagacgggaactgacatttctataacatgtgaaaaccccacatcgctaaaataataagtaaaaatgtaatgcctggtttgcaaaaagattgactataaatcttcttttaaatagtttctgtcttccatttagagtgtttgaatttgtaaaaacagataacagaataaatttttcaaggtccatctattgtgaaaagcaaaatttaaaaaatcataacttgaaataag

SEQ ID NO: 480469 - DNA, 475 bp, Homo sapiens
gttatcctatctctctttccacagtattggttcatacaacccagacctaagccaactagtgcatgctctttcgcaggcacagatgttgattcaggaagggcatctggcaaatgttgtctagtaacatgcaaaggatgttcactggggcttctagaaagacactttcttacttttctgagagccaccacagaggacactctctcctcttctgggcagaatggtatagggatatgaaacctgaatctctagattcattttgccacyctgagagaagcaagatctagaatgaagttgacaagactgaagacagagaagagaaaggtaaagaaggcaggtcttgtataacatggctgaacaactaaattaaacctcccctgaagcctatcataccttggactttttagccaataaatcacttccattgcttacatttgtctgagttatctatcccttgaaattgaaagtatttcattgt

SEQ ID NO: 480470 - DNA, 555 bp, Homo sapiens
tgcaaaagggcgaggaatgtgccaccctcagccaaacctcagcagttgtcccatcttcaaacctgactcayggggaactgagagaaaaggaactgacattcactgcacacctgtaagtttccaagaacactttcccctggggcccagggcgtcctgagagccctcccagtggtgtgtcagagcagatggcggccctacccagtctggtttttctcctcatttccatcccccactgctggctgcaccaaggtttatatctgtgtccagagccctggggggccatgctgggagatcttagctatctgctccttgtggccatctgctcaccagttcctggcctgtaatgcatcttgttttttatcaaaataacaaacaggatgagtaaaagaaaccaaacatgaaagagcacaaactgtatgttccatttatatgaaattcaaaaacagactacactcgcctgtagaggttcatacgctagttacctttggccgggtcttctatgagactggaaactctctatttcttgatctacatggtgattacacaggtgtatac

SEQ ID NO: 480471 - DNA, 636 bp, Homo sapiens
cgtggctgctcccctcaggacctgaatctgaggtgatatcagccaaggcaacaatgacttgaccagactgtggcctccttggttcctgctggttttccaagcctgattctcggccttctggttaatttcatgagctacctaaagcctgccaataaattatttcttgcataaattacccagagccagtatatgttacttataatcaagaatgttgactgagaggctgggcatgtggcttacgtctgtaatcccagcactttgggaggctgaggtgggaggatgactttagcccaggagttccagaccagactgggcaatatagtgacaccctatatctacaaaaaaaaaaaaaaaaaawgtttttaattatccaggtgtggtagagcatgctagaaactcactaaatatttgttgaatgaatgaaagatcagtggaacctatacaatagaaaataaaattagtgatctgaataataaaggtaagaaactttcaaaattgaaattaggccaggcatggtggctcacgcctgtaatcccaacattttgagaggccaaggtgtatttttatattttgtaaaaatacaaaaaaattagctgggtgtagtggcaggcacctgtaatcccagctacttgggag

SEQ ID NO: 480472 - DNA, 636 bp, Homo sapiens
cgtggctgctcccctcaggacctgaatctgaggtgatatcagccaaggcaacaatgacttgaccagactgtggcctccttggttcctgctggttttccaagcctgattctcggccttctggttaatttcatgagctacctaaagcctgccaataaattatttcttgcataaattacccagagccagtatatgttacttataatcaagaatgttgactgagaggctgggcatgtggcttacgtctgtaatcccagcactttgggaggctgaggtgggaggatgactttagcccaggagttccagaccagactgggcaatatagtgacaccctatatctacaaaaaaaaaaaaaaaaaatgtttttaattatccaggtgtggtagagcatgctagaaactcactaaatatttgttgaatgaatgaaagatcagtggaacctatacaatagaaaataaaattagtgatctgaataataaaggtaagaaactttcaaaattgaaattaggccaggcatggtggctcacgcctgtaatcccaacattttgagaggycaaggtgtatttttatattttgtaaaaatacaaaaaaattagctgggtgtagtggcaggcacctgtaatcccagctacttgggag

SEQ ID NO: 480473 - DNA, 481 bp, Homo sapiens
tgtcagagatgtctcttttctaacrgatcacttagttttgcattccccaaccagggaatgatctgtctcctcaccttctaagtcaaccactgaggctaatctacaaatgataactaaaaatctttgaaatgaaaggaacttccatagtagtgctctctaacagaacttaaaacacctgcattgcatatgctggccctagatcaccacatccagaacacctgggttaattcctgtagttttagaaacaggttattcattgcttttatgtgaagtaagtagtgagtgtcgcagatttttcccacaaaacttctcttggtagcctctttttacttcaggtgtttagagtctgctatcttattaatcattcagtaaaccaaaatgtgaacatttcacaagtctctgattgtacctggtgtatgtgcctctgtgcaccattcccccgttcaatgttgtttcatactggaatggccctcatcagggt

SEQ ID NO: 480474 - DNA, 481 bp, Homo sapiens
tgtcagagatgtctcttttctaacggatcacttagttttgcattccccaaccagggaatgatctgtctcctcaccttctaagtcaaccactgaggctaatctacaaatgataactaaaaatctttgaaatgaaaggaacttccatagtagtgctctctaacagaacytaaaacacctgcattgcatatgctggccctagatcaccacatccagaacacctgggttaattcctgtagttttagaaacaggttattcattgcttttatgtgaagtaagtagtgagtgtcgcagatttttcccacaaaacttctcttggtagcctctttttacttcaggtgtttagagtctgctatcttattaatcattcagtaaaccaaaatgtgaacatttcacaagtctctgattgtacctggtgtatgtgcctctgtgcaccattcccccgttcaatgttgtttcatactggaatggccctcatcagggt

SEQ ID NO: 480475 - DNA, 522 bp, Homo sapiens
cagctggatcacttgagtctaggaattcgagaccagcctgcacaacagggtaaaaccctgtctgtacaaaatatacaaaaaattagctgggcttggtggtatatacctgtagtcttggctactcaggaggctgaggtgggaggattgcttgaacccaagaggtcgaggctgcagtgagccatgatcatccactgcactccagcctggatgatggagtatgatcctatctctctctctctctctcwcacacacacacacacacacacacacacacacacacacacagttccctgctttcaaggtggtgacactctagataaacgtacactcattaaagatagggcagcatatgacaagtgccacatgaatcaaagtgacagcaaaggtaatgtatggctttagattacctagagaccctcttgcactggttgcctgactggaaaaggtgaggctctaatggtgccatgaaggatgggtgagaataagagtgcaaggctaaagggctgctacatgagcaaatga

SEQ ID NO: 480476 - DNA, 466 bp, Homo sapiens
gtcaacaaaaatagtgttctcattgagaattaaaacctggcgcgctggctcatgcctcagcctcccaacactttgggaggccgaggtggacagatcacttgaggtcaggagtttgagaccagcctggtgaacatgatgaaaccccgtctctactaaaaatacaaaaattagctgggtatggtggtgggcacccataatcccagctactcgggaagctgaggcaggagaatcgcttgaatctgggaggtggatgttgcagtgagccgagatcgagccactgcactccatcctgagcaatagagcaagactctgtctcaaaaaaacccaaccaaccaaccaaacaaaaactggataccatttaacagggttctgwcccattagcccgtggggaattaagggcactggatgagcagtgagaaagggtgagtactagtcctagccctgccctgccaccttgggcaagtca

SEQ ID NO: 480477 - DNA, 287 bp, Homo sapiens
cctgccactgcactgtgggggcccctctctgtggctggctgagggtggaaccagctccctctgctcacggggaggtgtggagggacaggtgccagtgggagccagggctgtgcatgrcactcctgggctgacattggttccatgtgggtgcaggctgggtgggccccacactcagcgaagctggccagcacctgctgggcttgatcagaggatgagctccctctgggctgctggagtgcctgggctagatgccacaaagtccccagtgagttccattgagaggtgaa

SEQ ID NO: 480478 - DNA, 522 bp, Homo sapiens
atctctgcaaccgcgttaaaccagttcgtactaattacccataaacagcttaaccctccgctgccatgttgaactgcagaggcacatttctacagttctgttaattttatttgctattgatgacatgctgtacttaggaattataatttaccttcagaagtggtatataactattaatttatcagagtctcacaacggccctgggaactagaatcactttcatttttttagatgataagatggaacagataaattatgatatttttctgccacttcatagggaaagcctgggcttggagcccatttgctggagagttgctkcacatctcaaagtgacaaccgatgccttgtttgtttgcgtgggaaagagaatgacactcacgtaacagccttctattatattgttcttttaaaagatcttttatgctggcttgatttgctttttgctttctttgccaagtgggtttgccttgctttggagagctgcagaaaataatacaaactctgagagattccaaaagg

SEQ ID NO: 480479 - DNA, 522 bp, Homo sapiens
atctctgcaaccgcgttaaaccagttcgtactaattacccataaacagcttaaccctccgctgccatgttgaactgcagaggcacatttctacagttctgttaattttatttgctattgatgacatgctgtacttaggaattataatttaccttcagaagtggtatataactattaatttatcagagtctcacaacggccctgggaactagaatcactttcatttttttagatgataagatggaacagataaattatgatatttttctgccacttcatagggaaagcctgggcttggagcccatttgctggagagttgcttcacatctcaaagtgacaaccgatgccttgtttgtttgcgygggaaagagaatgacactcacgtaacagccttctattatattgttcttttaaaagatcttttatgctggcttgatttgctttttgctttctttgccaagtgggtttgccttgctttggagagctgcagaaaataatacaaactctgagagattccaaaagg

SEQ ID NO: 480480 - DNA, 644 bp, Homo sapiens
ggagaatcctactcctgaaagtagaaagttgctttcctttaaaattaggagataatgaatggcattcatgtattcagcttggcattctccccatttatgagaccagattatgtgagtatctgggcatggasatggagattgaactgggctttgatcatttaattgtagaatgtggtgtgaatgggcctgtgttctcacaaggttatttaaacaatcctaacccaaatcttactcctggggtcttagggggttaataaacacccttttgctccccttctgggttgaaaaccagttgacacagaagacaaaggaaatctgaatgtctgtcagctttttgctgataagctgatggaaggatgtgagctttatatctgtggccaaaagggcttgcttcagtgacacttgcagcccagctggctacctgcagcctctccgcctgccctgctaaggttgttggaaggacactctgtgcaggcagacaggtaggcagataggcagataggcagatagacaggtctgagagtgggtggagctgaggacagagtacttttcccaaattctctaatgagatgagtcactcccagcctcacccccatgccagaaacaatgaagggaagaggtgggaaaagagtaagggtgggggt

SEQ ID NO: 480481 - DNA, 305 bp, Homo sapiens
tgaatcttttcttctccagggcagcatttaggttttagtccccagttgtgcctgcctgtaagccaagaaaaaaacaacaaaaaaagcacartgtgttttaaataatgcaaccaaatccatttttgggcaaaggcagttagagatttataaaagacagcagccaggaaatttctctgctggtgtggttggaaaaaaagcaatcttcccatccttattagcctgtttccatttcttagacaccaaagaagcaccaagaggaggaaattggtatattggtataccaattagaggaaaatgctaacatc

SEQ ID NO: 480482 - DNA, 623 bp, Homo sapiens
tcaaacatcttaaatgatacactgttttaatatctaaaaatctgtcattctacttaattaacttagtcataaggacaaagccttagtatatttttgccacatacatgttatgtataaattttactgttgaataatacaagtattcattgctgactgaattcttaaaactttgggaatagaaaaaacacatttattaatggatgctaaagtgattcctgagaaaaataatgtgtatggttaatatggaaaacctttggtaatgtgatttgggtataagaatactaaaaccagagtacagggtgtgaatcatgtaccaggagggattttatttttaaatatctttattgaggtataattgaaatacaataaactgtacatatttaaagtacccaatmtgataagttttgtcatatgcatacagccatgaaatcatcagcataagcaaggtaatgaacatattcatcactctcaaagtttcatagtacctctttgtgatcccttcttacttaatcctccttgccaccccaccatcaccagaccactgatctgctttctttatgatcagtttgctacaaatgaaatcacataatatgaaccttttttggtctagcttttgtcactta

SEQ ID NO: 480483 - DNA, 623 bp, Homo sapiens
tcaaacatcttaaatgatacactgttttaatatctaaaaatctgtcattctacttaattaacttagtcataaggacaaagccttagtatatttttgccacatacatgttatgtataaattttactgttgaataatacaagtattcattgctgactgaattcttaaaactttgggaatagaaaaaacacatttattaatggatgctaaagtgattcctgagaaaaataatgtgtatggttaatatggaaaacctttggtaatgtgatttgggtataagaatactaaaaccagagtacagggtgtgaatcatgtaccaggagggattttatttttaaatatctttattgaggtataattgaaatacaataaactgtacatatttaaagtacccaatatgataagttttgtcatatgcatacagccatgaaatcatcascataagcaaggtaatgaacatattcatcactctcaaagtttcatagtacctctttgtgatcccttcttacttaatcctccttgccaccccaccatcaccagaccactgatctgctttctttatgatcagtttgctacaaatgaaatcacataatatgaaccttttttggtctagcttttgtcactta

SEQ ID NO: 480484 - DNA, 602 bp, Homo sapiens
gggttcacataggaacaccaaattgaaggtcacagggaagatgctgatttgtgatcatgtggcttcacacaggcaaatccatgcattgtgctttagggtgagcagcatggattcatttgtttgaatgatgtcgatggttaatgaattttaggaggaactctgaggaagccagctagttgctaatacaaatttcagtggaataatatcttttcccttttttctcctcttaactctcagtgccagggcactttgggaaacatttagacttaaaacattagaatattaaactgaaaagacrgagcaaaataattcaaattacagcagttgaatcgagtagttaaaattcagagatatcaagccaatgaataagacagcatttgtgaagtactacgttagcaatattgggatgagttgaagaacttctaaaaaggtgaactaaggacgtaagatttttgagaagttgaatcaaatccagagtggcatgcaaggaaaaccttgtgtgtttttactgctgtactaatagttaaaactagctattgtattctccagggcagatatgaaatggccttcagtcctagaaaactagcagagcagtttatcag

SEQ ID NO: 480485 - DNA, 356 bp, Homo sapiens
actgtaaaacagtgcagagcttcagacctcagtggatgtagtccaggactctcggggctccatgaggaaggctgaggascccaaaaatgcgttgtgtggtgccttttctgtgttccttaaggggtgtctggattgctaaaggcctatttttgatgtttttatgtaataaccagaagtgtgatgttttctattggtaattttttatccactgaccaccaaatggaggaggtagaagctttaagaaaaatatatcaagggaaccagatggaaggttgaggccatcagaaagaagtggaggcatcagtaaatgaaagaacaaatcatagaagagtcagcttgggagtttttcagaaagg

SEQ ID NO: 480486 - DNA, 519 bp, Homo sapiens
agtttgctttggctatatggttctcaggttaattaaggaattataaagaagcacctttggtttaacactcatcaaaactcttccttaaatatattcaggcatgtacagacaatgaagtctgatgtggaccaatcccaggacaattctcaaagttgtttagctttttaggttactgtgtaaacaatttttaactcttattttattttattttttgttttgttgtctttgcaatcccaaaattttctgttagtttccttatcatgtaatctaaaaagaagaatgggagaacctctttaagtgagcacagttgtattagatttgaatccctgccaatttaccactgtagattgtagagtcatatgtggaggctatgtgtaatgtggcatgcggcatcctcagatrtcaaacttctctttaatttccaagtgacaattagccaacccaccgtttcccatgacttctctgactcctaaatatttttgagagtccccagtgattgctcatgtgctcttcaaattc

SEQ ID NO: 480487 - DNA, 340 bp, Homo sapiens
agctgtcactcacatattttatttcgcctgaattcatgataagcagcatctttcattttctatattggtatagacggttgctttgaaacaaaaggcaattattgcttatttctcttagaatatgtttttcttccagttaacttgggtactaggtgctttcatctactatattatttcttctccccagtttcagttcttatgaaaaatatacaagtttggtactcatccaaacctrattccagtgcagaacagcaggccaaagcctggaatgacctttggttccattttgaggacacttttcaaggtgatgttctcatcaaagcatttggaatattctgtg

SEQ ID NO: 480488 - DNA, 551 bp, Homo sapiens
tgagagtcaatactatgcctgtgagttgtgcatagttatatgtcacaatttactctgtggtaatgaaacaggcttgacagccaagtcacctaaatgctgaaccagaaattttcaaatattcttgtaggcaagytcctggaagaaaagttgcataacttctgggttacacccagatgtatggcacaatgccccttttaagcagtgcctaggcagaagaggagagtcatataatctaaatgactggccaagacatgtgcaacaatgccttctgttgaaaggaccaggcaagagagtcatgacatttgcatgaagtgcttagaaatgctacaatccccaaggcagaggttgtagtgagccgagactgcagcactgcactgcaacctaggtgacaaaatgaaagaaaaagaaaaaaacattacaatccccagtggaagcaggatccagtcagaggaggtgagacaggtaaactagatgatggattcagagacattttacaatccttcctgaggatattgttaagacaggagagtcaaatcacaaatgtgaccagc

SEQ ID NO: 480489 - DNA, 635 bp, Homo sapiens
gttactctaagtggattgaattgggttcaaggtgtgtagattggcctggaattatacaggcccttccacacttgcatgagggtacttttttggtatatgaatctggcaagtccatattcttaagaattacaccttatcagagtgtccctgcatcttcccacttatagatgagtttgatcacctggctccactaggttgactgaattctgccattaagtatgctgcttccgtttcctgtaaacttcatctgcaagatactgtcagtgcatttaaagaacagaaagtttacagggcggattttatgatttggtaatttttttttttttgacagaatttcgctcttgtcgcccagtctggagtagtgcaatgtcatgatctcggctccctgcaacctccgcctcctggcttcaagtgattctcctgcctcagcctcccaagtagctgggattacaggcacttgctaccacatcccactaatttttgtatttttagtagagatggggtttcaccatgttggccaggctgatctcraactcttgacctcaggtgatccacgtgccttggcctcccaaggtgctgggattacaggcatgagccaccgccctcagctcgtaccttcttattaataatgacgg

SEQ ID NO: 480490 - DNA, 511 bp, Homo sapiens
atagcttcttcccagttctgtctttttgcccatccacctttcagataaggcacgtgtgtctgaaatttctctgtttcactttcttagtctctttacccattttaaaaaatcatttcttctctattgaattcccagaacactttttgcctgtgcatttaataaatwttattttgcatttattttatcttttgctccatgctatcctttcctctcaagagaggacagattctgaggttcactcatcactatattctttatgaaataattgcctggaatgtagtagtagctccgtgaaatgcagccacgcttttcttttcagaggccatccctgcgcctctcccattagaacactggggtgcttcccactgcccttaggacccagtacaaactccctggaacggccagaaattccattgatcattgcctctgctgacattcccacactggcctctcctctggccacttcattgacctaatctgatgctccagcctcaagggagccacttatggt

SEQ ID NO: 480491 - DNA, 614 bp, Homo sapiens
tactcatttctgaagctttattttagagttgtggctaccccagcccggaaatggggatagcttcttcccagttctgtctttttgcccatccacctttcagataaggcacgtgtgtctgaaatttctctgtttcactttcttagtctctttacccattttaaaaaatcatttcttctctattgaattcccagaacactttttgcctgtgcatttaataaattttattttrcatttattttatcttttgctccatgctatcctttcctctcaagagaggacagattctgaggttcactcatcactatattctttatgaaataattgcctggaatgtagtagtagctccgtgaaatgcagccacgcttttcttttcagaggccatccctgcgcctctcccattagaacactggggtgcttcccactgcccttaggacccagtacaaactccctggaacggccagaaattccattgatcattgcctctgctgacattcccacactggcctctcctctggccacttcattgacctaatctgatgctccagcctcaagggagccacttatggtcactagagttctccgaatcccccgtggtctacagagtaaattgcagt

SEQ ID NO: 480492 - DNA, 306 bp, Homo sapiens
atagttataatatctagtgtctctatgggtctataactagtacccagggcaataagaaagtaattgtaaaagaacaaaatgaagaagcaaaaaaaaaagaaaaataaaatgagtgaaataattagacaatttacctacaaaataaataagtacaagtggcgtatatgcacagcatcacttataatcccgaaaatggaaggtaaacagaaaattttttatcatattgacaaaaacagaaaaaagatcagtcttctgattcttggtgaggatgtgaggaaatgggaawctcctaacagatttacagga

SEQ ID NO: 480493 - DNA, 306 bp, Homo sapiens
atagttataatatctagtgtctctatgggtctataactagtacccagggcaataagaaagtaattgtaaaagaacaaaatgaagaagcaaaaaaaaaagaaaaataaaatgagtgaaataattagacaatttacctacaaaataaataagtacaagtggcgtatatgcacagcatcacttataatcccgaaaatggaaggtaaacagaaaattttttatcatattgacaaaaacagaaaaaagatcagtcttctgattcttggtgaggatgtgaggaaatgggaatytcctaacagatttacagga

SEQ ID NO: 480494 - DNA, 581 bp, Homo sapiens
aaatcctagtcctgccccttctctggttgtgtagcctttgataaattgttcaacctcttaatgctgaaattttcttatttgcaaaatggggagcacaaaaatgggacccaccttaaaaagtaattatggcagttatatgaattaatgtwtgtaaatatatatgtatagtaagtgttttatgtgtttgtatttagttgatgtttgaaaaatgttattcatgtataaactgtgaataactagaagcagaagacagttgaggttccttaacaaaaaacagattaccatgagaaaaagaaacagtagtttattaacatgtatatctcatatatacatagatgctatcttgaaaaatgaataatgtcaaagaggtggcctagaactctggtgtgttagcatcttcaactgtaataaacaaaaaagggtatagaggaggcaagacatggaacagtaatcagaaaatgcagggtaaaaaagagtaaggtttgctatgcagttataagtcaatgtcttctccattgataagagtctcttgtgatttcatcatccttcttttcttggtacacaggaacacttacaaatgg

SEQ ID NO: 480495 - DNA, 581 bp, Homo sapiens
aaatcctagtcctgccccttctctggttgtgtagcctttgataaattgttcaacctcttaatgctgaaattttcttatttgcaaaatggggagcacaaaaatgggacccaccttaaaaagtaattatggcagttatatgaattaatgtatgtaaatatatatgtatagtaagtgttttatgtgtttgtatttagttgatgtttgaaaaatgttattcaygtataaactgtgaataactagaagcagaagacagttgaggttccttaacaaaaaacagattaccatgagaaaaagaaacagtagtttattaacatgtatatctcatatatacatagatgctatcttgaaaaatgaataatgtcaaagaggtggcctagaactctggtgtgttagcatcttcaactgtaataaacaaaaaagggtatagaggaggcaagacatggaacagtaatcagaaaatgcagggtaaaaaagagtaaggtttgctatgcagttataagtcaatgtcttctccattgataagagtctcttgtgatttcatcatccttcttttcttggtacacaggaacacttacaaatgg

SEQ ID NO: 480496 - DNA, 581 bp, Homo sapiens
aaatcctagtcctgccccttctctggttgtgtagcctttgataaattgttcaacctcttaatgctgaaattttcttatttgcaaaatggggagcacaaaaatgggacccaccttaaaaagtaattatggcagttatatgaattaatgtatgtaaatatatatgtatagtaagtgttttatgtgtttgtatttagttgatgtttgaaaaatgttattcatgtataaactgtgaataactagaagcagaagacagttgaggttccttaacaaaaaacagattaccatgagaaaaagaaacagtagtttattawcatgtatatctcatatatacatagatgctatcttgaaaaatgaataatgtcaaagaggtggcctagaactctggtgtgttagcatcttcaactgtaataaacaaaaaagggtatagaggaggcaagacatggaacagtaatcagaaaatgcagggtaaaaaagagtaaggtttgctatgcagttataagtcaatgtcttctccattgataagagtctcttgtgatttcatcatccttcttttcttggtacacaggaacacttacaaatgg

SEQ ID NO: 480497 - DNA, 328 bp, Homo sapiens
gagccaatggtgtaaatctcagtctgagtactagagacaatgaggcaaaatgtttccattcaagcaggcagtcagtaaggggtgaattctttcttcttctaccttttgttctcttcaagtcctcagtagactggacgatacattctggagatcaatctactgagtctatggattcaaatgctagcaycctcctgaaacaccctcaaagacacatcccataataatgtttaatctagttactctgtagtaagtcaagttgacacataaaattaaccaacacaataatcaataataatactaaaacaataaaataataaatcagtagtac

SEQ ID NO: 480498 - DNA, 328 bp, Homo sapiens
gagccaatggtgtaaatctcagtctgagtactagagacaatgaggcaaaatgtttccattcaagcaggcagtcagtaaggggtgaattctttcttcttctaccttttgttctcttcaagtcctcagtagactggacgatacattctggagatcaatctactgagtctatggattcaaatgctagcaccctcctgaaacaccctcaaagacacatcccataataatgtttaatctagttactctgtagtaagtcaagttgacacataaaattaaccaacacaataatcaataataatactaaaacmataaaataataaatcagtagtac

SEQ ID NO: 480499 - DNA, 554 bp, Homo sapiens
cacatattagctacaaatagcatacatatttcaagatctggaatagaagttgataagctacacttaaatcttggcttgctttggcccttgagttgcaaaacacaatgcttatggcatagagaccctgatattatctccataaatgtgacaaattacaagccaaattaaatgacatacacctagaagagccccaatggtacaatttattaaatactttagtataatgagtatttatgttaaattgattatgctaagactatggcaggttaagcttaatatttctggtttctgaatgctcagtttaatatatcagattacagcatcttcacctctgtttattgttttgtgctgcgtgtgtgtgtgtgcacaaactcaaagaactaaaaaaagaaaaagaaactaagcccgtattagcagactaaagtraataataaatattaaatcagaactaacaaaatagaaaataatttgtaaaaactcaataaaagtgagttactttttggaatgaccaacaaaattcacaaaacttcagctagactgaaaaaagaaaaaat

SEQ ID NO: 480500 - DNA, 554 bp, Homo sapiens
cacatattagctacaaatagcatacatatttcaagatctggaatagaagttgataagctacacttaaatcttggcttgctttggcccttgagttgcaaaacacaatgcttatggcatagagaccctgatattatctccataaatgtgacaaattacaagccaaattaaatgacatacacctagaagagccccaatggtacaatttattaaatactttagtataatgagtatttatgttaaattgattatgctaagactatggcaggttaagcttaatatttctggtttctgaatgctcagtttaatatatcagattacagcatcttcacctctgtttattgttttgtgctgcgtgtgtgtgtgtgcacaaactcaaagaactaaaaaaagaaaaagaaactaagcccgtattagcagactaaagtgaataataaatattaaatcagaactaacaaaatagaaaataattkgtaaaaactcaataaaagtgagttactttttggaatgaccaacaaaattcacaaaacttcagctagactgaaaaaagaaaaaat

SEQ ID NO: 480501 - DNA, 619 bp, Homo sapiens
tgaacagaaggagactaagcacatggaatctcagggctgcaaaagcacacgggagtctcaggatccatgcggtgtacggctgacgccggctctggcccaggactggcagttgctgatgggtccctctactgaggcaggggatctgcagacctctcagctactgctcagacctcaagaagctttcctcagcccttacaagacacctgcacaaggcaatagcctgctcccaaytgtctgcctgaaagacaacacctcccatctcatctgctgctgacgctacaggaatatgaacagccgatttcattgttctcacaaatcacgacactctaaattcaatttccttaatagtctcaaacactcagaataacagaaccatgagtcacggaagtccgactcagcctcacacagaggacaagagtcctttggctgcaattcctgatttcctaatgctgttctgtgaggtttttggatgcctgttccctttgtgagaatagataatctgaagcagaagaaaaaggccctattgctctatttgggccacagagtgagggtccccatcctctccaaacttgccacaccccagcctgaggacgtcactggggaaagaagatcaaggccc

SEQ ID NO: 480502 - DNA, 619 bp, Homo sapiens
tgaacagaaggagactaagcacatggaatctcagggctgcaaaagcacacgggagtctcaggatccatgcggtgtacggctgacgccggctctggcccaggactggcagttgctgatgggtccctctactgaggcaggggatctgcagacctctcagctactgctcagacctcaagaagctttcctcagcccttacaagacacctgcacaaggcaatagcctgctcccaattgtctgcctgaaagacaacacctcccatctcatctgctgctgacgctacaggaatatgaacagcckatttcattgttctcacaaatcacgacactctaaattcaatttccttaatagtctcaaacactcagaataacagaaccatgagtcacggaagtccgactcagcctcacacagaggacaagagtcctttggctgcaattcctgatttcctaatgctgttctgtgaggtttttggatgcctgttccctttgtgagaatagataatctgaagcagaagaaaaaggccctattgctctatttgggccacagagtgagggtccccatcctctccaaacttgccacaccccagcctgaggacgtcactggggaaagaagatcaaggccc

SEQ ID NO: 480503 - DNA, 473 bp, Homo sapiens
cgtaacaaaattaataaagtaaacaagctatgccaatacttacctatatacctaaaaagtatacataccctaattggcccaaaagaagatgtaaggagcttctaattggaaaatgatgggactgtaatatttatggttacctgctatcayggcatattagttaaataagtgcccctctattaaacaacatgcaacaacatccagcattcaactttcctggcaggagtcaagcaattccaatggacagtaaagtaccaaaagtaattttcagccgaaatctttgtcaaccaactgtatagggttgctcaatgcctgatatgctattacaatccttcccactcccgaagcatgtgctggacctaatgctattatcccagcatggtagtatagtgctagtgtagtgtgaatacaccatgcgggactcctgcttattagttaaataagtgctcgtctattaaacaacatccagaaac

SEQ ID NO: 480504 - DNA, 599 bp, Homo sapiens
gcatccacaagggcaggtcggagatgtacaaagaggccctgccctgcccctccatggcacctgctctgctcccataccttctgcggtatgtgcagcctgcctgcaagggcagcagcaggatggaatcggaagccccrggaagcctccaggaggaatctccaagcactctgcaggtgctgctggagtatgcgcaggggttggaggcagggacacacaggggtcagaacaacatcgcagggtggaatgcaaacacacacgtggcacccctctatccacccctcatcccggccccactgctgacacttcctggggtctgcatctggcagactgcatctcttctgaaagacggtctgctctgaccattttagtggattttctctataagcgacgtgttgacaatgttatctgcttcctgctgatgttgaatgaaacaactttagcgtgaggtagacaaaagcaatatcccaagcacatcccactgtcgctgccagtaagagcccagcagaaggcagcgaatcactcctgaagtcacctgtagctctgtaatgcccagatctactgtgctcactaaataccgtgctgaatgagcaaggaagggg

SEQ ID NO: 480505 - DNA, 500 bp, Homo sapiens
gcctgcaagggcagcagcaggatggaatcggaagccccgggaagcctccaggaggaatctccaagcactctgcaggtgctgctggagtatgcgcaggggttggaggcagggacacrcaggggtcagaacaacatcgcagggtggaatgcaaacacacacgtggcacccctctatccacccctcatcccggccccactgctgacacttcctggggtctgcatctggcagactgcatctcttctgaaagacggtctgctctgaccattttagtggattttctctataagcgacgtgttgacaatgttatctgcttcctgctgatgttgaatgaaacaactttagcgtgaggtagacaaaagcaatatcccaagcacatcccactgtcgctgccagtaagagcccagcagaaggcagcgaatcactcctgaagtcacctgtagctctgtaatgcccagatctactgtgctcactaaataccgtgctgaatgagcaaggaaggg

SEQ ID NO: 480506 - DNA, 435 bp, Homo sapiens
tcttcccaggaagggcagacaatttgccctgattccagttctcttaaaatgtgagacctctggcctttcctctgggattcaaaatccaactgctgtgagttaagaatgttccttcataattttaacttctatttactcacctttgaaccacactaagtaatttcttggcacattgacatctgttgatggatctgtattacaacttttccaacttgcaggtttccaagtcacaagaggttcatcacaatacctcttcttyttgcaaaacacccttaatttaaccacagctatgatgatagtaactggcatatcactggaatgtcataaattgaaaattcataaaatcagtgcacagaaacaggtgcaggagaaatgtatggtgaatcaaagccatcccaatgaccattcatatttgtcaaagtctgaactcgtctg

SEQ ID NO: 480507 - DNA, 519 bp, Homo sapiens
actccagcctgggcgacagagactccgtctcaaaaaaaagaaaaaaaaaaaaaagtcaaacgaytgaacacgtaagttcctctcctgtctgcctggtagatggtggggggtgtcaggtggagcctgacaatcagaatgccaaggccaggtaactccagatcaagcttggccagacctcacgccacctccttctgaacacaccagagcctccgctatctcggggggatcagaagcagcatgttccatccccgaagaaacacaacactgtcagcgaggtcacagcctggggaagcctctgctagcaaggcagtggaggcatctctctcagagagtggcttcagggggagtgagtgggtttccactggagggactcctatgggagggtggaaggggctggtgaagacatttgctgcctgcttccctcagaagcagcttccatttcacaagatgaaaagagtacttcacaaacattgtcaggttttttttttaattaaacaaagaaaaagttgtgagactaaa

SEQ ID NO: 480508 - DNA, 440 bp, Homo sapiens
tgtctgcctggtagatggtggggggtgtcaggtggagcctgacaatcagaatgccaaggccaggtaactccagatcaagcttggccagacctcacgccacctccttctgaacacaccagagcctccgctatctcggggggatcagaagcagcatgttccatccccgaagaaacacaacactgtcagcgaggtcacagcctggggaagcctctgctagcaaggcagtggaggcatctctctcagagagtggcttcagggggagtgagtgggtttccactggagggactcctatgggagggtggaaggggctggtgaagacatttgctgcctgcttccctcagaagcagcttccatttcacaagatgaaaagagyacttcacaaacattgtcaggttttttttttaattaaacaaagaaaaagttgtgagactaaatgccag

SEQ ID NO: 480509 - DNA, 648 bp, Homo sapiens
aggatgtgcaggacagcgactgctgagacagcgttcttggctgccttgtggtgggtggggggccatggacccagcccagggcgggggttagggaaggcactcgggaggctactcgtaattcagggtttctgaaatctggagacagggagggctaggagtccataaagggatgtggcatttggcatcccagggagtcagcttaggggaggggcgtttagcactcaggggtctactctgtgcctcagcttggacccatgagtttggaaagtttcttttcttcttttttactttttttttttttttttttgagacagagtctcactctcgctctgttgycaaggctggagtacagtggcataatcttggctcactacaacctctgcctcccgggttcaagtgattctcctgcctcagcctcctgagtatctgggattacaggcgcccaccaccacgcccggctaatttttgtatttttagtggagacggggtttcaccacattggccacactggtcttgaactcctgacctcaagagatccgcctaccttggcctcccaaagtgccgggattataggcatgagccgccatacctggcagactttgcaaagttatttaacatctctattatctgagttgtcaggcagggata

SEQ ID NO: 480510 - DNA, 595 bp, Homo sapiens
aatttttctttaaacgttttgtagaccctcctgtgaaaccatctggccctgaaatgtctttctggggagcgtttaaattgcaagttcaattcccttccttggcatagggctgttgaattatctgtttcatgctgggcatgttgtagttcgtgttttcaagaagtggttcattttgtctaagttgtcaaatttatgtataacttcaataatacgttttaaataaagaatccattatttttccttaattttattatgtgtgtggaattygtgtttttacagttttattttatgatttctcagtctaaataaatattcacctttgaacctagcttcttatgattgtaattttatatgtatctttttcttaaagaaggttccgctatcccccaaaacatgcaagattcgggctgcatagaagctggatctgtccagcccctgactaacatttgtttctggcattaaatgaaacttgcctttaaatgaaacttaaatgcgtagagtgagtttccggactcacgtgtggccaggtctccacaggccgtggtcaagctcttgctgacttttgaagcgaaatcccatatgaacaaaggaaagg

SEQ ID NO: 480511 - DNA, 597 bp, Homo sapiens
tcattctgggacactctttactgggcattcctctcgcctgtctcctctgccctatcttctgtttcctgaatcccatttcttcccgttcttggaagaagaggaaatctctcattttggtggagtgcgttctccagtggcttcttgcgagggagagtttttgagaatttgctcatttgaaaatgtggaaatcatggaaataattttcttcagartcttaaaggcattgctccacagtcttaatccaatttagctattcagaagtctaaagctcatataattccctatactttctttgtgacctttgctatttctcttggaggcttataactatccatattacctcagggttttaaaatagtgaattgtgccttccaatcctatgttctttctttcaagaaattcctgttacttgggatgggactacatagacttgactggctttctaattttcttagcttttttctccattaaaaaagacctcttattctttttgctttagtctctggatgattccttgacttcattttacaaatttttgattgagtttctcatttatgctatcttatttttaaatctcaagaattatttttgtgttac

SEQ ID NO: 480512 - DNA, 606 bp, Homo sapiens
tgagattcagccaaagtggtaattaaagaatgtctagtcttaagtgcttattttaagaaaaaaagaaagttagaaaatcaataagctaggtattctatttaagaagttaggaaaataacaatgagatagaagcaaggagaacagtagataaataataagtgcagaaatgcataaaacataaatcattctcaatcaggattagctcataatactctcagaattaaaaagtggaaagattatttctggaaagggtaagagaaggccagtcatatacatacctatatatattttctattttaactctttaaatgaattttacagaaagaattagaggaccattgctttttaaatgacatttattttttctaataattcaagtacataacacattttcaaagggaaatttgaaaatactgaacaatgtaaagaaaaragatagaacttatagtcctatcattaggagataattattaagtattaacttgtgcgtacttatgctttcttttttcagcctatagcatctggtctcccatccaagtaataacctggatcaatcctgcttaagtttccaatattaggcattttcagggtgttgtgaccacagat

SEQ ID NO: 480513 - DNA, 272 bp, Homo sapiens
gctcagaacccccatccacaggtccatgtgctggctctgctcttggcaggagccaccttccagaccaggttcttcccacttgttggaagaaagaagagccagctacacatggcaaaacccgcctcttagggtgtcagggagaggaggagggaaatgctgcagggaaggtatgtggctgatttgttttgtctataatcaataccggccatccatttgtgcccagttcagaggatgtggagcgtgrttttattgctttcctggaggatggaggg

SEQ ID NO: 480514 - DNA, 648 bp, Homo sapiens
attaattagaaaaattataggtgaaacaaaaggaaaaatgggaaaagtatatgaacaggtaataaaataaacacttaaaaacgttctcatcccatagctgttggggtaatgccaattaaaagaacactgtgaaaaccaatttttcacctaatgattggcaaaaatgaaaaagagttctagtgaattacctactactatcaagtttcttttacaatagtgatgaacacgactattctgggaaggtataatctagtaaatatagaggtatacacgtgtggggtcttcatttgtcagaggcatcagrtgggagaatcagcccaccaaaatcaaaagaactttatgtcatgaattctataagttggatactccgaatgagtactgtgtgggacttcctttcttttaaaatgtgcatctcatttctgggttgtgtgagaagccgactctgagacagagactagcatgtgggaaggttattagggactgtccaaccatggtagtctcagggaagctgtagcatagaccctatgggcaggtctaaagatggggtgaccctgcagaactgtcctgagttgaaaccagagaacctggcatttatacccttgtatcaagcagggatatgacttgaccttgaggaggggacttttcatg

SEQ ID NO: 480515 - DNA, 627 bp, Homo sapiens
agccaactaggctttgaggcgttttttcacttggtctagggctgacactagtctttctgcagggttgaggtagaaagactgkcttgagggtatgatctgagaataaggtagataggaggtattggtggagctgagtatattttaatctgaaaatgatcatcttttctaagtgacaactttttatcactaaattcagtccttgagttataatagccgtgagtggttttctttttctcacacaaaaaaataaagttaaattctgtaattctaatgaaaattatgtttttttctgattgaaaaataacacagaacatttacgtgatcatatatagagttttgtcatattcaagaataaaaaagataaacaacaacataactgaccattctgttattaaatggcaaatgtggagagggaaataaacaaaaataaggaggtttacttgagtaatcaattagaattattgggttctgcataatttcttgctctgcttcccataggattttgattcttgtttcctcagttaaagaaaaagctgtaataatatctgctctgtctgacactcagggttctcactcagggtttatattctcacaatgaatataaaagtttttgtaaaaacagcaacc

SEQ ID NO: 480516 - DNA, 513 bp, Homo sapiens
ctcagccataaaaaggaacgaaataatggtatttgcagcaacctggatggaattggagactattattctaagtgaagtaactcaggaatggaaaaccaaacatcgtatgttctcactcatatgtgggagctaagctacgagcacacaaaggcataagaatgatacattagactttggggacacgggggaaatggtgaaggcggtgagggataaaagactacacactgggyacagtgtacactgttcaggtgatgtgtgcaccaaaatctcagaaatcaccaccaaagaacttattcatgtaacaaaacaccacctgttggccaaaaacctattgaaataaaaaagttaaaaattaaaaaagcaaaaacaaaatggcaatagaatagagaccacaaagtcataagaattaattgccaaatgtaatacccaccctgccattattacaggagtaactcacagtcactaagatggggcacttagggaagaatttacaaagaagatggatttgaacca

SEQ ID NO: 480517 - DNA, 290 bp, Homo sapiens
tgcctgcaatccatactcaccataagaccatcctccagacacagccctgactgatggtttccagcatgtacctctcaccctacaattacctgtggaccataaagccctcaccagcttggyggctgtttgatccgaatgacggtcagaaccaggacacctcacttagtctttcttgccagcgattttagcttatttgccatgagtacagggtataattaatatcacacaggagccagcattgtcatttttcaaatcatttccctggaaatgttctacacctcttaatggcc

SEQ ID NO: 480518 - DNA, 618 bp, Homo sapiens
ggagagtgtctgtgtagaaaaggcatcatcattgtctcctccaacaaggaaatgaacggcagggcatgccagtcctggaggacaggaataatgggggacaaacaggggcttggggagtcatcttcctgcctccaagcaaagactccctcactcaatcagccttacaaaagagtttaaaattcagtaacccaaagcacggggactgctactctttgtcactgaagtcctcargtaagagaacaataaaaaaacagtaacaacagcaaccaacaataggtaattcatagaatggaatcataggaagtgggtacttctattattgtacagattgcacagataaagaaactaaggcacagaggggtactttaactcattcaaggtcacacagccagaaagcagcattgctgagccaagcaatctggctccagaatctgggctcttagccactacctactctgctaatctccacacaaaacattagtcatcaggctaatttccaggctaaagactggaagaccactacaagtactttcggataaaataattgttcaaaaaactactatgggaatgagatagaatgtgaactatggtgaacaattaaaacacaaactaaaaata

SEQ ID NO: 480519 - DNA, 618 bp, Homo sapiens
ggagagtgtctgtgtagaaaaggcatcatcattgtctcctccaacaaggaaatgaacggcagggcatgccagtcctggaggacaggaataatgggggacaaacaggggcttggggagtcatcttcctgcctccaagcaaagactccctcactcaatcagccttacaaaagagtttaaaattcagtaacccaaagcacggggactgctactctttgtcactgaagtcctcaagtaagagaacaataaaaaaacagtaacaacagcaaccaacaataggtaattcatagaatggaatcataggaagtggrtacttctattattgtacagattgcacagataaagaaactaaggcacagaggggtactttaactcattcaaggtcacacagccagaaagcagcattgctgagccaagcaatctggctccagaatctgggctcttagccactacctactctgctaatctccacacaaaacattagtcatcaggctaatttccaggctaaagactggaagaccactacaagtactttcggataaaataattgttcaaaaaactactatgggaatgagatagaatgtgaactatggtgaacaattaaaacacaaactaaaaata

SEQ ID NO: 480520 - DNA, 586 bp, Homo sapiens
ctggaagtcaataggaagtgttgtggtctctcacaacaagctcatttattcatccattctctggacactcaaggaaaaatattagctcctcttaggatctgtgtataagccaaatcattttggcttaggcgtactaggaggagattttcaagctgtgttagaagagggaatatagtcacctttatctttccaagttatctgtcagttgagagccatgctgctgttaacagcacctcccggtggcccaaaaggaaggcataaggacccagccaatcttgcttaggcttttatgggaagagtcttttgtaggccttggtgactgagcacattgagctatatgatggtgggttttttacattgtatagggttttgatgaaagatatggtatgagcccctaaagcacttaagggtaccratagacttgacacttctccacttccatcacacagtattgctatgaaaatgcaatcaatccagttcctgacatcttttctaccccactctcaagagcacctactgtatcaacatgacattttaaaatcttggcttgttttccaggccatgaatttaatttctcattgcttca

SEQ ID NO: 480521 - DNA, 366 bp, Homo sapiens
tgcttaggatttgggagtgaacagactcaggactattgagagattgaggtccacttcagcagtttgtctttagcatgagagactcattcaacttctgttcttggcaggcagttaacaagatcaaagagattgctgtgaccgtgaagaaggcagataaagtgtaagtctgtagtgggtttttttttttttttttaaagagacggagccttgctgtattgcccaggctagtcttgaactactggctcaagtgatctcccacctgcgactcccaaagtgctgggattacaggtgtgagtcaccgtgtcaggcctttgtcagaaccttgactgacttsctgtggccaaattggatgcagaagcatgctgc

SEQ ID NO: 480522 - DNA, 548 bp, Homo sapiens
cagggagacaagagcatcctggggtgagctccactagagtggcccgtctggaagtttcactgtggttgcattctttgttccagaagtggctggacaacacgcagttgctttcttctggcatcatcttatttagccctggcctagccagacactgctctcagggtttctctggtttgagtaaatgggttacattaccttgtctgccccttctatctccatattcttttggtttagtcttttgttccctcttactcaagactgtgagaagggtgttttagggaggscttatgctctctaaactctagtgatcccttggaagtctactaaggagacgactgaaagcacccacctagtcttttcagttcagcccccagtgatcttggtccttctgctttcttgtgaccaatgggagtttggaatggctggcacagatgagctggaaatccagcagtgtctaacatcctcctgatttacactggtcctgatagctggcctgcaccctgctgtagttggtcgttgttaaaagctggaggtaaatgatgatgtca

SEQ ID NO: 480523 - DNA, 528 bp, Homo sapiens
gcggcggcgctcagagttggttcctgaccgccttctgccgcggccgggtttgtcaccaggtcctggggtctgcaccggctcggccagacctcgccccccgcttctccgccatggccctggtgcggggcgcggagccggcggcggggccttcccgctggctgcccacgcacgtccaggtgacggtgctgcgggcccgcgggctgcgggcgaagagctcgggagcgtgcagcaccagcgacgcgtacacggtgatccaggtgggccgcgagaagtacagtacgtcggtggtggagaagacgcacggctgycccgagtggcgtgaggagtgctccttcgagctgccgccgggggccctgggatggcctgctgcgggcgcaggaggaccgacgcgggcccggcgccctgggccgcgaggctccgccgccgcctgcgagctggtgctcaccaccatgcaccgctcgctcatcggcgtcgacaagttcctgggccaggccacggtggcgctggacgaggtcttcggcgcaggcc

SEQ ID NO: 480524 - DNA, 378 bp, Homo sapiens
cctcctctaggtccgggatgggatttgtgatgggtacacgtgttcctaggcggctctttaagagcagaattgggtctccggatggggtccagcagcagttccgcgggttccctaggaatgcccagagggatcatcccaggcggtctccgcggagaccaagcatctgacccgaggtcsccgagtgcacgacccaggcgcgctgcccatgaggccgcttagggaccgtggcgcatgtctcaggagtagcgcctgcgcccgcccccttccggattcacagaaccacccacccccggatttgcccccgcgtggaagcaggcccaagccagagtgctagggttagggcggagaggccctgattcaaggtgggcaacagaagcc

SEQ ID NO: 480525 - DNA, 634 bp, Homo sapiens
tctccaactcttccagctgctccaagttaaacatagttcggactctcttttgctgtctctcagtgtcctgtaggtcctccgttggggcccagtctgggaaggcccagagtcctgagcagtgagccagctccaaccctaaagagcaaccagcagcaggggaggttatccagcagcaggggaggttagccagaagccccctgcactcccatctgggcaaaatgagaaggcacacacagctctgctaccttgccttccccttggccaggtaacagtgcmagaagacagtggaaagagactgtgcagaaataacaggaaacaaacaaatgggaaagaagggacaatgcaatgagactgtctgccaccactactctctagccaagtggcttcacttctggcccctaagaggagttgccaaacctcccttctctttgccttcctttcctctccttgactgcttctggcaacgccatggaatgggcagagaagagacccccaggggttcacccttttaattcactgaacaaatattatactttttgaatgtctactgtgtgtcatgcatggtttcaggacaaaacagaaaatctctgtcgttatggagcttacatcttagaaatgaggtcagaagagatag

SEQ ID NO: 480526 - DNA, 634 bp, Homo sapiens
tctccaactcttccagctgctccaagttaaacatagttcggactctcttttgctgtctctcagtgtcctgtaggtcctccgttggggcccagtctgggaaggcccagagtcctgagcagtgagccagctccaaccctaaagagcaaccagcagcaggggaggttatccagcagcaggggaggttagccagaagccccctgcactcccatctgggcaaaatgagaaggcacacacagctctgctaccttgccttccccttggccaggtaacagtgcaagaagacagtggaaagagactgtgcagaaataacaggaaacaaacaaatgggaaagaagggacaatgcaatgagactgtctgccaccactactctctagccaagtggcttcacttctggcccctaagaggagttgccaaacctcccttctctttgccttcctttcctytccttgactgcttctggcaacgccatggaatgggcagagaagagacccccaggggttcacccttttaattcactgaacaaatattatactttttgaatgtctactgtgtgtcatgcatggtttcaggacaaaacagaaaatctctgtcgttatggagcttacatcttagaaatgaggtcagaagagatag

SEQ ID NO: 480527 - DNA, 610 bp, Homo sapiens
cgggcctcgccaggatggcctcgaccgagaaaggggactcgaagcgtccgggagcgcggggcgtgttcgggccagtaggggacctgggcgccggagagcggccagagcgcggaggtcggacccgagagcccgagggagcgggtggcgggctgcctcgcggcstggggctaggcatgacgcggccgttgcccggacggacgcaaggaagggagctcgggagaagtgagaagattctgcaaaaggcagcgagcaagaccggttgtctgggaacctcctgcgcgctcggcgaaggctcttaaatttggcgggggcggggcatggggcggcctctccccactgcggtcgcggcggggcccccaaagcctgtgagcgcccgctctgtgcgaggcaaggtgggcacagcaccaaagagtgtgttccctcccttcctccgcttttaaaaatgcccaccctggggcggtcgtggggaggactctgagctcgctggtgatcctgggcgaaacacccagccaccgggctccgtctttctcctttgctcactgaagaagggatgcccgtttccccggggccttgcagaggcggagctgtgatctggagagcggtagggcag

SEQ ID NO: 480528 - DNA, 527 bp, Homo sapiens
atgactaaattccttgaagacagtgacagtggtaacatttgtttccacattccctacaagcacctcacctaagtctgaatgcacctctgctttttattgagtgcttgtcagactgaagaactcattcatggtcagagctattaattatcactttcatctggggaaaatttcctcctaatttttgtgatacctattaaagatttctttgtgtttaataattttacattaaaatgcattataaaatcatgtattacattgtacattacagtgcatgcattgcaaaaaaaagttcaaacmctgcagaagtggacaataaatgtttctctttccccaaagcctttcccatctttctccctaaagataattccttttaaaagtttgatgtgtatcttttgagatattttctgtgtacttttttgttgagacagggtcttgctctgtcatccagactggagtgcagtggtgcgattttggctcattgcgacctccaccttccgtactcaagtcatcctcccacctcagcctca

SEQ ID NO: 480529 - DNA, 662 bp, Homo sapiens
ctgcttggggactgaggcaggaggattgcttgagcccaggagtcagcctaggcaacacagcaagaccctgtctcttaaaaaaaaaaaaaacaacccatcaacccagaaagagtttggagtattatctatgctgttcttggaccaggagaagagaamcagccattttaagtttgggaaggcagtcaaaggtagtattgggagctgatataaccagttttgaaagccggagaacacacatcattataaatgatgggtgactattgccaagatgaagaaaaactgacccattactattaggccaaggaagtttggctaaggtggattttataagagctctttcttgtacctaccaatagaaggggctcccatctgtcccccactaagaatttctctgtgcttcatctatcttctttctgctcaccactgccccagaaggccatgcttctcactttgagaaacaaaaactaaaagaactacatgtctgccccaaaatgaaaacctttaacatgctcctgtagtcaccagttctcataaaatactaaccaatagttaattaagtcatttttgggatgattacctggtttttattagatccaacctgatttttaagaggtgctaggtatagatcgatagctagctagctagctagatagatatataga

SEQ ID NO: 480530 - DNA, 544 bp, Homo sapiens
atatacgcttttatatactttatatgagtaattttttttcctagttgaaactgtcctctatcccttcactatattctgtggaaaggtctttattggatcaacagcagcagcaacaatcgatggcatttactgaacatttactatgtgctactgcagtgttgaatgttttgtatgaattattttatccaattccccagcaactctctcagggagttgctgttattccaattggatagacaaagaatatggggtatagcraagtcaagtaagggctcaaaagtcacatagttaataaagggtgaagctaggtgtcaaacctagctctcaacccaacactccattatacctccactgtcagactgtgtgggaacatttgtcaagaagggccacttataaaataataatcatagcaaacaccaatacagtttttactatgtgcctgatgctgcactaacccagggtttctcactggtggcactattgatattttgggacaggtcattctgtgttgtgcgggatatcctgtacattgtaggatgttcaa

SEQ ID NO: 480531 - DNA, 631 bp, Homo sapiens
ctcctacattaaagaatcaaagaaagggcatctaattattgaagtagcttgcagatgttacaaaaaaaattgaagcatatatttagtttctaagcagatgaaaagaaagctttgagaaaaactcatcttgtgcaacattgtcctgatgtaatattcatgttatttgaaatgatgttgtccccattcattcagaatggcattttagtaccactgaaagccagtagtagtacttgctgtaaaatgactacactgagaaaagacaaggcaagttttccaactttggaaaacaggaatttacacatccacacaaagtttgacatttgctaacaaactttttcctacttcttaaagtatctgaaacatcaaatttgagctaacttcaaagccagcaagggggaattcagtgatgtcagtaggaaatcccttcattgattcacgcgagcacactttccatttgcattcaaaaaacaggaatcacaaatctggctgggaaaactgttttgtgacctactagatctctctgactttcattcccaaactcctcactgtratttctcagtttttttcagaactgccttagctgtctcttgactaccttatcagaataagaaattaattttcaaaattctca

SEQ ID NO: 480532 - DNA, 558 bp, Homo sapiens
tgtttcctcagtagtaaaactgggtacagggctgctgcatactcaggctatgttcattgatgtaacaaatgccaacttttccaaatacattttctagccaggacaccacgcaatatgttatagaagttctccaaaacaaatgatgatttacggacttctttctgcaatagcactaagtctcctgctacaacatacaaaaataataataaaggatgcaatattaaaaatgaagtttcatacttctgaagtctgcttctattttcagagcttatacttacaacaacgctggttttgttaccccctctcacagccctgcaaaattatccagatgtacatagtcctgaagccaccaaagtttctaatggttttatttcaaagtgcacactcacacatacataagcctgatggaaactatcttctaatgctcagcccctgaaatgatttccaggttaccaagcatgtatgaaagtttttatgaaaactgaaagaacattgaattaccattcattgatytgctcattatttgccagatataggtaaatatctgtttgcctatgt

SEQ ID NO: 480533 - DNA, 633 bp, Homo sapiens
ctgtgaggccttatgtatamaacagggaacatgcgaagataagccttataaagtatatcccgtttcaaaggataacttctgagatttcatacattttgaccaatggaatcctcagaataataggatccttccagtacagagctatgtatgtatgtatgtatctatctacctacctacctatcacatatctttttaatatatctatatttttcttaaactcaggacttcatagattcaataatttgttgaagaagatttcaggtaattctcacttgggaacatcccaattttctttcatgaacaactaaggatagccattaatcaacatgcattctttttaatttgaactcaccaagtttcctgccctgctgcaatagggaccctagaacaggttttttgagcaaatacataagcaacaaaataaaactgaatgtgccctaaatccaggctcaacgaccattcttaaattatccgatatctgtgggaaaaaactccttgcctgtggttcagggggaaaaaaaatgttagtgcctggctttataaaggaagtgcagtgctttttcttttaaccaaaagtgctctttctatgttatatttatttctacaggaggggaattccacactctggcatct

SEQ ID NO: 480534 - DNA, 633 bp, Homo sapiens
ctgtgaggccttatgtatacaacagggaacatgcgaagataagcctyataaagtatatcccgtttcaaaggataacttctgagatttcatacattttgaccaatggaatcctcagaataataggatccttccagtacagagctatgtatgtatgtatgtatctatctacctacctacctatcacatatctttttaatatatctatatttttcttaaactcaggacttcatagattcaataatttgttgaagaagatttcaggtaattctcacttgggaacatcccaattttctttcatgaacaactaaggatagccattaatcaacatgcattctttttaatttgaactcaccaagtttcctgccctgctgcaatagggaccctagaacaggttttttgagcaaatacataagcaacaaaataaaactgaatgtgccctaaatccaggctcaacgaccattcttaaattatccgatatctgtgggaaaaaactccttgcctgtggttcagggggaaaaaaaatgttagtgcctggctttataaaggaagtgcagtgctttttcttttaaccaaaagtgctctttctatgttatatttatttctacaggaggggaattccacactctggcatct

SEQ ID NO: 480535 - DNA, 633 bp, Homo sapiens
ctgtgaggccttatgtatacaacagggaacatgcgaagataagccttataaagtatatcccgtttcaaaggataacttctgagatttcatacattttgaccaatggaatcctcagaataataggatccttccagtacagagctatgtatgtatgtatgtatctatctacctacctacctatcacatatctttttaatatatctatatttttcttaaactcaggacttcatagattcaataatttgttgaagaagatttcaggtaattctcacttgggaacatcccaattttctttcatgaacaactaaggatagccattaatcaacatgcattctttttaatttgaactcascaagtttcctgccctgctgcaatagggaccctagaacaggttttttgagcaaatacataagcaacaaaataaaactgaatgtgccctaaatccaggctcaacgaccattcttaaattatccgatatctgtgggaaaaaactccttgcctgtggttcagggggaaaaaaaatgttagtgcctggctttataaaggaagtgcagtgctttttcttttaaccaaaagtgctctttctatgttatatttatttctacaggaggggaattccacactctggcatct

SEQ ID NO: 480536 - DNA, 633 bp, Homo sapiens
ctgtgaggccttatgtatacaacagggaacatgcgaagataagccttataaagtatatcccgtttcaaaggataacttctgagatttcatacattttgaccaatggaatcctcagaataataggatccttccagtacagagctatgtatgtatgtatgtatctatctacctacctacctatcacatatctttttaatatatctatatttttcttaaactcaggacttcatagattcaataatttgttgaagaagatttcaggtaattctcacttgggaacatcccaattttctttcatgaacaactaaggatagccattaatcaacatgcattctttttaatttgaactcaccaagtttcctgccctgctgcaatagggaccctagaacaggttttttgagcaaatacataagcaacaaaataaaactgaaygtgccctaaatccaggctcaacgaccattcttaaattatccgatatctgtgggaaaaaactccttgcctgtggttcagggggaaaaaaaatgttagtgcctggctttataaaggaagtgcagtgctttttcttttaaccaaaagtgctctttctatgttatatttatttctacaggaggggaattccacactctggcatct

SEQ ID NO: 480537 - DNA, 552 bp, Homo sapiens
atttttttattttaagagtgacctttctattgtcacagtctgatgtctgcaggagttaacaaagtcatttcactctggctggttcaaactttatcatctctcagcactacttaccttctagcatctctactcccatctacccctttagtaatcattctctggtgtgcctctcatagtctctgaatacacactgcccagctttcagatagaactcatgactgacaggttaatacacacaaagccttctgcatcctctcctctgtgcagattcctcttctctggaatcctatcttgtagattccagctgcttcagaaaccctgcaatctgatttctagaagctcagagagagcattctgtttcagctctagctccttatactagagtcaagaaattgcccacacagagagctatacaytgaccctgggattcacttggtgagtttctctttaataacgtataacagtcttgctttgcctattgtccaaagcctgtaaactagtacctcatacaacttgcctgtttttttttctttaaattatggcaagagggct

SEQ ID NO: 480538 - DNA, 651 bp, Homo sapiens
atgtatatccttagcttatgtgcatgcttcattgtsccattggactttgcttacaaaacacaagcccaaaataaaactttaaagaatttcaggactgtgacagcacatcattcaactaatatgaaacccttttgagtacgggagccctgtgcgactacacagcttgtacacccataaagtaaaccttggtcacaaagatggtttaattactgagaatacactgaagtaccacctcataggactggaaagtctccacactacataagcctaaagtaaatgtgaatggcatggcctcaacatgggcaatcgatgcctaggcagaagcagaaagatcagttaggaagcagtttcaataatgaaggagagagtgactgggctgacatagtgacagtgaatatattaagaaatatcaaattctaattagattttgaaggtatatttgcccattcttatggtgctaataaaaacatacccaggactgggtaatttataaaggaaagaggtttaactgactcacagttcagcatggcaggggaggcccatgaaacgtacaatcatggtggaaggggaagcaaatatgtccttcttcacatggcggtagcaaggagaagtgccaagtgaaggggggaaaagccccttaggaaaccatca

SEQ ID NO: 480539 - DNA, 210 bp, Homo sapiens
tgggtctgcctttcccagcccactgactcaaatgttaatctcctttggcaccaccctcacagacacaccccaaatcaatactttgcacccttcaatcaagttgacattcagtgttaaccatcacacckggggttgactcgggccacactggtatcccaagagattaaatctagtaggtaggggactgaagaaagaagttccaggaaacac

SEQ ID NO: 480540 - DNA, 210 bp, Homo sapiens
tgggtctgcctttcccagcccactgactcaaatgttaatctcctttggcaccaccctcacagacacaccccaaatcaatactttgcacccttcaatcaagttgacattcagtgttaaccatcacacctggggttgactcrggccacactggtatcccaagagattaaatctagtaggtaggggactgaagaaagaagttccaggaaacac

SEQ ID NO: 480541 - DNA, 210 bp, Homo sapiens
tgggtctgcctttcccagcccactgactcaaatgttaatctcctttggcaccaccctcacagacacaccccaaatcaatactttgcacccttcaatcaagttgacattcagtgttaaccatcacacctggggttgactcgggccacactggtatcccaagagattaaatctagtaggtaggggactgmagaaagaagttccaggaaacac

SEQ ID NO: 480542 - DNA, 635 bp, Homo sapiens
aatagaaagcaaactgagagtttgggccttgttagtcgcctgcattgccttggaacaaacagtgcctagttaacacttgcatgaactcagagccctggttcgtatgtccccagaaatacattcagggcagcagggaagccctgtgctcatgaaagccatgaaaagcaggtagagagtgactttaggcaatagtgctcccaccattttttcatattctcagcactggttacttattcatgaagaattcttcttagatctgcttctccctaggggccataggtttcattttgcagsgagggaaggtttgctattcatttttattttattatttttttaagacggttttgctcttgttgcccaggctggaatgcaatggcacaatctcaactcactgcagcctctgcctcctaaattcaagtgattctcctgcttcagcctcctgagtagctgggattacaggcatgtgccacaatacccagctaattttgtatttttagtagagatggggtttctctgttggtcagggtggtctcgaactctcgacctcctaaagtgctgggattacaggcttgagccaccgtgcccggccaggtttgctattcatttttggtgtcttggccttttcatcgtagcac

SEQ ID NO: 480543 - DNA, 635 bp, Homo sapiens
aatagaaagcaaactgagagtttgggccttgttagtcgcctgcattgccttggaacaaacagtgcctagttaacacttgcatgaactcagagccctggttcgtatgtccccagaaatacattcagggcagcagggaagccctgtgctcatgaaagccatgaaaagcaggtagagagtgactttaggcaatagtgctcccaccattttttcatattctcagcactggttacttattcatgaagaattcttcttagatctgcttctccctaggggccataggtttcattttgcagggagggaaggtttgctattcatttttattttattatttttttaagacrgttttgctcttgttgcccaggctggaatgcaatggcacaatctcaactcactgcagcctctgcctcctaaattcaagtgattctcctgcttcagcctcctgagtagctgggattacaggcatgtgccacaatacccagctaattttgtatttttagtagagatggggtttctctgttggtcagggtggtctcgaactctcgacctcctaaagtgctgggattacaggcttgagccaccgtgcccggccaggtttgctattcatttttggtgtcttggccttttcatcgtagcac

SEQ ID NO: 480544 - DNA, 635 bp, Homo sapiens
aatagaaagcaaactgagagtttgggccttgttagtcgcctgcattgccttggaacaaacagtgcctagttaacacttgcatgaactcagagccctggttcgtatgtccccagaaatacattcagggcagcagggaagccctgtgctcatgaaagccatgaaaagcaggtagagagtgactttaggcaatagtgctcccaccattttttcatattctcagcactggttacttattcatgaagaattcttcttagatctgcttctccctaggggccataggtttcattttgcagggagggaaggtttgctattcatttttattttattatttttttaagacggttttgctcttgttgcccaggctggaatgcaatggcacaatctcaactcactgcagcctctgcctcctarattcaagtgattctcctgcttcagcctcctgagtagctgggattacaggcatgtgccacaatacccagctaattttgtatttttagtagagatggggtttctctgttggtcagggtggtctcgaactctcgacctcctaaagtgctgggattacaggcttgagccaccgtgcccggccaggtttgctattcatttttggtgtcttggccttttcatcgtagcac

SEQ ID NO: 480545 - DNA, 635 bp, Homo sapiens
aatagaaagcaaactgagagtttgggccttgttagtcgcctgcattgccttggaacaaacagtgcctagttaacacttgcatgaactcagagccctggttcgtatgtccccagaaatacattcagggcagcagggaagccctgtgctcatgaaagccatgaaaagcaggtagagagtgactttaggcaatagtgctcccaccattttttcatattctcagcactggttacttattcatgaagaattcttcttagatctgcttctccctaggggccataggtttcattttgcagggagggaaggtttgctattcatttttattttattatttttttaagacggttttgctcttgttgcccaggctggaatgcaatggcacaatctcaactcactgcagcctctgcctcctaaattcaagtgattctcctgcttcagcctcctgagtagctgggattacaggcatgtgccacaatacccagctaattttgtatttttagtagagatggsgtttctctgttggtcagggtggtctcgaactctcgacctcctaaagtgctgggattacaggcttgagccaccgtgcccggccaggtttgctattcatttttggtgtcttggccttttcatcgtagcac

SEQ ID NO: 480546 - DNA, 547 bp, Homo sapiens
ttgtttgcctttgagtgggaagacccccgatctagtttaaaacaacagtacccatggacagttttaccccaagtgtttacagactctccaaatccttttggtcaaaatttaaaataagtcatagaaaaattttccttgccctcatgcatatgcctactccagtacatggatggcctgcttatttcaggggaaaacaaagaatgggtaacagcattttcaatcaacttccttaattttctaagagtagaagaattaagagtctcaaaaagtaaacttcagtttgtagagcctgaagtaaagtacttaggaattttaatcagcaaaggcaaatggaggattgggtttgaacgaattgaaggtattatatccctacttctgccagaaacaamagaggagcttagaacgttcttaggcttagttggatactgttgcctatgggttgactcttatgccctagaagaaaactgctataccaaaaactcaattcagagggagtcgcccccacttatctggacccaaccagaaatgcgacagatagaaaaattaa

SEQ ID NO: 480547 - DNA, 547 bp, Homo sapiens
ttgtttgcctttgagtgggaagacccccgatctagtttaaaacaacagtacccatggacagttttaccccaagtgtttacagactctccaaatccttttggtcaaaatttaaaataagtcatagaaaaattttccttgccctcatgcatatgcctactccagtacatggatggcctgcttatttcaggggaaaacaaagaatgggtaacagcattttcaatcaacttccttaattttctaagagtagaagaattaagagtctcaaaaagtaaacttcagtttgtagagcctgaagtaaagtacttaggaattttaatcagcaaaggcaaatggaggattgggtttgaacgaattgaaggtattatatccctacttctgccagaaacaaaagaggagcttagaacrttcttaggcttagttggatactgttgcctatgggttgactcttatgccctagaagaaaactgctataccaaaaactcaattcagagggagtcgcccccacttatctggacccaaccagaaatgcgacagatagaaaaattaa

SEQ ID NO: 480548 - DNA, 609 bp, Homo sapiens
agggtgtcatcttcgactccctgttgtctcacttcctatatctaacctgtcaaaaatgccactgacacattttaaaaatatatccccaatcctattacttcccactacatacactgctaccttgattctgagccaatgttctcccttccttggattcctgcaatagtctccaggtactttcccccaattctacccttccctctttgtgctattctccatcatagatgccagggaaaactttaaaagtataagtcacatacatctcctctctgctgaaaacaatgtccttgattctgagagaaatggggaacttttgcaaagtccacaaaggcctrtggggccctgtgtgatttggccccactgttctgacctgattctcctgctcatttgcttcatcctacctgtgctggctgcctgctgatatttgaataacaggtgtttttatgtcttggggcattttctctggctgttccattttcttagactgttcctttcccctgggtgactcctatattccaaatctattatggtcttctcatgtcctgtcatctcccctttttgttgtaggcattgttgtgggaaccattcgagtgcaggtgtaggttgata

SEQ ID NO: 480549 - DNA, 299 bp, Homo sapiens
atgtgcagaccccagggggcttcctgttccacaagctcccctctctttttcctctccacccttgctgttgggcctcccttccaaatctgcctaacaaaggcagcaggatctttaatactgttcagctttgtcaatggagacaggatactctagaaagttgagagattccctggtccagtctgggggagggaaaaaatatgcagtgtagcatagatggttktacttgtccactcagacacatgctcatacttattagatggatgtatcagatgcttcaaaagtcctgatgtgtagtagca

SEQ ID NO: 480550 - DNA, 468 bp, Homo sapiens
ccttcagtcagtggtctctgaagtgagatttgctcatcttctgtggaataggtcttgggaaactgaacttgacagcttgaatcttcctcatatcatctcaacttagggtacattgagtgccacaggataaatgtgggagatctttctgaagcatcagtttcccttgaktctcttgagagagaaaaaacattaatgtacttaggggtgaccctcacataggtttctaagagtataccagacttctctctgaaatgagacttgggttgtcctctttctgataaattcccagatttaacaaaaaagctgccttctgccatgaggacacattgatataaaagtttgagagatactggtgcacttcttcacactaacaggcatttgaggatgtatgactctaaaccacacagcgtgtagttcatgcctatgtaatgtttacttttctacctctgcgtctggttttggtccccg

SEQ ID NO: 480551 - DNA, 468 bp, Homo sapiens
ccttcagtcagtggtctctgaagtgagatttgctcatcttctgtggaataggtcttgggaaactgaacttgacagcttgaatcttcctcatatcatctcaacttagggtacattgagtgccacaggataaatgtgggagatctttctgaagcatcagtttcccttgattctcttgagagagaaaaaacattaatgtacttaggggtgaccctcacataggtttctaagagtataccagacttctctctgaaatgagacttgggttgtcctctttctgataaattcccagatttaacaaaaaagctgccttctgccatgaggacacattgatataaaagtttgagagatactggtgcacttcttcacactaacagrcatttgaggatgtatgactctaaaccacacagcgtgtagttcatgcctatgtaatgtttacttttctacctctgcgtctggttttggtccccg

SEQ ID NO: 480552 - DNA, 542 bp, Homo sapiens
tggggttccgtggttgacccggaagcaagtcaggcagggagccaggaatgtggtgactcacattagctatgtggagagagaccagggagtgtcccttccaggtggaacccctcctcctccatgagtcacccggctccatacacctgcctgattccagcagcccaacacacctgtgccaactagcagcttatgtttctcatgtgcttgcctgtctgtcctattgacgattcctcaaaacaccaaggggaggtagcatgaaatgttatcctggaaaacctttgtgagttagaaaacgtggccaagtgcccccagttgatgactggcaaatctrgaatcagcctcatgacgtttccagtgtgttacacaaaccatccagccttgctgcttctccaaatactgtatctatgaagtatgccagactctcagcagagaggaggtctacggcagtggaagagagcaaagcaggtgtcaaggttcattaatctgatcttggtcccgttgtgatgggtcacacactatatccaggttgctttttaaagctc

SEQ ID NO: 480553 - DNA, 639 bp, Homo sapiens
  misc_feature (1)...(639): n = A,T,C or G
ctgccccaaattttcattttrccacgggcccccgacattccatagccggtcctaactggtagaactttgcctgttcttttgagtgcctttgttgagaaaagtaattaaggacctgctgactggactgcagtgactcagtgaagtgcttgcagctttatgtgaacaacaagaaacaaaaacagcacactgtatttagagctccagacgtctgtgcggacccaagtctgctggcaggggtattgatgtcgtacttcgtcatttctgagtgccattagagccaccaacctgttctgggcctaggctgggtctgtaagcgcccctgttctcgtaaatactttatttgtagagttcctgctgctgggctggccagcacttcctcattgggggaaatgtgtagacacaattgacttcagttcttgaaaagttttatttagctatggaatcgtagtatttgagttggaaaataccttttatagcatatccgacttgctgaggcccagaaactgtgcacatcatatcactaggcaaaaggccaggacccaagttcaagtcctctgccgtagagtcntacatcctgccagcagtgcccatcatgtggtgtttcataagggggcagcatcgcaccctaggaacttcact

SEQ ID NO: 480554 - DNA, 469 bp, Homo sapiens
caatcaatagtttattagccagaagtgtctatcaagtgtttgtatagtgatatatcaaagcagaaaaccaactttttaaaaaacatgaacttttgaaaatgtaacagatgttactcacacatgctttgatacaacagaagaactttttaaagtgacctataaatatagaggctgtcttaaataatcataatataattttttaccatttatgtctcatattttcccacttatggctaatataagaaatacatttttgtgattctttttgagaattagttttttaaaaaatatcataagagaaattataaatggaaaattatgcaaacataaatttgatgagaagtactcaccttgtcaaaataggcctgtgatttaaaaaaaaatgaatttgaagagatttttaattgcatcatckttctgtataatccatttccacatcatttgatggcactgatgtcagtttttcatc

SEQ ID NO: 480555 - DNA, 599 bp, Homo sapiens
ctgggaacagactgacaacgtaactcaaggagctcaggaagccacaaacccatttaggcaacaaaaagaactccagaataactgttttaccatcagatccccagatacactggatcaaaagcagaagggggaagaacagataatggagggctagccaggaaattaaatagtaggatagctgagcccacctctttttttttttttttttttttttgagacaagagtctcgccctgttgccaaggctgaagtgtgatggtgtgatttccrctcactgcaacctccgcctcccgggttcaagcaattctcctgcctcagcctcccgagtagctgggactacaggtgcccgccaccacgcctggctaattttttgtatttttagtagagatggggtttcactatgttgaccaggctggtcttgaactcctgacctggtgatccacccgcctcggcctcccaaagtgctgggattacaggtgtgagccaccgcgcccggcccaggctcaaaactgaatagaaactgcattcactggcaagaatcctcactggaaaagaatatgctctagctaccactgtttagtctagactctagactcccatc

SEQ ID NO: 480556 - DNA, 599 bp, Homo sapiens
ctgggaacagactgacaacgtaactcaaggagctcaggaagccacaaacccatttaggcaacaaaaagaactccagaataactgttttaccatcagatccccagatacactggatcaaaagcagaagggggaagaacagataatggagggctagccaggaaattaaatagtaggatagctgagcccacctctttttttttttttttttttttttgagacaagagtctcgccctgttgccaaggctgaagtgtgatggtgtgatttccgctcactgcaacctccgcctcccgggttcaagcaattctcctgcctcagcctcccgagtagctgggactacaggtgcccgccaccacgcctggctaattttttgtatttttagtagagatggggtttcactatgttgaccaggctggtcttgaactcctgacctggtgatccacccgcctcggcctcccaaagtgctgggattacaggygtgagccaccgcgcccggcccaggctcaaaactgaatagaaactgcattcactggcaagaatcctcactggaaaagaatatgctctagctaccactgtttagtctagactctagactcccatc

SEQ ID NO: 480557 - DNA, 599 bp, Homo sapiens
ctgggaacagactgacaacgtaactcaaggagctcaggaagccacaaacccatttaggcaacaaaaagaactccagaataactgttttaccatcagatccccagatacactggatcaaaagcagaagggggaagaacagataatggagggctagccaggaaattaaatagtaggatagctgagcccacctctttttttttttttttttttttttgagacaagagtctcgccctgttgccaaggctgaagtgtgatggtgtgatttccgctcactgcaacctccgcctcccgggttcaagcaattctcctgcctcagcctcccgagtagctgggactacaggtgcccgccaccacgcctggctaattttttgtatttttagtagagatggggtttcactatgttgaccaggctggtcttgaactcctgacctggtgatccacccgcctcggcctcccaaagtgctgggattacaggtrtgagccaccgcgcccggcccaggctcaaaactgaatagaaactgcattcactggcaagaatcctcactggaaaagaatatgctctagctaccactgtttagtctagactctagactcccatc

SEQ ID NO: 480558 - DNA, 580 bp, Homo sapiens
cccaaagatttccaattccctccaaacaaaaacaattcatgaagcttgttttaactttactctggtggcaggggatggggatccctattagatggaatgaagatacaatataaacctttccctataggactgcacatccaaaatgcacaattattcacgggaaaagagaggcaaaaaaaaaaaaaaaaaaccttagaaaaggtggataaaatatcaaagtatctgagtgacagacacttttagttgattaaaccctagggataccagagagcgaaacaaacgagctaacgagctaatgtgcaggcaccgaggtgcttttcagcactgacgagcgactgccagtattcggagctgtcagtcatgaggacccasggggtgtcacggccttccattgcccagaagggatcacaaggttccgggaatggtcccgatttagcctctctatgctccggtacctgcttcctctgccagcctagggaggcgggggcccttccgcgccccagagccgcgacggctgcagctcccaggagtctcatggcaagcgcagagcacgcgtcaaagtcccgtggcgccgggtggg

SEQ ID NO: 480559 - DNA, 580 bp, Homo sapiens
cccaaagatttccaattccctccaaacaaaaacaattcatgaagcttgttttaactttactctggtggcaggggatggggatccctattagatggaatgaagatacaatataaacctttccctataggactgcacatccaaaatgcacaattattcacgggaaaagagaggcaaaaaaaaaaaaaaaaaaccttagaaaaggtggataaaatatcaaagtatctgagtgacagacacttttagttgattaaaccctagggataccagagagcgaaacaaacgagctaacgagctaatgtgcaggcaccgaggtgcttttcagcactgacgagcgactgccagtattcggagctgtcagtcatgaggacccagggggtgtcacggccttccattgcccagaagggatcacaaggttccgggaatggtcccgattyagcctctctatgctccggtacctgcttcctctgccagcctagggaggcgggggcccttccgcgccccagagccgcgacggctgcagctcccaggagtctcatggcaagcgcagagcacgcgtcaaagtcccgtggcgccgggtggg

SEQ ID NO: 480560 - DNA, 580 bp, Homo sapiens
cccaaagatttccaattccctccaaacaaaaacaattcatgaagcttgttttaactttactctggtggcaggggatggggatccctattagatggaatgaagatacaatataaacctttccctataggactgcacatccaaaatgcacaattattcacgggaaaagagaggcaaaaaaaaaaaaaaaaaaccttagaaaaggtggataaaatatcaaagtatctgagtgacagacacttttagttgattaaaccctagggataccagagagcgaaacaaacgagctaacgagctaatgtgcaggcaccgaggtgcttttcagcactgacgagcgactgccagtattcggagctgtcagtcatgaggacccagggggtgtcacggccttccattgcccagaagggatcacaaggttccgggaatggtcccgatttagcctctctatgctccggtacctgcttcctctgccagcctagggaggcgggggcccttccgcgccccagagccgcgacggctgcrgctcccaggagtctcatggcaagcgcagagcacgcgtcaaagtcccgtggcgccgggtggg

SEQ ID NO: 480561 - DNA, 521 bp, Homo sapiens
cttaagtgttgcccatcttcaaccagcaaactaagcaaccaaccaaccacttcttacatggaaaaacaggcattcttattcctggttagtagcatgtaaattggtgcaactttttggaaagsaaattggcaacacctaatgaaatttaaatgtccatgccctttgatccagcaactccacttctacaatgcattttaaaagtgcatttgcacacactgagacatgactgagaatgttcactgtggcactgtaacaaacagcgcaaatatccatcaacatggatttggattgccatgtagctattaaatagaatgtggttgaactggatattatctgtgtattattcaatgttcttcagagaaacagaaccagtagagagcctctctctctctctttctctctccctcgcacacacacacacacgcactcacgcatgcacacacacatctatctaaattataaatcctccactggggaggtcactggaggaccatcagcagaggaagggtcatctctcccag

SEQ ID NO: 480562 - DNA, 651 bp, Homo sapiens
agctgtttcactgaacctcatacaaccaaatcatagttcacatttcacagattcctcaccagggttttgacatcttgggggaaaagaactgaagaagggtgggcaagacatctgactatagggyggtttctaataaagcaataagtacaaacaattccaagaaaactaggatgtcactggtccctgtggtcaccaaacaagaaggatgtctgtcctatgtaaggacactgaagaggggaaaaagtgcgtaatcctaatttaattataatattttttcctataatcagagaggagaaagtcacccaagcttgaagccaaaattataaatttcattgtccacacaaattgtacaagatttcccttgagcagactgcagggaggtgggctcttgttatccttccttcctttcaactcttccatttctgtctgtaatttccccacctttgtttccatataacttcaccatccttgctcctatatggccacaaagaaaattctgagaaaagagttgaaataccccagttaaatagattccttccttgtctattaagaagacatcactcttatttactttctgtaccttggctctaagctataagttcatctgtcttttctatgctataggcagtacagagcatgggccagcctgaa

SEQ ID NO: 480563 - DNA, 589 bp, Homo sapiens
acttggtatctttagaagcatctgaaacaccaccagctccttaagaaagcctggcctttatgaaactttcctctttttttttttttcactttattgagcattgttccaatttatttttaagccccttgcaagctcttactgtttcttgcaratttgtatgctttggctggatcactagtaccccttgttcagtggattttttgctttttatgccatttcctgaccattttacctggtgtgcccatggtgatgaaattatgatttgatttttgtttggtataaacatgttggtggtgttgagttaacaagagcattagtgtccagctctctcacaagatgtttacaacacttttaataaaattttttttttccttgaaaaaaaaaccatttaaaaaatcacagatggttcagaatgttgcaaatacaaaattgacaacccggaagaaaaggcattgattgtggacaacctaaagccagaatccttctatgagtttttcatcactccattcactagtgctggtgaaggccccagtgctacgttcacgaaggtcacgactccggatgaacactgtgagttttcccaaatcaa

SEQ ID NO: 480564 - DNA, 589 bp, Homo sapiens
acttggtatctttagaagcatctgaaacaccaccagctccttaagaaagcctggcctttatgaaactttcctctttttttttttttcactttattgagcattgttccaatttatttttaagccccttgcaagctcttactgtttcttgcaaatttgtatgctttggctggatcactagtaccccttgttcagtggattttttgctttttrtgccatttcctgaccattttacctggtgtgcccatggtgatgaaattatgatttgatttttgtttggtataaacatgttggtggtgttgagttaacaagagcattagtgtccagctctctcacaagatgtttacaacacttttaataaaattttttttttccttgaaaaaaaaaccatttaaaaaatcacagatggttcagaatgttgcaaatacaaaattgacaacccggaagaaaaggcattgattgtggacaacctaaagccagaatccttctatgagtttttcatcactccattcactagtgctggtgaaggccccagtgctacgttcacgaaggtcacgactccggatgaacactgtgagttttcccaaatcaa

SEQ ID NO: 480565 - DNA, 589 bp, Homo sapiens
acttggtatctttagaagcatctgaaacaccaccagctccttaagaaagcctggcctttatgaaactttcctctttttttttttttcactttattgagcattgttccaatttatttttaagccccttgcaagctcttactgtttcttgcaaatttgtatgctttggctggatcactagtaccccttgttcagtggattttttgctttttatgccatytcctgaccattttacctggtgtgcccatggtgatgaaattatgatttgatttttgtttggtataaacatgttggtggtgttgagttaacaagagcattagtgtccagctctctcacaagatgtttacaacacttttaataaaattttttttttccttgaaaaaaaaaccatttaaaaaatcacagatggttcagaatgttgcaaatacaaaattgacaacccggaagaaaaggcattgattgtggacaacctaaagccagaatccttctatgagtttttcatcactccattcactagtgctggtgaaggccccagtgctacgttcacgaaggtcacgactccggatgaacactgtgagttttcccaaatcaa

SEQ ID NO: 480566 - DNA, 601 bp, Homo sapiens
tgacccaaagacatcagcctcttttcctgcagtgggaccagacagtagtattytgaaaagtccccgtaattccaattttcaccagaattggagatctatttagggcatacacaggacttgaggaacatctgaggtggagctatgtcatctaacccctgcgtggacgaaggcattacctcggattttttctttttcttaaaacctacgcagattaagaagtgtcctttttattactctgtgtttcactggggaaatcatactttgtaccttttctctcaatttcttcttttaccttgagtaacccacatgttggcctcctgggtgtcccaggtgcctcagacttgaggatcttcctgttctctcatatgttcaattaactttcgttaagcctcgtgttcagccaacacatctgaggattcctgagggactcatatttccactgacacctcttcctgcttctcctaaatgttttgtctctgctctctgtgctatctcctgcaagcatcatctgtcttcctcattatttttctccgttaccaacgccattcctattacttcattccctcaaagcaccactaacaaaagactgtgtgtgcaacag

SEQ ID NO: 480567 - DNA, 601 bp, Homo sapiens
tgacccaaagacatcagcctcttttcctgcagtgggaccagacagtagtattttgaaaagtccccgtaattccaattttcaccagaattggagatctatttagggcatacacaggacttgaggaacatctgaggtggagctatgtcatctaacccctgcgtggacgaaggcattacctcggattttttctttttcttaaaacctacgcagattaagaagtgtcctttttattactctgtgtttcactggggaaatcatactttgtaccttttctctcaatttcttcttttaccttgagtaacccacatgttggcctcctgggtgtcccaggtgcctcagacttgaggatcttcctgttctctcatatgttcaattaactttygttaagcctcgtgttcagccaacacatctgaggattcctgagggactcatatttccactgacacctcttcctgcttctcctaaatgttttgtctctgctctctgtgctatctcctgcaagcatcatctgtcttcctcattatttttctccgttaccaacgccattcctattacttcattccctcaaagcaccactaacaaaagactgtgtgtgcaacag

SEQ ID NO: 480568 - DNA, 565 bp, Homo sapiens
aacctcatttgacatacttttttttttaaatrtaagtgtgttttaatgttaatgcgtaaatgaaaattaactgttaagaaatttaatatccttttgatccctccccattcttgccaagataaactccaatcatgtaagtttcctatgcttgattgattgcaaaatggctacaattattcatcccttcctatatagagagactttgcaataagactttgtagcacctgccatcaagaggtagtctatgcccttgtcctttgaatctgaagtgctcttgtgacttgccatggtcaataaaatgtggcagaagttatgatatgccagttccaaccctaggtctgaagtggcctgtatgttgccactcttcctggcagcactgtgtgaactagctcaggctagcctgacacacagcgagaaacacattgccttctcacccagccaatggccagcaagtgagtgaggccacccaagaccagccagcccccaatctgccactcgacccctgacacattagtgagcccagtggtgatcacacaggccccagccagttcaccagagctttgca

SEQ ID NO: 480569 - DNA, 630 bp, Homo sapiens
agtctatgtctaacaattccagtgtatcattttcactgagtctatttctatcgtctgttgtatctactaggttttactcaaagtgtcttttatccttccatgcctgattatctttgcctgtgcactgaataatgtgtttaaaaaaaaaataaactgacacattggctgacaacgtcctcttccaaagagaactttcttttgtctctgctacagcttggaaaaactacaatccaggaccatcttaatctaaattctagatttaagattacctgatccaggccaggtgcctgtaatcccagcactttgggaggccaaggtggatggatcatgaggtcaggagatcgagaccatcctggctaacacggtgaaacccagtctctagtaaaaatacaaaaaaaaattagtcaggcatagtggtgggcacctgtaatcccagctactcgggagactgaggcaggagaatggcgtgaacccaggaggcggagcttgcagtgagctgagattgtgccaccgcactacagcctgggcgacggtgcragactccatctcaaaaaaaaaaaaaaaaaagattacttgatccagcagatgatgatgaaagttgtcttgcaagtttctgggagagccaaatta

SEQ ID NO: 480570 - DNA, 367 bp, Homo sapiens
gaacctgagctaacattcccaaatgaaatgaggtggggcaatttgagtcatatgataacaatgttgtcatcctggagaacagtctcggtatgaatcagcacagttctgtgaaaattaaacatgtgaacaccaagcaaatgccacagaacctccttcagttacaggcatgcatacctgtatccataggagggccccccactagagcgtgaagtggcccaatgttcctggagaaagagaggggctgctgtcaccgactagacgaggtttgtaatagtatcgtcctgttttcactctccacagtagaaaatttctactaggctaacaaggcagagggtratgagaaacatgccaagtttaaaaaaaagaa

SEQ ID NO: 480571 - DNA, 224 bp, Homo sapiens
gtgaaaatgaatttgaacttacatttacgctgtttatccagttctcctgcatgcctatctttgtttgccatgtggtagraggtagatctcaatctcatttactttttgatcttcatcttttgggggttgttttgaatattttcacccagaatatattagaattatagcctccttgctacagaatgcacaccatcctccttcctttagcgtgtagctcctgagtt

SEQ ID NO: 480572 - DNA, 522 bp, Homo sapiens
agctgatgaaaaataaatgtttgttaaatgaactgagtatgggcggtatcagggagatgcttaaaatgacacctcctcagaattgaaaaaaaaaaaaatattacctcttcccctgcctcctacatctgcaatttcactgtttttgttttttggggttttttttttttttggtattttttttctacatagctcacaatctccagatgctcatttaatagggacaattttaatttctctcttgtgactgagaaacgttcagttttgtctgtgttcgtrggattctcacacttgtctctactatgagggtcccctcctgctgatactattttcactgcctattcacataattccaaatatctttcactttcatttcaaagatgttaaactgaaattgaccagtgtataatttttccttcagctccaaagaaaccttttggtcatacaagcagacattctcatataaagcttctgtttcattacaactcttatagacaatcatcaagatgtctttagataaactga

SEQ ID NO: 480573 - DNA, 522 bp, Homo sapiens
agctgatgaaaaataaatgtttgttaaatgaactgagtatgggcggtatcagggagatgcttaaaatgacacctcctcagaattgaaaaaaaaaaaaatattacctcttcccctgcctcctacatctgcaatttcactgtttttgttttttggggttttttttttttttggtattttttttctacatagctcacaatctccagatgctcatttaatagggacaattttaatttctctcttgtgactgagaaacgttcagttttgtctgtgttcgtaggattctcacacttgtctctactatgagggtcccctcctgctgatactattttcactgcctattcacataattccaaatatctttcactttcatttcaaagatgttaaactgaaattgaccagygtataatttttccttcagctccaaagaaaccttttggtcatacaagcagacattctcatataaagcttctgtttcattacaactcttatagacaatcatcaagatgtctttagataaactga

SEQ ID NO: 480574 - DNA, 620 bp, Homo sapiens
ttagtacagaaactccttttgaaaaaagcagttttaccttgaatctaatgaagacttttgttttatacatcaggctcctgaattttcctmatgtgagtctatttctaaaagatgcatctgcttttaggaagctattaaaataagttttctaagccattaaggtgagagaaagatcccagattaaaagtgtaccaaagtagtaaatatcatcattttaagctctcatgagaagtaaaaggttggcttttttctccagacctcatctagggctctctggaccaatgtattagcaccaggttgataagcctttctttccaagtgaattcccacaccatctagtggaggtagacagacacacacataattaacttatggacagtatcagcatgccaaaagagagatctaaatacgagtacattaaaatagtgtatactctctgctctatagtaatttgtatttgggaaaatatagctgtggttagggaagtaattactgattaaatacaagccatagagaaagcagcttgaagcaagcttggaagttgcaaacttatggacatggaagaagttctggctctctggtttaatgaattaaaataagtaagatactagcaaatggga

SEQ ID NO: 480575 - DNA, 628 bp, Homo sapiens
aattcaattgctgtttgggctaaattcaatacaataattattgattatccattatatgaaaaacacaggacatgctaagctgattcagacatagaagcaagcccagagtaggctctccctaagcaatgtttttgaattatgctaaacactcttgttatgatacatacagtccaggggaggagatctacctaggtttagtaggatatggaccattttaacaattaggttcaaattgaatcttgaaaaatcatttgtggctgaatggatgaatcaaggaaggaggatttagctggggacaagagtgtgtaaatgccttcatgtaagaagaaatagaaaagtacatgttcagaggataagaatgagttggtatatcaagagcttaaatcataaggtttgaagttttggcctsagtctcatcaaagtaggtgttgtctaccctgctaaaggtttaaaatcaaaatattatcctctttattaatggtttttaaaaggttttgtgataacacctttaaaaaggcctatcgcccagtcaataacagaagatcaacactttctcaagttccttgggtgaaggtggggtcaggagtctcagaagtcagccagctctccttcctttccccaggcatgc

SEQ ID NO: 480576 - DNA, 442 bp, Homo sapiens
cagcgaaccaccgtggcacatgtatacctaagtaacaaacctgcaaattctgcacatgtaccccagaacttaaagtataatttaaaaaatgctttcactggtattaaaatgagaagttgagggtggatgaattaggtgtttctcactttctgtcaagagaacctaaaggtttatttatattttwtttttaatttaatctaatattattcaaagcatttcataaacataatttagagagtcaaatgattcttaaaatgagaaatgagaacactttgctccacttggccccagtctaattttgttttgttttgttttgtttgttttgttttgttttgttttgagacggagtcttgctctgtctcccaggctggagtgcagtggcgccatctcggcccaccgcaagctccgcctcccgggttcacgccattctcctgcctcagcc

SEQ ID NO: 480577 - DNA, 541 bp, Homo sapiens
ttagtaacaaagataagcaaaaccattcataaacacatagacacccacgcatgcatacacatgcatataacaaaggagtaattccagataactaaaagcaaagaaattatttgataaatgtttctaagagaatttgttatccatattcgaaaaaaaagatgttttatctctatgccataccataaacataaagcagttataaatgaaacaaagaaataaaaatgaaaagcaaatgctaaattggttaattatcctggcaattacacttctaaatatcctaagggaaaaaatgctcatgttggtcagaagatacacacaaaattgttcatcacagattatttgtaatagcaatagaaataaaaggaaaacaaaacytgaagacaatcaatagaagagcgaatatataattatccattcatacaagtaacacttcacaacaggtagaaatgcatgaaaaaaatgcaacacatagcaatgtaaggcgtacagttagattcaatgttattaataaaaatctattagataaattgagtacaacacc

SEQ ID NO: 480578 - DNA, 582 bp, Homo sapiens
tagaagcagctggatagaaaaagttaactattaattaatcataattaagaataataactcatctgactagtactttaccacttsttttaatatgtagcatattattcaattaaaaagcataattttattgtatatatatatatataaaacacctttccaatttggaggaattaccaataaaatacaaataaacaaccttaaatttcaacatccagagataactttcttcaagattctttaaaaaatagatatctgggtgcatattttgtttgttttctccctgtatatgtacgtgtgtgtatgtgtgatgctgttcatgtttctttaataatatagcaaataatatcagtaacttttcttcatgttcacaatatttcatggtatcccattttgtggttgtgccataaatcatttctttggcgtttatattgactcattcactttgatccctgaggtttttgttttcttgtagcattgcacccatttttttcccctagggggcagtagctgaaccattagttgttctacatctgattactcctcagctcatttgcatgagcctttttctcattataatattat

SEQ ID NO: 480579 - DNA, 517 bp, Homo sapiens
tgtgctattaagtcagctacaatgtgggtgattagggataaactccatgggaaagctctgggaaatgatgccaatcacatagaattatttcatctgaggactaaagtagctgtagcatctgtacactgaaactctagggtcctcggataagcattactgtcagggggtactattttcctggaacttctgttctgttatccttggacagcatggtcttctgtatagcccttcaggtacacagaagtatacactagaggttaggagtctctggagcatctaaaactccctctgagggacaagagcaccaacaggatttgctccatcacacagatcatctctttgactatatcttcttcatctggttggtcaaaagggtgtctctgcattcattcattcaacagatagttatttatttatattggaagtatggcagggatacagagagaartacacaataaataaatatataatataatgcaaaatgatgacatgcgttactaaaagaaaataaagtagt

SEQ ID NO: 480580 - DNA, 694 bp, Homo sapiens
agatgaatggaaagttaaatatctctttamaacaaaattttaaaatatgtatttctaggaaatttcaaaatgatttaggcttttagatgcagtccttgcctgtggagtattgaagtgttatactagtcaggataaaataggctttgctccaaaaaacaaattagacttaaaatatcaatgaccttacaacaagaaaaccaccaacaatggttaatttctgtctcatcctgtatgtcccacacagttggtagaaaactcttctccatataaccaccctaaaccccatgctaatgggaagccctaataacttgtggtttcatcatctcaacactagcctccagtgttaccagagcaaaggatcacaacatacattggctcctctaggctctgtcctggaagtgatccacatcacgctccactcattggccagaacttatcagtggccccacttaagtgtgagagacttggaaatataggtatagtacctagatttagggggtgtaacaaatgtctttactcaatgtacatacttggttgaattaacttaatcttcttttaggttaccccatagctcaatacactatacattctgatagcctgttggaatttcaggtaaaatattcaattctcatggtaagatataaacattctctctgcctccttgcataaccagaacatgtgaatctgctttcca

SEQ ID NO: 480581 - DNA, 623 bp, Homo sapiens
ctgcctcttgaagaataccaagacttactctttcagtgtaattgagaggggcactgacatagaatatagagtggaaatcagaactcttagtcctgaattctaaggagtccatctaaacagtcagtaaatctagggaggttgcatgaaccactgattttatattttgtatttgaagccttgatgttactagaaactaataatgattataatactaggaagtaatcaattaattatcattgtaatgactagtgtaaaattaagttataaaacagctttaataaatcaagagacatggacacaatctaaaagggtactatggaattgcattttcattaagttgttagaggacacagtttaccaataagagattatcacaggactattatccaaggtcattcctagacagacaaggttgtggaagggtcctgcgacatacagtcttcatccaactacaatatatttccccatcaggaacttgtgtttaaagagtatttactgattaaatactagaagcctccaacaagayccaaaacttaggctgccacaagccaaagagcacctggggctaccagaagtgggaagaaacaagcaaagacccttccctcggggcttgggaggaagca

SEQ ID NO: 480582 - DNA, 462 bp, Homo sapiens
gggagcaagtctttcccattctgttcctgtgacagtgaataagtttcacaagatctaacggttttaaaaatgggagtttccctacacaagctatctctttgcctgctgccatccatgtgatacttgacttgctcctccttgccttctgccatgattgtgaggattccccagtcatgtggaactataagtccattaaacctctttcttttgtaaattgcccagtctcacatacgtctttatcagcagcatgaaaacaaattaatgcagcaatgcattaggtactgtgaggaaygtcacatgcacagagacatgactgttgaccttatgaggtattttaagacaccagacatgcctaggaaaagacacacggtcacatattgcagcttatgccaagagttaaatcagggatacaggtgtggatggttgtctgtttaatccctacatgcccatctatcacctcat

SEQ ID NO: 480583 - DNA, 634 bp, Homo sapiens
aggttgttttaaatgtgattaaaataatattccattaaatgtagcagagtgacatgatctttataaagtgaatgttcaagttgtcatgcccatgtttctaagaaaatatggccaagaaaaataatttctaaaagtggccatagaaaaatacatattytacctttatggtaatttttttgtggtgctcctttttgataatgagtgatgctgttgagattaaaagtcccttccttcgtatggtctttggaactttgcctctactctattaactctctcatctaatattaggagagtgatagcactgactcccaatcttacctgttaaataagtccacaacagcaggtgaaattcctcaggccaattttgaacttagtagcttcgattacagggtggtttctgcttccatttgttatcctttcgaaattcagcttggtgctctacgtactgattcagccaaggttactgtgctattcatcttgccataaattacatggataaactttttaaatctctttagcctaactgcgtttgatctcctctggattataatagaaagaataatacttatccaagatttggcagtattatcttgttttattttggaggggtggaggaagaggtgtagagcaggac

SEQ ID NO: 480584 - DNA, 634 bp, Homo sapiens
aggttgttttaaatgtgattaaaataatattccattaaatgtagcagagtgacatgatctttataaagtgaatgttcaagttgtcatgcccatgtttctaagaaaatatggccaagaaaaataatttctaaaagtggccatagaaaaatacatattttacctttatggtaatttttttgtggtgctcctttttgataatgagtgatgctgttgagattaaaagtcccttccttcgtatggtctttggaactttgcctctactctattaactctctcatctaatattaggagagtgatagcactgactcccaatcttacctgttaaataagtccacaacagcaggtgaaattcctcrggccaattttgaacttagtagcttcgattacagggtggtttctgcttccatttgttatcctttcgaaattcagcttggtgctctacgtactgattcagccaaggttactgtgctattcatcttgccataaattacatggataaactttttaaatctctttagcctaactgcgtttgatctcctctggattataatagaaagaataatacttatccaagatttggcagtattatcttgttttattttggaggggtggaggaagaggtgtagagcaggac

SEQ ID NO: 480585 - DNA, 634 bp, Homo sapiens
aggttgttttaaatgtgattaaaataatattccattaaatgtagcagagtgacatgatctttataaagtgaatgttcaagttgtcatgcccatgtttctaagaaaatatggccaagaaaaataatttctaaaagtggccatagaaaaatacatattttacctttatggtaatttttttgtggtgctcctttttgataatgagtgatgctgttgagattaaaagtcccttccttcgtatggtctttggaactttgcctctactctattaactctctcatctaatattaggagagtgatagcactgactcccaatcttacctgttaaataagtccacaacagcaggtgaaattcctcaggccaattttgaacttagtagcttcgattacagggtggtttctgcttccatttgttatcctttcgaaattcagcttggtgctctacgtactgattcagccaaggttactgtgctattcrtcttgccataaattacatggataaactttttaaatctctttagcctaactgcgtttgatctcctctggattataatagaaagaataatacttatccaagatttggcagtattatcttgttttattttggaggggtggaggaagaggtgtagagcaggac

SEQ ID NO: 480586 - DNA, 535 bp, Homo sapiens
caaatttcctctgaatctcaaggtttctatctttaacaaatagtaacagtatgctcaaatcaatcaatcaatatctatctctcacccacgtttttaagttacccttcacctctgtagaactmatgtgattatttttgttgattgcacaaataaaggtaaaatattctcactattcctgcaaatattgtcagtatacataataccagaattaagctctttccccaggattacactccttagaggaaggcaggagaaaagggtgagaagagaccagagtgtgtttcttttcctgagaatcacatatgccttaccccctcaatcaagcacaaagcatagtttgagggccaccgcccatctgagttccagcctgaacacttactatggatatcagcaccaaacctaggttctgggcacagggcatctccacacagtctgcacatgtaaactgatatccgtaatcagtggatgtaatcaggtctctactcttagctctttattacgggaataacactgtccagtgattattgattacctt

SEQ ID NO: 480587 - DNA, 646 bp, Homo sapiens
catccaaagagtgtcccagacacgtcccatgactttaacgtgataatacattttgaggtatgctactgcggtgaggtataaactagtcaatattttctagaaaattaacaataatattccactgggttgcacctcagaagggacttgattttactttctcaaatttcacccaaattttaaaaaagaacagtatattcattgcttcaatatctgctgattgcctactatgtgctgcgcagtgttctaagcactcatgatagagccgtgagcaaacacagttaaggtctgtcacttatgatatctaaatcatagcagaaggaaacatactataaacaagtaaaccaagatstcttcagtcatgacaggtgcgatgaaggataacatgaagtagaaaatgcaagagtgatgggggatggccacttcagagaggatgtcaagaatgtttctcttagtgggtggagtctgaactaagacctgaatgataaaaggaagcaaccatgtgaaaatacacagaatgctattgtagacagagcaaacagcaggagggaaggtagtgaggtgagaaaaggtaaaaaaagtcaaggtatgcggggaagaaagtgtggcttgaacacaatgagtacagggaactacgagaggagataaa

SEQ ID NO: 480588 - DNA, 547 bp, Homo sapiens
gtgggtgagacagatggtaaactaatgaatgtataatgtgaagctggttgtccatgaggacagtggaaggctgagcagcaggggaggcggcagaggaggtccttcgaagctctctgggagcacaagcctctgagcagggatctgggtgaggggagcaaggggctctgtgaagacccagggaccagattccaggcagaagccctcagagcagaastgggattgaagggctccaagagcagaataaagaccagtgtagccagactggggagaggggaggccccatctcacatgggttgcttctgaatgtgatgtggggcagtggcctgctatgatggtcttttaaaaagcactagaactgttgaatgaaatcctgatgccaggagggccagggtggaattggggagcccactgaggctgtggcaggagtctgggaagagtctgagaggggtgatgaggcagggaggtggcagatttgggagaaacgtaggaggcagagatacaaggaccagcagaagggaacagaggagcaaggagagacctgcttaca

SEQ ID NO: 480589 - DNA, 282 bp, Homo sapiens
ctagtaagttcctttccgaagtataaatagacttatatyttatagtctggaaacaagagagaactcccttttaggtattcatttatttaggtaatcactcagcaagaacctcatttagtgcctattaaagaactgttttgttatggaagcttctgaggcccacgactgtatgcttcagtttctttgtacatatggtgctgtgtaatgaggagaaaaaaaaaacgttttagcaacaactattttacaagcatcataaattttaggtcttatggtaacatttga

SEQ ID NO: 480590 - DNA, 406 bp, Homo sapiens
gcctctggagtccagtcccacctcctacctcattatcttgatagtatttcagactactcaggtagagtgaattccatctgcaaatcacgcatgagccagcttgtagttatgaagttttaggggaaatatgtccccctttttcacttggtaccamgttttgagataggcaattttctttgtagtcccctgaggaaggatttggggggcagatggatttctaggggcaaggtggggtgcggtgactcatgtgtataatcccagcactttgggaggccaagacaggcgggtcacttgaggtcaggagtttgagaccagcctggccaacatggtgaaagttagtctctactaaagtaaatacaaaaattagctgggtgtagtggcggcgcctgtaatcccagctactgag

SEQ ID NO: 480591 - DNA, 577 bp, Homo sapiens
ctttttatttttcaaatattttttcctaccacacaccagaagatggatacagttagtccttttactagatggtaaatatggagctttgagagaacaggtactctgccccagatgacccagcaagttggaggaaaacccaagaatgaaagcagtgttcctgtctttgggcatcctgcmactatcctaggcatgggtagtttccagatggagctaagatcaaactcctttatcactagtgatcaaatctggttgtttctaaggctgcactgttgttctgatgaccaagtggatcatccttgaatgacagggaaaaaatgtattaaatgagtccctcaccagcctgtcttcttgccagcaccctgacttcttaaggtattaacatgtcgtgtcactgatgatgacctaggattgcaggaagatgacagagtcactgttcctgtgtgcttggctgctcggctgttttgtttgcacttcagcattcctacctggtgtgtggtacatttttgtcattccacagcagtctgctgtgctcctggctccagagtaagctagtctacatctatttacatcagctttc

SEQ ID NO: 480592 - DNA, 428 bp, Homo sapiens
gaccatagtaatcggctaaactggagggtctgcctacaggataatgctggagctccaatggtagctttggatgttttaattggcaagcaatataacactctattaatcacacagacccaaatcaggccatataagttaagacctatttgcagcaaaacccctttcatcacccatctgggaaaaccttaaactgttgggagattttagatctggccgcgtttaattgagatgattctcttgccagacaggytctagtattttgatgcattatgggagtttcatctttccaggtggaggtctagctctcaagcccagtgttgtactcatgttcacctgagtggtatacacttgggaaatatactgcagtcccacatgtcagacaatattgtccaagcccagaagctcacttctagagatgaaatcacctc

SEQ ID NO: 480593 - DNA, 612 bp, Homo sapiens
gtgtttctgttcatttattttacrtttatgtatgtgaactttaaagatagggaagatgagcattttgtttagaggaaggagaaagggaagcttcttgaaattaaaggaaagggtaacggataaatttctcatctggggtgaaacatcacagacttcaaaattcagggcatcgacattcaggcaaggagcagctacatctatctctaaccctccctgatttatgaagtaagatatcctgatattctgcttggcttggtagtaggtaaaacagcctacagataacaggaaatctcaactggcatatatagatgagacaaggataggttaatgaatgggatcaatcaaacacatgtagggaagtcaaggcattttaggcagaggaaatgacaagaataaaacgaatagcttttcatttccacttgctgtcttctttccattaatgataggtataagacaggcaacatggcataatggctaagagcatggaaacctgatccagcatgagattggatcctgactctaccacttattatatgtataactctgtgataggtcatatgtaaacaattcccaaggacaaactcatgtgatggctccaaaacatacagcagc

SEQ ID NO: 480594 - DNA, 586 bp, Homo sapiens
tgcaatagtatttgtagatttcttcttaaagatatygtgaaaaagggatcacaagtttgccaaagagagacattgcaaaaggatatttaccatgtttatttaaacatagtgtaggatagggtgacctggtcttctgctttttaaggacaaattcttggtacagttcaacagtatcaagttgatccagcttgaaaaggctatctcatgttgattaaaatcaaaggtgacatatataagttacaatgccaatttattttcttacaatagaaatataactgccatagcacatttcctttaggcaagctgcatgagaaaaccaccatcagaagattgctggctgaatacggaaccagaactggtgttagagaggctgggatatagctgagcagtagttatatcatttgaatatttaatgcctacaggctaaaacaccaaatatgtccattttctcaatagatttactttttattccatatgaggggttcagctattggttcaaagcaatctcttccttgcttaatgatggatgactgctgccaaaatgcctccttttttctttgtatacctttctgacaattttttttcc

SEQ ID NO: 480595 - DNA, 496 bp, Homo sapiens
aacgcctctctcctctccagccggcatcggccaggctcatattgggccgtccctccagccctggctgctttttcaggtcaggcttcttgggcagcccgagtaggaccacccagcatcgccgcacacagcagcctcaggcctcaccgacataggccgggtggtctgtggagatgacaggactgcctttcttttttctgggattgggttttgctgtgtcacccaggctggagtgcagtggtgcaatcatagctcactgtagccttgaactgggctcaagggatcctcctgcctcagcctcccgagtaggtgggactacagaggcacgccaccatgcccggctactattttttattatttttctagagacagggatctccatatgttgccagggctggtctcaaactcctgggctcaagtgatcctcccacctcggccccccaaagcrctggacttacaggcacgaggccatgctggccaaggactggctttcgagcaa

SEQ ID NO: 480596 - DNA, 406 bp, Homo sapiens
agtaggaccacccagcatcgccgcacacagcagcctcaggcctcaccgacataggccgggtggtctgtggagatgacaggactgcctttcttttttctgggattgggttttgctgtgtcacccaggctggagtgcagtggtgcaatcatagctcactgtagccttgaactgggctcaagggatcctcctgcctcagcctcccgagtaggtgggactacagaggcacgccaccatgcccggctactattttttattatttttctagagacagggatctccatatgttgccagggctggtctcaaactcctgggctcaagtgatcctcccacctcggccccccaaagcgctggacttacaggcacgaggccaygctggccaaggactggctttcgagcaaagctcttc

SEQ ID NO: 480597 - DNA, 491 bp, Homo sapiens
ggtggaagccccgtggactggtcccagcgtgccaccccaaacgtggtccccaccgcrtggacgggactgaatctgggcctggcgggtgctccccatggcctcctccacccctgaggcctaggtctgggtgcttcccatggcctcctccaccctcgaggcctaggtctggggtgtgggttttgtcctagcattttaaaaactgtggtaaaatacatgtaacaagacaccatctgaaccgttttaaagggtgttaaatgcattcagaatgttgtgtggccttcaccatctgtctccaaggctattaccctgtgagcccgagacggtggcctcgtcagacatccactccccattcgcctccctctgcagccttctctgaccacagaccacagtgaagtcttgatcgacattcaaggcgggtgggctgctgcgtggatccctggctccagtccattcccgaacttcacaggccctgggaaaagtgggggagccac

SEQ ID NO: 480598 - DNA, 434 bp, Homo sapiens
tcaaaaaaaatttttttttctttataaaaagacaaattaaaaaacctggtttcaggttacaacaggcagctcagcagccggcctgatggtgacattcctcaggacggcctgcccagtgcttcctccctaccccgctgctcgactctgctgtggttgggtatggcaacaacgacacatttttatgatyaagtttcacaaatgacacacatgaactgtcttagtaacacacagaaacaagcaccagaaaggaagaaaacgagccgcagtgccgggcattccgggcctttctggacgtccccatccgtggctggaggacagcccgggcggcggcgggcggcctcggggcgggagcgtgggggcagggcacggcgagcccggggcttctcaggaccaccaggccgcctggacgctggggaggaacccccactccgaca

SEQ ID NO: 480599 - DNA, 434 bp, Homo sapiens
tcaaaaaaaatttttttttctttataaaaagacaaattaaaaaacctggtttcaggttacaacaggcagctcagcagccggcctgatggtgacattcctcaggacggcctgcccagtgcttcctccctaccccgctgctcgactctgctgtggttgggtatggcaacaacgacacatttttatgatcaagtttcacaaatgacacacatgaactgtcttagtaacacacagaaacaagcaccagaaaggaagaaaacgagccgcagtgccgggcattccgggcctttctggacgtccccatcsgtggctggaggacagcccgggcggcggcgggcggcctcggggcgggagcgtgggggcagggcacggcgagcccggggcttctcaggaccaccaggccgcctggacgctggggaggaacccccactccgaca

SEQ ID NO: 480600 - DNA, 618 bp, Homo sapiens
atattaattttattattctgatttttacagcattacttacttttcatctacttgatatgtcaggggctgaaagatgagacaaaattttttactaatgctgaattgccaatcattattactatacaatatgttttttggtacacaaagttttgtaataattatatatttgttgtggaatttaccctttatcattaaactgaaaattgcagttgcttccctaatatcattcaatctttctccaattacgtagaagctatatatagatgctacatagtttaggtggaattgagtcacgatccagctccatggatgatacctgattaatctaaatcagtaattctcagaatttatggcatcaggtcccctttatactattaaaaattatcaaaaactccaaaattattttgtttatgtgagttatatctatcagtgtttgctatattagaaattaaaatttaaaatttttaaacatttatttagttaaaactaacaatcatatatatgacaactagcatttttatttaaaaatctataattatcatactaaaataaatgtagtgagaagagaagcatgttytacattttcacaaatttctttagtatcttaatagaagacag

SEQ ID NO: 480601 - DNA, 586 bp, Homo sapiens
tcatatttcctttttatttttctttaaagtatctcaagtgtcaagcaaacagtggtaggaaackgaaattctgtgactgaacaccctcaatctatacattatagtcaccaatatttggggagaataattacaaaaaaaaaatcttccaaaaaatacctcacttcaatatcatgagaacttaaattctatcatcagaagtttagttcctaatgttaagccctgtcatttcccttcagtcctcttttgagaaataaataaaatgaggcacttatatcttagtgtgaatttctcagacaattttcttctataataagagaaataacagaagaagagtgggtgccaaaaagtttcagagacagggtaaaatgtgaaaggatcaagagaatgagaaaacaagacacagactgggaggacatatttgcaaaagacatacctgataaaggactgttattcaaaatatatatagaactcttaaaacttaagaagaagaaaacaaacaacctgatttaaatatgggcaaatatatagacacctcaccaaacaaaatatacaaatgtcaagtaatcatagagaaagattcccaata

SEQ ID NO: 480602 - DNA, 458 bp, Homo sapiens
atatttcctttttatttttctttaaagtatctcaagtgtcaagcaaacagtggtaggaaactgaaattctgtgactgaacaccctcaatctatacattatagtcaccaatatttggggagaataattacaaaaaaaaaatcttccaaaaaatacctcacttcaatatcatgagaacttaaattctatcatcagaagtttagttcctaatgttaagccctgtcatttcccttcagtcctcttttgagaaataaataaaatgaggcacttatatcttagtgtgaatttctcagacaattttcttctataataagagaaataacagaagaagagtgggtgccaaaaagtttcagagacagggtaaaatgtgaaaggatcaagagaatgagaaaacaagacacagactgggaggacatatttgcaaaagwcatacctgataaaggactgttattcaaaatat

SEQ ID NO: 480603 - DNA, 681 bp, Homo sapiens
tgactcatcactttcactggattgagggaatgtctaatattttgccagaaaagcatatacctagttcttcggacaccrtcttgaattggagacaaggggggctaccagaaaaatgactgaaacataagagtacctggacaggtgactttgcatagatatatacttatttatgctaattttaggaggttattggccaaaacgtagaaatgtttaaaaacaacaacaacaaaaaaaaaaaacaagagaaaagacagcatcagatctaaaatattcatctgagttactagtctcaaggcaggtggaaaaccgttgctcatgtcctatcacagtagcaccagcccccttgcccccttggacatttccagggcctctgacattcgttaaaatgaacatgaattacagtgtaaagttttagaactaaatgaaacaagtggttttaaagcccaaccaattgaaatggggtagaagaaaagagggcactaaataaaaccacatattctaaaatttaaggctactacaatgtcatatctacttgtttatcctgtgtggggtcaacagacacacagatggaactgcttgttctctagctgccaggtccagccactgagggcagcctcactattgaatagcagcacacacactaacaccaatgcttcatgcagagcacccaccacgtatccc

SEQ ID NO: 480604 - DNA, 577 bp, Homo sapiens
gctggggctactcaatatgtttctaaacacagtggggcctattaagactgcagagccatgcctcataccaataatcagggatcaactctatcttcattccctgtgatttgccataatataaggagcactaaggcaatacgaaaaagttaatgttattgtgaagttaccacatgccaattacawtgtcacgtgtttatgtagagagtatcatcccatttacagataaagaaatgtgttacttagcttctctcagaagtaacatgcctgaagtcacagaggtaatacatggcagagcttaccgttctgctgatgctaaaacttctgctcttataacaatgcactgagttgactccctgtatttgatacttagaataaagtcggtctgcttgactagcttggggaataagaagttattatagctccacagtccatttgctttcttcactgcatgtcttccacccctttgcgtttccctagttcaaggtttggccacaaatagtcctgtttctctttaccttccacacccagatgttgccacagtatttgatccttacacctgacccttaatagtttactc

SEQ ID NO: 480605 - DNA, 621 bp, Homo sapiens
ctgctggggctactcaatatgtttctaaacacagtggggcctattaagactgcagagccatgcctcataccaataatcagggatcaactctatcttcattccctgtgatttgccataatataaggagcactaaggcaatacgaaaaagttaatgttattgtgaagttaccacatgccaattacattgtcacgtgtttatgtagagagtatcatcccatttacagataaagaaatgtgttacttagcttctctcagaagtaacatgcctgaagtcacagaggtaatacatggcagagcttaccgttctgctgatgctaaaacttctgctcttataacaatgcactgagttgactccctgtatttgatacttagaataaagtcggtctgcttgactagcttggggaataagaagttattatagctccacagtccatttgctttcttcactgcatgtcttccacccctttgcgtttccctagttcaaggtttggccacaaatagtcctgtttctctttaccttccacacccagatgttgccacagtatttgatccttacacmtgacccttaatagtttactcagctttcatgagtcagtcctcattcctttggaagagtcattg

SEQ ID NO: 480606 - DNA, 599 bp, Homo sapiens
ctgccgccactctgttgcccgagaaaaggctgtgtgccagcctcatgcctcacttttacccttggtcctcgatcttggtgaaccacttgctgccgtaaaaagaaaagtaaaaactctcaccattgtcctatttttttggtgtgcaccaataggtttttctgttagctggtaatactgaaagcctcttcaaatccttgttaaataaatgaacaaaaacttaatggggtagatgggggaacattcatatggatgaatatcagcacggtcattaagcttgtggctcttctggttgtcagtcttgccctgatggtgtcacagttacctccagaatgaaagaaaaatggtaccttgatggctcctgtcctaagttttcctgcctgtagggctcagaaatgtgactttttctaktcttaaaaagattcaactgaaaggtaaaggggaactgaattgtatagggacattgtgtagcagaaactggctactggtttactaaaccttactataattctttctaagggcatgaatcacattttccagccttccttataattaggcatagatccttagttccaaaatatggaagattaacagcaatgaaa

SEQ ID NO: 480607 - DNA, 488 bp, Homo sapiens
cttctattgactgggtaactgaaactgcacaaagtgaaactgcagataaggaggggcactgctgtatctaataactgtccatgctgtctttatgcttattgagttttgcaaaaaatgacatccaataattcatttttaaaagttttgtttttgaacactttcattttgcacttacagaaaaattgcaagaatagaatgttacaaagaacttccctatataccctttacccagctctactagttttaaacattttactacatttgcttattattcccttaatatatatgtgtgtgtgtgtgtgtgtgtgtgtgtgtgtgtgtgtatacacatcatattttattctacttgagagttggttgcatatatcatgctcattttccctatactgttgctgtgtttatttctcagaacaatgatgttcttttataatagcaatttggttgtcaaattttartaatttcacattgatacttttatctaatttatg

SEQ ID NO: 480608 - DNA, 640 bp, Homo sapiens
ctgcaaaaggcctccgggcgtaccggacaggtcgcaagggcgggggtccccacctagcggaaatgcacggaggccaacccctccccctgcccccgcgaggagcggggcggactcggcagccgccactccccaggctcacaggaagaaactgggacgctgcggacgcggaactggccagacccgcggcgcgtggcacgcgcgagccctcccgcgcatgctccacccgccggcctccagcccgcgccccgggccccgcctccctccctgcttctccccctctcccgtcagcctccctccgagtttggcccctccggccgggcgatcgacgttccgcgtgcgtgcgggcgcctgacttcacttccggctaacgcgctcggcttgccccctggccccggatggtgactggtggtggtgctgcacctcccgggactgtcactgagccgcttcccagtgtgattgtgctgagcgcaggccggaagatggcggctgcggctgcggcggcctcgggccccggctgctcctcggcggcgggggcgggggcggccggggtctcagagtggctggtgctgcgggacggctgcatgcactgcgacgcygacgggctgcacagcctgtcctaccaccctgcgctcaacgccat

SEQ ID NO: 480609 - DNA, 650 bp, Homo sapiens
tcacctctgggtgaccttgacgctctgagcagcagaaagtgcaggctagggcagagatgctgctggtctggctgagtgtttaaggtacccccatcaccccacagagcccttggcaaggactgggaagctctggcgtcgaaggccatctctgtccaatcattagccacccaccgcactgctgaatggagtttgcagggtccacacacaacacagaaagcagactccagaattagtccagagaagtcactaaccaaacaaaactgcagccacaaaacctgggtaaagggagaatctgatttccacagtagccacattatgttacctaaaatgtccagttattaacaaaaacttaccagacatgcaaataaacaaaaaattatggcccatgcacaggggagaaatcaacagaaacctcctgaaatatcccagagactggatttattagacagagacgttaaatctgttgtttaaaacatgctaamtaaactaaaggaaagcatgtctaaagaattaaaatatgaggacgatgatctcactgcatagcacctctgcgtctgcaggccagagccaccccaccctccaaaagttgcctgcaaacagctaccagattagaaatcggtctgaggaggcactaggagccccctcaagtc

SEQ ID NO: 480610 - DNA, 650 bp, Homo sapiens
tcacctctgggtgaccttgacgctctgagcagcagaaagtgcaggctagggcagagatgctgctggtctggctgagtgtttaaggtacccccatcaccccacagagcccttggcaaggactgggaagctctggcgtcgaaggccatctctgtccaatcattagccacccaccgcactgctgaatggagtttgcagggtccacacacaacacagaaagcagactccagaattagtccagagaagtcactaaccaaacaaaactgcagccacaaaacctgggtaaagggagaatctgatttccacagtagccacattatgttacctaaaatgtccagttattaacaaaaacttaccagacatgcaaataaacaaaaaattatggcccatgcacaggggagaaatcaacagaaacctcctgaaatatcccagagactggatttattagacagagacgttaaatctgttgtttaaaacatgctaaataaactaaaggaaagcatgtctaaagaaytaaaatatgaggacgatgatctcactgcatagcacctctgcgtctgcaggccagagccaccccaccctccaaaagttgcctgcaaacagctaccagattagaaatcggtctgaggaggcactaggagccccctcaagtc

SEQ ID NO: 480611 - DNA, 580 bp, Homo sapiens
acatctggtggagagtgagagggtaagggagagagggctccccccgtactcttcaggtgcgctcccgctaacgtgaggcagtggagttgtactgaattcaggcaagggcacgaaatccttaaagccaagcctatcgccttttctgacttctgctagcgagcaggcccacgacaytgtaggcacaaggcagagatcccaatattttgataaataacgtagcagatgtcctaaagcttcccagagactctgttaactcttggaataaagttttcactttaaatcctgtatatatcaggaaattcaaacataatggtatatggatttctctttcatctgaaaaacaccaatgcaatagattaaatgctaccaccaagccagatgcagccccgcctccaacctgcaaggaacccattccctcgacatagacctgtgctggcgacatggctgactggggttacctgcagttgccaaaccgtaagatctagaaacacctgcactgaactcctggggagctgtggcccgcaggcctttagatctccgtcagggtgagcttgtaagaccccccggcttcttcaatctg

SEQ ID NO: 480612 - DNA, 627 bp, Homo sapiens
acgctgtagtcatccttgattctctctttctctcacaccccatatccaattttcagacaatcctgctggtcccaccttcaaagcatatccagaattcggccacttcccaccacctcactctattgccctcggcctgcatcatggcaatggcctcctacctggtccccaccacgcagcagcagagaactattttaaaatgtgagaccctgtcactaccctgctccaagcccctccaaggcgtccccacctagcccagagggaaagccacagtccttacggaarccggcaaggccctgctcaatccgctcccctgcgcccactatctctgaccgcagctcccgcctccctgtgccccaccagccacccgggtctcctcaagggtcacaaaacacaccagggtccctgcctcaggtacagtcccaccttcgtgcccctcatctccttcaagcctgaaagcctcgctcctccccgcctccccagggcctgcctgctttaccttccaaccagccacaccatttacttgtttttgtattgcccgttaccccaactaggaaggcgaggagttgtgtctgttctgttgactgccctgtccccgcgtctgggccgcgcctgtccgagggtcaggtc

SEQ ID NO: 480613 - DNA, 627 bp, Homo sapiens
acgctgtagtcatccttgattctctctttctctcacaccccatatccaattttcagacaatcctgctggtcccaccttcaaagcatatccagaattcggccacttcccaccacctcactctattgccctcggcctgcatcatggcaatggcctcctacctggtccccaccacgcagcagcagagaactattttaaaatgtgagaccctgtcactaccctgctccaagcccctccaaggcgtccccacctagcccagagggaaagccacagtccttacggaagccggcaaggccctgctcamtccgctcccctgcgcccactatctctgaccgcagctcccgcctccctgtgccccaccagccacccgggtctcctcaagggtcacaaaacacaccagggtccctgcctcaggtacagtcccaccttcgtgcccctcatctccttcaagcctgaaagcctcgctcctccccgcctccccagggcctgcctgctttaccttccaaccagccacaccatttacttgtttttgtattgcccgttaccccaactaggaaggcgaggagttgtgtctgttctgttgactgccctgtccccgcgtctgggccgcgcctgtccgagggtcaggtc

SEQ ID NO: 480614 - DNA, 627 bp, Homo sapiens
acgctgtagtcatccttgattctctctttctctcacaccccatatccaattttcagacaatcctgctggtcccaccttcaaagcatatccagaattcggccacttcccaccacctcactctattgccctcggcctgcatcatggcaatggcctcctacctggtccccaccacgcagcagcagagaactattttaaaatgtgagaccctgtcactaccctgctccaagcccctccaaggcgtccccacctagcccagagggaaagccacagtccttacggaagccggcaaggccctgctcaatccgctcccctgcgcccactatctctgaccgcagctcccgcctccctgtgccccwccagccacccgggtctcctcaagggtcacaaaacacaccagggtccctgcctcaggtacagtcccaccttcgtgcccctcatctccttcaagcctgaaagcctcgctcctccccgcctccccagggcctgcctgctttaccttccaaccagccacaccatttacttgtttttgtattgcccgttaccccaactaggaaggcgaggagttgtgtctgttctgttgactgccctgtccccgcgtctgggccgcgcctgtccgagggtcaggtc

SEQ ID NO: 480615 - DNA, 627 bp, Homo sapiens
acgctgtagtcatccttgattctctctttctctcacaccccatatccaattttcagacaatcctgctggtcccaccttcaaagcatatccagaattcggccacttcccaccacctcactctattgccctcggcctgcatcatggcaatggcctcctacctggtccccaccacgcagcagcagagaactattttaaaatgtgagaccctgtcactaccctgctccaagcccctccaaggcgtccccacctagcccagagggaaagccacagtccttacggaagccggcaaggccctgctcaatccgctcccctgcgcccactatctctgaccgcagctcccgcctccctgtgccccaccagccacccgggtctcctcaagggtcacaaaacacaccagggtccctgcctcaggtacagtcccaccttcgtgcccctcatctccttcaagcctgaaagcctcgctcctcccsgcctccccagggcctgcctgctttaccttccaaccagccacaccatttacttgtttttgtattgcccgttaccccaactaggaaggcgaggagttgtgtctgttctgttgactgccctgtccccgcgtctgggccgcgcctgtccgagggtcaggtc

SEQ ID NO: 480616 - DNA, 565 bp, Homo sapiens
gcagagaatgaaaacttgagcaactgcctatggggatagatgcctcagtgtggtgttagccagcaagaaggctcagctagaaatattcaatgacttgccataggtttagagagctagtatgagaatggaagcttctaggggctacaaacgtattatggtttgcaacttcttgcagacttttyccccaggagtcccacaagctgttcccaggaaagaataaatggagagaaaacactcccatcatggcactgcagggagagcaccagccaccgctgagttagttctccttcctgcagtgtgggttggcctggtgattcacttctagtacatagagtatgaatcagtaaagtagcagctttgtgctacagaaacctggcagacaccaccctaaccaaatgttcattattaacatccctaataatgtcatgttgatatcatgtaccccatgataagaaaagcactttccctttgtcacctttttgcctaaaatacataagcccagtctaaccataagacaacaccagaaacaaacccaaatcaaggaatattctacaaaatacttgcc

SEQ ID NO: 480617 - DNA, 565 bp, Homo sapiens
gcagagaatgaaaacttgagcaactgcctatggggatagatgcctcagtgtggtgttagccagcaagaaggctcagctagaaatattcaatgacttgccataggtttagagagctagtatgagaatggaagcttctaggggctacaaacgtattatggtttgcaacttcttgcagacttttcccccaggagtcccacaagctgttcccaggaaagaataaatggagagaaaacactcccatcatggcactrcagggagagcaccagccaccgctgagttagttctccttcctgcagtgtgggttggcctggtgattcacttctagtacatagagtatgaatcagtaaagtagcagctttgtgctacagaaacctggcagacaccaccctaaccaaatgttcattattaacatccctaataatgtcatgttgatatcatgtaccccatgataagaaaagcactttccctttgtcacctttttgcctaaaatacataagcccagtctaaccataagacaacaccagaaacaaacccaaatcaaggaatattctacaaaatacttgcc

SEQ ID NO: 480618 - DNA, 546 bp, Homo sapiens
tccttttgaaaaaatatccatactttaaaaagatgaaggggcggctgggtgccctggctcatgcctataatcccagcactttgggaggctgaggtgatagaattgcctgagctcagtcaggagtttgagatcagcccaggaaacattgtaaaaccttgtctctacaaaaaaaaaaaaaaaaaaaaaaaaaaatacaaaaattagcctggcatagtggcatgcacctgtgaccccagctacttgggaggctgatgtgggaagacctcctgagactgggagggaggcagagcttgcagtgagctgtgattgcgccactgcactctagcctgggtgacagtgagaccctttctcaaaaataaaattaaaattaayaaaaaaaaagatgaaggagatttctttttgcctctctatccctaacacataatttttaaacaagcacattaaatattccttgtggcaattttaataaatgtctaagtatgaacacaaggtgaagctcattcatactacgttctagttgaagacaaaatgttctttccttagata

SEQ ID NO: 480619 - DNA, 558 bp, Homo sapiens
ccaacatgcctctgcctcccacaggtgctggagcgctggagcacgtgccctcggaccatcgaggtcctgatgaacacctacagtgttgtgcagcttcccgaggaggccgtcggcctggtgactcctgaaactctgcaggtcagattccaaggccctgaacatagagcttctcatcctggycccaagactcccacccgctaaaccgcagccccccatagaaagtacccaaagatgcactcatgtcccagaagagagaacttgcagagtgaacactcaaacattcattgtttctaataggttccttccggtagatgccccacccctcaccagcctaccctgtgaggaggagccggtgctacctgtctgaggctgcctctcactgagccccttgttctgcccccagaaacatcagcgtttctactcctccctcttcgccttggtgaggcagcccaggtcgctgcagcatttgagccgctgtgcgctccgctcccacctggagggcagcctgccccaagcgctgccccgcctccccctgccaccgcgcctgctccgctacct

SEQ ID NO: 480620 - DNA, 497 bp, Homo sapiens
atggggtttcactatgctggtcaggctaatctcgaactcctgacctcaggtgattcacccacctcggcctcccaaagtgctaggattacaggcatgaaccaccatgcccagcccagagggtctttaagacattttttagagacaaggtctccctctctcacccaatctggagtacagtggtgtgattataactcattctaacctccaaatcttgggctcaagcaatcctccygcctctgcctcccaagtagctggagctacaagtgtgtgccaccgtgcttggctaatacaatcagagggtcttttaatcttgagtccttgacataccagaatgtgacaggcttcttaaagtggccttttattgaagggactggtggaagagagatgtttcaatatatatccttttgagcttttggaacttggtactatgtgattttattacctatgcaataaatgaatgcaattacttttaaaaatggttcttccttcatgcctta

SEQ ID NO: 480621 - DNA, 487 bp, Homo sapiens
ctggtgcgctacgcgggctaccggcagcaggayggctctgtgcggggggacccagccaacgtggagatcaccgaggtgggcaccgagggccacccatgagggtgtccccaaggtggagaatgaggaaaccagtgggagaaggctcgggggatccaggcaggaagaggggagcctcggtgagataaaggatgaaaaacaccaaaggaggggtgcctgggtggtcacggagacccagccaatgagggaccctggagatgaaggcaggagacagtggatggaggggtccctgaggagggcatgaggctcagccccagaaccccctctggcccactccccacagctctgcattcagcacggctggaccccaggaaacggtcgcttcgacgtgctgcccctgctgctgcaggccccagatgatcccccagaactcttccttctgccccccgagctggtccttgaggtgcccctggagcaccccacgtgagca

SEQ ID NO: 480622 - DNA, 487 bp, Homo sapiens
ctggtgcgctacgcgggctaccggcagcaggatggctctgtgcggggggacccagccaacgtggagatcaccgaggtgggcaccgagggccacccatgagggtgtccccaaggtggagaatgaggaaaccagtgggagaaggctcgggggatccaggcaggaagaggggagcctcggtgagataaaggatgaaaaacaccaaaggaggggtgcctgggtggtcacggagacccagccaatgagggaccctggagatgaaggcaggagacagtggatggaggggtccctgaggagggcatgaggctcagccccagraccccctctggcccactccccacagctctgcattcagcacggctggaccccaggaaacggtcgcttcgacgtgctgcccctgctgctgcaggccccagatgatcccccagaactcttccttctgccccccgagctggtccttgaggtgcccctggagcaccccacgtgagca

SEQ ID NO: 480623 - DNA, 668 bp, Homo sapiens
cagaggccagacagcctggggcggtgcctgcaccgcagaactggtcccgggccrggcaagcaagcacagggagaggtggatccctgggggctgtggctttttaagcctgggcttcctcaggggcagtgctgcctgtctggggatcatgtctgcagttgacaagggctcggtctccccagtgccacactgttcagggcagtgctgctgtcccggggcccaggctggagctcagcagatttgccttgattggaggaggagggcatcctaggaggagagggagtgggggctacctcagggacggggaggtcaggctgcagaaacacataggccctgattgggaagaagggaacggaaaataagacttaaagaatttaaacaaaaagagccattgcagcgggatgagaccacatcatcaggttttgggaataggactttagaggcgtaggatccattacagcatcaccgaaccagaagcaggaaggctgagctaagcagagcagcagcagtggagataggaaggaagggagggaggggccgaggaaggaaggaagagatataagacttcacacgcaccacaaaagaaagattaacgggacttggtgatatgaggctcagccaatcacgggtgagccctgcatttcaagcctgggactggcccagcagttttc

SEQ ID NO: 480624 - DNA, 583 bp, Homo sapiens
catgtgcccactggagcgtggggctgggggcattgagatgcgggcttcagtattcaaagaagagacgcaaacataccatgaggtggggagaggtcccatgaccatgtgcctgcctgggggagatggccatcaccctgtctgcccgccccagatcttcacccggatgggaaagtgctacacatttaactctggcgctgatggggcagagctgctcaccactactaggggtggcatgggcaatgggctggacatcatgctggacgtgcagcaggaggaatatctacctgtgtggagggacartggtagggagcacacaaatgaggctgggggagggcacggatggagtgcaaaaggctaggggaaggagaggaggagaggaggtgtcagggtgttcccccagaacctgtgaaaggggctgggctggctcatcccagtcctggggagaggggctgcagtgagaggtcttgtctggttgggcaggagacctgaccacacaggtcaggcctcacaggtccctccccgacagaggagaccccgtttgaggtggggatccgagtgcagatccacagccaggaggagccgc

SEQ ID NO: 480625 - DNA, 514 bp, Homo sapiens
acgcgatatttatggaatctgtgattcacacagattcaaatccaagtgaaattagaccttaaaacttagttttctgatttttcacacaaaaattcacagtagttttttttatagttcacaatagtcatgaagtagagatttttgactagaacaatatcctgaataccaaggataaaattggaggagatatggacccttgccataatgaagaggtggaaaatatgtacggtgatacagaaaaactcaagtgataaaccagcaaaaaatatatgcatgatggtatcagcttcaaagagatacatgttatgtgtgtacagccagaaactcctgttcatggtagaggagaacaaatagcaaatttatgaaatagtgcaatcaattattgttctatgataaatgctactctttcattatttcaaatacatttccatcctttgattatgtcttaaaaatattggttagtatatctagtgtcargaagagatccaatctatttgtgaaattcaaacacagc

SEQ ID NO: 480626 - DNA, 402 bp, Homo sapiens
tgcaccttcttttgaaagataagccacatttaatggtcttgctaaataatatagagctttcaaacatctgaagggcagcatggtaaggctccactagattgaactgggcattcacatcccatttataaagattcctaatgcatcsttcattatcattctagtcactcattgagttccattataacttttattgattctattttcagcaggactctggggatgagacgaagaagtaattaagtagtttttcaaaggataaccactgtcacctaaaatcattaagggagaataaaaatgcctaccatcctctgccatatcaaaattaatttgtaataattaaaaagttatctccctgaaacattaaaatttggaaaatttggagaaactggaaccatattgcta

SEQ ID NO: 480627 - DNA, 402 bp, Homo sapiens
tgcaccttcttttgaaagataagccacatttaatggtcttgctaaataatatagagctttcaaacatctgaagggcagcatggtaaggctccactagattgaactgggcattcacatcccatttataaagattcctaatgcatcgttcattatcattctagtcactcattgagttccattataacttttattgattctattttcagcaggactctggggatgagacgaagaagtaattaagtagtttttcaaaggataaccactgtcacctaaaatcattaagggagaataaaaatgcctaccatcctctgccatatcaaaattaatttgtaataattaaaaagttatctycctgaaacattaaaatttggaaaatttggagaaactggaaccatattgcta

SEQ ID NO: 480628 - DNA, 521 bp, Homo sapiens
taatttgtgaagatctagcttaagaactaacaatactagatagagcaaagtcagtagccaatgtacagtagcaaaaattttttaattaaagagaaaatgttgaggtgatgagaatgagattcatacaggcaaatgtacagtgtgtgaattgtatgttaaatttattaatttcagtgaygaagaattttaccgatatgaaagggaaaagttaaaaataagaacaaatttagattgttctcaaacttttctgtaatgaaaataaaggtcagaaaactggataaattacctacagagatataaaagataagacttatgactgatgaattctgtattctgtcaacttgttatttttatgtaaagacaacagaaaaatattatcagatatgtaagggctcaaaaagcataccactctcaaacatttcctggggaaataaaaaacacaggcatgctcctcttcaagataatttatctagagattcaaagaaagagtgttctaggctctgccttcccaggaagaattg

SEQ ID NO: 480629 - DNA, 521 bp, Homo sapiens
taatttgtgaagatctagcttaagaactaacaatactagatagagcaaagtcagtagccaatgtacagtagcaaaaattttttaattaaagagaaaatgttgaggtgatgagaatgagattcatacaggcaaatgtacagtgtgtgaattgtatgttaaatttattaatttcagtgatgaagaattttaccgatatgaaagggaaaagttaaaaataagaacaaatttagattgttctcaaacttttctgtaatgaaaataaaggtcagaaaactggataaattacctacagagatataaaagataagacttatgaytgatgaattctgtattctgtcaacttgttatttttatgtaaagacaacagaaaaatattatcagatatgtaagggctcaaaaagcataccactctcaaacatttcctggggaaataaaaaacacaggcatgctcctcttcaagataatttatctagagattcaaagaaagagtgttctaggctctgccttcccaggaagaattg

SEQ ID NO: 480630 - DNA, 626 bp, Homo sapiens
tggtttggtccacatggttagtcctttytggagaactaagttacaaatgatgtaaatccctaaggccctgattccttaagtgactatcttttggcacaatatttttctacctagattcagagaagcagccagagtatacgacacaaaaaagcaacctataagctatgtcagtataggaaatgtgtctgttttgttcattgcagtgtctatagtacctagcatagtacctgctgcagatagataattattaaatatgtgtggttgaatgatttaaaggcaaggaggggaacagagatgtaccttctagcagcaagttctatttagtagaactcaataaacgtattggttgctattctgtgccaggtgctgactctagtgttgaaaagccaatgaatacagacagaaatacagatagagtacatgctgccctgtgttgttattttgtctatggttggaaagttcactgtattggaacattttgagtggaagctgggatgtgtccttttaatgccagtctccccagttaggaagagtcatccaggtatcacatcattttaaagtgattatgtggtgaaactcgctagactatcaatgcttaccagcccttgctgggtagataacttctc

SEQ ID NO: 480631 - DNA, 492 bp, Homo sapiens
gtctcatctaaatatcatccaaatcagatatgagtgacaccccatgtctaattcatcctaaggtgaaattcttctcctgctgtgaacctgtgaaatcaaacaagttatgtgcttccaaaacaagcaaagcgtagacattcccttttcaaatggaagatataggaaagaagaaaagggtgataaatctcaagtaagtccacatgctagcaagacaagttctatgagaactgaaggcttgagaataatcctttttggcttcatgccctgmcttcaggtggtggtactgcacgtgcagccctgccaggcaggagtctcaaatctagagctctgtctgccaggtggcctactcctagggcattggagagcatccacctggccttttgtaagaaagacaatggtcccacctttcaaaaccaaggaagtagacttgatgacctctgaatcaccttggtggtcattctttctttgtcttgaagaatagtgcccatttgc

SEQ ID NO: 480632 - DNA, 492 bp, Homo sapiens
gtctcatctaaatatcatccaaatcagatatgagtgacaccccatgtctaattcatcctaaggtgaaattcttctcctgctgtgaacctgtgaaatcaaacaagttatgtgcttccaaaacaagcaaagcgtagacattcccttttcaaatggaagatataggaaagaagaaaagggtgataaatctcaagtaagtccacatgctagcaagacaagttctatgagaactgaaggcttgagaataatcctttttggcttcatgccctgccttcaggtggtggtactgcacgtgcagccctgccaggcaggagtctcaaatctagagctctgtctgccaggtggcctactcctagggcattggagagcatccacctggccttttgtaagaaagacaatggtcccacctttcaaaaccaaggaagtagacttgatgacctcygaatcaccttggtggtcattctttctttgtcttgaagaatagtgcccatttgc

SEQ ID NO: 480633 - DNA, 511 bp, Homo sapiens
atatttctataatcctaccacacagaattcaagaaatctaacagcttttcttcatttcatcccattttttgcccctttcagttcaaattagcagtttttctgcaggggtggtttggtaagcctgtagttcatacccattactaatctccttatcaaactgtcarttggctgcacccttactgttctcttccaaacatgctttctcactttttgcgatacagatgggctgagaattttccaaatatttaagttctagttctttttgcttaataattttaccttcaagtcacttttctcttctctcattttactgtataggaactgagcaaccttcaacaatttgctgagaattttcaccagctaagtatccaatttaattatgctaaatatacatttttattgctttcaagttctaccttccacagaacactagaacatgaacagaattctgccaaattctttgccactttgtaacagagattgcctttcctctagcttccaataataatat

SEQ ID NO: 480634 - DNA, 557 bp, Homo sapiens
tttctttggtatgaaaatatccaaataattgcacagataatggttaagaaaagactagctaggcaggcacaagtacagcagacagagacctgggagtccaagaagaccatatggtgaatgtgagtcagcggtgttgtgctgttattaaaaaacagaaccaacactatggggaaatatattaataggagtgaggcatgcaaatggcaggaagtagcctttctgatctattcataattgttgaaacttttgctttcctcgtgtcttctgttggccttcacacatcaagagcgtgtttagaaagtgtgaaaggcctcgagaaggccattggaaatgctggaggtgatagaaggtgatatctgtggtcctgggtcctctgratataaagtcatgaaggctaaatcactgtaaacctttttgactgtatgaggcccttggaagcagtaatgtgaattctagcagctcaaagaattcagatacaatgttactttcagatacaatgttacttgtaaatcactctgattttatctttatattgtaataaactgtgggtggcttta

SEQ ID NO: 480635 - DNA, 566 bp, Homo sapiens
aagacggtgcaaaagtggtacacattcagcagacactataacacaaatacccacagaactgtttttcaatttcagtacaatattcaataaattacatgtgatattcaacactgtattttaaaaacaggctttgtgttagatgattttgcccaattgtaggctaacacgagtgttctgagcatgtttaaggtaagctagactaagatgtgatgttcagtaggttagatgtattaaatgcatcttcaacatgttattttcaacttatggtggggacataggtcagggagcatctgtgtatctatctacmtttacagtgtattttcagttgtaattgtgatacgcatagtagtcattatctgacagcttaactcctatggaagtcttctgtgtcacaccgcttcatagctggaaagtctgtattttaccagtgttatgcttaacacgtttgctttcttaagcaatgtgatgtttatcatgcagtgaatatttgtactagtaaatgctgttgttccaaccagatattctttttccaattttgtgacttcatgaagcttttgcttctaaca

SEQ ID NO: 480636 - DNA, 627 bp, Homo sapiens
gagtgttcctcctcctctcactgtgcctggggtccctggggtccctggatcccctagaccccctgaacctgcccccatctccctgggtggtataaggccgggctgccccttgtccccaccatatccccaggccagactcagctggtgtgcaggagggctgctgagaggaaggacctgcaggagccccctccaccctgagccccatcccacgatcacagggactcacttcagggtgagcttgctgttgcaggtggagcaggagaagcagctcacacaccaggccttgttgagggccgacaccactgtgagggaagcgtgggactcagcaggcctggctaggctgccgcasgcccggctgggctcacagctgcagcacccaggccccaggagagcaggtggggtgggggagggaacacagggcctcaccatcgccttcaatcacatggctgcagttgtagcagacgtccccgaagagctgtgggccgagcaggctgtcagagtagctgcaggcagtcacaccccagcccagggccatcatgcagccagcctggccctccaacacggcccctctcaggcatctcccaggccctgcctcccagggcccagctgcaaggctgggttgagggc

SEQ ID NO: 480637 - DNA, 615 bp, Homo sapiens
ggagcagagcccttctgggaggagagattctcctagaagaggttcttctccagggcaccctgccttcgctgacttccccaggaggggctgcaccaggctctccaagagcagggtctcttccccggggctgccttgccgtcgctgactgcctcctaaggaagctggatttctctagccaaattgtgtcatgttgtmggatttttggcagtgggttggctggccctgtgcccactgggagaagacaggatggaggactgtaacttctcattcttaccctgggcttgcctgggcagaagaggagggagccctcatggtgatccaggagcactgcatctctaggccagagaacatctcgcagggacatatatctccggcactgtcagtcacatgctattcatgggaagggtatctcttggacattaccctgaatgctgagctgtcctgtgggtgttagactcccttccagaagaggggcatacccttcttcatggggagccctgggctgtggagacaggctggagcagggcaatggagggaacttgaaatctagactcaggaccctttttctctggtgtgcactgacaaccccagcaccactgagagtggggctgccgc

SEQ ID NO: 480638 - DNA, 468 bp, Homo sapiens
tgcctcacttatccttaatctcaggtgccaagcaccgtgccagcagagtgggccccagtaacagcttacagaataaacaaacagtaaagaaaggagaccaaacttcggtgaggaggaagaggaacgatctcaaggtggaggaaaggcacaaaaaccaccagtaagtgccagaagcgcattccttactctatgcatgcaactgaaacatgggtcctgcacttacgtccggtgttgcargcaagattaaaccactcctaactagcagtgaaaagtctaggaaggatcccccgccccaacgccccttggattctccaactactcaactactgaaaactctcttaacagaagacacctctccttccctgcacacaataggagcttaacatatgaaagtgacttcccaatttcagcaaaaaccttcgccgattcagaagaaagctttcccaccagaatcccctctccaacgtt

SEQ ID NO: 480639 - DNA, 468 bp, Homo sapiens
tgcctcacttatccttaatctcaggtgccaagcaccgtgccagcagagtgggccccagtaacagcttacagaataaacaaacagtaaagaaaggagaccaaacttcggtgaggaggaagaggaacgatctcaaggtggaggaaaggcacaaaaaccaccagtaagtgccagaagcgcattccttactctatgcatgcaactgaaacatgggtcctgcacttacgtccggtgttgcaagcaagattaaaccactcctaactagcagtgaaaagtctaggaaggatcccccgccccawcgccccttggattctccaactactcaactactgaaaactctcttaacagaagacacctctccttccctgcacacaataggagcttaacatatgaaagtgacttcccaatttcagcaaaaaccttcgccgattcagaagaaagctttcccaccagaatcccctctccaacgtt

SEQ ID NO: 480640 - DNA, 627 bp, Homo sapiens
ttcaaatactgtgtctgggctgaaatccaattaagccatttctgtctgaatatccccaaagagcctcctgctgagctcaaagtggaaatcatcataaatgccagattagctgtgtaagcayttccaaagccaaaaccagacaagagcatgaaaacctacatgcctagccttttaactgggcacaaagacagaaaagacattcagtgaccatctggcaaaaagtcaaacccattttctcgtccaccaggtcttctcagataatcctcatccagtgcaaacatcaaagaaaagcgctggtccgttcatttacacacattttgaaatgatcaacttcagcttcacaatgaaattttgtgcagtgaggaaacaggcccagaaaacatctcaagctttctctagactcaaaattttactcaaccaaccccttacagagtacacccttgaaattagtaaatcctgagagtcgccactgcctctatgtatataatttgccccgtaaaaaatgggcaagcaaagccaaaacctaactgagagggagagggatggcagagatgcactcaacgtgttaatttactcctctgtcttgcaatccatgactcagattcacaactcacaaggcacatggta

SEQ ID NO: 480641 - DNA, 465 bp, Homo sapiens
gccctatcttagaaaccgattgggagatgctgaggcaatgcttagattttgagttttggaagtggtcttggatcaccaaaggagggttatttaaacgttgcttctctctctctctctctctctctctgacacacacacacacacacacacacacacacacacacgcacgcacactccggttacctttgcgttctcaggaaggttaagtaaatacttgcaccggcatttggctgctgggctcttttctcacatgggcggggtggcggttgctccttcccccatcagggggcttttctgtgggcttccccatcccccacaaaataggtgctttccaagtcccccgtgtcatcaaaatgcagtgacaacgaggggatttgaggacrgattatgcggataatcagggaagtctcgaggttaaattaacaaaacatcgccagtgatagatgtgggtgtcatcgccagtga

SEQ ID NO: 480642 - DNA, 497 bp, Homo sapiens
gctgatctttgaccatttctaacaaatacaacctcaaaggtcaagaaatgtcctgccatatattcaagagaacatagcagaacctgaaggtacaacaaggtaattaaagggactctatctacaccaatatatatctatatacatagatatatagatacatataatatagagagcaagatatgtttaaagatgttactttataaccaggataactaattattattatttttttgagacagagtctcacactgttgcccaggctggagtacagtggcatgattttgattcactgcaaactctgcctcccaggttcaagtgattttcctgcctcagcytcccgagtagctgggattacaggcgcatgcacaacacctggctaatttttgtatttttagtagagacagggttttgtcatgttggccaggctggtcttgaactcctcaggtgatctgcccacctcggcctcccaaagtgctcagattacaggcgtaagccac

SEQ ID NO: 480643 - DNA, 621 bp, Homo sapiens
ctactacatgggtaaataaatggccatatagagagatggttgaggtcaaattgaaattttctaaatgtaagaagaaacaaaggcagatcacaaaatccactgactcagtgtatgctaaagatatatttctgtttgaatttgattaaacaaaatatttaaaataaaaatattttcttatataatccgacstttatttttatgtgagctccagttacaatgagcatatttctcattaagtctccttagattgttatagcatataaactagccccttgaaatttatcattttcaaattgcaataaaaattaaggacactggatcagaaagatggatactctgatgtggtaattaactgaactttcagagtgtctgacacactctaccacaacactgcaaaatgagaaatctagcaattctttaaaattcccagaactatcttggggtcaggacatgaatactcaataaagaagtattaaataatccattaattttgacctgttaactgtggtttaactttaatccaaaacatggaagctgctattatcataaactctgttctacatgatgcgtaggtatttttaactcgtcattttattttatttttttcagatctgtattctg

SEQ ID NO: 480644 - DNA, 521 bp, Homo sapiens
gactgctccaatagcctaattgtttttatttttgggttacagtcatggttgcatttttgtaagtatttttccttaaataatttatccctggccttttactcacagtgactggaagacaatttttgacaggtaagcagaaccctgtgaggcwaaagcatagaaaatgtcagagtggtcactagtcagtcaacaagaaaacagacagaggtaaggagcgtgttggcaatatgtgggcactgcaagatgcctacagagaatatctcactgtcccttccacccttaggcaaccttaacaagtatatttttatttagaatggcttgttcttattcattacttatatatgaccaaaatcatactcactaccctacccctccatcatctcaaccatttattttccttcatattgtttcagtgaattacatcaccatcgccaacccaagctagaaaactgagtcatcataacacactgcttttctctattttctcttgtttaattttcctcaaatgtgttttttaaatc

SEQ ID NO: 480645 - DNA, 521 bp, Homo sapiens
gactgctccaatagcctaattgtttttatttttgggttacagtcatggttgcatttttgtaagtatttttccttaaataatttatccctggccttttactcacagtgactggaagacaatttttgacaggtaagcagaaccctgtgaggctaaagcatagaaaatgtcagagtggtcactagtcagtcaacaagaaaacagacagaggtaaggagcgtgttggcaatatgtgggcactgcaagatgcctacagagaatatctcactgtcccttccacccttaggcaaccttaacaagtatatttttatttagaatggcttgttcttattcattacttatatatgaccaaaatcatactcaytaccctacccctccatcatctcaaccatttattttccttcatattgtttcagtgaattacatcaccatcgccaacccaagctagaaaactgagtcatcataacacactgcttttctctattttctcttgtttaattttcctcaaatgtgttttttaaatc

SEQ ID NO: 480646 - DNA, 576 bp, Homo sapiens
gaagacacatagacacacagggaagaaggccatgtggcaacagagacaaagacaggagtaatgcatttacaagccaagaaatgctgacaattatcagtatccaccaagctaagaagaggcaaagaagaatgcttccccaatgccttccgaggaagcatggycctgatgacatcttatatgtagttcccagaaccctgaagagaatgcatttccgttattttaaggcacccagtttgcatttttttgttaaagcatccctgggaaactaatgtagagatcttgttttatataagatgcacagtttctaggtttcccattatgtgccagttagcacataatatcagtctccaccagaacccattcctcaaaatgtcctgcctgttaactgagaagagagtgctaacaatgtagcactagcctcagttcaagagcgaccagggcagcagcggcattatcctactgaagaacttggcctggggcttacctctcataaattcatccactgctgccactgacttcaagtaatcattgtagtattgactacacacgccaaactcctggtgcctttccctaaag

SEQ ID NO: 480647 - DNA, 576 bp, Homo sapiens
gaagacacatagacacacagggaagaaggccatgtggcaacagagacaaagacaggagtaatgcatttacaagccaagaaatgctgacaattatcagtatccaccaagctaagaagaggcaaagaagaatgcttccccaatgccttccgaggaagcatggccctgatgacatcttatatgtagttcccagaaccctgaagagaatgcatttccgttattttaaggcacccagtttgcatttttttgttaaagcatccctgggaaactaatgtagagatcttgttttatataagatgcacagtttctaggtttcccattatgtgccagttagcacataatatcagtctccaccagaacccattcctcaaaatgtcctgcctgttaactgagaagagagtgctaacaatgtagcactagcctcagttcaagagcgaccagggcagcagcggcattatcctactgaagaacttggcctggggcttacctctcatawattcatccactgctgccactgacttcaagtaatcattgtagtattgactacacacgccaaactcctggtgcctttccctaaag

SEQ ID NO: 480648 - DNA, 600 bp, Homo sapiens
tggttaccatgaaaaaataacatggtgagtaaagttgtggtttgtttctgactcataatcaacataatactgaaaaaactgaatcatctgaggatatctacacacctattttagccctgaatcttctttaagcttagttaaatattataaaaggctaattcatgatactgtctcatcatcaagaattaaaactatctctccacaatatccctgtgttcagccattacaaaatcytcaacctgaatttttggtgttttgaaaaagttaacaaagaaaggctgcccttgaaccttgttggaaacaattttattgggtactgttaagtatacatacagtaatcagacttcagtgtgttgacacttgggtccatggtctacaatttaacatgttcaattccatatgccaatctaaactcttgggttacctccagatgaggatacctagatatttctcagaagtagttgatgccataaagcagacaccttccaccaggaattttggctcgagcagatgattcttgatgcccatagtctctactaaaaatctgtgtaacacaaataataatgcttctttaatctgcatagagttattctttatttt

SEQ ID NO: 480649 - DNA, 600 bp, Homo sapiens
tggttaccatgaaaaaataacatggtgagtaaagttgtggtttgtttctgactcataatcaacataatactgaaaaaactgaatcatctgaggatatctacacacctattttagccctgaatcttctttaagcttagttaaatattataaaaggctaattcatgatactgtctcatcatcaagaattaaaactatctctccacaatatccctgtgttcagccattacaaaatcttcaacctgaatttttggtgttttgaaaaagttaacaaagaaaggctgcccttgaaccttgttggaaacaattttattgggtactgttaagtatacatacagtaatcagacttcagtgtgttgacacttgggtccatggtctacaatttaacatgttcaattccatatgccaatctaaactcttgggttacctccagatgaggatacctagatatttctcagaagtagttgatgccataaagcagacaccttccaccaggaattttggctcgagcagatgattcttgatgcccatagtctctactaaaaatctgtgtracacaaataataatgcttctttaatctgcatagagttattctttatttt

SEQ ID NO: 480650 - DNA, 594 bp, Homo sapiens
ggaaagagtatgatctgttcaactaatctgtagcattatacatgtaaatatgattattttaatcttgaaaacttaaatgtatatcacttccactttccaattttatcaaattattatttctatattgtcaggatttagaatatttacrttgtcttttgtagccataattttaacaattgttatgaattgaaataatttaattcttactaccagtcccttccttcacaggttttaaatttatctcctggtaagctaaatttccttttttttttctttgtcttgcttttctaagaagaatgtgtgctgctattgtttctgaattcttacatgtttgaaaatgtttccttcctgttttaactctgagcaaaaatttggttggttaaacaattcttagagcatcctttattttactaaagatgttgtagacaatgttttgctgttggggcatataaagtacagaaccaacctagtttagttttcctaaaaatggtgacaaattagtctcctcaaatgtgcacggtatttttttctctatcttgaacgtctagtaactttaccaagacatgtctcagtatagattatttataataactt

SEQ ID NO: 480651 - DNA, 617 bp, Homo sapiens
aaacgcaatttatttggtctagtcagatatgactaaggcttatcataaactaactcattcaaaagtacgtattaagcatctttsaagccctttgctaggaactagggacacaacgagtaataagatcattcctgctcacataaaagaagttgaggagactggaagtaaatgtgtgattacagaggagtgagatgagtgctaaaataaataaacatagcatgttgttagaacacaacacaaggaccaaacccatgttggagatgttagaaaggtcagactgaaaactcagtgtattaatctgtttttatgctgctgataaagacctaatacccgagactgggtaatttataaagaaaaagagatttaatggactcacagtcccaagtggctggggaggcctcacaatcacagtggaaggtgaaaggcatgtcttacacaatggcagacgaaaggaaaatgagagccattataaaataataggaattgttttataaaattgctgcatgaaataggtaaacagaatggctaatgaaatagaaaataacttctaatagcacagtcaatgccagagaccatgaatttcttgtaatgaaaattgcattattgtgtcatttttt

SEQ ID NO: 480652 - DNA, 617 bp, Homo sapiens
aaacgcaatttatttggtctagtcagatatgactaaggcttatcataaactaactcattcaaaagtacgtattaagcatctttcaagccctttgctaggaactagggacacaacgagtaataagatcattcctgctcacataaaagaagtygaggagactggaagtaaatgtgtgattacagaggagtgagatgagtgctaaaataaataaacatagcatgttgttagaacacaacacaaggaccaaacccatgttggagatgttagaaaggtcagactgaaaactcagtgtattaatctgtttttatgctgctgataaagacctaatacccgagactgggtaatttataaagaaaaagagatttaatggactcacagtcccaagtggctggggaggcctcacaatcacagtggaaggtgaaaggcatgtcttacacaatggcagacgaaaggaaaatgagagccattataaaataataggaattgttttataaaattgctgcatgaaataggtaaacagaatggctaatgaaatagaaaataacttctaatagcacagtcaatgccagagaccatgaatttcttgtaatgaaaattgcattattgtgtcatttttt

SEQ ID NO: 480653 - DNA, 611 bp, Homo sapiens
actaatatttaataatcttygctttcctgatataaatgttagttatcatatataaatatacaggcttacttgtttaatcgctaaattcatttgcgtactaattagaattttggatctgtattcatgagaagaattaatctattgtttcctttttgtattatccagaatatagaaaacattattctgtttcttacagaaaatattattccagcatcctaaagatttacccaaagtttaaatgttaaaatgaccatgctatccaaagtaatctacagagtcagtgcaatctctatcaaaataccaattacattcacagaaatagagggggaaatctggacaggaatcacagaaaacagaggcgagcaaagacacaaagtaacctgcagagctaggaccagcagggagccaggagaaaatcccttacttggggaaggggccagtgagtgacagaattctggggtttcacaccctgccactgacctttacaatcttaataacgggagaaccccctcatcacccccaggcctccagattaagacggagctgcttagagactgtgcagagactgctcaaacccacgtgcagttccacaggcatttgattccagagca

SEQ ID NO: 480654 - DNA, 571 bp, Homo sapiens
gcaagttggagaagacaggttctattaagaataagacataacatccacggattgctttctgtagcccaagactgttgaatgtttaatagatattttgttaagataataacaacatataaagtgacactattaacagctctcctttacagataaggactccagtaaaatttaccattggtcattttcatttacaaagcctagctttttaaaaataacttatttattgaagctttactctacattccagatacttcaccaagcattatttgatgtatttctcacaaacaccttttagagyaggctataactgaggaaactaaatccccaataggtgaaataagaagttaagtagccaagcccaataagtaagccatggaggcgaatatatgttatctttagaaacctggaattcttggctcctttgggctttttggtaagtcctaatggaaaacagtactgggttcagagtggtcagaagccatagagacatgtcccttgagcctccctggctctttatctgaagcaatcccacccctctattgctatgcttttgctcacattacatgaccag

SEQ ID NO: 480655 - DNA, 512 bp, Homo sapiens
tctcctttaatctttggctgaaggaagccctaaagactttggggcctcaatctcccatatgcagtgacattctcaaggccattgactcagcttctcacctgggtttccttccaatgagccacagatagaagtcacagataatggcaggggcctgctggctgatggcattccagtactgggttgtgaagttgcttgtggtgaaatcagcatatggcctcctcaaagctctcgcaaatggarttggaatttcagaggttgccaagacctggaatcctggggaaaaaaagagagtaagtgatagaggagaataggagaatataagcccatcacactggaaggtatttataatgggtcacaacaataaagatgaaggatttgctgtgtagagtcaagaatcaatttctgagaacaacgtaaagatttttatgctaggcaagtggttatctgcaaaatgaaacaatgtgaatgggttaagaattggaccctttatttgaaacacctactctaaaaca

SEQ ID NO: 480656 - DNA, 559 bp, Homo sapiens
ctgctttgcatgtttcccgctttaatttgaaatgattagcactttcttatgttactcagttctcttttcttataactagctccccttcttttggacataagaaaccaatttagaacattttttaaaatgtgaataaatatgcagctttgcatataatgaaaacygctttgggatcacgttaaaataatgatgttctaagtcaccaaacttcaccccaactgaacttttttaggagaaagagttgaaggcaggtgggaagcagaaagaaaggggctgctagaaaaatccggaattcgaaggaaggtctttgtcactaccataattcattgtctcatatttctatttgaattcatgttgaacccagctctgggaggaatagagacagagtctgaagggcagtctgaatccctaataagatttaaactcatttagatcactgatttcccattcattgtacaaaagagtaaagtggggtttaggccctaaatgcctcagtgtgagatgtgaaccccacagctctgccggatcaatgtggacttcagggagatgcgcactgagg

SEQ ID NO: 480657 - DNA, 559 bp, Homo sapiens
ctgctttgcatgtttcccgctttaatttgaaatgattagcactttcttatgttactcagttctcttttcttataactagctccccttcttttggacataagaaaccaatttagaacattttttaaaatgtgaataaatatgcagctttgcatataatgaaaactgctttgggatcacgttaaaataatgatgttctaagtcaccaaacttcaccccaactgaacttttttaggagaaagagttgaaggcaggtgggaagcagaaagaaaggggctgctagaaaaatccrgaattcgaaggaaggtctttgtcactaccataattcattgtctcatatttctatttgaattcatgttgaacccagctctgggaggaatagagacagagtctgaagggcagtctgaatccctaataagatttaaactcatttagatcactgatttcccattcattgtacaaaagagtaaagtggggtttaggccctaaatgcctcagtgtgagatgtgaaccccacagctctgccggatcaatgtggacttcagggagatgcgcactgagg

SEQ ID NO: 480658 - DNA, 223 bp, Homo sapiens
ctccttcccgctgcctttccgtggccctggtttgggacacccagcccggccttcatgaggcgccccccacccagctccgcccctccacgcccctgtctttagtctcttaggcgktggccgccaccgccacagccctgggcctggcacccccagtcgcccgcagtctccttgtggtggcaccggcgtccccgctggagctgctggaggccaagcccaagcatga

SEQ ID NO: 480659 - DNA, 223 bp, Homo sapiens
ctccttcccgctgcctttccgtggccctggtttgggacacccagcccggccttcatgaggcgccccccacccagctccgcccctccacgcccctgtctttagtctcttaggcgttggccgccrccgccacagccctgggcctggcacccccagtcgcccgcagtctccttgtggtggcaccggcgtccccgctggagctgctggaggccaagcccaagcatga

SEQ ID NO: 480660 - DNA, 223 bp, Homo sapiens
ctccttcccgctgcctttccgtggccctggtttgggacacccagcccggccttcatgaggcgccccccacccagctccgcccctccacgcccctgtctttagtctcttaggcgttggccgccaccgccacagccctgggcctggcacccccagtcgcccgcrgtctccttgtggtggcaccggcgtccccgctggagctgctggaggccaagcccaagcatga

SEQ ID NO: 480661 - DNA, 223 bp, Homo sapiens
ctccttcccgctgcctttccgtggccctggtttgggacacccagcccggccttcatgaggcgccccccacccagctccgcccctccacgcccctgtctttagtctcttaggcgttggccgccaccgccacagccctgggcctggcacccccagtcgcccgcagyctccttgtggtggcaccggcgtccccgctggagctgctggaggccaagcccaagcatga

SEQ ID NO: 480662 - DNA, 546 bp, Homo sapiens
caaaacacagaatccaggtaagtgggcttaccaggaaaagctggtgccacgttgctcygcacaatgcagggccttaggatggcaatggttaggttcctgctctcctgctgcaccaccatttctcccaaggccttgctataggtctaagtattgggacaatctccaatccgcttgggagtgatctcgtcaataatggcgttgtctatacataaaaggtagtcagagtaaaaagaattctagcaacatgtgttagacaatagaccaaaaggaaaatgtgagacacagtcaaacaaaacttccaccttttagccttggttctggaattcagaacagtcacatgataccaagtttgagcgcgtacctgtccaaagcatgcatgagctcttttgtcttcactgctaagcccaatcttacagtcaaatcctatgccctcccatccagacaggtaggtaggtagacggatagaatcaatagcgatgccactttattactactactagtatagggctattagtactactttagtgctactattactttgtcagt

SEQ ID NO: 480663 - DNA, 546 bp, Homo sapiens
caaaacacagaatccaggtaagtgggcttaccaggaaaagctggtgccacgttgctccgcacaatgcagggccttaggatggcaatggttaggttcctgctctcctgctgcaccaccatttctcccaaggccttgctataggtctaagtattgggacaatctccaatccgcttgggagtgatctcgtcaataatggcgttgtctatacataaaaggtagtcagagtaaaaagaattctagcaacatgtgttagacaatagaccaaaaggaaaatgtgagacacagtcaaacaaaacttccaccttttagccttggttctggaattcagaacagtcacatgataccaagtttgagcgcgtacctgtccaaagcatgcatgagctcttttgtcttcactgctaagcccaatcktacagtcaaatcctatgccctcccatccagacaggtaggtaggtagacggatagaatcaatagcgatgccactttattactactactagtatagggctattagtactactttagtgctactattactttgtcagt

SEQ ID NO: 480664 - DNA, 498 bp, Homo sapiens
ggcaactcctttgcacccttgctgtgggtgcagcagaaccaaggtccagggctcaccacttcataaacacactcacgtttctttccttccttccctccctccttccttccttcctttccttccttccttccttcttttctttttcttttttttgagacggagtctcgctctatcacccatgctggagtgcagtggtgctatcttggctcactgcaacctctgtctcccgggttcargcaattctcctgcctcagactcccaagtagctgggattacaggcgcccactaccgcgcccggctgatttttgtatttttagtagagacggggttttgacatgttggccaggctggtctcgaactcgtgacctcaggcgatccgccccccccactcggcctcccaaagtgctgagattacaggcatgagcaccgcgccgggccacactcacattttctaataagaccttcacactaaccctgaaaggtgtggagggcatggaa

SEQ ID NO: 480665 - DNA, 562 bp, Homo sapiens
aggcttggatctacaccaacagcgtgggacagctcgaggagggaaatgagcgaaggaggagggagctgagccaaggtgaaagaagagctagggtttagtttttaaacatgctgccttggggtgtgttgtggagaccttcagtacccaggaagagagggcagactgagtccctcccctytgttcccctcaccatgtcctcaggccctggactcagcctgctcctatcacccaaaatacctctgtctgccagggtctccacctttcttggtagtgagtggcctgacagtcagtactctgtcagtctggccaggaagagactgcggctggctccttcgcctctccataaggactacacggaggcaaccctgcactcatcccccagctcctggctgtgaggaagcctgcagcaggcatgaacatgacctggggctccatcagccggtgtgcctttcacaccccaccccaagtaagctttgcagctacctgccagagaccctgaaatgcttcttcatgaggacccaggggggcgagggactgcctcatagcccagtgggcacgttga

SEQ ID NO: 480666 - DNA, 213 bp, Homo sapiens
gcacgggagccggagggacgcagaggaaccagtgtgaggcaccagggaagacacaccgcaggcttgcctcctcagtgctcccagaggttgaccatggactcmtgtgaggactttttcttccctgttacctaagtacaggcagaggtggatccaggcctccacctaattcctgtggtatcaggctggggctgaagcatccactgtggccgggtg

SEQ ID NO: 480667 - DNA, 528 bp, Homo sapiens
tccagtgtgacctcaagcccctcaaaccttcacgtataagtctctaacagtggaagtttaggccctggtggggatgagagtgtatgagacaatacctctctctgcctggaaacccatctcatcttgtgttccatcgtgaagactagggaagtgctgggagcattcttccagtgctaaagtgggtggaagaaagggctgccttctctgctgaggacaggtctagtcaggatctcagaggagccaagaggacactcccagacacaatcaccctcagcctgcactggctggcagccagragaggctatggctgactgcaccaaggctggcctcacccaggcaggcctagccaggagggagggtccctgcaagcacccacagcctggccctgggaggaactgggctctcttggttggggcacagggaatccactcccctatagctcccagaattatccccatttctagacaagccccgccccccaactgacacacacgtgagaccctgctgaaagcatgcactgccacaccc

SEQ ID NO: 480668 - DNA, 626 bp, Homo sapiens
acggaatgatcagaagtttgagcacttattttgggagtctgagagggggatctataattagaataagtcagatagaatgaaaataagaataaagcaaacaattaacctgattgatgttttccactggggtatattggctggtttttcacagaaaatgtagagacgggttacytttaacaaaactctcctgtcctgctattataccttaccagtcgttaggacctttataaactgaagtgtggacacaacagagggtttgccactgaactgactttgtttctcctcacaaatggacggatcaaaataatgaccaatttgtttagttgattaagggaaaaaaatgtcagcaaacacgttacccatgtggtaaaatattttttactttttaggaaatgttttcctatccccatggtaatagctgttatcccattctcagccacaaaatcagaaaaacaaagggcgagtaaggaggctttgtctcataggttttgctatcttgtttaaagtatcaatgtcttggggatgccatcttcttaggattatactaacatagtttgtaggttttctataaggcagtattacaatgccaaagcaaagccctagaatgaatgttgatctacaaacag

SEQ ID NO: 480669 - DNA, 626 bp, Homo sapiens
acggaatgatcagaagtttgagcacttattttgggagtctgagagggggatctataattagaataagtcagatagaatgaaaataagaataaagcaaacaattaacctgattgatgttttccactggggtatattggctggtttttcacagaaaatgtagagacgggttacctttaacaaaactctcctgtcctgctattataccttaccagtcgttaggacctttataaactgaagtgtggacacaacagagggtttgccactgaactgactttgtttctcctcacaaatggacggatcaaaataatgaccaayttgtttagttgattaagggaaaaaaatgtcagcaaacacgttacccatgtggtaaaatattttttactttttaggaaatgttttcctatccccatggtaatagctgttatcccattctcagccacaaaatcagaaaaacaaagggcgagtaaggaggctttgtctcataggttttgctatcttgtttaaagtatcaatgtcttggggatgccatcttcttaggattatactaacatagtttgtaggttttctataaggcagtattacaatgccaaagcaaagccctagaatgaatgttgatctacaaacag

SEQ ID NO: 480670 - DNA, 626 bp, Homo sapiens
acggaatgatcagaagtttgagcacttattttgggagtctgagagggggatctataattagaataagtcagatagaatgaaaataagaataaagcaaacaattaacctgattgatgttttccactggggtatattggctggtttttcacagaaaatgtagagacgggttacctttaacaaaactctcctgtcctgctattataccttaccagtcgttaggacctttataaactgaagtgtggacacaacagagggtttgccactgaactgactttgtttctcctcacaaatggacggatcaaaataatgaccaatttgtttagttgattaagggaaaaaaatgtcagcaaacacgttacccatgtggtaaaatattttttactttttaggaaatgttttcctatccccatggtaatagctgttatcccattctcagccacaaaatcagaaaaacaaagggcgagtaaggaggctttgtctcataggttttgctatcttgtttaaagtatcaatgtcttggggatgccatcttcttagrattatactaacatagtttgtaggttttctataaggcagtattacaatgccaaagcaaagccctagaatgaatgttgatctacaaacag

SEQ ID NO: 480671 - DNA, 609 bp, Homo sapiens
agtttgagcacttattttgggagtctgagagggggatctataattagaataagtcagatagaatgaaaataagaataaagcaaacaattaacctgattgatgttttccactggggtatattggctggtttttcacagaaaatgtagagacgggttacctttaacaaaactctcctgtcctgctattataccttaccagtcgttaggacctttataaactgaagtgtggacacaacagagggtttgccactgaactgactttgtttctcctcacaaatggacggatcaaaataatgaccaatttgtttagttgattaagggaaaaaaatgtcagcaaacacgttacccatgtggtaaaatattttttactttttaggaaatgttttcctatccccatggtaatagctgttatcccattctcagccacaaaatcagaaaaacaaagggcgagtaaggaggctttgtctcataggttttgctatcttgtttaaagtatcaatgtcttggggatgccatcttcttaggattatactaacatagtttgtaggttttctataaggcagtattacaatgccaaagcaaagccytagaatgaatgttgatctacaaa

SEQ ID NO: 480672 - DNA, 602 bp, Homo sapiens
ttttattttataaaattaacaattcaatgaaaaattagacataaaatgttgaatgacattttattcattttaattttcatctataccatatactttacaataatttttaaagccagactgaaaccactattttcctaggataatgcctttgtaatttagaaaaaagacttgaaatttggaacaaggctggatttctttagttaaggtattttaggagtttcaaactaatcagggaatatattttgccaagttactttttttaaaaaacaagcaaattcttttaggtttaatttactcctaatgaatgcacatcatgatactttttttctgattttttgaatccataaagtcaatcttcacattttataaaacagagctttttaattttattcaaattaatgatttttgtgatacaaattttaccttcttgttggtaaaaaggaaaaattgggaaagtatggaattatctttgtaattaccttcccccacccaagttattaaaaatactatggccaaaggcaaatatttttaatgttttaacttaygcttttcatttgttatttatttgtttatttatttttgagagacattgtcactcagtt

SEQ ID NO: 480673 - DNA, 540 bp, Homo sapiens
gctgttgccctaagacaagasggataatcctttgcaactgcatcagaggcaggctatattaagtgatggatttttgatgattcccataaaattgagtgaaatctcaagggcttgtgtaagtcacttatgcactaacagacagctctttgtagttaggaatgctgtgatggttaattttacatgccaacttaaaaacgtatgtgccatgaggtacccaggtatttgatcaaatattgttctgggtatttctgtgagggtgtgcattagtctgttctcatgctgctaataaagacatacccaagactgggtaatttataaagaaaaaaggcttaattgactcacaattccacatggctagggagtcctcacaatcatggcagaagacaaatgaggagaaaagtcatatcttacatgataggcagggagcttgtgcagggggactcctattgataaaaccatcagttctcacgagatttattcaataccatgagaacagtatgtggaaaaccacccccatgattcagttgtctctgactgact

SEQ ID NO: 480674 - DNA, 534 bp, Homo sapiens
gcagctcccctatgtaatgtgggaatgcacacgagcattgaaacctctttaatttttttcccagggcaaaggcccaggaaagtcaaagtgtctctaggaacctaaaagcttttgacaaccataaaatcattcctgatttyctctaatatatcttgtcctctcctttttccccttttattccagttaataggtcaacaatataacccagccaccctgggactagatggagaaggaactggtattggttaacagccttagggagtagttcccactgtttccatactgcaaaggtggaaactgagacttattcaaggttgttcaggtgggaagtcataaaaggagaattcaaaatcacatccatttggtacccaatttatacactttgtactatcctggctgggaaatacctgtttcaaatatagaaggtgtagagcttaggtgacaagcattctgatgtcttcctcaattaaggctctagtggccttttcattgcttttccttctccccacattcccaccccagggaccattctta

SEQ ID NO: 480675 - DNA, 519 bp, Homo sapiens
ctgcgttgtataaactttctctaggaatcacttttaaattgtaagatggcaggctagattgaaatgttaagaactttaacaagcaggtggatttcattgcctgtttatgatacagtgggtctgtgttcattatcttctgtataatccataacccacttggggccctaggccaaattaaggtctaagtataggtatttttttctgaaagaccaggagtgtcagttaaccacattarccaattatagacttagcagttttagtttggccttggtgatacataattcttcactttttgtgactcataaacaaaccactattatgaactcttatttattttggaaaataatgcattttatataaaatgcccagaagtgttttctggcaaagatggatttcataaccattactaattttaggacaatgtaccagcattcaagctacttaggacttcttagaaatgtctccaaatgtcgctcttctttaagtgcagaatatactaactttataaaaactatatta

SEQ ID NO: 480676 - DNA, 600 bp, Homo sapiens
gctcctaatagttcacaaatctctgatgctctgcttaacccagagtctgtcattttttttcactcccaggcttttctgcagacgccaaactctaggagaatctcttttctcgcactgctccacagccttgctaacccatgacatcattcccacagccttctatggctccctaaagctgctcctgtaatctgctaaccccaccgttccagaacagtggcacatcaataaaacccagcagttctgttatttgggtttcatcaagcttttcaggaaaaccttttgtggtggacagttagtaaaggaaacagaacaaagaaataaagcaccagctcattagacctgaatcagagcctagaaccaaactctactcacttggaaagggttggctagggggtcttagaagtctgcaggctctataaaaaggaatgttgctcttcagacactgagcagggaaatttgttggtggcatttcgtagtctaatccaagccctaggatatggaatttaggagagaacaaaattgttctagggatgtgagcccctccttacctgatarcaatccaaaccccagggactgacttgctcacttgaggctggctgc

SEQ ID NO: 480677 - DNA, 635 bp, Homo sapiens
tccccattgattttaatggacactggttcagttcccccatctgtaaaatgaaaaatctgtatgaatgagaaatagatcattgtgctttaaaattctaaaattatatcatcctgtggtccagtctttctcttayagaatagaaaagtttaacaaatttcctcaaatcaaagcaaaatattattttatacaggaaacaacctaaagtcaaatacctgtcttctttcaactgctctgagtgagacttattttgatacaggaattatgtacacagactctgggtgcttctcatttataaactgtgtgtgctgggcaagttatttaagcttagtgtctcagtttagtcatctgtaaaatgaatataataataatacctacttcataagattggtatgaactataaatgagtcagtagctataatgtgcatagagctgtgctgacaacctactaagtaaccagtaaatgatagcccttagccgtctgtctctaactcaactctcccatttttctcaagctaatatgcttactatatacattttccagtagcctgtcctttatagctgtgacttatccaaacctgacacacagaacattcctttcacatttcaagcccaccaaactatttctcttcagccac

SEQ ID NO: 480678 - DNA, 641 bp, Homo sapiens
tgtaaatccccattgattttaatggacactggttcagttcccccatctgtaaaatgaaaaatctgtatgaatgagaaatagatcattgtgctttaaaattctaaaattatatcatcctgtggtccagtctttctcttacagaatagaaaagtttaacaaatttcctcaaatcaaagcaaaatattattttatacaggaaacaacctaaagtcaaatacctgtcttctttcaactgctctgagtgagacttattttgatacaggaattatgtacacagactctgggtgcttctcatttataaactgtgtgtgctgggcaagttatttaagcttagtgtctcagtttagtcatctgtaaaatgaatataataataatacctacttcataagaytggtatgaactataaatgagtcagtagctataatgtgcatagagctgtgctgacaacctactaagtaaccagtaaatgatagcccttagccgtctgtctctaactcaactctcccatttttctcaagctaatatgcttactatatacattttccagtagcctgtcctttatagctgtgacttatccaaacctgacacacagaacattcctttcacatttcaagcccaccaaactatttctcttcagccac

SEQ ID NO: 480679 - DNA, 641 bp, Homo sapiens
tgtaaatccccattgattttaatggacactggttcagttcccccatctgtaaaatgaaaaatctgtatgaatgagaaatagatcattgtgctttaaaattctaaaattatatcatcctgtggtccagtctttctcttacagaatagaaaagtttaacaaatttcctcaaatcaaagcaaaatattattttatacaggaaacaacctaaagtcaaatacctgtcttctttcaactgctctgagtgagacttattttgatacaggaattatgtacacagactctgggtgcttctcatttataaactgtgtgtgctgggcaagttatttaagcttagtgtctcagtttagtcatctgtaaaatgaatataataataatacctacttcataagattggtatgaactataaatgagtcagtagctataatgtgcatagagctgtgctgacaacctactaagtaaccagtaaatgatagcccttagccgtctgtctctaactcaactctcccatttttctcaagctaatatgcttactatatacattttccagtagcctgtcctttrtagctgtgacttatccaaacctgacacacagaacattcctttcacatttcaagcccaccaaactatttctcttcagccac

SEQ ID NO: 480680 - DNA, 669 bp, Homo sapiens
taatgcaagtaattctgtgatcctaatatgtatgaaatcattgaatagataaagctaagaggacaacaaagtatggagtggtatgatgagtctatgagaaggtaaatgattttcagacaattcaaattctctagcgaatttgttgtcacaaaatacactgtaattaaactgcattggccttgggcaaaattcatcttggatatcttatttgaaatagcattcaatgagcacttgtgctagccactgcagatactttattaaatagaatatgcttgcaaggcacttataccttcataccatcttctcttccaatgcctaatgtttacctggtgaaatctactttcaagatggccctggtgtctttcatgtattccgtcatgtaaattaasttaatgtattaactctcataatctgtggtttgttggcttgttgttgtgattgttgtttacatttttatgtcattcccaactctacaaagtaaagctttgatctctgctagagtaaccttcaggcaatagtaaactgctacagaattctgtattttttcacaccaggaggtcttcttcactgaaattcattcaacaaatactgactaagagctgactctatttcagatccagaactaaatgatggaaatccatggttgcttctctgacacctccacttgga

SEQ ID NO: 480681 - DNA, 559 bp, Homo sapiens
atgggttgtgactcacaattggccacagatttttctccctcctccccaaggcttgccctggcaaccttggcttaaagcacagaatgctcttggtaaatatgaagggctttagaaatattagtgtcaattgtcattgttgtttttgttaagactacaatttggagctataaccataggattgacaacttccccccaatccaattataaccactataaagtggaaatcttaatttctttctcaaagagtagtgattttcaaatgggggtgatttttgcccccaggggacatttggctatgtctggagacattcttttggttgtcacagttgggggtgggsgtgctactggcatctagcaggtggaggccagaaatgctgctaaacatcgtacagtgcacaggacagcccacaagccccaaagaattatcccaccccaaatgtcaatagtacagaggttgagaaatcctgtcctacaggatcatggggaggagagaaaagatctagccttattttctgcctgaaaccccattattagcttctgggttaaagtcggccctggt

SEQ ID NO: 480682 - DNA, 559 bp, Homo sapiens
atgggttgtgactcacaattggccacagatttttctccctcctccccaaggcttgccctggcaaccttggcttaaagcacagaatgctcttggtaaatatgaagggctttagaaatattagtgtcaattgtcattgttgtttttgttaagactacaatttggagctataaccataggattgacaacttccccccaatccaattataaccactataaagtggaaatcttaatttctttctcaaagagtagtgattttcaaatgggggtgatttttgcccccaggggacatttggctatgtctggagacattcttttggttgtcacagttgggggtgggggtgctactggcatctagcaggtggaggccagaaatgctgctaaacatcgtacagtgcacaggacagcccmcaagccccaaagaattatcccaccccaaatgtcaatagtacagaggttgagaaatcctgtcctacaggatcatggggaggagagaaaagatctagccttattttctgcctgaaaccccattattagcttctgggttaaagtcggccctggt

SEQ ID NO: 480683 - DNA, 609 bp, Homo sapiens
ttcaaattctgttttcaccatttgtctcaggctatgtctatatacttggcaataaaatcctgctatctctaacttttacttaaaatgatcgctayggtgcatgtaatgtatgacatcagttcttcaatcttaatcaataactccaggatgatgacacattgggctatctgaaggttgccatttaaaggttttgcactatcattcaatcactctctctgctctctctgttcagcttcacctgcagctacctattcaaacccagctctcttcatggtttatttgctaataagccatcctgatttaattattctctgaaaacactatgtgaatccccacctccaggtctttgctcacatcacctaccctccacacatgctgtctctccttcctgtcaaagcacacctgtgtgtctgcagtccttggctcatcctcctcctgctcctctgaactcctataacgctttcagtgtcattgaattcccagtgtatgtttctttcattgtcagatattactgtccttgatggcaaagactatggtttcaggcttttttatattcttgtcatcagtgataggtgccatcagtaatgggtgttcgacctcttcacagca

SEQ ID NO: 480684 - DNA, 616 bp, Homo sapiens
gtctttgctcacatcacctaccctccacacatgctgtctctccttcctgtcaaagcacacctgtgtgtctgcagtccttggctcatcctcctcctgctcctctgaactcctataacgctttcagtgtcattgaattcccagtgtatgtttctttcattgtcagatattactgtccttgatggcaaagactatggtttcaggcttttttatattcttgtcatcagtgataggtgccatcagtaatgggtgttcgacctcttcacagcaataccgaatacaaagaaaattctggactcagacagagttgggtcaagtcccatcgccactgtttactagattcctcctgtccctggccctcayatccaatgtgtcgtgaagccctgtcagttttacttccaaaatatatattcaatctagttgcttcccttttccattgtgtttattcatatcaccagcgtctttcacttcagccatcaagacagcctcctatctagccttcatgcttccattcttgctccttcccctccattctccatactaaatacaataatctttttgttaagagtaagccagatcatcttacttccatgctaaaaactctttaatgttttcccac

SEQ ID NO: 480685 - DNA, 513 bp, Homo sapiens
ggctcacagtttcataggctgtacaggaagtacgatgttgatctgaggaagcctcaggaaacttataatcatggcggaaggggaagggggaacagacatgtcacatgactrgagcaggaggaaaagagaggggaggtgctacatatgttttaaacagatctcatgagaactcactatcatgaggacagtacctcagtgtaaatgagaactttccagcagtcaggtctctaaggcaaggagtttctttctattggaggcttgagcagcagctagaggagatgtggtagaagaaactcgtttgtttaggaagatgaagctagatcagagattccaaactgagttccctgtgtgctcctggggtgctgtgtggctactgtagggggtaaactagtggctgaaaggcaggctttactcccatgctccagtgtgtattaggggtgtgtaagatttcatctgggccaaagagttttctaattttaaatgaatgagccagatgtcagcaagtttcctttc

SEQ ID NO: 480686 - DNA, 570 bp, Homo sapiens
agtcatgtttgtgtttactgaattgtaatatatcattttcaaaaggaaaccattatatatatggttcccactacatatagtatacatatatagtagatgtatgtgtatgtgtgtgtgtgtgtgtgtgtgtgtgtataactttatatatatatcttgaggtcagaagtgcgagaccagcctggccaacatggtgaaaccccatctctactagaaatacaaaaattagccaggcttggtggcgcatgcctatagtaccagctactcgggagtctgaggcaggagaatcgcctaaaaccaggaggtggaggttgcagtgagctgagatcgcagcactgcactccagcctgggcgacagagtgagacaccgtctcaaaaaaattaraattaaaattaaaaaaaagacaatgaaatggtcagtctcacacattgctggtggtagaatgaatggcataaattttagggattaatcctcagaagatattgacattgacccaaagagacaaacttaaattcagaaaaacaagccttcagtataaaacatcactgcagcatcaattgacatgtagaaaa

SEQ ID NO: 480687 - DNA, 646 bp, Homo sapiens
ttaatcagagtttaggtgtcagccacaacaaattttgagatgacaatgtctaaatcctaaaaacgtttgaaaccagaatgcaaaaccattgtcctcaccactctctataatttccattaattgctctaatatgctggttcctctttttgattgcatgcccyttagaagaaaatcattgatacattgattacagctttcatctggaggttcgagcatttctaaacatttatttggatttcatgccaaactgggggataattgcacataaaaggatcatgctgggttagatactgacatggggttttaaaatatccttcctctagtataaatagcccaattggcagctcaggcatgcatctcatcgctctgtgcagcttgaccgactacattttctgtttagcgataacacaggataatagatggtgctcagagaggtaaccttcaagctcaatggctgagacatgctttctgatccaaagttgtggcaggtgagattgtaaagcctgagtcttggagaaatgctacagggtaccagaaaccaggcagcagtaacacagctttctttttcaaaggagaatcccggaaggacctatcttattaatgtgggatgaccccaatgttgcccgaaactggggatggcccaact

SEQ ID NO: 480688 - DNA, 672 bp, Homo sapiens
ccacttcacttaaaattattctatatgttagtttgtgaattckgttgttggtatttaaacgtacatcatagtttaatcatatcacataaagttgtgatttcaggaatactttatatttcttttgctgtttttgcttgtgacaattgactggtccaccacatagaatttcttagtctttctaacactaggtgaacatttgaactgaccagatgattttatggaaacagcatgagacagtggaagtcaaatctctattctgtaccttgctttgcccctttctggctacaggagcctcagaagtcattcagagatgcagcaaagtgcaggggatcaaaccattgatcgctgaatttgagtcttacttttgtcatttattattagctgtgtgacagctagtaaattaacttaatctctctgtctctgtgttttcatttgtaaatggtattaatattagtgcctctcccccagcgttcttaagaagattaaagcggttgatatttgtaaagtacttagaatattgcctgtacagctaattatttaataacattttaatgtgatgtgacctcattagatctgatgtctacaaacagtactttgagtttgagaattgttatcattttaagtgtttcttgcctttgttttcaatacatcttgaaattattaaacttaaac

SEQ ID NO: 480689 - DNA, 541 bp, Homo sapiens
taagagaacataaacacttaaaaaattaaaatgatgtcatatcccacacctacactcattgctcaccttccattsagaccacacttgcccatagagatagaaagctagaaaaaaactttacatttgtaatggatagaaagatggcagtatcatcatagctcaatcttcatggctcaatcagtgaatgttgactcggtagtcagaaacatctggcacaattaaagatttttaatggtccctgcccacaaaggagattaagacatcataaggaagaaaaacagaaaaaaaaatacaataaatgcaaatgcacctaggtaaatcacagaattaaaagaacaaagcacgttaaaaggaggattatgtttgtgtaagagaaaatgaattaattttaaacctttaatcttgatgcttaaaattttagggattttggtaattgctttccaacatttatatggcaagttatttaaattaacctagtcttgctatttttcattccaaatctatttaagtcctttgtgaggctctctgaccaagtaatttg

SEQ ID NO: 480690 - DNA, 541 bp, Homo sapiens
taagagaacataaacacttaaaaaattaaaatgatgtcatatcccacacctacactcattgctcaccttccattgagaccacacttgcccatagagatagaaagctagaaaaaaactttacatttgtaatggatagaaagatggcagtatcatcatasctcaatcttcatggctcaatcagtgaatgttgactcggtagtcagaaacatctggcacaattaaagatttttaatggtccctgcccacaaaggagattaagacatcataaggaagaaaaacagaaaaaaaaatacaataaatgcaaatgcacctaggtaaatcacagaattaaaagaacaaagcacgttaaaaggaggattatgtttgtgtaagagaaaatgaattaattttaaacctttaatcttgatgcttaaaattttagggattttggtaattgctttccaacatttatatggcaagttatttaaattaacctagtcttgctatttttcattccaaatctatttaagtcctttgtgaggctctctgaccaagtaatttg

SEQ ID NO: 480691 - DNA, 541 bp, Homo sapiens
taagagaacataaacacttaaaaaattaaaatgatgtcatatcccacacctacactcattgctcaccttccattgagaccacacttgcccatagagatagaaagctagaaaaaaactttacatttgtaatggatagaaagatggcagtatcatcatagctcaatcttcatggctcaatcagtgaatgttgactcggtagtcagaracatctggcacaattaaagatttttaatggtccctgcccacaaaggagattaagacatcataaggaagaaaaacagaaaaaaaaatacaataaatgcaaatgcacctaggtaaatcacagaattaaaagaacaaagcacgttaaaaggaggattatgtttgtgtaagagaaaatgaattaattttaaacctttaatcttgatgcttaaaattttagggattttggtaattgctttccaacatttatatggcaagttatttaaattaacctagtcttgctatttttcattccaaatctatttaagtcctttgtgaggctctctgaccaagtaatttg

SEQ ID NO: 480692 - DNA, 664 bp, Homo sapiens
gctgtgaaacccccaggcacaggctggcacatggttagcactaaagagcggacatttccttctagcttatctggtcctcattcatcagaggcaaaatcagagacaatgaaagggccttacagggaagcagtttttatcacaatctaagaactttttgacaatctcaaccatgcaacaattgaaatggtccctttgtaaggtaatgctctccccatcactacagatattcaagcagaggctggatgattagctcccacaaatgctatagaaggaatctctaaattgaatggatgttgggctttcagggctctttttcagttcaacgactttggcagcctcagtttctcactctgtgaagtgcatttgagacaactcctctcatcttcctaagtttatggatgtggtagatggattttccaaagatgtagttggttgtgttttcaaaaatggctgcagcagtatctctcattccacrtgctcttcttagaacataaccttgcctctctccatgaagagaaggaggctaattcccatcctgttccatctgagcctacttgtgactgcttccaccaataaaatgtggcagaagtgacactaagtgatttccaagatcatagagagaccatgcagcttgtggtagctctccagcaatgctggttcctag

SEQ ID NO: 480693 - DNA, 473 bp, Homo sapiens
gcccgtccatgatgaggcccgttccactcgtgcctacctcggcccactcttgcatggctcaatttcggctcccggagctggttctaccagggccccagcaccggtccagagaggaggccccgggtccgcgcgtctggttgtgtcgggcggtgctctctgtccttctcactccccagccctcccttccatttctcggttacctgcgcggctgcaggcgccgccggggactgcacaggtaaaagtctcggcaagtgagggcgcaggtgtgggcgcctcctgggccaggcgggcaggggagaggccgacggcacgtgcctggctctaaaaagattttttttttttaacagggattgtattgacagtgggggcttggggagggcagacacggaccctgggagcgctgcagggcactggggrgagagaggggcgggactgaagccccggagattgggggccggttcctttacggcccc

SEQ ID NO: 480694 - DNA, 550 bp, Homo sapiens
atagatttagtgaagatgtgggttctccaaaggagaatctggttgctcttgtaggagggatgggtgctgaacaggcaaactcaagagcagtcaactcaacagccggagatgcttctaaaactctggcttctctggaggcccacaggactcttgcccaaatctgcgttatttgtgggcctcctctgtaggctttcctaaggcatgaaatgcttaaaatgcttcttgctcatctttagccacctaaccctcttccctaaggctctggccaatgacttgtgcattacagtcactcaggaagaatttgctgatgttaygaaagaatgaatgaggaactgtgctggggctgggcccaaaacttttattaactgcagggttaaaagctatcgagggtcaggggcaccacaaaggggcagagggagtgagtcaattaacacctgcctttttatttccaaatcgaattgttgcatgaggtttggggatgatgtaaccactctgcagtgttggggcaggatttatgagctagggtatgtggagcaatggtctgagcagg

SEQ ID NO: 480695 - DNA, 578 bp, Homo sapiens
agacattcaaccacatttggaaccacatagatttagtgaagatgtgggttctccaaaggagaatctggttgctcttgtaggagggatgggtgctgaacaggcaaactcaagagcagtcaactcaacagccggagatgcttctaaaactctggcttctctggaggcccacaggactcttgcccaaatctgcgttatttgtgggcctcctctgtaggctttcctaaggcatgaaatgcttaaaatgcttcttgctcatctttagccacctaaccctcttccctaaggctctggccaatgacttgtgcattacagtcactcaggaagaatttgctgatgttatgaaagaatgaatgaggaactgtgctrgggctgggcccaaaacttttattaactgcagggttaaaagctatcgagggtcaggggcaccacaaaggggcagagggagtgagtcaattaacacctgcctttttatttccaaatcgaattgttgcatgaggtttggggatgatgtaaccactctgcagtgttggggcaggatttatgagctagggtatgtggagcaatggtctgagcaggca

SEQ ID NO: 480696 - DNA, 453 bp, Homo sapiens
accaacactacagtccctgaggagaggaaagaggcctttcagacggtgggtgtgtgcaggcaagtgagttcatgtgcaaatacacacacayccccacgcacctcttcttttcccttcagactcaaaattcaagcatgcagttgtccatctcaaggtcccccagtcccaaggctggcaccacagtcagcagttgttgagccatttgtcccacggctgcgatctctgatctgaaccacatctcacagagcaggggagaggaagaaagaagaagataagttctctgggaaactcccacctcccaggcctcatgaggtcctgcctcgccaaactttccaaatcagaaaggttttagagaaatgggagagagcaggaaatgctatatacgtatgacttcagggcctctagggtcttgaactcagagcaacaaaatctactcagaccctggtatagtga

SEQ ID NO: 480697 - DNA, 511 bp, Homo sapiens
attgccatgcctcagtttccccatctgcaaaattggcttaatgacagtgcttcyctcttgcagtcataaagctcttagaatacagcttggcagaaaaatgttgcctgtcactatttgtgctgtaaaagccctacctcttggccgaatggagctcagtaaaccaatgggagaaacaggtcccttctgagatctccctagatccctattcagcccctggtaggctcacaataagggctcagtgtttgtgggagtgagtatctgtgcagaaggaagatcagaatccagaggtgacagtttaaggttaacatattattttcccagcatttcaaaagaaaatgccgtgaaacactagtcccacaagatattcctgagaaaaaacaaatgggataggaaccaaatgagctgggaaaacagggcattcaatgtctcccctcagagattcccagtgcacgcttgcacttcaaaggctctgagaagtcctaccataaagacacctgcttaaatgtgtttc

SEQ ID NO: 480698 - DNA, 394 bp, Homo sapiens
atccctgctacttgggaggccgaggcaggagaatcgcttgaacccaggaggtggaggttgcagtgagccaaggtcacgccattgcactccagcttgggtgacagagtaaggctccgtctcaaaaaaaaaaaaggttaccaatccaatcagttgttagaagataaaacccataatttttctaccttggtaaatacatcttcatcatcatgaaggcaaggtttgaatttagaattctgaggagttgactttygaaaaaaggcagcacagagagccaggctgcagcctacccccttcacgcctcaccccacttggctttttagtgcacacacgtgtgtgtgtgtgtacaggtgtgtatacccactagccccacatatccacgcccccacccagttcc

SEQ ID NO: 480699 - DNA, 571 bp, Homo sapiens
aaaggaaacggttttttttggatgggggtgttttgtttctaaggagaaacttccagtgtattaaaaagcattaaacttgcctttttgataaattttttactttttcttaacaattatattatagccaattctcatataaataattttatatagattccccaaagagatacattatagactccaatttaacctgaagcagctcatgtccaattagaattgtaataaaaaagtagacagttctattttttgcgtcttagtctattttaaagttttttcagcttagaattgtggcttctacttcttaatgatatttaatttcttaataaagttttgcttttatttcttaactgttaaagcttccattaacaattatatcttgagaagatcacagcaggtggcaactgaatttaaacacactgatttccattaactaccagaaaaaaatatatataagtgaattttgaaaacacagacttgttattttgctttttttttatttttcttaatagcattgttcattggttggatggctcttmtgtggaaatgtaagctagagcaagtgattgctttt

SEQ ID NO: 480700 - DNA, 476 bp, Homo sapiens
tgtagcagtaaggattataacttgtcaaataactctttgatcttaagtccttttgggagattgccactgggttttatttgaagggttagtaagagaatggaataaatacatgcagcataagtagatctgagaaataagcagggagggactggggcacaggcttttgatgcttcccgtcacatcaccttgacccaccccaatgtcacttgcagttcccatgtactctgacaaaattwcaccttctgtgcctaccaattctttctactttttttgcctcaagtttatctgaaaccacaagtgctcacttaggcttactgaagccagtcaggtgttgagtcacagaggcgttaacacccttggatacaagccacaaccaataagtaaatgctccattctcttctatttctgaagtggcaattctgaggtgtgttgtattgagtcctcagaagaccccccagtgagacaaatacacagtt

SEQ ID NO: 480701 - DNA, 628 bp, Homo sapiens
tagcagtaaggattataacttgtcaaataactctttgatcttaagtccttttgggagattgccactgggttttatttgaagggttagtaagagaatggaataaatacatgcagcataagtagatctgagaaataagcagggagggactggggcacaggcttttgatgcttcccgtcacatcaccttgacccaccccaatgtcacttgcagttcccatgtactctgacaaaatttcaccttctgtgcctaccaattctttctactttttttgcctcaagtttatctgaaaccacaagtgctcacttaggcttactgaagccagtcaggtgttgagtcacagaggcgttaacacccttggatacaagccacaaccaataagtaaatgctccattctcttctatttctgaagtggcaattctgaggtgtgttgtattgagtcctcagaagaccccccartgagacaaatacacagttgttcacaatgataagagcacaatagagctccctttgctagttttctttcttccttgttttatacctccacccctcctttacacctgctcctcaaaacaaatgcctgcatctgagtccttctctcaggctctggttttggaagaaacccaactaa

SEQ ID NO: 480702 - DNA, 502 bp, Homo sapiens
tttgaaaagaaataataaattacaaagaaataagacaatagtgtgaatcaaaaccttttttttctactttgagaacttgcataaaagtggcatagatcatacattggtttaaagaatcctagaacccagcagttcctttattggttaattattaattaaatattaattatataattaattgttaaactccgactttagttttctcagcttttatgaaaacatgtagtattgcttttataatggtacagtatagtatgcaaatgcctatggcactattaayctgttgactttatctggcctgcagaattgctttatttaacctaaacggtgttttaaaaatcaggaaaatttctcataaaaattacaaattccagcttctcttgaaactataaggtcttacaatattggacctgcattaccaccagccatctgtcctctaggcccaatagtagccactactctcttgggttcagagcttgatggccgctagctcagctgagct

SEQ ID NO: 480703 - DNA, 579 bp, Homo sapiens
taagatgagcacatccttaaagttcagtatggctcccatacaaagctgagcaatgttgaagagctacactgtgcacatgcacaatcagctagttggattttgcaaccgattcattttctggaagaaccattcattccaaatacattattggagttgtcttaaattggccatgttttccactcacggctattcctacattttacttacaaaaaatactcacaagttatcttcttgactaaaagtttagtttgaaattacctggttaatcctgaaaaaagagtgttgtgtgctcacataaacaatatttggaacctgcagtttatgcttccttatyatttaaataattcataccaacccaggcaagtggctcacgcctgtaatcccagcactttgggaagtggaggatggcttgaggccaggagtttgagaccagcctaggcaaaataatgagaccctgtcactacataaaaaaaaaaaaaaaaaaaaatagctggtcatggtggcatgccactgtagtcctggctatttgggaggctgaggtaggaggattgagccaaggagttggagaatgcagtgagc

SEQ ID NO: 480704 - DNA, 627 bp, Homo sapiens
ccccttcgatattctcaaagagtggtgggcagactgtagggtgggtaccaaatgaccctacctcttgatgttcatgcccatagatagttatttcccctggagtgacctgtgacttgctactagaatattagataatatcaggctcataatcatgtacatataattggataaatcctgtccatttggccatattctattagttagaatataaataatattctatttagttaaaatatggcmaaatgggaaggatttatctaattatgtggacatgattatgaccttaagattatactggctagatcgatggagacttctctcttactggctggctttggaagaagcaagctgccttgttaggagctgtccatgtgacaaataactttgaacaacttctaggagatgagggtggccttgaaccaaagccagcaagaaacagaaatgcaaggcagaaattctgccaacctgaatgagcatggaaggggatatttcttgtttgaggtgggtgtcaaattagactgcagctctgcccaacaccatgattatatccctgtgagacctctaagcagatgatccagttcagtcatgcctggactcctgacccaccaatgttttgacatgttaagt

SEQ ID NO: 480705 - DNA, 613 bp, Homo sapiens
caaaggcatctgggaaatgtagttttcaattcccaagcccagcagcattgatcaaagaatagaaatgtgtgggagctaagaccaaacagaaaaataaccagcccagcccaaccatttggctagtcaatattcaaacactgcctttacccacatttaagcttccagrcagcaataacaccctctttatgcttccacctagtatgatgcaattaagccttgtacaagtgaagatggtcttaccccctcttaaaaacaagctgagatacaaagatccaccaatcatgttattcatctcttgctcaggcacaatctcatctgattattctgtacccaagagtccaaattattaagtaaaccaccacaggactcataatataaaattgtaatgaaaagaaaggagattagctaatatttatatatgtgaatataacaagtgcattatttacctattcctgtatagcaaattaccccaagatgtaggagcttaaaatgaaaaaacattatctttcaccagtttctgagaatcaagaatcaagaagtggcttaatgatagttctggctcagggcttctcataaaattgcagtcaagatgttggccaaggctgcagtcatc

SEQ ID NO: 480706 - DNA, 473 bp, Homo sapiens
gagctgaacaatgagaacacatggacacggggaggggaacaacacactgggatctgtagggggtagggacagggggaggcagagcatcaggataaatagctaatgcacatggggcttaatgcctaggcaatgggttgataggtgcagcaaaccaccatggcacatgtatacctaggtaacaaacctgcatatcctgcacatgtatcccaaaactttaaattaaattaaatttyaaaaaatcaccatagtcgaccacacaattttaaaagctcatctgacctcttatgatactgtagaaagtgtgaaggtcagttactgtttacacagtgaagtccaatgtctaaagccagaaaaccttgctcccactaacagcctatcttccacaaattcccctcttctgtttatatttgtcagtgttccttgttcatgcacaagtattgaggtatgtgacaggtcctaaaacaaaaatacac

SEQ ID NO: 480707 - DNA, 607 bp, Homo sapiens
gtagtgtgactctaaaatctgaaaggtctaagagtttgtaaatttgaaagcaccgcacccgagggaaaattcaatgaaattaatagaaaatcacatttgctttttttttttttttttgaggtggagtcttgctctgtcgcccagactggagtgcagtggtgcaatctctgctcactgcaagctccgccttccaggttcatgccattctcctgcctcagcctccccagtagctgggactacaggcaccctccacgtcgcccggctaattttttgtatttttagtagagaggaggtttcactgtgttagccaggatggtctcgatttcctgacctcgtgatccrtctgcctcagcctcccaaagtgctgggattacagatgtgagtcactgcacccagcccacatttccatgcttctaactggaggaggagacaatctaaatgtaatgccttagggtgagcaaaattttaactgtttttacttttaatctagaagagaaattggctcttccatatatcactcaccagattgactcattcttataagcaattgatttttgcataccgaaagtggccagagagatggatatctatgtgtggagtgtggatt

SEQ ID NO: 480708 - DNA, 493 bp, Homo sapiens
cagaagaagcctcattggtagcagccttcatagagtataggtggcaartatatcttttcagatgttaaaagcatcagcttctcatttaatctctcctagatctgggaaagtcctagaatgggacggcctggctgctttaatggcaatgttctaaagatgcaaaaagacagctttgcagggccatttcaaaatatatcaaagaaacatatgtcagggtaaaatatttttatatttggggtctgctgttgaagcagcctcattgtctagagtaacaccgaaatttgttgtcttacagccatggagaataaaaacactgacacagaaagcatgaggttgggagcagaattttagtagcaagagaaagagaacagtcctctgctgcagggagttgtgctggaaaaatgggttgctgggtccatggtgaaatgcctggcattttatcgatgagctagtgaagaggtggtgtgtgatttatatatgccataaagaaagt

SEQ ID NO: 480709 - DNA, 571 bp, Homo sapiens
ctttattccctcaagctacttcaagtcactgggaacacagtcaccagatgctcccaggtaatcccggaaagcaaagaaataaaatttgatacatgtaaatagatgccattattattcaaaaatcactgctccttcctggtggagaattagacaactggtccagttgatatcaagtttggccacatgacttgctttagccaatgacgctgggaagtaagaggaaatgacacatcccacttctgaacagaaactttcagagaaatggtgtggttctaccatgccttatttatctctaatacaagagaaaatgtctcagatatgagcatctagcctaagtcttggaacaaagctacacaatggacatgcagtatgagcaaaaaataaatccttgttattgtaagccactaaaatatggggactgtttgtwaccacaacataacagactaaacttaattatatagtatgtcataaggaaggactgactagacaggcttggttttgatcacatccccagcttaaaacccttcggtgatactcctgtgcctcctggagtccaaattctagcaaagaa

SEQ ID NO: 480710 - DNA, 697 bp, Homo sapiens
ctaaactatcgtgaccctatcttttggagtcttatttctcaaaacaccacaaagctttttctcctctgtagtcattatgccaccctgaactcattcccaaccgctcatctttgcttaggctgtgtccccatctggggaaaccaagcctcacctcctcttcaattactgcaacccattctgctagttctcttctctaaattcttattctagtcaccatcattaccacctaattttttaaatcttcccaaaggagattttgacacgtcagtctccaactaaaaatccttcaacagcaccatgttttcttttttttttttttcttttcttttaaaatagagtcttgctctgttgcccaggctggagtgcagkggcgcgatctcagctcactgcaacctccacctcccgggtacaagcgattctcctgcctcagcctcccaagtagctgggactacaggcacaccatcacacctggctagatttggatttttagtagagacggggtttcgccatgttggtctggctggtcttgaactcctgacctcaggtgatccacctacctcagcctcccaaagtgctaggattacaggcgtgagccaccgcacctagccgagcaccatgttttcaacactgaatacatcctgtgtcccatgctctgctaggtgccaggggtacacatactaatgcaacacgggcagag

SEQ ID NO: 480711 - DNA, 324 bp, Homo sapiens
gcatttttagtagagatggggtttcaccatgttggccaggctgatctcgaactccttacctcaggtgatccacctgccccggcctcccaaagtgctgggattacaggcatgagccacygcgcccagccttcttttttcctttttaaaggctgcttgacgtttatggttttctacttggtacagggcaaacaaagctgctgggaagttaagaagtgtgcacgcgacctgcatagcaaaggagatggttcttgtcttcatttcccatattttgtaattttcgttgtttttataaaaagcatctgtcttcagttatggaagccagcc

SEQ ID NO: 480712 - DNA, 324 bp, Homo sapiens
gcatttttagtagagatggggtttcaccatgttggccaggctgatctcgaactccttacctcaggtgatccacctgccccggcctcccaaagtgctgggattacaggcatgagccaccgcgcccagccttcttttttyctttttaaaggctgcttgacgtttatggttttctacttggtacagggcaaacaaagctgctgggaagttaagaagtgtgcacgcgacctgcatagcaaaggagatggttcttgtcttcatttcccatattttgtaattttcgttgtttttataaaaagcatctgtcttcagttatggaagccagcc

SEQ ID NO: 480713 - DNA, 511 bp, Homo sapiens
taacatatttcaaatgtggaagaacagggcttcttttgtctccmctgatgttttagggttaaaagcaaggaaattgagcactaatgttaaatgagaataaatatttctcttgggaagctgaataacttgtactgcattttcaaatggagatttcctatggcttcgtgataaaggcgcttccacctctttgaagtatttaagagaaagtttctgtacctctccacttttccttcactctgaaggtctggagaaagaatgcaagcatgcatacctgcctcactctcttccttattttaagaacttcctgatcatagacaacctgcagtttcctatcagctcctccatccacgtgctagacacacacggcgctgcctttcaaaagcagctccacaggccccacctctctgtgttcttgccatcagggcccaccaggtatgaggcagcaattcggatatgcgtgtttgctttgtacacacacagtctccctctaaaacagaaagttcaaagtcta

SEQ ID NO: 480714 - DNA, 643 bp, Homo sapiens
ttttactctggacatgatcctacttttggcaggatttgctctgttgagaaatagctgggaacagttgcagcccaggttagggggaagactgagggggtcctagtgtaatgcctggttcatttggggatgatggtaggttgggagagggaactgatgagagaggcccttgatgagaagccgtgtgaactttgggaggcattaagtcagctctgccgggcagraccaccctgtcctcccagaagccggattgtagtgcccataggtttgtgctttgtctccctgctggactgtgagtgccttaagagacggtctttcctctttgtcttcccaatgtcgagcagagctcctgctgcatggaggccatgatccaggttgaattgggtttttgggaaatgcaaaaagaggattggtttggggaagaggggatggtatcagcagtgctctgagggctttgaagaccctataaatacatattccccttggagggcaatacccaggggcctcctcctgccttcctcgatccatttcaagtgaagacttacatttgaattttgaacataaaacattggacctgatgaatggaaaggaatgagaaacagttcatctgagtctgtataataacaggacacaataaagatgagca

SEQ ID NO: 480715 - DNA, 643 bp, Homo sapiens
ttttactctggacatgatcctacttttggcaggatttgctctgttgagaaatagctgggaacagttgcagcccaggttagggggaagactgagggggtcctagtgtaatgcctggttcatttggggatgatggtaggttgggagagggaactgatgagagaggcccttgatgagaagccgtgtgaactttgggaggcattaagtcagctctgccgggcagaaccaccctgtcctcccagaagccggaytgtagtgcccataggtttgtgctttgtctccctgctggactgtgagtgccttaagagacggtctttcctctttgtcttcccaatgtcgagcagagctcctgctgcatggaggccatgatccaggttgaattgggtttttgggaaatgcaaaaagaggattggtttggggaagaggggatggtatcagcagtgctctgagggctttgaagaccctataaatacatattccccttggagggcaatacccaggggcctcctcctgccttcctcgatccatttcaagtgaagacttacatttgaattttgaacataaaacattggacctgatgaatggaaaggaatgagaaacagttcatctgagtctgtataataacaggacacaataaagatgagca

SEQ ID NO: 480716 - DNA, 643 bp, Homo sapiens
ttttactctggacatgatcctacttttggcaggatttgctctgttgagaaatagctgggaacagttgcagcccaggttagggggaagactgagggggtcctagtgtaatgcctggttcatttggggatgatggtaggttgggagagggaactgatgagagaggcccttgatgagaagccgtgtgaactttgggaggcattaagtcagctctgccgggcagaaccaccctgtcctcccagaagccggattgtagtgcccataggtttgtgctttgtctccctgctggactgtgagtgccttaagagacrgtctttcctctttgtcttcccaatgtcgagcagagctcctgctgcatggaggccatgatccaggttgaattgggtttttgggaaatgcaaaaagaggattggtttggggaagaggggatggtatcagcagtgctctgagggctttgaagaccctataaatacatattccccttggagggcaatacccaggggcctcctcctgccttcctcgatccatttcaagtgaagacttacatttgaattttgaacataaaacattggacctgatgaatggaaaggaatgagaaacagttcatctgagtctgtataataacaggacacaataaagatgagca

SEQ ID NO: 480717 - DNA, 636 bp, Homo sapiens
ccctggcttctggtgcacatagtgtgtctgcagcagctctgctctgccatgactccacattttatgtctgttagtagcttgggagaagttggrgtggggttaagaagacatattctgtgggctaccctccagcttactcctccattagacaattaacaatgtactgaactgatggggtcagattccaagacaccaattggaccacattttctagtggtcaaagtcactgtcggtggcaaaagtcacaagccacaaacttagatgtggctttctctgtgatggcaaaaggaatgggctgagccagagttgtctctccgggaagccttgcccatcttgctttccacctctctccctctctgtgagtacgagcgtggcaggcttatagatcagccagctggggaaggagttagactcaaggcagagaagcagcctcacttaggcccggagtctggtcatggactccagtttggtttaccagaaaccgtacatcagggtaaacaccacatgtccaggtaacagtgacgtacagtgaagggaagagcttcattcactgatgtcaactcttgcttggggccacttcctttttcacagagcaaatgattctttgaagtccaactctacgtggcgcacccaaag

SEQ ID NO: 480718 - DNA, 636 bp, Homo sapiens
ccctggcttctggtgcacatagtgtgtctgcagcagctctgctctgccatgactccacattttatgtctgttagtagcttgggagaagttggagtggggttaagaagacatattctgtgggctaccctccagcttactcctcyattagacaattaacaatgtactgaactgatggggtcagattccaagacaccaattggaccacattttctagtggtcaaagtcactgtcggtggcaaaagtcacaagccacaaacttagatgtggctttctctgtgatggcaaaaggaatgggctgagccagagttgtctctccgggaagccttgcccatcttgctttccacctctctccctctctgtgagtacgagcgtggcaggcttatagatcagccagctggggaaggagttagactcaaggcagagaagcagcctcacttaggcccggagtctggtcatggactccagtttggtttaccagaaaccgtacatcagggtaaacaccacatgtccaggtaacagtgacgtacagtgaagggaagagcttcattcactgatgtcaactcttgcttggggccacttcctttttcacagagcaaatgattctttgaagtccaactctacgtggcgcacccaaag

SEQ ID NO: 480719 - DNA, 636 bp, Homo sapiens
ccctggcttctggtgcacatagtgtgtctgcagcagctctgctctgccatgactccacattttatgtctgttagtagcttgggagaagttggagtggggttaagaagacatattctgtgggctaccctccagcttactcctccattagacaattaacaatgtactgaactgatggggtcagattccaagacaccaattggaccacattttctagtggtcaaagtcactgtsggtggcaaaagtcacaagccacaaacttagatgtggctttctctgtgatggcaaaaggaatgggctgagccagagttgtctctccgggaagccttgcccatcttgctttccacctctctccctctctgtgagtacgagcgtggcaggcttatagatcagccagctggggaaggagttagactcaaggcagagaagcagcctcacttaggcccggagtctggtcatggactccagtttggtttaccagaaaccgtacatcagggtaaacaccacatgtccaggtaacagtgacgtacagtgaagggaagagcttcattcactgatgtcaactcttgcttggggccacttcctttttcacagagcaaatgattctttgaagtccaactctacgtggcgcacccaaag

SEQ ID NO: 480720 - DNA, 297 bp, Homo sapiens
aagactaagggaagcactgggaatattagaaaacttctttaatttatggactaaatgtccataaatatggacttaatttatggactaaaatccatctgttgaggccctaactcccattatrgctgtgtttggagaagtggcctccaaggaggtaattaagggtaaatgaggtcataggggttcggggcctgatctgataggatttgagtccctggaagaagagacactggagacctcactcattcactctctgtgcacatgtacaaaggaaaggacatgtgaggacccagaaagaag

SEQ ID NO: 480721 - DNA, 569 bp, Homo sapiens
acaacaagaaagacagactaaaatataaaatcataactgcatataaagttggaattgagtacaatatactaagcttcttgaactgtctgggagttatgcaaatatactgagtttaactttgataagctatgtatgtacaaaaaacatacagaataccaactaaaaagtaaaaaatgcatataagttgtaaactaggaaaaagaaacattagaaaataatcagtccaaaggaagatgagtaaaaaaaagtataaaaaatataaaatgtataattaatccaaattaatgtaaacagactaaatattccagttatagatcaggcataatccagctataggctctttataagaggcacccatagaaaaactygagaaagttaacgttaaaagtataaattaggatatatctagcaaaaaataaccaaaagaaaactgacatattaatatcagaaaaataggaaaaacataagcgctaaagggaatcactttacgatgacaaatgttcaatatatcaagaagagataacattctgaacctgtataaataaaacaaatgaacaaaataccatttt

SEQ ID NO: 480722 - DNA, 601 bp, Homo sapiens
ttatccattcccaaagcaggtggctggccagattgggaggcaacagtgagcatggatggcccaccaaggatggggaagccagggcccaacctattcagccagtcctctgcccacattcctgrcccaaaaccttcacacccttctgttcctctccagttacactggcttcctgccccatacccccaaataaaacaaagtcaggtgttgctacaagcaaccttgcagggtcccagggcaccaccctccaatgggcaaggatcctccttccttgaggtgtgagcaacctcaaggggagtaacctaccccagtccaaagccccctctgccaagtctcttcagtgacaactcactccttgtcaagttaaagacatccctgattgggagaaagttcttcactaatttcagtttcccccaaatatgggacagtgaaccagacgcctctcttactttcatgacacttccttgaatgtgatgatgatcctattccttttgggacaccatctctcccctctaggtccacccaaatctgttggtgcaataataataataataataataataataataataataataataataataataataatggcagtggt

SEQ ID NO: 480723 - DNA, 601 bp, Homo sapiens
ttatccattcccaaagcaggtggctggccagattgggaggcaacagtgagcatggatggcccaccaaggatggggaagccagggcccaacctattcagccagtcctctgcccacattcctgacccaaaaccttcacacccttctgttcctctccagttacactggcttcctgccccatacccccaaataaaacaaagtcaggtgtygctacaagcaaccttgcagggtcccagggcaccaccctccaatgggcaaggatcctccttccttgaggtgtgagcaacctcaaggggagtaacctaccccagtccaaagccccctctgccaagtctcttcagtgacaactcactccttgtcaagttaaagacatccctgattgggagaaagttcttcactaatttcagtttcccccaaatatgggacagtgaaccagacgcctctcttactttcatgacacttccttgaatgtgatgatgatcctattccttttgggacaccatctctcccctctaggtccacccaaatctgttggtgcaataataataataataataataataataataataataataataataataataataatggcagtggt

SEQ ID NO: 480724 - DNA, 601 bp, Homo sapiens
ttatccattcccaaagcaggtggctggccagattgggaggcaacagtgagcatggatggcccaccaaggatggggaagccagggcccaacctattcagccagtcctctgcccacattcctgacccaaaaccttcacacccttctgttcctctccagttacactggcttcctgccccatacccccaaataaaacaaagtcaggtgttgctacaagcaaccttgcagggtcccagggcaccaccctccaatgggcaaggatcctccttccttgaggtgtgagcaacctcaaggggagtaacctaccccagtccaaagccccctctgccaagtctcttcagtgacaactcactccttgtcaagttaaagacakccctgattgggagaaagttcttcactaatttcagtttcccccaaatatgggacagtgaaccagacgcctctcttactttcatgacacttccttgaatgtgatgatgatcctattccttttgggacaccatctctcccctctaggtccacccaaatctgttggtgcaataataataataataataataataataataataataataataataataataataatggcagtggt

SEQ ID NO: 480725 - DNA, 590 bp, Homo sapiens
gtggtttacctgaggtccagggcagggcctctggccatgcttccgttccatagaccactgctccaccagcggagagtgctgccagaacttccttcttgggaagagaggtgctctccagaactcccgactactgattaatttaggcatagggaaacctgtggtcacgccctagacctcatcaaacccctccccaggcaggccctaactcacaggctgccgcgggcacttcccatcaccacctgtgccccgcagggtctccttctccaaccaccagggaagagagtgagacttcctggtccagcccatgaccgtcccccccagccccgctgctctacatgtaagtgaacgctgccgtgagtgctgcaggygccagtgatgactcaggagggcaacagcagagcccccagcgtgccctctggtgtcacatttcctgggtccagatcttgctctgccacttaggagcagagcccaaccttaggtgggctgctaaggaactggcacgcagaagtactcaatacatatttgttaactgagaaaatgaatgaatgaataggttgtgatgatcacagaacccacctcctagggctgtt

SEQ ID NO: 480726 - DNA, 590 bp, Homo sapiens
gtggtttacctgaggtccagggcagggcctctggccatgcttccgttccatagaccactgctccaccagcggagagtgctgccagaacttccttcttgggaagagaggtgctctccagaactcccgactactgattaatttaggcatagggaaacctgtggtcacgccctagacctcatcaaacccctccccaggcaggccctaactcacaggctgccgcgggcacttcccatcaccacctgtgccccgcagggtctccttctccaaccaccagggaagagagtgagacttcctggtccagcccatgaccgtcccccccagccccgctgctctacatgtaagtgaacgctgccgtgagtgctgcaggtgccagtgatgactcaggagggcaacagcagagcccccagcgtgccctctggtgtcacatttcctgggtccagatcttgctctgccacttaggagcagagcccaaccttaggtgggctgctaaggaactggcacgcagargtactcaatacatatttgttaactgagaaaatgaatgaatgaataggttgtgatgatcacagaacccacctcctagggctgtt

SEQ ID NO: 480727 - DNA, 550 bp, Homo sapiens
ccttttgattctctgggtgatgtgggatcctctccttcatgtctggctgaaacgtctcatagtctagggactttcgttaataatatgttatccatctataacacaatccatataaactgatgaagaaagaacaggataactttaattaaaaaaagaatcccatttggaaaagagaagagtgggaaacaacccacagtggccattagtctatgacagtatcattcctgctggacagaagtaatggggactagattccagtagtgaattctttggatggtcatgctggctgctcaaggtcttctatttaggaagctatactttgcccactcttttccttggctccatctgggaggcagtatgctattagggttaagagtaaaggctttgsagtcagaatgcctgggttctaatgctggatttgctacctttttttttttttttttttttttgagacggagtctcactctgtcacccaggctggagtgcactggcacacactcggttcactgtagcctctgcctcccaggttcatgtgattcccctgcctcag

SEQ ID NO: 480728 - DNA, 581 bp, Homo sapiens
accccaatgtacattcagcacagcaatacaggtaagtgacttgaaaattactcacaaacacacattcatattctctgctaaggaataatttcttaaagaattttgaaagtccataattaaattagaaaggaaattagatgacttatttttactttgttttatccaaaattatttatttacttaacatttattgaactcttactgtgtgccaaacagcatgttttcactaagttcaatataattcatgagagaataaaatatcctcaaggaagaartcacagtgattcctaaggtgctttcatcataaaatttgcaaaacaagcaaaatggataagatattgttaataaaatattttaaatctgagttttaaagcaaagaaaaattaaagagatactaccttaacaattttttatactgccactgaaaatatttcagaattttatcccaggcattttttttttctgtagtaaacagaacagaacttagctttccagtgcatttaactgtgaagatgcaactaatctggtaactctagattatctgaaggtagatgatctaaatcattgtcacacttaattcc

SEQ ID NO: 480729 - DNA, 424 bp, Homo sapiens
tgaggtcccaaatattaaaagttaaaagctataaaagtacagcttttccttgtgattttcaaacttttaaaacccagcttaatctctcatgctgacaagcctataatttgtaaatggaaattataattttgcccctcttccctaaaatcctaatctctctccccttctacccactctccatttcactgccaatttcctggctttccgattgccacagccccaaccaggtcagccaagagcaaaactgaatawaccaccgaacactgaattgcaggagtgtccataaaagcttgttgcatagggcagtgaaggaacagcttccaattccaaaaaaaaaaaaaaaaaaccacaaaaaaacaaaaaaaaaaactctcttaaaggggcagcttgcaggagagcggcacacatccatttttgggacatg

SEQ ID NO: 480730 - DNA, 624 bp, Homo sapiens
tagcataaccttggagtgggctaaagaaagtatagtgaagtaagggagatttaccaccttactggaactaaaagaggtttgaggacctatattcagagtggaggaagagatggtcaaacatacttccatctatcaaggataaattactcccccrtcccaacctctcatacatgcataaaatatcaaattatgtggtgttgagcaggaagataagcaaggaaaagtccaggaggaaacctttggtagggaaaaccatggcgaatagacttgggaactatatacacagatgcccaattggtttctttttcttgcattgtatttcccttattccaccctcaaagctttagaaagtattgctaaaatttcagtcttatgtttgctgttttgggtaaaataaaaagtggagtatgtggttaagttttcagtctgttgtttcctgatctgagtagattaaagggaggagcttagagtgaggggacaggggagagtcacagcaatgtggagaaggaaggcaagagtgagccaacaagggaggccaagcagagacaccagagacagataaccacacaaaaactctgttatttagtaggagttctatcctgcggtaactggacatacagtggc

SEQ ID NO: 480731 - DNA, 624 bp, Homo sapiens
tagcataaccttggagtgggctaaagaaagtatagtgaagtaagggagatttaccaccttactggaactaaaagaggtttgaggacctatattcagagtggaggaagagatggtcaaacatacttccatctatcaaggataaattactcccccatcccaacctctcatacatgcataaaatatcaaattatgtggtgttgagcaggaagataagcaaggaaaagtccaggaggaaacctttggtagggaaaaccatggcsaatagacttgggaactatatacacagatgcccaattggtttctttttcttgcattgtatttcccttattccaccctcaaagctttagaaagtattgctaaaatttcagtcttatgtttgctgttttgggtaaaataaaaagtggagtatgtggttaagttttcagtctgttgtttcctgatctgagtagattaaagggaggagcttagagtgaggggacaggggagagtcacagcaatgtggagaaggaaggcaagagtgagccaacaagggaggccaagcagagacaccagagacagataaccacacaaaaactctgttatttagtaggagttctatcctgcggtaactggacatacagtggc

SEQ ID NO: 480732 - DNA, 624 bp, Homo sapiens
tagcataaccttggagtgggctaaagaaagtatagtgaagtaagggagatttaccaccttactggaactaaaagaggtttgaggacctatattcagagtggaggaagagatggtcaaacatacttccatctatcaaggataaattactcccccatcccaacctctcatacatgcataaaatatcaaattatgtggtgttgagcaggaagataagcaaggaaaagtccaggaggaaacctttggtagggaaaaccatggcgaatagacttgggaactatatacacagatgcccaattggtttctttttcttgcattgtatttcccttattccaccctcaaagctttagaaagtattgctaaaatttcagtcttwtgtttgctgttttgggtaaaataaaaagtggagtatgtggttaagttttcagtctgttgtttcctgatctgagtagattaaagggaggagcttagagtgaggggacaggggagagtcacagcaatgtggagaaggaaggcaagagtgagccaacaagggaggccaagcagagacaccagagacagataaccacacaaaaactctgttatttagtaggagttctatcctgcggtaactggacatacagtggc

SEQ ID NO: 480733 - DNA, 620 bp, Homo sapiens
agccgctcgcgtcgccgccgccccctagccgccagcgctcggccgctggctgcgctaggacccgcggccgccggccgccgagcgcgggagggcaggcaggggcaggagccggagggcccggggcgcggcgcggcatgtagctgcgggctcccgcgtccgcgtgaggctgtcggcccggggccccgccatggctgggatggacagtggcaacctgaagaccgcgaggctgtggcgggacgccgccctgcgtgccaggaagctgcggagcaacctgcgccagctcacgctyaccgccgccggggcctgccccggggccggggccgacgcgctcgagtcccccgcctccccccagctcgtgctgccggccaacctcggggacattgaggcactgaacctggggaacaacggcctggaggaggtacccgaggggctggggtcggcgctgggcagcctgcgcgtcctggtcctgcgcaggaaccgcttcgcccggctgcccccggcggtggccgagctcggccaccacctcaccgagctggacgtgagccacaaccggctgaccgccctgggcgcggaggtggtgagtgctctgagggagctgcggaagctcaacctcagccaca

SEQ ID NO: 480734 - DNA, 575 bp, Homo sapiens
aaagttttgggattacaggcatgagccatcactaccagccgtggtgagctttgtttaaccaagcatttttcaaacttattgactgaagaatctttatgtgtgtgtgtatgtgtgtgcatatgtaagaagtawcatccgctggagctggtattgtgcagaaaatatgttgagaaatataaaacagatatctggcttgtgttcctctatatagtcttttttgactgagaatgctttatccttgttgttacggatattttcactttgtttatttctattttggtctgaatcatgagtgtagttgatccttgaacaacatagatttgaactgcttgggtccacctccacgccacctgtgcatacggagggctggctcatctcatatgcaggtcccgagggccaacttcaggactttatgcatagattttggtgtgctggggatgggggccctagaaccaaaccccccatatatataccgagggaggactgtctatttttgttttttacctgtgaggccatcgccacaatgaagagagtatcccccaaaaggcatatttttaatatagttgtaattatag

SEQ ID NO: 480735 - DNA, 575 bp, Homo sapiens
aaagttttgggattacaggcatgagccatcactaccagccgtggtgagctttgtttaaccaagcatttttcaaacttattgactgaagaatctttatgtgtgtgtgtatgtgtgtgcatatgtaagaagtatcatccgctggagctggtattgtgcagaaaatatgttgagaaatataaaacagatatctggcttgtgttcctctatatagtcttttttgactgagaatgctttatccttgttgttacggatattttcactttgtttatttctattttggtctgaatcatgagtgtagttgatccttgaacaacatagatttgaactgcttgggtccacctcsacgccacctgtgcatacggagggctggctcatctcatatgcaggtcccgagggccaacttcaggactttatgcatagattttggtgtgctggggatgggggccctagaaccaaaccccccatatatataccgagggaggactgtctatttttgttttttacctgtgaggccatcgccacaatgaagagagtatcccccaaaaggcatatttttaatatagttgtaattatag

SEQ ID NO: 480736 - DNA, 575 bp, Homo sapiens
aaagttttgggattacaggcatgagccatcactaccagccgtggtgagctttgtttaaccaagcatttttcaaacttattgactgaagaatctttatgtgtgtgtgtatgtgtgtgcatatgtaagaagtatcatccgctggagctggtattgtgcagaaaatatgttgagaaatataaaacagatatctggcttgtgttcctctatatagtcttttttgactgagaatgctttatccttgttgttacggatattttcactttgtttatttctattttggtctgaatcatgagtgtagttgatccttgaacaacatagatttgaactgcttgggtccacctccacgccacctgtgcatacggagggctggctcatctcatatgcaggtcccgagggccaacttcaggactttatgcatagattttggtgtgctggggatgggggccctagaaccmaaccccccatatatataccgagggaggactgtctatttttgttttttacctgtgaggccatcgccacaatgaagagagtatcccccaaaaggcatatttttaatatagttgtaattatag

SEQ ID NO: 480737 - DNA, 616 bp, Homo sapiens
tgtgagccaccacacccagcgtatatttttgttttgtaawttgggcaaccttatacaatgcccatgacttacaaaggattttttgctcctaaatcagtgtaatttaataatgtgaacacaactaaggcaaatcaaggtgttcatggagttggttggtgtcttttatggaatgcaacatgggaattggaaatagtaattatccaccttcaccagtgtgttagtgagtatggaccatttaacctacaacagttggataaccttgacaatagaaataggtagctaagccaggggtggtggctcctagtactttgggaggccgaagtagggggatcacttgaggtcaggagttcgagactagcctgcccaacatagtgaaaccctgtctctactaaaaacacaaaatttgccaggagtggtggcgcatagctgtaatctcagctactcaggaggctgagacaggagaatcgcttgaaccctggaggcggagtttgcagtgagctgagattgcgccattgcactccagcctgggcgacagaacaagactccatctcaaatatatatacgtagctaggacctgacctaatggttgtacccacactgtttgccttgtacgtgc

SEQ ID NO: 480738 - DNA, 659 bp, Homo sapiens
aaaaatatttgaaataaaaatttctttggatgggattgctagcrcattaagcaatgcagagaaaaaggtaaataaattcaaagatatagcaacagaaacaatacaaaatgacacacacacacacagaaaaaagatgaatacagcttcagtaaccacttaaagaggcttaatacttcaggaccacttgaagaggcttaatactattgacctaaaaggtagaagctgaggcaaaattaatataactagagagtttatttggtccaagtttgaggattgcaacccaggagcatagaattgaagttgtgctgaatccatctactcagaagatatgccagtttggaagttaagtgaacacttagtaaccaatcataattgtcttaagtcttgcccattctagattatttgctttgttaaataggcaattgagatagggcataattccaataacaataatctttgatggggttaagtagccctttctaaccatacatacctccatctcagcttctatctcaagaaacaactcttttgactttgtttctttgacttctagaactagtgcagcagcatcaagaaattagacctgccataaataaaaagacccagaagaagatactctaataagtagtgaggcttttgtccatgaagcctatgatgag

SEQ ID NO: 480739 - DNA, 606 bp, Homo sapiens
tgtcagtgaagatcaatgtattgttagacagcagggttagtaaattactctaggctgcactaaatatgtgactttcacatagcaaaatgccttttgtttctaagccgtctcccattgctgcctgatgccacgtgttagataattccatatgtttaggtctgtatttgagcaacctgctctgttctcttggtctctggtatctgttcttatacccttcccacactgctttctattactcagctctgcaatatgtcttcatatcttataaaacaagttcctcctctttactcttctttttcaatactgacttagctatttgtggatatttaatctttcatgtatactttaggacaaattttttgctcttcaaaaaatccaatccaatccaatccaaaaaattcattaagattgaattcactcgattgatttgaggagaaatgacatattaatttatcctcttgtaatatagaactgctaattcagattgtcttttatgaygatctttaacatttcacaattttctccatagatatcttgtacattcgtaaccaagaaatcctagatacattatgagttttttcccattatgaatggtaaattatttta

SEQ ID NO: 480740 - DNA, 606 bp, Homo sapiens
tgtcagtgaagatcaatgtattgttagacagcagggttagtaaattactctaggctgcactaaatatgtgactttcacatagcaaaatgccttttgtttctaagccgtctcccattgctgcctgatgccacgtgttagataattccatatgtttaggtctgtatttgagcaacctgctctgttctcttggtctctggtatctgttcttatacccttcccacactgctttctattactcagctctgcaatatgtcttcatatcttataaaacaagttcctcctctttactcttctttttcaatactgacttagctatttgtggatatttaatctttcatgtatactttaggacaaattttttgctcttcaaaaaatccaatccaatccaatccaaaaaattcattaagattgaattcactcgattgatttgaggagaaatgacatattaatttatcctcttgtaatatagaactgctaattcagattgtcttttatgatgatctttaacatttcacaattttctccatagatatcttgtacattcgtaaccaagaaatcctagatacattatgrgttttttcccattatgaatggtaaattatttta

SEQ ID NO: 480741 - DNA, 478 bp, Homo sapiens
tgttttttgttttgagacagagtcttattctgtctcccaggttggagtgcagtggtgctcactgcagcctcaacctcctgggctcaagcaatcctcccacytcagccacctgaatagctaagaccacacgtgggcttcactatacctgactaatttttaaattttttgtagagatggggtctccctatgttgcccaggctagtcttgaatgcttgggctcaagcaatgctcccacctcggcctcccaaagtgccgggattacaggtgtgagccaccatgctcagccaccttaacaatctatacaataatctggtaatttccctttggagttggcaatacaattgcagaaaggggttggatattaacagaaactatttcaagtaattgggaacaattggcacttgcacatcttcacatttttcatttgcaaggagagtaataaaaccccaagtaattacactcaaatggccctccagct

SEQ ID NO: 480742 - DNA, 587 bp, Homo sapiens
ctggagacctaaagtacagcatggttactttagttaatgtgttataaaaaattcagaaaattttgagtaagcagattgccctccataatttgggcgggcctcattcaataaattgaaatcctggatagaaccaaaattccaggctcctggagcaagagtgaragtggcaccactcactattatgcctagtgacccactagaaatcctcctgcagactgcatttcgacttcatctgcaccatcagctctcctgggtctctgcttgatgacccacactgattatgtggacatgccagccctcataatcacatgagtcagtttcttataataaatctcttaatttattcttaatttatataaattgtatgtataaaatatatacatattatgtatatattcactttacatatgtatatacaccagatgcacatacaaacacatgcactacctaatgtttctatttctctggaaaactatgactaatacaatcagaaataaataaatgaactaaaaatgtctcaattttttccaaaattgatgataactataatcccaaagagccaagaatatcaacaaactccaaacaca

SEQ ID NO: 480743 - DNA, 642 bp, Homo sapiens
tggacagcaggtagagaagttgcaaattgagcagtaatttcaacctcctattcaggattctctgaatgaatgctgtagaaatgatagggactgtcattttgagccttatttataatcactatacaatctcagccattcaargcaactgtttatatgatcgcaattgaatattactaattaaaacttataaaatgggcatgccactttaaaacaaaaaagtcccacttatgagtgagaacatgtggtggtttttattttattttaaaataaaaagtcttgtacttttcttctttggtatctaaaaatctatattttaattggtggaaaattcttaaaaatgaatgactattttctcataaactaataaaagagcactaagaattacattaacattgtatattattccaaaacatttgtgagtgcagcctgaaatttcctatgaaaatatgcttgtcttttctccaatgtggagtgaaagacaaaccttgctagagaagaggagattcaattctgaaatatttgtactcaatgtatatttaacaatgtaaattgtagcctggcttaatagtttaaaacacatttaaaattatgttatggctttatgttctgagattattaatttgctgaaaatgtgtattttta

SEQ ID NO: 480744 - DNA, 600 bp, Homo sapiens
tggacagcaggtagagaagttgcaaattgagcagtaatttcaacctcctattcaggattctctgaatgaatgctgtagaaatgatagggactgtcattttgagccttatttataatcactatacaatctcagccattcaaggcaaytgtttatatgatcgcaattgaatattactaattaaaacttataaaatgggcatgccactttaaaacaaaaaagtcccacttatgagtgagaacatgtggtggtttttattttattttaaaataaaaagtcttgtacttttcttctttggtatctaaaaatctatattttaattggtggaaaattcttaaaaatgaatgactattttctcataaactaataaaagagcactaagaattacattaacattgtatattattccaaaacatttgtgagtgcagcctgaaatttcctatgaaaatatgcttgtcttttctccaatgtggagtgaaagacaaaccttgctagagaagaggagattcaattctgaaatatttgtactcaatgtatatttaacaatgtaaattgtagcctggcttaatagtttaaaacacatttaaaattatgttatggctt

SEQ ID NO: 480745 - DNA, 297 bp, Homo sapiens
agtcatcgcccaaacaaactttgtggtatgaaactcatcagtttctttaatcaggtatatgatgaggtatttatggagaaccaaatctgcttttgagaaaaatactttgctctttgattttcatataaaaatgttcctttgctaccttcaagcctaatcctaggcaatgctactgaatttctatattayaaatacatatcaataaacttaattttttacagtctgctgtgtaatttctgtgaatggctaacaaaagttagagttaagttacagtcctgggttataaaatcgcattac

SEQ ID NO: 480746 - DNA, 604 bp, Homo sapiens
ccttaagcagcaggcctaaagctaagaaaaaataaatagaacacacagatcaatgaagatgtttcagggctctgacagagaaactgtggataaatttgtgatacgtaaacagaaaaatataatcaactaaaaaaaggaggcaattcttatattaagaagcaaaaagtrtacacgaaaggaaataagatgaataaattttaatacacagtatgaaattaatagataatgtcaaaaattgaacactcaagaatataagtcaattaggattaagatgacagatagcaagcaggactagcttgcagctcccactcagacagacagaggagcatgtggagacttacatggtgaactttcgctgcaagaactactgcaggaacatactaggaaagccaaaagaatccacagaccctttgaaggaactgggtcaccactgcaggctccctgagataccaaaaaacttaagtccgcttgctttctcaacagaaggctcatggtctggggcaagttctcagccctggtcactggctgcctggaaatacatttggtgctgttggggcatggtgggagtgagaccagcctttaggactgcagactacataggagg

SEQ ID NO: 480747 - DNA, 604 bp, Homo sapiens
ccttaagcagcaggcctaaagctaagaaaaaataaatagaacacacagatcaatgaagatgtttcagggctctgacagagaaactgtggataaatttgtgatacgtaaacagaaaaatataatcaactaaaaaaaggaggcaattcttatattaagaagcaaaaagtgtacamgaaaggaaataagatgaataaattttaatacacagtatgaaattaatagataatgtcaaaaattgaacactcaagaatataagtcaattaggattaagatgacagatagcaagcaggactagcttgcagctcccactcagacagacagaggagcatgtggagacttacatggtgaactttcgctgcaagaactactgcaggaacatactaggaaagccaaaagaatccacagaccctttgaaggaactgggtcaccactgcaggctccctgagataccaaaaaacttaagtccgcttgctttctcaacagaaggctcatggtctggggcaagttctcagccctggtcactggctgcctggaaatacatttggtgctgttggggcatggtgggagtgagaccagcctttaggactgcagactacataggagg

SEQ ID NO: 480748 - DNA, 604 bp, Homo sapiens
ccttaagcagcaggcctaaagctaagaaaaaataaatagaacacacagatcaatgaagatgtttcagggctctgacagagaaactgtggataaatttgtgatacgtaaacagaaaaatataatcaactaaaaaaaggaggcaattcttatattaagaagcaaaaagtgtacacgaaaggaaataagatgaataaattttaatacacagtatgaaattaatagataatgtcaaaaattgaacamtcaagaatataagtcaattaggattaagatgacagatagcaagcaggactagcttgcagctcccactcagacagacagaggagcatgtggagacttacatggtgaactttcgctgcaagaactactgcaggaacatactaggaaagccaaaagaatccacagaccctttgaaggaactgggtcaccactgcaggctccctgagataccaaaaaacttaagtccgcttgctttctcaacagaaggctcatggtctggggcaagttctcagccctggtcactggctgcctggaaatacatttggtgctgttggggcatggtgggagtgagaccagcctttaggactgcagactacataggagg

SEQ ID NO: 480749 - DNA, 600 bp, Homo sapiens
aatccttagaatcactgagaaagcacattcggagggaagcttcacagtgactctgcagtgagggccgtatcagtgacagtccctcccaagcctgtctcaccggagacgcctctgcctccagggtttttgctacctccccgctcctcagccctgagctgagggtaaggacagtgaggacctttgccaaagaatgggctttaaggaatgggacctaatgtctactgcagaccctgtgaaatggctgaaacaatctgctacccgaagccccaaaggctttgagtagggaaccataatggccgcactcacttccaaccckgggaaaggtggacatctgaatccccaagtagcgggaacgaccacacttgggggagcgggggttaaggagaaatgagctccttgccggtgcagggtgacagcggggaggaagcctcaggcagaaaagtcgccgttcacactctcccttctctccttcctctgcctccttccaccccctctatccccaccactcgccagttaccggtcgccgctcacctgatggggcgcgaggtgcagagactgtaccgaccgaggacccagaggctgtcaccacggaggggaagt

SEQ ID NO: 480750 - DNA, 600 bp, Homo sapiens
aatccttagaatcactgagaaagcacattcggagggaagcttcacagtgactctgcagtgagggccgtatcagtgacagtccctcccaagcctgtctcaccggagacgcctctgcctccagggtttttgctacctccccgctcctcagccctgagctgagggtaaggacagtgaggacctttgccaaagaatgggctttaaggaatgggacctaatgtctactgcagaccctgtgaaatggctgaaacaatctgctacccgaagccccaaaggctttgagtagggaaccataatggccgcactcacttccaacccggggaaaggtggacatctgaatccccaagtagcgggaacgaccacacttgggggagcgggggttaaggagaaatgagctccttgccggtgcagggtgacagcggggaggaagcctcaggcagaaaagtcgccgttcacactctcccttctctccttcctctgcctccttccaccccctctatccccaccactcgccagttaccggtcgccgctcacctgmtggggcgcgaggtgcagagactgtaccgaccgaggacccagaggctgtcaccacggaggggaagt

SEQ ID NO: 480751 - DNA, 626 bp, Homo sapiens
ggctatagaaacagcctctgagctggctagcctgtctgtggggttgcccgtttcccataaattctctacactgatccaggggactttgtgaatcacatgctgataaagtcctccttgaaaacttccaatggctcacactgcccacaggacagaatacaagctttcttacactgccataaccctactactatatatgctgaacccccattacttctgaattacttttttttttatgagacggactccagctcttgtcaccccaggctggagtgcagtggcacgatctcagctcactgcaacctctgcttcccgagttcgagcaattctcctgcctcagcctcccgagtagctgggactacaggcgggcaccaccacgcctggctattttttttatttttagtagagccggggtttcaccatcttagccaggctggtctcgaaytcttaccgcaggtgatccgtccacctcagcctcccaaagtgctaggattacaggcgtgagccaccgcacccagccctgaattacttttgttctcaacattctcactccaataattataaaataaatataaacaaactattgagtctcatttttaagcttcttttaaaatttgtggtaaaataca

SEQ ID NO: 480752 - DNA, 411 bp, Homo sapiens
gtaagattcaaaaggttgatataatgtgcttagaacagtgtcttaaacaaaatacgaaaatgttagcttttactcactctaataaattccttctttgcacaggtaaaatttcagattttgcatttctacatgtgtctgttttttataaactttatgtgtcattatcattgcatattttctgcaatttaatgtggttactaataatctgaaactttctaaagaaaaattaagaagagtaaaaaaaaaaaagttatcattctttccctaaaatgtaaagaaaatagcagcacctgaagttgttttaagctctttgacttaagaaaaaaygagaaactggtaacataatgttattgggaaaaattgctaaaaatgtcaaatgctatggacatttttctacttacaggaaactgt

SEQ ID NO: 480753 - DNA, 607 bp, Homo sapiens
ctgggttcctgtagatctcagaggagatggggaatctcttcctccactgcctttgccatcactgtcagccatcaaacgtttgaaaatcaccccactatgctgtagctgctattgcttggcctcccgccctgatgacagttaaaacctgcattactcatcgctgactatcttgcgcttctctttggcacccaacatcaacctgcttcacctccttattttttcaaccatcattcaagtgtagactcttttgggataagagttgttttgtcttattctcctatcaataatgctttttccttctgttccttgatcccgtctctcttctgatccttctaaactccttctctaagtccaccattccatgattaatgagctcyagagatgactaaactctttgcaaagtactttgcacatcttggatttaaataaaatttcattctccctgaaagaccttgattaacattttcttctttcaagcaaggctatgtattctcccatttcttacctcttagcattgacaggcaggatttgaacactctgtgctcttcatcatcattttcagacccttattcatcagccttctcataaaactgtcatgcatcttcac

SEQ ID NO: 480754 - DNA, 625 bp, Homo sapiens
aaataataaggatctttgggacaacaaagctagacaaagtattctttaaaggtaatttgcccaagcgattaagaatatgtgaagaagtatttatccatttgggacctgccagtcaatttacttagcggtgtgattatggttattgctcattggagaacagcatggttccaaaggcacagttgctgttttactcactaaaaattggttagtttgaatttcattataaaatccttacttgattatctatcactcaatgtttggtcataaagtgcagtcttaaatcaccgtttctccaagcggtttccttggactatcacagccatacaacactgtgagctaagaaaacttccttgggtaggcgaatttgtgaaactgcttattgtatcacactcgtggagacaaacaatgctcattaaaatgttaatagctctgaaaaatcctgcagtatagaagtttaatttattcatcaaatttttacgtatctgtttaactccccagsaactgatattttatgcaatatattttgtgaaaataaggttttagtcagttattctgagatgcttctagtaattacacaatattattcttctttatatagcttcttaacctattctgggttacatcc

SEQ ID NO: 480755 - DNA, 625 bp, Homo sapiens
aaataataaggatctttgggacaacaaagctagacaaagtattctttaaaggtaatttgcccaagcgattaagaatatgtgaagaagtatttatccatttgggacctgccagtcaatttacttagcggtgtgattatggttattgctcattggagaacagcatggttccaaaggcacagttgctgttttactcactaaaaattggttagtttgaatttcattataaaatccttacttgattatctatcactcaatgtttggtcataaagtgcagtcttaaatcaccgtttctccaagcggtttccttggactatcacagccatacaacactgtgagctaagaaaacttccttgggtaggcgaatttgtgaaactgcttattgtatcacactcgtggagacaaacaatgctcattaaaatgttaatagctctgaaaaatcctgcagtatagaagtttaatttattcatcaaatttttacgtatctgtttaactccccaggaactgrtattttatgcaatatattttgtgaaaataaggttttagtcagttattctgagatgcttctagtaattacacaatattattcttctttatatagcttcttaacctattctgggttacatcc

SEQ ID NO: 480756 - DNA, 468 bp, Homo sapiens
actgaacccaaatggctaatggattttctttcccgttacatgctctctaatttatgatgctttgcttggggggaaaatgagaggtgggagtctgtttacggaacatggaagtccttttgcagaggtacaagagtggaaatggctgttccccagcctggctctctgagtcagacctgacatccacagagagagcactgcagtaactgcaaacgcttctgttttgattgtggtaattggaacaatcagggcacaaacygcaaggtcactggcaagggtagcagcaggcatgattcctcccttagtaattttaaagcagcagatttcaaaagggaaaaccaagcagatgaaagtgagcagatttgttcttcagcacatgtgagatacccttggagatgccaataaatcactggagagactgtgaaggaggcttaggccctgcagatgaagttagtgatggagggaaatcgt

SEQ ID NO: 480757 - DNA, 575 bp, Homo sapiens
ctgccctctctggattcggtcatattccctttcctattcttcctaggcctataaaccttctcactggatcttctatgacacttaacctgcctttcatatttggtgtctccatgtccacctgtgttatattctatgtaatatcttccagttcagaatttctttctatagttgtaatgattggttttgcatttctagattctagaagttctatttggctctttatcaaatctatttggtaatttattttactctgtgtttttattttatattttatctgcttattttgtgtctttaaacatacaaaacatrtttcttttatatgctgtctgatagcagttgtatctgaagtcttcatgtgtctgatctgcagatagctgttttcgttgtctttcttttctatttcttttagtgttctgtgcttttatgaatgtgagattatatgccttggagcttcatttatgggaattttctaaatcctggaataaacatgggtttctccaaatgattgggttttcctctgccaggtccctcagtgaactatgtgtcaaggatcgctgtaaataacaacatatcat

SEQ ID NO: 480758 - DNA, 432 bp, Homo sapiens
ctgggaccacaaggaggccccttactcagatattgaggaccacgtggagggcctggatgacgaggaggagggtgagcatgaggaggagtatgatgaagatgctcaggtagtggaagatgaggagggcgaggaggaggaggaggaaggtgaagaggaggacgtgagtggaggggacgaggaggatgaagaaggttataacgatggagaggtagatggcgaggaagatgaagaagagcttggtgaagaagaaaggggtcagaagcgaaaatgagaacctgaagatgagggagaagatgatgactaagtagaataacctattttgaaaaattcctattktgatttgactgtttttacccatatcccctcccccctccaatcctgccccctgaaacttacttttttctgattgtaacattgctgtgggaatgagac

SEQ ID NO: 480759 - DNA, 593 bp, Homo sapiens
tagatattcattgttcatttaaaaatgtctagtatatagtcccaaactagtatttaattaattaaacaaaattaactctgacttcagtaggaaaatgggggaggaatggagtccatagagaaatggggaagagaaaactcaaattcttgtgtttttttaatttttatttttggagacagggtctcactctgttgctcaggctggagtgcagtggcaccatctctgctcactgcaacctctgccttctgggctcaagccatcctcctatctcagcctcctgtgtagctgggactacaggcacacaccaccacatctggctaatttttgtattttttagagaaggagtttcaccatgttgcccaggtcggtctcaaactcctgagctcaagcaatccactcaccttggattacaggctcccaaagtgctgggattacaggcgtkagtcaccatgcccgcccttaattcttgtcattttataggagatgaataatgtcacatatatcccatcctaattcaggaatcctccagactatgcccatgtatctgtttataggcccattttgagtacctatgatatgcaaaaactccacca

SEQ ID NO: 480760 - DNA, 609 bp, Homo sapiens
atttgaaaaaggtcaaacagatttttatattactatattagtttgttttcatgctactgataaagacatactcgaaactgggaacaaaaaaaggtttaactggacttatagttccacatggctggggaagcctcagaatcatggtgggaggcgaaaggctctttttacatggcagcggcaagagaaaatgacaaagaagcaaaagcagaaatccttgataaacccgtcagatctcataagactttttcattatcatgcaaacagtaggagaagggcctcccagggtccctcccacaacttgtgggamttcttggagatacaattcagttgaaattttctttgggacacagccaaactctatcaattacatatttgaatattttaagagaatgaattgaggcatttaacctgatataaatagactgcataactctgcctgccttgcagacatttaattgtttattaatatgtagcaagagaattcacttcataccccttaaaaatccttccaaaatgaataacctatagaattataggttgagcatgtaatttatcatctaagctgggatacttttcagagggaaaggagaaaccagatgtgatggtggg

SEQ ID NO: 480761 - DNA, 675 bp, Homo sapiens
aacccacagactcgtaagcttaggtcttttttgttgtttgccactgaggttttgtagttgtgtgttatagttgaaaatcatcaattgttagaagactttactatacatgctatgttcagtttaaaactcaatattattttgactgagtgaataatgaatacatgaccaaattttaaaaaaggaaaaaattttaaaattgtataattataaaaatataagccattaaagattcttgtaaatttctatgtaraattataaaaataataatggaatcacttaaaaatatatttgaatcttattcactacccatggatagatgatgaaattattttatctaattgctaaattttattatttatgcttttaaaatataaatttaaagttttatatgtttaaaaatacagttcttttgaaaaattatttatattattgtatctatagtctgtgatatagaatggtctaaactggtattataaattggtggcattctgttttataaccaaaatcatcttggttatctagttctgcttctgttttttaataggaatgtttcttatttatcagacttttgggatgatttctgttttctttaattctttattttcactacttttttggtctcctaatgctaagttctctcatatttgagaatgtctgactactgcctttatgtct

SEQ ID NO: 480762 - DNA, 675 bp, Homo sapiens
aacccacagactcgtaagcttaggtcttttttgttgtttgccactgaggttttgtagttgtgtgttatagttgaaaatcatcaattgttagaagactttactatacatgctatgttcagtttaaaactcaatattattttgactgagtgaataatgaatacatgaccaaattttaaaaaaggaaaaaattttaaaattgtataattataaaaatataagccattaaagattcttgtaaatttctatgtaaaattataaaaataataatggaatcacttaaaaatatatttgaatcttattcactacccatggatagatgatgaaattattttatctaattgctaaattttattatttatgcttttaaaatataaatttaaagttttatatgtttaaaaatacagttcttttgaaaaattatttatattattgtatctatagtctgtgatatagaatggtctaaactggtattataaattggtggcattctgttttataaccaaaatcatcttggttatctmgttctgcttctgttttttaataggaatgtttcttatttatcagacttttgggatgatttctgttttctttaattctttattttcactacttttttggtctcctaatgctaagttctctcatatttgagaatgtctgactactgcctttatgtct

SEQ ID NO: 480763 - DNA, 606 bp, Homo sapiens
ttttttactcttttctgcgattttgttgaatattctctaccatgaattactctattcccctggtgataattcatcttcaacttgaatacttatttagtgtaaagtcttggatgttccttcttaattctgttgatatcctcagtaccacctgtcaaagagtggagactaggttacgagattcccagagctaagcctcaaycttctacttctttccttgcctttttaaaaaattattattattttctcctctcattcccctgcccttctgaaatttatggcaaggaattgtttcattttgtttatttaattactggtagtggggtttatttttttcactgagtttaaaaaattttgtcaattttctattgcagttggaagattctgtgcctgttgtcaaggtgacactccccggaattttaaagagaagttttaaagtaggatgctttggctagtatttgcagaaacatatacactttttttacatgataaggaaaacaacagatatttattcttcatcccagggggaaaaaaacccttggaggaataattcagaggcaacatccttaacgggtgatcagtagacacaagactcatcccagtgagcca

SEQ ID NO: 480764 - DNA, 606 bp, Homo sapiens
ttttttactcttttctgcgattttgttgaatattctctaccatgaattactctattcccctggtgataattcatcttcaacttgaatacttatttagtgtaaagtcttggatgttccttcttaattctgttgatatcctcagtaccacctgtcaaagagtggagactaggttacgagattcccagagctaagcctcaatcttctacttctttccttgcctttttwaaaaattattattattttctcctctcattcccctgcccttctgaaatttatggcaaggaattgtttcattttgtttatttaattactggtagtggggtttatttttttcactgagtttaaaaaattttgtcaattttctattgcagttggaagattctgtgcctgttgtcaaggtgacactccccggaattttaaagagaagttttaaagtaggatgctttggctagtatttgcagaaacatatacactttttttacatgataaggaaaacaacagatatttattcttcatcccagggggaaaaaaacccttggaggaataattcagaggcaacatccttaacgggtgatcagtagacacaagactcatcccagtgagcca

SEQ ID NO: 480765 - DNA, 606 bp, Homo sapiens
ttttttactcttttctgcgattttgttgaatattctctaccatgaattactctattcccctggtgataattcatcttcaacttgaatacttatttagtgtaaagtcttggatgttccttcttaattctgttgatatcctcagtaccacctgtcaaagagtggagactaggttacgagattcccagagctaagcctcaatcttctacttctttccttgcctttttawaaaattattattattttctcctctcattcccctgcccttctgaaatttatggcaaggaattgtttcattttgtttatttaattactggtagtggggtttatttttttcactgagtttaaaaaattttgtcaattttctattgcagttggaagattctgtgcctgttgtcaaggtgacactccccggaattttaaagagaagttttaaagtaggatgctttggctagtatttgcagaaacatatacactttttttacatgataaggaaaacaacagatatttattcttcatcccagggggaaaaaaacccttggaggaataattcagaggcaacatccttaacgggtgatcagtagacacaagactcatcccagtgagcca

SEQ ID NO: 480766 - DNA, 583 bp, Homo sapiens
gaaatattggaaactaatataatgaatccacaagatacatttatttatttatttaatttatttcgtggttcagccatcctatcaattaagggaaatattgatagggtggctaaaccatgaaataaataaatgtattgtgtggattcattatatacttgccaaaatttttcggtgtaattaattatgcaaatattttgtctagtcttaacaaacattaaaacttgctcaccatacgtgaaacagtttgccagatttggacagcagcaagtcctatgagggcaaagtggccagggcaaaactcgggggatcayctggaagcactgccttcaggacagagcctcatcaagctaagctcataactatgacgtgcagaagacattgccctagtcatggtttgtgcttgggcatcgcatgagacctggcttgccccagggctgttgggttccatcagggaatatttggcctgtgcaaacaggattttgaaggagatttgaatggaaagcgtatttacagaggtatgggcagagctgtgggaacccagggggatactgaagcctcctggtagcagcagaaagccatcacc

SEQ ID NO: 480767 - DNA, 583 bp, Homo sapiens
gaaatattggaaactaatataatgaatccacaagatacatttatttatttatttaatttatttcgtggttcagccatcctatcaattaagggaaatattgatagggtggctaaaccatgaaataaataaatgtattgtgtggattcattatatacttgccaaaatttttcggtgtaattaattatgcaaatattttgtctagtcttaacaaacattaaaacttgctcaccatacgtgaaacagtttgccagatttggacagcagcaagtcctatgagggcaaagtggccagggcaaaactcgggggatcatctggaagcactgccttyaggacagagcctcatcaagctaagctcataactatgacgtgcagaagacattgccctagtcatggtttgtgcttgggcatcgcatgagacctggcttgccccagggctgttgggttccatcagggaatatttggcctgtgcaaacaggattttgaaggagatttgaatggaaagcgtatttacagaggtatgggcagagctgtgggaacccagggggatactgaagcctcctggtagcagcagaaagccatcacc

SEQ ID NO: 480768 - DNA, 583 bp, Homo sapiens
gaaatattggaaactaatataatgaatccacaagatacatttatttatttatttaatttatttcgtggttcagccatcctatcaattaagggaaatattgatagggtggctaaaccatgaaataaataaatgtattgtgtggattcattatatacttgccaaaatttttcggtgtaattaattatgcaaatattttgtctagtcttaacaaacattaaaacttgctcaccatacgtgaaacagtttgccagatttggacagcagcaagtcctatgagggcaaagtggccagggcaaaactcgggggatcatctggaagcactgccttcaggacagagcctcatcaagctaagctcataactatgamgtgcagaagacattgccctagtcatggtttgtgcttgggcatcgcatgagacctggcttgccccagggctgttgggttccatcagggaatatttggcctgtgcaaacaggattttgaaggagatttgaatggaaagcgtatttacagaggtatgggcagagctgtgggaacccagggggatactgaagcctcctggtagcagcagaaagccatcacc

SEQ ID NO: 480769 - DNA, 407 bp, Homo sapiens
ctgagctgcctctaccgcttgggttgtatctgggaatgatgactgccccaaagcaatatgtgaccagtgaaccacagctctcaactcaagggmaaatgactcagctttgtgaactgattgactggagtagagaattccttgcaaagaacttatatcatctgggtattgtgcttggggctcctgatgtacaggaacaccttttgaggcttcttgctgttttgtttgtgaggtcttctatgcctactgttcctgacgtggaaacactattctcacaggtttcacttttcatcagtacttgtgatgggctttgccatcagttaactaatgcatttgtggaaagaaaacagcccctgagaggaattggcatccttaaaggagctataacaagctgcggatgaatacaaacc

SEQ ID NO: 480770 - DNA, 595 bp, Homo sapiens
gatagcaatacaaaatggactaacacacagcctttacaaaaataatgcatactgtcatgscttttagagtcctaacgagtctcacctactctcagccttatcccagaacagcctgttgacaacacagttgtcaagagtaattctactcaagtttaagttaaaccatactgttttccaaagaggttgcactaatttacattcctgtcgacagtgtatgagttcccttttctctgcatccactccaaaatctgttattttatgtctttttggtaatagccattctagctggcatgagatgctatctcattgtggtttcaatttgcatttctctgatgattagtgatgttgaacagttttacatatgcctgttggctatttgtatgtcttcttttgaaaagtagctgctcatgtccttggtccatttttaggccgcatgacatctctccttaggttgtctagtggcttccagcctcacatgctcctgcctcaggacttctgcatttgctggtgccttacttgaaatccacttttcccactactccctcactacattcatttttttgggttctaatgttatcctttcactgatatcttc

SEQ ID NO: 480771 - DNA, 625 bp, Homo sapiens
ggcattgcactaagaactatatatacatcatgcttattaaacttcacaagcctttgaggaatggactgttataatccccattttacagaagagaaaactgaggctcatagaattgaactaatttatccaaggtcatatgcagtcagcatttgaactcaggtcagatttcagatcctcacttttatcattactggtttaagttgaaatgtggaagtatgaaatagtgggggtgtcagatatgtacctagttaacaatactagcaggcaaagttagataatagacgctctaaatatataagtatggaaggtaaatgtgtgccctttctagaatgactcagtcccagctccatgatagcagctgaaggtgaagaaataagtaactgagaaacaatgatatcccaakatgttacccctcaatttcctttctcccctctatgcatatcctaactcatcacaagcgatcctcactaaagaaaggactagagatggggttcatcacctcatccccatcaaaattccttggtttataaaaactgaaaagatattaagattcctacttgatttttaatagtagttaattattacctagttgtttgcccagtaaagaccaatttttctccttttt

SEQ ID NO: 480772 - DNA, 625 bp, Homo sapiens
ggcattgcactaagaactatatatacatcatgcttattaaacttcacaagcctttgaggaatggactgttataatccccattttacagaagagaaaactgaggctcatagaattgaactaatttatccaaggtcatatgcagtcagcatttgaactcaggtcagatttcagatcctcacttttatcattactggtttaagttgaaatgtggaagtatgaaatagtgggggtgtcagatatgtacctagttaacaatactagcaggcaaagttagataatagacgctctaaatatataagtatggaaggtaaatgtgtgccctttctagaatgactcagtcccagctccatgatagcagctgaaggtgaagaaataagtaactgagaaacaatgatatcccaagatgttacccctcaatttcctttctcccctctatgcatatcctaactcatcacaagcgatcctcactaaagaaaggactagagatggggttcatcacctcatccccatcaaaattccttggtttataaaaactgaaaagatattaagattcctacttgattyttaatagtagttaattattacctagttgtttgcccagtaaagaccaatttttctccttttt

SEQ ID NO: 480773 - DNA, 491 bp, Homo sapiens
ctgtcatgggcggattagtgaaggactcagtggtgaggccccggatgtacccgccaagctgggcgtcaaacactttccattcattttctccaagtcccccctgcttttggtgccttcctcccacctcccaggggtctgctcacatcacactccctggyggtgagtgtaaccctcctattccatgggggacagctcccccaggcagggagacttgtgttttcaactttactgggatttgccatgagaccttccctgtgttcagggctgtgtgccctgctaagtgacacatagctgctttgataaacaaactctaaacattcatgggatactgttttctatcagagtagccctcataaccatctcaggaaatggtcgtaatttttaaaatcagtattccagggacatggatgtttcactcattaaggaaaacgaattcctagtcacagtacattatcctgtggctttccaggaatgatgtcgaccactctcac

SEQ ID NO: 480774 - DNA, 491 bp, Homo sapiens
ctgtcatgggcggattagtgaaggactcagtggtgaggccccggatgtacccgccaagctgggcgtcaaacactttccattcattttctccaagtcccccctgcttttggtgccttcctcccacctcccaggggtctgctcacatcacactccctggtggtgagtgtaaccctcctattccatgggggacagctcccccaggcagggagacttgtgttttcaactttwctgggatttgccatgagaccttccctgtgttcagggctgtgtgccctgctaagtgacacatagctgctttgataaacaaactctaaacattcatgggatactgttttctatcagagtagccctcataaccatctcaggaaatggtcgtaatttttaaaatcagtattccagggacatggatgtttcactcattaaggaaaacgaattcctagtcacagtacattatcctgtggctttccaggaatgatgtcgaccactctcac

SEQ ID NO: 480775 - DNA, 491 bp, Homo sapiens
ctgtcatgggcggattagtgaaggactcagtggtgaggccccggatgtacccgccaagctgggcgtcaaacactttccattcattttctccaagtcccccctgcttttggtgccttcctcccacctcccaggggtctgctcacatcacactccctggtggtgagtgtaaccctcctattccatgggggacagctcccccaggcagggagacttgtgttttcaactttactgggatwtgccatgagaccttccctgtgttcagggctgtgtgccctgctaagtgacacatagctgctttgataaacaaactctaaacattcatgggatactgttttctatcagagtagccctcataaccatctcaggaaatggtcgtaatttttaaaatcagtattccagggacatggatgtttcactcattaaggaaaacgaattcctagtcacagtacattatcctgtggctttccaggaatgatgtcgaccactctcac

SEQ ID NO: 480776 - DNA, 575 bp, Homo sapiens
ttaataagttctccctgctcgttttttgctagtggtagcgttttgagtttactagcaatccatggggagatagagaacgagagagatttaaaattgattgtccaacaaaggggaaaagtaagagcgaggagaggaaaagagagatagagagagagagagagagagagaaagagagagagagagaaagagagagacctttatctcagtactaggacataaatgttctcacrtaggtccccatagaggacagtgtaagatagtggagcaaaaccaatgcagaatttggttgaatgacagagtcagcatagggatatctcagaacaaacacaacttaaagaacatcattttgagggtgaagagttgcaatccatccttggttcatcatgagataaatatcacagtttcttcaagcagatgcctggctttatatatttttgactctttaagctcccttaccatcatcaacaaattagtaaccaaacccacttgattaaacactgagctttatatccattcctttatatttattcctactgctaatgaaagggcgtgggccattatacttgagggttatc

SEQ ID NO: 480777 - DNA, 602 bp, Homo sapiens
ctgcctgtatctctcagaagaccctgcatcccaacgcctcctcctcaataaaactcttttcaagttgtttcacaagggatgctaattctcttcactatctactcccaccatctttcattgtctcataacccaaaagaccccagaaagaagttccaagtctactctgggagaaaactgcctttatgacaaaatattttaggatctcaacaatttatttaccagtgggagtgtggagagcacatataggaatatattcaaaggatcttagatcaaggaagactaataagattattgtgacctattttttttcttttttttgagatggggtctcactctgttgcctaggctgcagtgcagtggcgcaatcttggctcactgtaacctccacctccagrgttcaagcaatcctctcacctcagcctcccaagtagctgggaccacaggcatgtgctaccatgcctggctaatttttctatttttggtagagatggggtttcgtcatgatgaccaggctggtctcgaacttctgagctcaagcaaactgcccatatcagtctcccaaagtgctgggattgtaggcataagccaccacacccagcata

SEQ ID NO: 480778 - DNA, 615 bp, Homo sapiens
gctgcttaaaaagagtgagaaaacaaagagaatagataaatgtactttttatgtaactttatcaaatagaaaattaaatacaaaatgtacacattgcaaataggtaagagtagacatgtaagtatttgttaaatctgaaatgtctattgtatagattgatttatgacagaagacaaaattaaaacaagtaggaagttaaagagaggcaaattttatctcaatttaagaatattttcatgaggcatggtgaaatggtacaggcgtgattacaggctcatgcctgtaatcgcagcactttaggaggctgaggcgggaagatcacccttagtcaggagttcaagatcacatggccaacatggtgaaaccccatctctacaaaaatacaaaaaattagccaggcatggtggcacatgcctgtagtcccagctacttgggaggctgaggcaggagaattgcttgaacccggcaggcggaggttgcaatgagccaagattgcaccactgcactccagactgggcgacagagcragactctgtctcaaaaaaaaaaaaaaagtatacatatactttaaacctctcaaaagcccctctcaattctaaaattctatcattaaag

SEQ ID NO: 480779 - DNA, 615 bp, Homo sapiens
gctgcttaaaaagagtgagaaaacaaagagaatagataaatgtactttttatgtaactttatcaaatagaaaattaaatacaaaatgtacacattgcaaataggtaagagtagacatgtaagtatttgttaaatctgaaatgtctattgtatagattgatttatgacagaagacaaaattaaaacaagtaggaagttaaagagaggcaaattttatctcaatttaagaatattttcatgaggcatggtgaaatggtacaggcgtgattacaggctcatgcctgtaatcgcagcactttaggaggctgaggcgggaagatcacccttagtcaggagttcaagatcacatggccaacatggtgaaaccccatctctacaaaaatacaaaaaattagccaggcatggtggcacatgcctgtagtcccagctacttgggaggctgaggcaggagaattgcttgaacccggcaggcggaggttgcaatgagccaagattgcaccactgcactccagactgggcgacagagcamgactctgtctcaaaaaaaaaaaaaaagtatacatatactttaaacctctcaaaagcccctctcaattctaaaattctatcattaaag

SEQ ID NO: 480780 - DNA, 511 bp, Homo sapiens
ttctcaattggtgttcaaccacccttatctagaggagacacaggatttccataacaatacctaagaccctcttcctcctcagctccaacacccacctacaagattggcagatcctacataattacccacacagtgagcactttctatttctcctgattcttcaytcttcttccctaccagcaagtttatatcctgtcagaaattattatttgtgcttctctttcctgcacctagtccaaagccaaaggtgaaaggtgatgggagtgagcaggaggtcatggagcttatccctgaggacctacatggagggcatcttggaagttcaccgagaagagccggtgggcaggatcaggcaaagtagggctgggccctctgctccctcagctcaggagcccttttcctgcctctctagtgggtttcataactccatagaagatgattctgaatgccaaccaaataacttcacacaattagaatggccagccagacctaaaatacagaagtctaaaac

SEQ ID NO: 480781 - DNA, 531 bp, Homo sapiens
gggtcaggaaagtgatattcccagcattctcaattctctccccagctaaatagattcttttgttagttcttttaaagataaaggaagttccccccaacatttctgtctatgttctgggctctgacatccctcaggagtgagcatggcaacactgtatggatgggctttgctaggctgggagacttttaactgtgttgagagaggtgagggggcagaatcccaccacaggctggcctgggactggctccctcccctcgaaggccccctgaagaggttgatgattactgcccttgtacttggccagaagaggcagcatggggtaccctgtgggaattctgttcctcttgatcagaggaaaacacttgtactccgttgggtctcaagtttttatttcttttttattctgcttgtgaaaacatctttcaacacctatgttttattttccatccatgataccgtactagaagtggggagatckaactctatccttttcttagtagaatgatacctattttgtcttctctaaattag

SEQ ID NO: 480782 - DNA, 477 bp, Homo sapiens
attttgtgggtggtgttataacccttctaaatacccacctgtctgtcttcattctttccccaaatatttattgagcatacagctgaagggagatggacagttaacaggaaaatacatagtatgtcagacatttaatccttttttgtttgaaaatcattgtattggcatgtgagtagatytctgagtattgccattcaaaattaattcagctaccttttaacatatggccaattatagatggattttctgtaaactatactcatgaaattacagcttattgtgtattcttaaaacttttttttttgtcaaaaagtataacttatgaaacagcatgtagattaggggaaattttacttcattaaaacaatccattctcaaagacttctcaaggaacttttattttcacagaaagaaaaataaacctttaaagggatgcagagttaatgtaaaacgtttttcaaattttcttatgtcaga

SEQ ID NO: 480783 - DNA, 600 bp, Homo sapiens
gcacaagaactcttcttaggaagggaacagtgcctggggtaataccttgataagccatctgaggaaaggcgtgccctgccccaagactgtggcaaagaaagaaaaggcaggtcagttctgcatgacaaaacaagaggaacgtgtttggccttgcacaggaaggaggggcaccaggtaaggtagagagagactgagtgaaaattcctttggtgaagttgccactttcacgtgttagcaatggcaaatccatatgggtctacagcaacctcattccttgcctcctcagaagaaaaattccactaaggggcataaggcagagtgagagacccatgcaagttttagaacaggagtgaaagtttattaaaaagtattagagcaggaatgaaaggaagtaaagtacacttggaagagggccaaacaggtgacttgagagattcaagtgcatggtttgacctttgacttgaggtcttctatgttggcatgcttccggggttgcattacttctccccccattcttcccttggggtgggctgaccccacatgcagtggcctgtcggtatgggggaggggytgcatgcacagtgtgtttactggagttgt

SEQ ID NO: 480784 - DNA, 630 bp, Homo sapiens
cagaaattacctttttatcattatgctaatgtcattcattgacaaatcaagagatacatattttctttcttgtgcaacatattttcttctggaattaataatggtcattatttattagttatcatttattcctttgttaccagttctttcaaatactcaggcagaactctgaacccttctgaacactacattctacatggtcacacgttaaataaacttttcattccagtttgttgttgttttcrataaagacattcctgctggtcttccaaatatactgctgttttctaggcctgcaactcagctactgacgtgagatctccctgggctcttttatgatgattccagttttctttgctccaacatttaatgtccaagttgttctctttattcactccctcattttggtggaatatatcctgataatagtttccaaagcatgtgtatatggaagacaaattatttgtgaaatgtgagtgcctgaaatgtctttattctcatatgtgtttaataatgtctggctacagatttgaagctcagaaataactttccaacaggattttgaaatcattactctatggcctttaagcttccaacattgatgaggaacctaaggtcatgctgattctc

SEQ ID NO: 480785 - DNA, 630 bp, Homo sapiens
cagaaattacctttttatcattatgctaatgtcattcattgacaaatcaagagatacatattttctttcttgtgcaacatattttcttctggaattaataatggtcattatttattagttatcatttattcctttgttaccagttctttcaaatactcaggcagaactctgaacccttctgaacactacattctacatggtcacacgttaaataaacttttcattccagtttgttgttgttttcgataaagacattcctgctggtcttccaaatatactgctgttttctaggcctgcaactcagctacygacgtgagatctccctgggctcttttatgatgattccagttttctttgctccaacatttaatgtccaagttgttctctttattcactccctcattttggtggaatatatcctgataatagtttccaaagcatgtgtatatggaagacaaattatttgtgaaatgtgagtgcctgaaatgtctttattctcatatgtgtttaataatgtctggctacagatttgaagctcagaaataactttccaacaggattttgaaatcattactctatggcctttaagcttccaacattgatgaggaacctaaggtcatgctgattctc

SEQ ID NO: 480786 - DNA, 662 bp, Homo sapiens
cattctgaagaagcttaaggcacagctcactgagcttgatgctgggaacttttcaaggcaagtttagggagrttgtgctttcgtaagtacatgctgttgtattcctagcagattttagtgtttctacaaagagataggaatggaaactttcccagtcttttctaaaaatcattattcttcccaatgtcttgagaaagtgtcacaaaggagagaaaggtgactgacatgggttgggtggatttggtgcctgatcctcttaagcctatgaattattacagccacatcacagttccatggctttatagacagtacttttaatcagctttgctcttctttcttaagcagataacagtgttcttaaaaagaatgtatcacttattttataatcagcaactcagaggtgatacattgttatcttcatatcaaacacaccccaaagaatagacattattcattatgtggtttcaaatattttaaacaattttgtattgctgtaaaagtagagcaataaatctttgacttataacattagatgagcaattgactatgctgcttagataaggaaataaatatttttcataatttagagtatgatgcaatttagtatagaatacctgacaaaatatataatgttaaatgaaaatattgttatttgtatgtaa

SEQ ID NO: 480787 - DNA, 662 bp, Homo sapiens
cattctgaagaagcttaaggcacagctcactgagcttgatgctgggaacttttcaaggcaagtttagggaggttgtgctttcgtaagtacatgctgttgtattcctagcagattttagtgtttctacaaagagataggaatggaaactttcccagtcttttctaaaaatcattattcttcccaatgtcttgagaaagtgtcacaaaggagagaaaggtgactgacatgggttgggtggatttggtgcctgatcctcttaagcctatgaattattacagccacatcacagttccatggctttatagacagtacttttaatcagctttgctcttctttcttaagcagataacagtgttcttaaaaagaatgtatcacttmttttataatcagcaactcagaggtgatacattgttatcttcatatcaaacacaccccaaagaatagacattattcattatgtggtttcaaatattttaaacaattttgtattgctgtaaaagtagagcaataaatctttgacttataacattagatgagcaattgactatgctgcttagataaggaaataaatatttttcataatttagagtatgatgcaatttagtatagaatacctgacaaaatatataatgttaaatgaaaatattgttatttgtatgtaa

SEQ ID NO: 480788 - DNA, 662 bp, Homo sapiens
cattctgaagaagcttaaggcacagctcactgagcttgatgctgggaacttttcaaggcaagtttagggaggttgtgctttcgtaagtacatgctgttgtattcctagcagattttagtgtttctacaaagagataggaatggaaactttcccagtcttttctaaaaatcattattcttcccaatgtcttgagaaagtgtcacaaaggagagaaaggtgactgacatgggttgggtggatttggtgcctgatcctcttaagcctatgaattattacagccacatcacagttccatggctttatagacagtacttttaatcagctttgctcttctttcttaagcagataacagtgttcttaaaaagaatgtatcacttattttataatcagcaactcagaggtgatacattgttatcttcatatcaaacacaccccaaagaatagacattattcattatgtggtttcaaatattttaaacaattttgtattgctgtaaaagtagagcaataaatctttgacttataacattagatgagcaattgactatgctgcttagataaggaaataaatatttttcataatktagagtatgatgcaatttagtatagaatacctgacaaaatatataatgttaaatgaaaatattgttatttgtatgtaa

SEQ ID NO: 480789 - DNA, 556 bp, Homo sapiens
ttaaacaatagcttttgtatctccccttgggaagaactaaaaagtgaacatgaacattcttatgagaatttcactaacattttggggggatgtggtttctaatcaaaactaacatataacaggccagccccaagacagtctaaccagatgttcaaggttaccttgattctgattagttatttccctggcaaacccatttttaactgttttatatcaccagtgtttttgattgaattattgtgtaagaaagcaatatttgcctgcctaacaaccatttccatcctcatttgggctttttttgtttaccactaaaggatggaaaaaggatgaaaaagccaatgctgaccttcytggcttcccttgtagccaagagcagccatgcaacccaattttgaacaaatgtaagtaagagacagtcttctggagccagtataaaaaaatgatttttggtgataaaagcagcagggtacctgaagagcgctttcttgacattttggctgccctctgctttttgcccttggaaacagtcacacgaagttatgtcagaaatggtggc

SEQ ID NO: 480790 - DNA, 557 bp, Homo sapiens
ttgttgttgcagacgtctcagcatgtgacttacgctcaccatttagacatttcaattgtttagatctgctgctattgttatttaaagcattattatagaaacatatattactataacacaaattcatttttaaaatatttggtcattgtatttcaatgtaattggttttctttgaaatactccatgttctattttatgcatttaaaaaacatcacagtgagaaggggtccacaggcttccctacttcaagaagtccatggcacagacacacaaaaagggaagctcccttggcagagtgaaggcatttgggctctagtctcttttccaggacttgctagagcaggaattttgagattgatgggtttctctaggaagttggtaactagtgccaatgggagatctgcctggcttgatytgttgtgctgcacatggacaactgtggatgctgtcggagcttctgtggagtgggaagggagctccgcagtgtagaatttgaggagaagccctcctttgaaatcttgtaacaataagaaagataactcatatacgatgtgctt

SEQ ID NO: 480791 - DNA, 608 bp, Homo sapiens
ggctgagatgttctgctagcaagttaaacatagacaggaaaccgcgtgtctgatactgtaaaaaaataatttgtcttcctgccagagataggctagcaaaccaaaaaggctgttttcacttaaaagaaatgctacaacaatgagagaggaaggaatgaaactttgtggctacaagaagtcttcttctctgcccctctctcaacatctcaggttagagggcacacatcaccacactaaatgctaaagcctgcacatagcttgcgagtcagcaacgtgcaccactgggcatacatcttatggtctgcttccctatttaaccacatagattgaactttgagtcagaagtggttactcaagtcctggtttctaagctagcaagatataattgatttatttacttacagtcctatcccattcccaaaaacaacaacaacgacaacaacaaaaaacacagtgaaagaagatacagtcaagacaggagctataattatgacaaatggaatataaatgtgagaaaacagggtaaaaactggtaagcaagagtgatrttagtatgctaaatgtgtaggtacatatttgctagaagcatgattcagatttgactctaa

SEQ ID NO: 480792 - DNA, 608 bp, Homo sapiens
tgtatgtttattcagacattcatgtttaagaatttctgagaaaggaagccaaagataataatacctgacctctatgtctatatgatgaagaagtgcacttcctatgtaaagatgccygtattcctgattaggttaagcaacttgaagttctagtgaggggcaaaactacaggactgcagaaactggcatagccttttacacatggcagcatttgtctactgataatggtgacacaacctccaagagggcagaccacacggtgtattaaagagaagctgtccccataagaaaaggggaaaagtaaaatgactcattacatagtttgaaatctcttatgatgggtggacaaaaccctcaaagaagaaattctccagtcttaaattgggcttttaatgttcgaggcaagaacaagtctcctgatgagtacactgccatcgcctctttaacaatttagctatgaaaatatgaaaatacgaggagactatagatttttatcttagatttacttacaaattaagcagtgagggagcatgactaaaaatagaaaaatgatgaaaagattaattaatgatactttactatgtctcagtggatgggcagtcctatta

SEQ ID NO: 480793 - DNA, 538 bp, Homo sapiens
accttaggaaaaattttcacagacattttaaccaattcagaggaaggggagaatgaaaataccataattaaccaaagaggaataatattaccaccaaaaccaagtaagccttttatttaggaaggagtgagctctagctgaagtaaacatgctatttagtcaggatgtatgctcagacacctgtagtcggaaattttcaaaatagctatggttttttttcttctctttttttaatagtagtcatctccaatgaacaccagtggaagtctgtggtatttctcagttctgacctgtcatgacttttgttagttttctattttgattagctaaagattttctaactcaacttcaatgatttattctactaacaaaatagtacagggataacaaagaatgaaatgtttcagaagagaaaatactggaaatcttatttagtccaattcttgtcactgtatagaaggaaaatgagccccartgggaagaaagacagcctggtcacccagacacctagattcctggtacaacataccttagtctt

SEQ ID NO: 480794 - DNA, 496 bp, Homo sapiens
tgagaagttgagggatcataaactcagagcttcttggttctgaactataaaatcatggatttcctgcaaagacctaatattgtagaaaacatttgaggcccacagaaatgtcaaaaggcatagaatctggaggttgccacgttggaggagagargatagttattgtcatcttggaggacaatacacagcaaatggctcattgttttattccttgtggggcttcacttttgggacaaataaagatttagtgaaagtaagtctgagttttaaaagttcttcatgtttaggcaattaggcacatcaggataactcagcatcttcttcttgactaatataagaagctttcctagagatagttgtggcaggaactgctctactgatagtgcaatactctttcagaaatagtataactgtttctgattattgtccagaagcacaggaaaatattcttaggatagatttggcttgtacattaaattatcaactgtgaaaaaca

SEQ ID NO: 480795 - DNA, 496 bp, Homo sapiens
tgagaagttgagggatcataaactcagagcttcttggttctgaactataaaatcatggatttcctgcaaagacctaatattgtagaaaacatttgaggcccacagaaatgtcaaaaggcatagaatctggaggttgccacgttggaggagagaagatagttattgtcatcttggaggacaatacacagcaaatggctcattgttttattccttgtggggcttcacttttgggacaaataaagatttagtgaaagtaagtctgagttttaaaagttcttcatgtttaggcaattaggcacatcaggataactcagcatcttcttcttgactaatataagaagctttcctagagatagttgtggcaggaactgctctactgatagtgcaatactytttcagaaatagtataactgtttctgattattgtccagaagcacaggaaaatattcttaggatagatttggcttgtacattaaattatcaactgtgaaaaaca

SEQ ID NO: 480796 - DNA, 656 bp, Homo sapiens
gaatctatttccttttttgttctgaaattttaacaagattctgctatgaggagcaaaacacagaatatattaacatgctccaggaagtaagcattgacattaaattttctgtgaactaatttttatcttctatggccctctttcagccttatgaatttttcattctcaaaattaatttaaataacttaagtaaatactgtcctttgacaaygctaggcaagccaaataatgtattaaggaaaccaaagcaactgatatcctcagtctcagacacaaaggcgacaatcctcagtatttttatgtcatcagccttgtttatacactgtggtatattttaggttcacttttctttagccatcataaatactaccagaattctttcattaaaacagctttttagaaattcccacactttcctattcctggtagctagtttgttcatttttgtttttacttgtcataatatggaaaccagctaaataccttttaatttacgtagaagttacttttatatgtttataaacattaaagctctgtaggaaagctaaatccttttataatttctataatttacatagtaattttaaatagcctaatataattattgcattaaggcagtatatcatggccgggtgcggtgactcacgcctgtaatc

SEQ ID NO: 480797 - DNA, 460 bp, Homo sapiens
tgaatgccaattatcaaaataaaagtgaatgccaattatcaaaataaaaatacattttcaagaaagtcattaaatagcaatgccaaagaaactgacatactcttcaaaccaacttctttatgacactgggggaaaacattaaatcaaaaggcaatttaaattaaagcattaaaaayttacctgaaaaatgtcaactccatcctttttctttcaatgcttgtaagggaattcttacaagctttcccttacaagcattgaaagaaattccttacaagcattgaaaaaatcccttacaagcattgaaagaaatgtcagcaaacatgatgtccatttctcattaactttatttcctacttgttatcagaacgaaattaatagctacctgattcaaacccttcacatatttatttaactattactcctctttgacagaaggggaaactgagacacagagtaactt

SEQ ID NO: 480798 - DNA, 428 bp, Homo sapiens
gcacactgcccactagagttccatgcctacatcacggagagatagaatagtctcaaaggattcttaagagtaatgtggggaccaaaaggagatgaatccacagcctctgccttaccgtctgatctaactaatagtatttccagacctttctgtgggctgcaccaggggttgttcagaaagaaaaaaagttgttaatgtcccaccgtttcccgtagcttccgaggtctgtgttgttcataccccaggttccaggttgttctcccactacttccacagaatcagtgtgtctcattccggtacctataatctcatctttattctagtcgccctctacttttttctagacactttatctactagaggcagttaaaatagagacaagaatatttacawaaaacttagctggaactaagttggagtcccataac

SEQ ID NO: 480799 - DNA, 630 bp, Homo sapiens
gggatgctctagccctctatgggtgaaactgaktttctcaggagttctgcagcaagctcttagctgactttcaaatcagtgtaaccagtagtgtgtcactgagtccaaaagcccaaagaacacctctgggaggaggctagtcctttactagaggctccaaatgccaaaatcaagattttcttgacctcaggatgaattgatcaatgcaaatctccccaaatattttcactaaaccttaattggaaagtaagactccagattttttaactctcactaaacataaatatctgattttttcacctgagatctatgtatgtgtgttggagcatgcctttaccaatcagcataaagttacatctctccttgcgcctctactttctacttgtgcagagtttaaaatgcagaggtgagagcttagggttttctgggtcttttgctaagcatgtacctgaccttgagcatccccaattccccatttccttcttgatcccaaagaccgttatcacagtcttaattcccagcagcttttcctcctagagctttttgacatgattattcttagacccaactgatatccttcgttcctggtagactgcgtagctcatttccatttaaatgcttttagaaata

SEQ ID NO: 480800 - DNA, 630 bp, Homo sapiens
gggatgctctagccctctatgggtgaaactgagtttctcaggagttctgcagcaagctcttagctgactttcaaatcagtgtaaccagtagtgtgtcactgagtccaaaagcccaaagaacacctctgggaggaggctagtcctttactagaggctccaaatgccaaaatcaagattttcttgacctcaggwtgaattgatcaatgcaaatctccccaaatattttcactaaaccttaattggaaagtaagactccagattttttaactctcactaaacataaatatctgattttttcacctgagatctatgtatgtgtgttggagcatgcctttaccaatcagcataaagttacatctctccttgcgcctctactttctacttgtgcagagtttaaaatgcagaggtgagagcttagggttttctgggtcttttgctaagcatgtacctgaccttgagcatccccaattccccatttccttcttgatcccaaagaccgttatcacagtcttaattcccagcagcttttcctcctagagctttttgacatgattattcttagacccaactgatatccttcgttcctggtagactgcgtagctcatttccatttaaatgcttttagaaata

SEQ ID NO: 480801 - DNA, 630 bp, Homo sapiens
gggatgctctagccctctatgggtgaaactgagtttctcaggagttctgcagcaagctcttagctgactttcaaatcagtgtaaccagtagtgtgtcactgagtccaaaagcccaaagaacacctctgggaggaggctagtcctttactagaggctccaaatgccaaaatcaagattttcttgacctcaggatgaattgatcaatgcaaatctccccaaatattttcactaaaccttaattggaaagtaagactccagattttttaactctcactmaacataaatatctgattttttcacctgagatctatgtatgtgtgttggagcatgcctttaccaatcagcataaagttacatctctccttgcgcctctactttctacttgtgcagagtttaaaatgcagaggtgagagcttagggttttctgggtcttttgctaagcatgtacctgaccttgagcatccccaattccccatttccttcttgatcccaaagaccgttatcacagtcttaattcccagcagcttttcctcctagagctttttgacatgattattcttagacccaactgatatccttcgttcctggtagactgcgtagctcatttccatttaaatgcttttagaaata

SEQ ID NO: 480802 - DNA, 630 bp, Homo sapiens
gggatgctctagccctctatgggtgaaactgagtttctcaggagttctgcagcaagctcttagctgactttcaaatcagtgtaaccagtagtgtgtcactgagtccaaaagcccaaagaacacctctgggaggaggctagtcctttactagaggctccaaatgccaaaatcaagattttcttgacctcaggatgaattgatcaatgcaaatctccccaaatattttcactaaaccttaattggaaagtaagactccagattttttaactctcactaaacataaatatctgattttttcacctgagatctatgtatgtgtgttggagcatgcctttaccaatcagcataaagttacatctctccttgcgcctctactttctacttgtgcagagtttaaaatgcagaggtgagagcttagggttttctgggtcttttgctaagcatgtacctgaccttgagcatccccaattccccatttccttcttgatccyaaagaccgttatcacagtcttaattcccagcagcttttcctcctagagctttttgacatgattattcttagacccaactgatatccttcgttcctggtagactgcgtagctcatttccatttaaatgcttttagaaata

SEQ ID NO: 480803 - DNA, 620 bp, Homo sapiens
tgtttgggcaccatagtgagggttataggataagcccatgcccagggaaacctagaaaatggacatgtgggttgcttggcarcggtcatgtgcaatcctgtctgtcctgcctctgtatccctgctttcacgccactgtaaacttgcttcaagctagcccaccaccttttgtgaaatgtgcataaaagtcaggttctgtctttgttccgggcccagtctttttgatgtgagttagcttgtcctcagtttcatgcgcgtccgtgtgaagagaccaccaaacaggcttcgtgtaagcaataaaagcttttaatcacctgggtgcaggcaggctgagtccgaaaagagagtcagcaaacgtagatagggatggggccattttataggatttgggtaggtaaaggaaaaagggggattgttctctggcgggcaggagtgggggggtcacaaggtactcagtcggggagcttttgagccaggatgagccaggagaaggaatttcacaagacaatgtcatcagttaaggcaggaacaggccattttcacttcttttgtggtggaatgtcatcagttaaaacaagaaccggccatctggatgtgtacgtgcaggtcacagaaggtacg

SEQ ID NO: 480804 - DNA, 598 bp, Homo sapiens
gttataggataagcccatgcccagggaaacctagaaaatggacatgtgggttgcttggcaacggtcatgtgcaatcctgtctgtcctgcctctgtatccctgctttcacgccactgtaaacttgcttcaagctagcccaccaccttttgtgaaatgtgcataaaagtcaggttctgtctttgttccgggcccagtctttttgatgtgagttagcttgtcctcagtttcatgsgcgtccgtgtgaagagaccaccaaacaggcttcgtgtaagcaataaaagcttttaatcacctgggtgcaggcaggctgagtccgaaaagagagtcagcaaacgtagatagggatggggccattttataggatttgggtaggtaaaggaaaaagggggattgttctctggcgggcaggagtgggggggtcacaaggtactcagtcggggagcttttgagccaggatgagccaggagaaggaatttcacaagacaatgtcatcagttaaggcaggaacaggccattttcacttcttttgtggtggaatgtcatcagttaaaacaagaaccggccatctggatgtgtacgtgcaggtcacagaaggtac

SEQ ID NO: 480805 - DNA, 598 bp, Homo sapiens
gttataggataagcccatgcccagggaaacctagaaaatggacatgtgggttgcttggcaacggtcatgtgcaatcctgtctgtcctgcctctgtatccctgctttcacgccactgtaaacttgcttcaagctagcccaccaccttttgtgaaatgtgcataaaagtcaggttctgtctttgttccgggcccagtctttttgatgtgagttagcttgtcctcagtttcatgcgsgtccgtgtgaagagaccaccaaacaggcttcgtgtaagcaataaaagcttttaatcacctgggtgcaggcaggctgagtccgaaaagagagtcagcaaacgtagatagggatggggccattttataggatttgggtaggtaaaggaaaaagggggattgttctctggcgggcaggagtgggggggtcacaaggtactcagtcggggagcttttgagccaggatgagccaggagaaggaatttcacaagacaatgtcatcagttaaggcaggaacaggccattttcacttcttttgtggtggaatgtcatcagttaaaacaagaaccggccatctggatgtgtacgtgcaggtcacagaaggtac

SEQ ID NO: 480806 - DNA, 620 bp, Homo sapiens
tgtttgggcaccatagtgagggttataggataagcccatgcccagggaaacctagaaaatggacatgtgggttgcttggcaacggtcatgtgcaatcctgtctgtcctgcctctgtatccctgctttcacgccactgtaaacttgcttcaagctagcccaccaccttttgtgaaatgtgcataaaagtcaggttctgtctttgttccgggcccagtctttttgatgtgagttagcttgtcctcagtttcatgcgcgtccgtgtgaagagaccaccaaacaggcttcgtgtaagcaataaaagcttttaatcacctggrtgcaggcaggctgagtccgaaaagagagtcagcaaacgtagatagggatggggccattttataggatttgggtaggtaaaggaaaaagggggattgttctctggcgggcaggagtgggggggtcacaaggtactcagtcggggagcttttgagccaggatgagccaggagaaggaatttcacaagacaatgtcatcagttaaggcaggaacaggccattttcacttcttttgtggtggaatgtcatcagttaaaacaagaaccggccatctggatgtgtacgtgcaggtcacagaaggtacg

SEQ ID NO: 480807 - DNA, 620 bp, Homo sapiens
tgtttgggcaccatagtgagggttataggataagcccatgcccagggaaacctagaaaatggacatgtgggttgcttggcaacggtcatgtgcaatcctgtctgtcctgcctctgtatccctgctttcacgccactgtaaacttgcttcaagctagcccaccaccttttgtgaaatgtgcataaaagtcaggttctgtctttgttccgggcccagtctttttgatgtgagttagcttgtcctcagtttcatgcgcgtccgtgtgaagagaccaccaaacaggcttcgtgtaagcaataaaagcttttaatcacctgggtgcaggcaggctgagtccgaaaagagagtcagcaaacktagatagggatggggccattttataggatttgggtaggtaaaggaaaaagggggattgttctctggcgggcaggagtgggggggtcacaaggtactcagtcggggagcttttgagccaggatgagccaggagaaggaatttcacaagacaatgtcatcagttaaggcaggaacaggccattttcacttcttttgtggtggaatgtcatcagttaaaacaagaaccggccatctggatgtgtacgtgcaggtcacagaaggtacg

SEQ ID NO: 480808 - DNA, 614 bp, Homo sapiens
aaaagtctaggctgtggatgcctccttctgcttgctgggagatgtagtttcataaagactcccagaacttgtgtcacagggctgcaggactaccatcccattatgcactggggtyagggacacggcccgtcagtggagaaagaggcgggtctgtgtgcgtctccttcggcttgctgggagatgtattcttataaacactcccagccctttggtcaaagggctacaggactacaatcccaacatgtgccagtctcgggggcgaggtacaggcctggaagaaggggcagagtggtacacgccccacctaatatgctgggagctgtagtctgttaactgctctcagcctgtttgtcggtaggcttcagaactataatcacagcatgtaccgggacccggggtgcatagccctggagggaggggcagagcggtgtggacttcccggtgtccaaagcactgctgagttcttatgctatgccgactctttgccaaggagaatgagtacataggtggacctagaggacaggtctgcgctgagcattgaggagggtattaccctacataggcaccttacctttgcccaaatcgggcgggttgtcctcaactgattggcccta

SEQ ID NO: 480809 - DNA, 587 bp, Homo sapiens
tgcttgctgggagatgtagtttcataaagactcccagaacttgtgtcacagggctgcaggactaccatcccattatgcactggggtcagggacacggcccgtcagtggagaaagaggcgggkctgtgtgcgtctccttcggcttgctgggagatgtattcttataaacactcccagccctttggtcaaagggctacaggactacaatcccaacatgtgccagtctcgggggcgaggtacaggcctggaagaaggggcagagtggtacacgccccacctaatatgctgggagctgtagtctgttaactgctctcagcctgtttgtcggtaggcttcagaactataatcacagcatgtaccgggacccggggtgcatagccctggagggaggggcagagcggtgtggacttcccggtgtccaaagcactgctgagttcttatgctatgccgactctttgccaaggagaatgagtacataggtggacctagaggacaggtctgcgctgagcattgaggagggtattaccctacataggcaccttacctttgcccaaatcgggcgggttgtcctcaactgattggccctat

SEQ ID NO: 480810 - DNA, 587 bp, Homo sapiens
tgcttgctgggagatgtagtttcataaagactcccagaacttgtgtcacagggctgcaggactaccatcccattatgcactggggtcagggacacggcccgtcagtggagaaagaggcgggtctgtgtgcgtctccttcggcttgctgggagatgtattcttataaacactcccagccctttggtcaaagrgctacaggactacaatcccaacatgtgccagtctcgggggcgaggtacaggcctggaagaaggggcagagtggtacacgccccacctaatatgctgggagctgtagtctgttaactgctctcagcctgtttgtcggtaggcttcagaactataatcacagcatgtaccgggacccggggtgcatagccctggagggaggggcagagcggtgtggacttcccggtgtccaaagcactgctgagttcttatgctatgccgactctttgccaaggagaatgagtacataggtggacctagaggacaggtctgcgctgagcattgaggagggtattaccctacataggcaccttacctttgcccaaatcgggcgggttgtcctcaactgattggccctat

SEQ ID NO: 480811 - DNA, 564 bp, Homo sapiens
gtgtcacagggctgcaggactaccatcccattatgcactggggtcagggacacggcccgtcagtggagaaagaggcgggtctgtgtgcgtctccttcggcttgctgggagatgtattcttataaacactcccagccctttggtcaaagggctacaggactacaatcccaacatgtgccagtctcgggggcgaggtacaggcctggaagaaggggcagagtggtacacgccccacctaatatgctgggagctgtagtcygttaactgctctcagcctgtttgtcggtaggcttcagaactataatcacagcatgtaccgggacccggggtgcatagccctggagggaggggcagagcggtgtggacttcccggtgtccaaagcactgctgagttcttatgctatgccgactctttgccaaggagaatgagtacataggtggacctagaggacaggtctgcgctgagcattgaggagggtattaccctacataggcaccttacctttgcccaaatcgggcgggttgtcctcaactgattggccctatccttctcaagttcctcttt

SEQ ID NO: 480812 - DNA, 319 bp, Homo sapiens
acacgccccacctaatatgctgggagctgtagtctgttaactgctctcagcctgtttgtcggtaggcttcaraactataatcacagcatgtaccgggacccggggtgcatagccctggagggaggggcagagcggtgtggacttcccggtgtccaaagcactgctgagttcttatgctatgccgactctttgccaaggagaatgagtacataggtggacctagaggacaggtctgcgctgagcattgaggagggtattaccctacataggcaccttacctttgcccaaatcgggcgggttgtcctcaactgattggccc

SEQ ID NO: 480813 - DNA, 564 bp, Homo sapiens
gtgtcacagggctgcaggactaccatcccattatgcactggggtcagggacacggcccgtcagtggagaaagaggcgggtctgtgtgcgtctccttcggcttgctgggagatgtattcttataaacactcccagccctttggtcaaagggctacaggactacaatcccaacatgtgccagtctcgggggcgaggtacaggcctggaagaaggggcagagtggtacacgccccacctaatatgctgggagctgtagtctgttaactgctctcagcctgtttgtcggtaggcttcagaactataatcacagcatgtaccgggayccggggtgcatagccctggagggaggggcagagcggtgtggacttcccggtgtccaaagcactgctgagttcttatgctatgccgactctttgccaaggagaatgagtacataggtggacctagaggacaggtctgcgctgagcattgaggagggtattaccctacataggcaccttacctttgcccaaatcgggcgggttgtcctcaactgattggccctatccttctcaagttcctcttt

SEQ ID NO: 480814 - DNA, 319 bp, Homo sapiens
acacgccccacctaatatgctgggagctgtagtctgttaactgctctcagcctgtttgtcggtaggcttcagaactataatcacagcatgtaccgggacccggggtgcatagccctggagggaggggcasagcggtgtggacttcccggtgtccaaagcactgctgagttcttatgctatgccgactctttgccaaggagaatgagtacataggtggacctagaggacaggtctgcgctgagcattgaggagggtattaccctacataggcaccttacctttgcccaaatcgggcgggttgtcctcaactgattggccc

SEQ ID NO: 480815 - DNA, 561 bp, Homo sapiens
aacaagttcttctgataacaacagaagtccagtgctactatcttaggagcttttactatatgtggacttaatattttaatttgttgctgaagcaggattgtacgaggggcaagggagaatactgtgatagttttccaccaccagggagtctggcacgttcataaccagctacctttgtaagcatctagattattggggaagggaatattatcccggatggtgaatggaattaatggcacccccaagtgaatctccccatccaataagggggcagataggccacccatagggtctgcatacccagagggccccccaggggacagcaatggttatactacaattatagtgtattaagatgttattaaagtagcaaaggaagtccaggttggattgcaagtgttgttgttttggccccatttgtagtgacagagccattcagaaatattggcaaggacaactctgcaaggcagtccatttcctgtggcctctggcaatttgatgcatagccagcattgactgcggttagcttctgtygcagtggttgctgcccagttgatgaat

SEQ ID NO: 480816 - DNA, 566 bp, Homo sapiens
gagctggacaagtactggtcccagcagactgaggagagcaccagagtagtcaccatgcagtccgctgagatcggagctgctgagaggatgctcagggggttgagatrtacagtccagtccttggatatcgaactggactcaatgagatatctgaaagtcagcttggagaacagcctaagggaggtagacgcagatggagcagctcaacaggatcctgctgcacctggagtcagagctatcccaaaaccgggaagagaggtaccacgcccaagagcacgaggacctgtggaacatcaaggtcgagctggaggctgagattgccacttactgccgcctgtagaagacggggaggatttcaatctcctggatgctctggacagcagtaaatactctgcaagctatccaaaagaacagcccccgcaggatagtggacgggaaagtggtgtctgagaccaacaatacagactttttgttgtgctaagccatcagaagcaaggtccctttggggagcaggaggccagtaaaaagttcagaggtaaaaaaaaattaacttcaaatcacagaag

SEQ ID NO: 480817 - DNA, 627 bp, Homo sapiens
gtactggtcccagcagactgaggagagcaccagagtagtcaccatgcagtccgctgagatcggagctgctgagaggatgctcagggggttgagatgtacagtccagtccttggatatcgaactggactcaatgagatatctgaaagtcagcttggagaacagcctaagggaggtagacgcagatggagcagctcaacaggatcctgctgcacctggagtcagagctatcccaaaaccgggaagagaggtaccacgcccaagagcacgaggacctgtggaacatcaaggtcgagctggaggctgagattgccacttactgccgcctgtagaagacggggaggatttcaatctcctggatgctctggacagcagtaaatactctgcaagctatccaaaagaacagcccccgcaggatagtggacgggaaagtggtgtctgagaccaacaatacagactttttgttgtgctaagccatcagaagcaaggtccctttggggagcaggaggccagtaaaaagttcagaggtaaaaaaaaattaacttcaaatcacagaastgtttccttcaacacaaaagtaatatagattcattaatatatagaagtggaaattaagacaatttccacaac

SEQ ID NO: 480818 - DNA, 492 bp, Homo sapiens
tcgggagtggcccgcattcgtgggaagacgctgggcctcatcggctagggtcgcacgcagcaggcttttgcagttccagccacagcctttggattcagcgtcatgttttattacccctacttgcaggatgggatcgagcagtccctgggcatgcagagggtctacaccctgcaggattggctgtatcagagcgactgcatctccttgcactgcagtctcaacgaacttaagcaccacctcatcaatgactttaccataaagcagatgaggcagggagcattccttgtgaacgcagcccgtggtggcctggtggacgagagagccttagcacaggccctcaaggaaggcaggatacgaagggcagtcstcgacgtgaacgagtcgcagccctttagctttgctcagggtccgttgaaagatgcccccaatctcatctgcactcctctcactgcctgctacagccagcaggtgtcactggagatgagggagaca

SEQ ID NO: 480819 - DNA, 385 bp, Homo sapiens
ttcaccatgttgtccaggttggtttcaaacccttgacctcaggcgatccacacgtctcagcatcccaaagtgctgggattacaggtgtgagccaccgcaccctgtcaagatktttttaaagctctaatttttctcctactgggtttttctcgtttgcgccctcgatctttctgtctctttttgtgtaaacctttttgtctaattctgtctattgtattcctcaaacacaggaagcaagctccaatgctatgagatgctccatgtagagacccacataacaaagggtgagggggtgctcagacgagtagagagaaggaaagtcaggctctccagccacactaaaccctgtcaattttcacatgagtcagcttaaaggctcatgctt

SEQ ID NO: 480820 - DNA, 385 bp, Homo sapiens
ttcaccatgttgtccaggttggtttcaaacccttgacctcaggcgatccacacgtctcagcatcccaaagtgctgggattacaggtgtgagccaccgcaccctgtcaagatgtttttaaagctctaatttttctcctactgggtttttctcgtttgcgccctcgatctttctgtctctttttgtgtaaacctttttgtctaattctgtctattgtattcctcaaacacaggaagcaagctccaatgctatgagatgctccatgtagagacccacataacaaagggtgagggggtgctcagacgagtagagagaargaaagtcaggctctccagccacactaaaccctgtcaattttcacatgagtcagcttaaaggctcatgctt

SEQ ID NO: 480821 - DNA, 611 bp, Homo sapiens
tgctccagcaaagctcagtgggcaccagaaacacagtaggctgtaaccacctcctggccatcactaaccctacagccccaagcaggagcactaccgaacaaatctgataccttgatttttctgtcctcaagacactggttcttcaaggtcctaggggataaagtagcaggatctgaaggccccaagtataatgagtgacctaggaatcccgttttgccctctctttgcctccacctttttggttgtgctatttactcatgaggtatcctccccttatccagtgaaattattttctaccactttcaaatgaggaccttaagaacgcaacagtagctgagattttccgtggacctcagcctcagagtccagtgctctggcacatttaactctgtctcatcttcatctacccaagatgcctctcaagtggccatgcctccctctgatttgaaggatctgcagagtgggtgcatttttgcagtctcagagcaagaatccaggctggcagacacttatgagtatgtgaaatcatcaaggtcacccacttcaggcacccctatttatgaggaagaaaacaggctttcctgtasgcactgtctacattaggctgaggt

SEQ ID NO: 480822 - DNA, 594 bp, Homo sapiens
atgacagttgaagcagaacctgagatcctgtttctctccattgacatatgaacttaactacaattgggtgaacaaagccagttgagtttgtagcaccccacatgagaaaaaagccaaccataaccacattttgaagaaaatttggtcacatttgtgcactacagaacagcgcagttagataaaaatctgtccattccatgattctcctttgggaaagaaaaaagagtgaaatgcgtatgcaaacttctgacttactgagttataccggggttatctaaagactggaaattgcttcctttaacatttagtgttgatgagaatagagactgagtttaaatgacagcttgggtcaactgagaataaagataaatgcttcttacaacaacagagactgtagtgcctacaasagtgacgaagggaagagactaaaggctcctaagaggaaacagaggtaaaccttattaacaagaaaatacatacagtagtccaaagaagacacattttgacaacagattggagaagctcccagtatgactactgtggctgaatgttgtcaattttcccatgtataaagctctttcataaaggataaaa

SEQ ID NO: 480823 - DNA, 177 bp, Homo sapiens
ccagaacaagaccttgtatccaaaaactaagcaaaactaaacaaraacaaaaaaaaaaaacttataaataaactttgaagattgtgtcatctgtgtccttccctgccctccaagctatcaatgttaaatataatggttattgagaaaatggttagatattattaagaaatttctata

SEQ ID NO: 480824 - DNA, 496 bp, Homo sapiens
ggtattctgttgtggcccaaatattttctcaccgctaccttcagggtctmaactagcaaatcaggacacctgcagaggacagttggccgttttcaaatagaaagagaaatacccccgttcatgagagtaatccagtgattttcaaaaagacaagtcacactgacatccagcgcagtcaggccacaattaccctggaataatcacttcacacagaatggttgaggagactttctaagatgagcaaatttgggcagcataatccttgcttatttattcccagcccccactgcccgcctgattcctaatggctaccctacaatgtggtcagcagtgggatgtagcgtggtgagagaggggctcagggacgggatgaaggtctttcctgcattatcaaaatgcaggttaaaaagttgttaaaaagatgtccaaatgttctaattcctactgttaaatagctgctaagatgcattatacaacagacccaggtaagggaagg

SEQ ID NO: 480825 - DNA, 588 bp, Homo sapiens
ctgagaataggtattctgttgtggcccaaatattttctcaccgctaccttcagggtctaaactagcaaatcaggacacctgcagaggacagttggccgttttcaaatagaaagagaaatacccccgttcatgagagtaatccagtgattttcaaaaagacaagtcasactgacatccagcgcagtcaggccacaattaccctggaataatcacttcacacagaatggttgaggagactttctaagatgagcaaatttgggcagcataatccttgcttatttattcccagcccccactgcccgcctgattcctaatggctaccctacaatgtggtcagcagtgggatgtagcgtggtgagagaggggctcagggacgggatgaaggtctttcctgcattatcaaaatgcaggttaaaaagttgttaaaaagatgtccaaatgttctaattcctactgttaaatagctgctaagatgcattatacaacagacccaggtaagggaaggagcatgtgcatttcaagtctcagctcacttcttaattagctgtgatactctgggcaggtgaccccaactatacgagcctgtgt

SEQ ID NO: 480826 - DNA, 588 bp, Homo sapiens
ctgagaataggtattctgttgtggcccaaatattttctcaccgctaccttcagggtctaaactagcaaatcaggacacctgcagaggacagttggccgttttcaaatagaaagagaaatacccccgttcatgagagtaatccagtgattttcaaaaagacaagtcacactgacatscagcgcagtcaggccacaattaccctggaataatcacttcacacagaatggttgaggagactttctaagatgagcaaatttgggcagcataatccttgcttatttattcccagcccccactgcccgcctgattcctaatggctaccctacaatgtggtcagcagtgggatgtagcgtggtgagagaggggctcagggacgggatgaaggtctttcctgcattatcaaaatgcaggttaaaaagttgttaaaaagatgtccaaatgttctaattcctactgttaaatagctgctaagatgcattatacaacagacccaggtaagggaaggagcatgtgcatttcaagtctcagctcacttcttaattagctgtgatactctgggcaggtgaccccaactatacgagcctgtgt

SEQ ID NO: 480827 - DNA, 496 bp, Homo sapiens
ggtattctgttgtggcccaaatattttctcaccgctaccttcagggtctaaactagcaaatcaggacacctgcagaggacagttggccgttttcaaatagaaagagaaatacccccgttcatgagagtaatccagtgattttcaaaaagacaagtcacactgacatccagcgcagtcaggccacaattaccctggaataatcacttcacacagaatggttgaggagactttctaagatgagcaaatttgggcagcataatccttkcttatttattcccagcccccactgcccgcctgattcctaatggctaccctacaatgtggtcagcagtgggatgtagcgtggtgagagaggggctcagggacgggatgaaggtctttcctgcattatcaaaatgcaggttaaaaagttgttaaaaagatgtccaaatgttctaattcctactgttaaatagctgctaagatgcattatacaacagacccaggtaagggaagg

SEQ ID NO: 480828 - DNA, 596 bp, Homo sapiens
tgcatttcaagtctcagctcacttcttaattagctgtgatactctgggcakgtgaccccaactatacgagcctgtgtgcctgtcaacccaaaacaatcctaagcaaaaacaccaaagcttggggcatcttgctacccgacttcaaactatactacaaggctgcagtaaccaaaacagcacagtactaataccaaaacagatatatagaccaatggaacagaacagaggcctcagtaataacatcacacatctacaaccatctgatctctaacaaacctgacaaaaacaagcaatggagaaagatttactacttaccaaatggtgctgaaagaactggctagccacattcagaaaacagaaactggaccccttctttacaccttatacaaacattatctcaagatggattaaagtcttaaatataaaacaccaaaccacaaaaaccctagaagaaaacctaggcaataccattcaggacataggcatgagcaaagacttcaggaataaaataccaaaagcaatcacaacaaaagctaaaattgacaaatgagatctaattaaactaacgagcttctgcacagcaaaagaatctatca

SEQ ID NO: 480829 - DNA, 405 bp, Homo sapiens
tgtaaggcagggcccaggcagttgggttacatcacctgagtagtggacccagcaatattaacacagtgtcccatatgggcagtgcacaagccggagagtcacataacctggatgcgaggccaagctatatataacaacgcttcctgagggcagcgccaagkcagaagaggagactcacatcacctgggtgtaaggtctagcgatatgtcaaactgctcactgtgggcagtgccaacgaaggagaatagagttacatcctcaatgtgctggatccagcaatatgttaatatcccatctgtgggctgggtccatgcgagcccgtcaagtcacttaggtgctaggcactgggaaatttgacaatggaagctgcagaatggtccaggaattagattaacaatcgcacag

SEQ ID NO: 480830 - DNA, 505 bp, Homo sapiens
atcgctgtgtccagcacaccggttatgtgattatgctgcctcatctcttctcacaggagctgttgtgacaaatccctgggcccagaaattatttaataygactctcctcaatgaccttaactttgtgcatgggataaattgtgacatacctctggatccagcaccgaggtgatgcgactctccttttctacatgggctatgcttacaagaaggaggctgacttattgctgtgttgacaactgatgtgatacctctgttcttgttttcctagattttaagaatttaaacaagagacacaaagaaaaaaagtacagcataatttattggaaaagaaaatatttgaaagttaagtgcagaatacagtacaccctgagagagatactccagggcggactgctcataagagtgagacagcgtggactgtcgctggagaaacccctttatggcagttttacattattattaataaggaggagggaagaggagttgctagtaaacatgttct

SEQ ID NO: 480831 - DNA, 505 bp, Homo sapiens
atcgctgtgtccagcacaccggttatgtgattatgctgcctcatctcttctcacaggagctgttgtgacaaatccctgggcccagaaattatttaatatgactctcctcaatgaccttaactttgtgcatgggataaattgtgacatacctctggatccagcaccgaggtgatgcgactctccttttctrcatgggctatgcttacaagaaggaggctgacttattgctgtgttgacaactgatgtgatacctctgttcttgttttcctagattttaagaatttaaacaagagacacaaagaaaaaaagtacagcataatttattggaaaagaaaatatttgaaagttaagtgcagaatacagtacaccctgagagagatactccagggcggactgctcataagagtgagacagcgtggactgtcgctggagaaacccctttatggcagttttacattattattaataaggaggagggaagaggagttgctagtaaacatgttct

SEQ ID NO: 480832 - DNA, 505 bp, Homo sapiens
atcgctgtgtccagcacaccggttatgtgattatgctgcctcatctcttctcacaggagctgttgtgacaaatccctgggcccagaaattatttaatatgactctcctcaatgaccttaactttgtgcatgggataaattgtgacatacctctggatccagcaccgaggtgatgcgactctccttttctacatgggctatgcttacaagaaggaggctgacttattgctgtgttgacaactgatgtgatacctctgttcttgtyttcctagattttaagaatttaaacaagagacacaaagaaaaaaagtacagcataatttattggaaaagaaaatatttgaaagttaagtgcagaatacagtacaccctgagagagatactccagggcggactgctcataagagtgagacagcgtggactgtcgctggagaaacccctttatggcagttttacattattattaataaggaggagggaagaggagttgctagtaaacatgttct

SEQ ID NO: 480833 - DNA, 505 bp, Homo sapiens
atcgctgtgtccagcacaccggttatgtgattatgctgcctcatctcttctcacaggagctgttgtgacaaatccctgggcccagaaattatttaatatgactctcctcaatgaccttaactttgtgcatgggataaattgtgacatacctctggatccagcaccgaggtgatgcgactctccttttctacatgggctatgcttacaagaaggaggctgacttattgctgtgttgacaactgatgtgatacctctgttcttgttttcctagattttaagaatttaaacaagagacacaaagaaaaaaagtacagcataatttattggaaaagaaaatatttgaaagttaagtgcagaatacagtacaccctgagagagatactccagggckgactgctcataagagtgagacagcgtggactgtcgctggagaaacccctttatggcagttttacattattattaataaggaggagggaagaggagttgctagtaaacatgttct

SEQ ID NO: 480834 - DNA, 598 bp, Homo sapiens
gggttgtgactcccacctctatgggcacctggaactaaaatgagctatgccctcccccaaccaccccatgtgatataaagtgaggctacgggaaagaaaaccttcgttttctctctcataaataggggtactcaaaaggaataataccaagaattctagatactcataagtgtctgctccccttggctcttcattggtaactcactgtgctttgagactctgggaagaggcttttcaggttctagaggtccttcagagaagagagaggcctagagatgtgggcagatgaggacttggaataaagcagaatgtgacaatgcactgggctctggagtgtggggsccagaaaaaatactagatttttgggctgtccttgaggtcctcattcagaagtggaagaaaataatgtctctgaatgctgttaaagtgtttaatgagtgcacagcacactcaaagaggctgaggaaaataggaatcaagggaggtttccgaggttacttttatggcccttggagtcttcagatactgctccttttcccaggggtccttgaatagccactgccttgagaattccccaatgcaggtgcctgttttgtga

SEQ ID NO: 480835 - DNA, 459 bp, Homo sapiens
acagtatctgattttcttttaatttcaacctcttctgctgtggaatggaaaattaaggccatatatataaaatatatatcttttatgtataaagatacataaactatgtatcttttatatataaagatatatatgtataagtttatatattatatatagttatatataattgatatatatatagttatatataatatataaataaaawtatttatatacattatatatatatatattttttgagacacagtctcgctctgtcacccaggctggagtgcagtggcaggatcatggctcaatgtaatctctgcttcctgggctcaagtgattcttacacctcagcctcctgagtggctgggattacaggcatgcatcaacacatctggctaatttttggatttttcgtagagaagggtttttgccatgctggccatggctggtttcaaacccctggcctta

SEQ ID NO: 480836 - DNA, 599 bp, Homo sapiens
gtaattacagccaaggaccagcaggcagcattgctgcatccacatgggcttttgctggaaccagtaagtctctgccagcccctcccaggctcctgggatgccacttgttctgggtctgtggacagataaccaggacacttactcagtgaagcccatcgctcaaccccagccccaccataccctgtctcctatgccattcctcatcccagaaggaaaggcaatgcctttgtcccacagcccctgccttgtgtcatctcatgtgggggtatggaatgaacccgtcagcctaaactccagtccttctgcctgaggaatctgtccccgctgtcttagtcrccctctagggagctgtcagtgggataaagagcagccctggaagagaggcccaccttcttctgtttgacttcaggacagcctttcagggcaagaacccagagcagatggaggcctcacagaaggctgtggcagggctctcggcttggtgggctaagcatctccctctctgatgactgccatggggcccacaaccactcattcaagagggtcaccaccacattgcaggtgttcagctggacggttccccaggcagagcctgccat

SEQ ID NO: 480837 - DNA, 599 bp, Homo sapiens
gtaattacagccaaggaccagcaggcagcattgctgcatccacatgggcttttgctggaaccagtaagtctctgccagcccctcccaggctcctgggatgccacttgttctgggtctgtggacagataaccaggacacttactcagtgaagcccatcgctcaaccccagccccaccataccctgtctcctatgccattcctcatcccagaaggaaaggcaatgcctttgtcccacagcccctgccttgtgtcatctcatgtgggggtatggaatgaacccgtcagcctaaactccagtccttctgcctgaggaatctgtccccgctgtcttagtcgccctctagggagctgtcagtgggataaagagcagccctggaagagaggcccaccttcttctgtttgacttcaggacagcctttcagggcaagaacccagagcagatggaggcctcacagaaggctgtggcagggctctcggcttggtgggctaagcatctccctctctgatgactgccatggggcccacaaccactcattcaagagggtcaccaccacattgcaggtgtkcagctggacggttccccaggcagagcctgccat

SEQ ID NO: 480838 - DNA, 401 bp, Homo sapiens
cccagacaattttttaatttttttctagagactgagcctacttatgttgctcagactcatcttgaactcctgggatcaagcgataatcccaccttggccaccyaaagtgtttacattacaggtgtgagctagcactctcagcaaaaatatattttaaagaaccgttacaaccaaattatgagttatcattatgccactgccctccagcctgggcaccagaacaagaccttgtatccaaaaactaagcaaaactgaacaagaacaaaaaaaaaaccttataaataaattaaactttgaagattgtgtcatctgtgtccttccctgccctccaagctatcaatgttaaatataatggttattgagaaaatggttagatattattaagaaatttctatatatcc

SEQ ID NO: 480839 - DNA, 401 bp, Homo sapiens
cccagacaattttttaatttttttctagagactgagcctacttatgttgctcagactcatcttgaactcctgggatcaagcgataatcccaccttggccacctaaagtgtttasattacaggtgtgagctagcactctcagcaaaaatatattttaaagaaccgttacaaccaaattatgagttatcattatgccactgccctccagcctgggcaccagaacaagaccttgtatccaaaaactaagcaaaactgaacaagaacaaaaaaaaaaccttataaataaattaaactttgaagattgtgtcatctgtgtccttccctgccctccaagctatcaatgttaaatataatggttattgagaaaatggttagatattattaagaaatttctatatatcc

SEQ ID NO: 480840 - DNA, 401 bp, Homo sapiens
cccagacaattttttaatttttttctagagactgagcctacttatgttgctcagactcatcttgaactcctgggatcaagcgataatcccaccttggccacctaaagtgtttacattacaggtgtgagctagcactctcagcaaaaatatattttaaagaaccgttacaaccaaattatgagttatcattatgccactgccctccascctgggcaccagaacaagaccttgtatccaaaaactaagcaaaactgaacaagaacaaaaaaaaaaccttataaataaattaaactttgaagattgtgtcatctgtgtccttccctgccctccaagctatcaatgttaaatataatggttattgagaaaatggttagatattattaagaaatttctatatatcc

SEQ ID NO: 480841 - DNA, 401 bp, Homo sapiens
cccagacaattttttaatttttttctagagactgagcctacttatgttgctcagactcatcttgaactcctgggatcaagcgataatcccaccttggccacctaaagtgtttacattacaggtgtgagctagcactctcagcaaaaatatattttaaagaaccgttacaaccaaattatgagttatcattatgccactgccctccagcctgggcaccagaacaagaccttgtatccaaaaactaagcaaaactraacaagaacaaaaaaaaaaccttataaataaattaaactttgaagattgtgtcatctgtgtccttccctgccctccaagctatcaatgttaaatataatggttattgagaaaatggttagatattattaagaaatttctatatatcc

SEQ ID NO: 480842 - DNA, 396 bp, Homo sapiens
tattctgatgtggcccaaatattttctcaccgctaccttcagkgtctcaactagcaaatcaggacacctgcagaggacagttgaccgttttcaaatagaaagagaaataccccgttcatgagagtaatccagtgattttcaaaaagacaagacacactgacatccagcgcagtcagggcacaattaccttggaaaaatcacctcacacagaatggttgaggagactttctaaggtgagcaaatttgggcaacataatcctttcttatttatttccagcccccgctgcccccctgattcctaatggccactccacagtgtggtcagcagtggggtgcagtgttgtgagagaggggctcaaggacgggatgaaggtctttaccgcgttaccaaaatgc

SEQ ID NO: 480843 - DNA, 396 bp, Homo sapiens
tattctgatgtggcccaaatattttctcaccgctaccttcagggtctcaactagcaaatcaggacacctgcagaggacagttgaccgttttcaaatagaaagagaaataccccgttcatgagagtaatccagtgattttcaaaaagacaagacacactgacatccagcgcagtcagggcacaattaccttggaaaaatcacctcacacagaatggttgagragactttctaaggtgagcaaatttgggcaacataatcctttcttatttatttccagcccccgctgcccccctgattcctaatggccactccacagtgtggtcagcagtggggtgcagtgttgtgagagaggggctcaaggacgggatgaaggtctttaccgcgttaccaaaatgc

SEQ ID NO: 480844 - DNA, 526 bp, Homo sapiens
ggagacaccatatccaatgtgtaatttttgttgtttgtgtatgctttaattactttctctttttctttactgcagtttttttttcctagtggttatcatgagacttaggtaaaacatcttgtattttaatagtctagtttaagatgataacaatttatagtattctgaaattcagtatgtatttaccattttagtgacatttatactttagtatttttcatattgttagttagcatttcatcatatcaatgtgaagatttcttccagaccatggctggagaaggaaagaaggtgtgttttgcctgactcagkgactatagagagaaccaagttctgcaggcctgtcacctaagtctcaggtgagtatgaattctcttgtgtttttcacagattgttgcagtggcaggaccaaggtcaaatgagttatagccaagtctacagtaagatgtggcagtattctgttttgaagccgggaccatgattggcaagcttgccacttggtcaagtgctcaccctctgaaaatgt

SEQ ID NO: 480845 - DNA, 570 bp, Homo sapiens
ttattctaattacttagttttaattataatgtgtcttttttttttttttttttttttttgacagagttttgctttgtttcccaggttggagtgcagtagtatcatcatagctcaatgcagccttgaactcctgaactcagcaatcttcctgcctcagcctcccctcagcagccaggactatagggttgtggctaattttttgatttttgtagaggtagggtcttgctctgtcacccagggtggtctcaaactgctgtcctcaagtgatcctcccagctgggactacaggcacaagccactgtgcccagcttgtcactcttgaagaaagaggaaatgccattcagttggcatgtgctggagttgtttgtgtgtgatgatgatggatttccattgatccctctgtgctcttccctgtagctcaaggmcaaccactaacatttctgaagctgtagttattgatgaagacctagccatggaaaacaacagttattcagccccataattgtcaaactcacgactatagtactgcttttactcttcttaggcacagccaaagacaaggcatgtgct

SEQ ID NO: 480846 - DNA, 632 bp, Homo sapiens
gcagagacctgggaagaccacttcaaatgtgggaggaaacatttgaatcagaacatattaaaagagaaattgtcatctacgtgtgttgcttaaaatataattgagaggaaaagaactatgttctattggttctggtaatacagtagatttgtctcayctaattagcaatagtaaaaataccaacggaattagaaaataatatagttctgtagccaaaaagggtaatgttgtgaaaaattataattttatcgaacactcaggatatacctagttctagcaaggttttgtggagtagaaccaatactgtactattaatattatagtgtcatactgaatagtttcactatgcggaaaaccccctgtgctctgcccattcattcctctgtctccgcaaaccactgaccaccaatgatcttttgactgtttccatagtttggcttcatcagaatatcatacagtttgaactatactttctggttagttttgctgtgaacttaaaattgctctaaaactgaagcctaattattcatgaaataagcatcttttaggtgcaccgtactgtgctacatcatgttttaaaagattgttaaaagctgttggaaagcattgctgagataaatggaacgctcaga

SEQ ID NO: 480847 - DNA, 525 bp, Homo sapiens
agcctggcttgtgtaacaagtggggatcaggtggaattgttgaggaatgtctctttagagtctacaaatttgatcgaagtaaggattaatttaaagcacaaaatatattttcagcagagaccaaatgttccccaactattaaatwtaactatcaataagtaaacacatcaagtagaacattatattcttgatattattattaaatactattttcctgtgcctttaagaaaagaagcagacactccttgggatcactcacagctcaatttttatggcatttgttttacaaatactgcgttactgtggaggaaagaagtggggacatgcacagcatatttattttttctatatccaaagtaaatccatacatcattactttaggaactaaatatgtataatttgccttggatttattacagcatcaaagtgcaactggaaatatacggagtttgaaattagaattgtcaactgttcacatggagatcaatagccttggaaagggtgactgtgggccctgccaggcaa

SEQ ID NO: 480848 - DNA, 525 bp, Homo sapiens
agcctggcttgtgtaacaagtggggatcaggtggaattgttgaggaatgtctctttagagtctacaaatttgatcgaagtaaggattaatttaaagcacaaaatatattttcagcagagaccaaatgttccccaactattaaatttaactatcaataagtaaacacatcaagtagaacattatattcttgatattattattaaatactattttcctgtgcctttaagaaaagaagcagacactccttgggatcactcacagctcaatttttatggcatttgttttacaaatactgcgttactgtggaggaaagaagtggggacaygcacagcatatttattttttctatatccaaagtaaatccatacatcattactttaggaactaaatatgtataatttgccttggatttattacagcatcaaagtgcaactggaaatatacggagtttgaaattagaattgtcaactgttcacatggagatcaatagccttggaaagggtgactgtgggccctgccaggcaa

SEQ ID NO: 480849 - DNA, 598 bp, Homo sapiens
ggttagaagggcattaagaactttaagttaaatatgtagcacatgggagaagaggtccattttggcaaaacagcagagatatgcttttcttaccycaaggctgaaggattttcttttacaaaaattgattaatcgatttctttttatttatttaatttttttttttttttttgagatggagtctcactctgctgccaaggctggagtgcagaggcgcggcctcggctcactgcaagctccgcctcctgggttcacaccattctcttgcctcagcctcctgagtagctgggactacaggcacccgccaccacgcccggctaattttttgtatttttagtagagatggggtttcaccgtgttagtcaggatggtttggatctcctgacctcgcgatccgcctgccttggcctccgactgtgctgggattacaggcgtgagccaccgcgcctggcctatttttttattttttgagaagcggtctccctgtgttgcccaaactggactgcagtggtgcaatcatggttcattgcagccttgaactccagggctcaattgatcctcccacatcagtctcctgagtagctgagaaaagaggcac

SEQ ID NO: 480850 - DNA, 471 bp, Homo sapiens
accttttaattactctctgcttttcttttccatctttgaaataaaaatacatttattctaattctctttctctctgtctctctcctggaaaaattattgtaagatggaagcacttttaaacaacacaagaaaatgaaaagaacaggactagtcatattttccatattattattaaatactaaaattaatcattctttaatttctagagcttcattttctccaaacagtctagagactacaaagataacaggtttgtcttttatatccctgtgacttctcacctacgtgcaagtcaaaatactgttcttaaatcaagagtggtttttcttcttaaagttatccaaagtcactttctggagttctttaaaactccgagatgtgagaaaaataaaacttcatgtgttaaaattctatagagcattctcactaaaatggrtttctataaactctgttcaagttgtcaacaacaaa

SEQ ID NO: 480851 - DNA, 630 bp, Homo sapiens
ttttattccgtcagccttccttttataccagactacccctatgatcgaaagcactgacagttgaaagaggccaagggccccacatggaagaatcgggggcactcactaatcccaggcccagagaggtcttagaggaattatgagaagcaacggctggagtatgtgtgtctggcattgccctttcttttgctggtagattattaacctttatctttaactttgtcaaagtggataattcatataatcccttgacatcctttcaaccaacaaaactatatcatcctatataatgtgactactgggaagatatatctcttggacttcttctccagagcacttctaatctggtttgattttaagattatttggtcttaaatctttctacaagatatgaagcttaaagcacagtggggacacttttcccgagacatagatgctctaatcatactttcctgactctaaaattctcctgaatagattaagacaaaactttattacgatcactcttaatgtcaagtatyctccggatgtcctgccctcttcagaaagcagagaatatttcaggtattaaaattggctcccagcggggtcttgggtgcagaggctgcgacgaacctgttgagtgaaact

SEQ ID NO: 480852 - DNA, 375 bp, Homo sapiens
ctattttttttcattttccctattctctgacacatgcgcrtgcgtgcgggcgcacgcgcacacacacacacacacacacgtctatcttcgtagatataaatccaaatagctttttctaagttattctacttacaataaagtcttaggcctttctctgggttaactctaagccattctatttttaacctctttgattttattcccatcagtctctatttctcacttccatttccattaccccttcccagcctcaacaaatggcctctccctctgctatgtgcttcctgtcaatccagctcttgcttaccataaattagcattttccagtatccacactcagatttaaaacgcagaagatagctctgttgactacat

SEQ ID NO: 480853 - DNA, 623 bp, Homo sapiens
tattatattttaaaattaaggctgagctgctggtttctggtaggaaatggaaggagggaggaaggaaagaaatcagagaaaaataaaaagaaagagaataataataattattattattattgttactgttgccactgttcactcaaaatgactacagcggtggcctgccagttctccacttacatagcctgacaagggtatttcagatttccagttgctkggcaacctgccttttacgtttaagccgtttaaatgtattcacctttagaattaggtatatttacagatgactgggcaacaagaaagagcccctggcaggccaagaactcctaggatgtgtggaatcaacagagtgtgtggggagcaggtctggtcagagagcctgacggagaatattagtgacacatttaggcctgaaaatgggaaattgagatctgcatacaaagtcttttgctgcttgcaaacagtctcaaagacttatttctggccccttcgtttcaaagtttacttctgccatcctaaaaccttcctgcgggtctgtgtggcataccagcagtggcctgagacaatggcttaaagatgtgtccccctgcacaggggcatgtcccccactcccctgcccc

SEQ ID NO: 480854 - DNA, 623 bp, Homo sapiens
tattatattttaaaattaaggctgagctgctggtttctggtaggaaatggaaggagggaggaaggaaagaaatcagagaaaaataaaaagaaagagaataataataattattattattattgttactgttgccactgttcactcaaaatgactacagcggtggcctgccagttctccacttacatagcctgacaagggtatttcagatttccagttgcttggcaacckgccttttacgtttaagccgtttaaatgtattcacctttagaattaggtatatttacagatgactgggcaacaagaaagagcccctggcaggccaagaactcctaggatgtgtggaatcaacagagtgtgtggggagcaggtctggtcagagagcctgacggagaatattagtgacacatttaggcctgaaaatgggaaattgagatctgcatacaaagtcttttgctgcttgcaaacagtctcaaagacttatttctggccccttcgtttcaaagtttacttctgccatcctaaaaccttcctgcgggtctgtgtggcataccagcagtggcctgagacaatggcttaaagatgtgtccccctgcacaggggcatgtcccccactcccctgcccc

SEQ ID NO: 480855 - DNA, 628 bp, Homo sapiens
ttatgagcatgagtttttttcttcaggcaatcatacgaataatacctgctcacgttatctctagaagataaaaacagagaaatcaaagatgacctccaaatcaccaggtccttgaatccctggtgtaggaatgggctgggaatatctagctcctggacctagtgagcatggcagcccccacctggaygagggcggccctaacctactctacatggtaacttaaagctgccttagattaatgtactaggaaccacttactctgagatgtcacttatataaaataagcttgtaaattataacacaaaatgtaatgagagaagcctttgggacctgataagaaataataaaaatggagacttggaaaaacaggacttgttagcactgaccaggaaaaattgtgctctcattttaggagtctgatactgttattttagagcaaaaatgctgctagagtaggcaaggccagtcttcaggccgtgagaactaccatatcttcaacagccagctccctctgctctgattctgtgctgaataagctgccttctgcgatgtatttcagtgtcctgagtggctcacctcaacaagactgagacatgccatgtgagtgacttcttctggttcttagtaa

SEQ ID NO: 480856 - DNA, 628 bp, Homo sapiens
ttatgagcatgagtttttttcttcaggcaatcatacgaataatacctgctcacgttatctctagaagataaaaacagagaaatcaaagatgacctccaaatcaccaggtccttgaatccctggtgtaggaatgggctgggaatatctagctcctggacctagtgagcatggcagcccccacctggatgagggcggccctaacctactctacatggtaacttaaagctgccttagrttaatgtactaggaaccacttactctgagatgtcacttatataaaataagcttgtaaattataacacaaaatgtaatgagagaagcctttgggacctgataagaaataataaaaatggagacttggaaaaacaggacttgttagcactgaccaggaaaaattgtgctctcattttaggagtctgatactgttattttagagcaaaaatgctgctagagtaggcaaggccagtcttcaggccgtgagaactaccatatcttcaacagccagctccctctgctctgattctgtgctgaataagctgccttctgcgatgtatttcagtgtcctgagtggctcacctcaacaagactgagacatgccatgtgagtgacttcttctggttcttagtaa

SEQ ID NO: 480857 - DNA, 558 bp, Homo sapiens
ctctgacacatagaactttctaaaaccctcatccaatacagccaagctcccagtcctggcctttagagcaagccttctgtgattcccatgccctccaccatgctaagccattactattctgtccctgctcatgccccagcatgtcaaggtgatttctctgcccatgagagcagagcttctaagtgttgaaagggtgccaagacttcttccgggggaaagtaattaatcacattataagaggcacacactctagaagaaaattgcayataaaaagtcagactagagaatttcaagcaaaatatcaccaaccttttcctaaggatatgttgattaaaccacaaggagttaattaggtgagggtcaatgaggtatatttgtaaaggtaatgacccattaggctgcatgctatttgaaggggatgtgggacaagtttcaaaacttcctgttgctttgaccatttcattacgtgccagaaactataaacaaaaagaaagaaaagaaaagaagaaaaggaggggttacagggttagatcagttcttcccagcactttaaaattt

SEQ ID NO: 480858 - DNA, 568 bp, Homo sapiens
tcatccaatacagccaagctcccagtcctggcctttagagcaagccttctgtgattcccatgccctccaccatgctaagccattactattctgtccctgctcatgccccagcatgtcaaggtgatttctctgcccatgagagcagagcttctaagtgttgaaagggtgccaagacttcttccgggggaaagtaattaatcacattataagaggcacacactctagaagaaaattgcacataaaaagtcagactagagaatttcaagcaaaatatcaccaaccttttcctaaggatatgttgattaaaccacaaggagttaattaggtgagggtcaatgaggtatatttgtaaaggtaatgacccattaggctgcatgctatttgaaggggatgtgggacwagtttcaaaacttcctgttgctttgaccatttcattacgtgccagaaactataaacaaaaagaaagaaaagaaaagaagaaaaggaggggttacagggttagatcagttcttcccagcactttaaaatttactcttctggaatccaaatttcatccttagcacccagt

SEQ ID NO: 480859 - DNA, 648 bp, Homo sapiens
aaaactctcatataaaatatcgtatgctattctcattctgtttatggaaacaagggcttttatttcacttgcttgcttctaagttaatatctactcactttaaacctttccatcaatcacttagttacagtttcctaatcccttattttcaatttctaaatgtgaacatctctgaaacattctttaagtttgaggtatatgcattgatagaaaaacatggactaaaaaaaactcagtctgtatttatatattcattgtgaattctcaaacattttatcacagaaaaatcaatgtgtttgaagagtgttgcccagacctcagacacattatggtgcacttatggttcatatatagttcattactatatatgcatattacctttctaagatctgaaaacttcagaatttcaaatgacatctgggacagagggtaaaaataactggaggacagtaacaatttctaaatgtattttacattaaatataaaatatgtgtgtttggtattttaatgctaatgagaataatttcaaaaaaaaagtcctaaagcagcaaacagaggtgtttcttcatgaaagcattttccttgctgtctgaatatcyatagaaatgtaggaataataaaatcagccaaataattttatttttatca

SEQ ID NO: 480860 - DNA, 550 bp, Homo sapiens
accaaacccccttgtaatgcacttaccatcctctactttatatggttattttgaggattaaaagattgaggattaaaagagagattacgtataaagtgcctagtatctgcgctcagtaaacatatgcttacattcctcttccccttgtctgtatacatgtaaaggcgagcttagctaaacgttctaacttctcaaagatctcttggcacacggcccacgttaggacagtgacataaaaatatgaacgaagaagggccaggaagacagtgccttcctctacccaactagatatttctttytttagaaagaacaatacgttgtgaaccacagtttacctgctagtggaactgaaatgctgaggggaaaaaaaaaaaaaaaaaaaaaaaaactcaagccatatattactgggcctaaaaaatgagtgaacccaaaggttggagtcaggggtgctccttgtacaggctctccccttcacttggagcagcacctcagcttcagcactggccatgagaaggttaatataaagtagatggtcaaattgctttagcag

SEQ ID NO: 480861 - DNA, 656 bp, Homo sapiens
gaagtgctctttatctgattcaaaaaactagattatcatttaaatattctctttccacatgtccctcaaattgatcatagctatattttcttaagcatgtggcttatagcttgatgatcttggaaaatattcaaaagtagcacataacaggtattgtaaccaagggaggtttcaaagagagtgactggtcagagcatcttctaggatacttcctttttaaaaaaaagttttggaaaaaacttaattcacaaataaaaaatgtatgtattcaaggtgtacaatgtgaggatttgatacacatttacattgtgtactgactactgaagtcaaattaacacatccatcaccaccmgtaattgtcattctgtgtggggaggtggggtgaggacacttaaaatctgctcttttaccaaatttcaagtaaacagttcagtgtattattaactgcagttaccacgctgtatgttagatccccagaacttattcatttcataactgaaggtttgtaccctttgaacaacatctccccatttccccaaaccccagcctctggcaatcattgttctactctctgcttccatgagttcaactgttttagattccacatataaatgccatcatacagtatttgtctttctgtgtctggcttatttcct

SEQ ID NO: 480862 - DNA, 656 bp, Homo sapiens
gaagtgctctttatctgattcaaaaaactagattatcatttaaatattctctttccacatgtccctcaaattgatcatagctatattttcttaagcatgtggcttatagcttgatgatcttggaaaatattcaaaagtagcacataacaggtattgtaaccaagggaggtttcaaagagagtgactggtcagagcatcttctaggatacttcctttttaaaaaaaagttttggaaaaaacttaattcacaaataaaaaatgtatgtattcaaggtgtacaatgtgaggatttgatacacatttacattgtgtactgactactgaagtcaaattaacacatccatcaccaccagtaattgtcattctgtgtggggaggtggggtgaggacacttaaaatctgctcttttaccaaatttcaagtaaacagttcagtgtattattaactgcagttaccacgctgtatgttagatccccagaacttattcatttcataactgaaggtttgtaccctttgaacaacatctccccatttccccaaacccyagcctctggcaatcattgttctactctctgcttccatgagttcaactgttttagattccacatataaatgccatcatacagtatttgtctttctgtgtctggcttatttcct

SEQ ID NO: 480863 - DNA, 656 bp, Homo sapiens
gaagtgctctttatctgattcaaaaaactagattatcatttaaatattctctttccacatgtccctcaaattgatcatagctatattttcttaagcatgtggcttatagcttgatgatcttggaaaatattcaaaagtagcacataacaggtattgtaaccaagggaggtttcaaagagagtgactggtcagagcatcttctaggatacttcctttttaaaaaaaagttttggaaaaaacttaattcacaaataaaaaatgtatgtattcaaggtgtacaatgtgaggatttgatacacatttacattgtgtactgactactgaagtcaaattaacacatccatcaccaccagtaattgtcattctgtgtggggaggtggggtgaggacacttaaaatctgctcttttaccaaatttcaagtaaacagttcagtgtattattaactgcagttaccacgctgtatgttagatccccagaacttattcatttcataactgaaggtttgtaccctttgaacaacatctccccatttccccaaaccccagcctctggcaatcattrttctactctctgcttccatgagttcaactgttttagattccacatataaatgccatcatacagtatttgtctttctgtgtctggcttatttcct

SEQ ID NO: 480864 - DNA, 656 bp, Homo sapiens
gaagtgctctttatctgattcaaaaaactagattatcatttaaatattctctttccacatgtccctcaaattgatcatagctatattttcttaagcatgtggcttatagcttgatgatcttggaaaatattcaaaagtagcacataacaggtattgtaaccaagggaggtttcaaagagagtgactggtcagagcatcttctaggatacttcctttttaaaaaaaagttttggaaaaaacttaattcacaaataaaaaatgtatgtattcaaggtgtacaatgtgaggatttgatacacatttacattgtgtactgactactgaagtcaaattaacacatccatcaccaccagtaattgtcattctgtgtggggaggtggggtgaggacacttaaaatctgctcttttaccaaatttcaagtaaacagttcagtgtattattaactgcagttaccacgctgtatgttagatccccagaacttattcatttcataactgaaggtttgtaccctttgaacaacatctccccatttccccaaaccccagcctctggcaatcattgttctaytctctgcttccatgagttcaactgttttagattccacatataaatgccatcatacagtatttgtctttctgtgtctggcttatttcct

SEQ ID NO: 480865 - DNA, 598 bp, Homo sapiens
gggggtagggatttttgtctatttatttcttctttactgatgcatggccaggacctaggatagtgtccaacattcattcattcctttgttcagcaaatacttattgagtacctagtatgtaccacatgcaaaacgattatgaaagtgattatgaaagtcaattaagaaaccaatatttcttttctgcttggctaatgggcagagttgatgaaaggaagcaacaggtctttctgatcactttgtgctccatcagctaaatgttaatgacccctttacttgcaaaggagggatagggttaaatttaggactgtgtagggtccagccccacaggattggtgggttttctccccrtgtgcagagacaagagagtgtagaaataaagacacaagacaaagagataaaagaaaagccagttgggcccaggggaccactattaccaagacgcagagaccagtagtggccccaaataccaggctgcattgatatttattggatacaaaacaaaggggcagggtaaggagtgtgagccatctccaatgataggtaaggtcacgtgggtcacatgtccactagacagggggcccttccctgcctggca

SEQ ID NO: 480866 - DNA, 598 bp, Homo sapiens
gggggtagggatttttgtctatttatttcttctttactgatgcatggccaggacctaggatagtgtccaacattcattcattcctttgttcagcaaatacttattgagtacctagtatgtaccacatgcaaaacgattatgaaagtgattatgaaagtcaattaagaaaccaatatttcttttctgcttggctaatgggcagagttgatgaaaggaagcaacaggtctttctgatcactttgtgctccatcagctaaatgttaatgacccctttacttgcaaaggagggatagggttaaatttaggactgtgtagggtccagccccacaggattggtgggttttctccccatgtgcagagrcaagagagtgtagaaataaagacacaagacaaagagataaaagaaaagccagttgggcccaggggaccactattaccaagacgcagagaccagtagtggccccaaataccaggctgcattgatatttattggatacaaaacaaaggggcagggtaaggagtgtgagccatctccaatgataggtaaggtcacgtgggtcacatgtccactagacagggggcccttccctgcctggca

SEQ ID NO: 480867 - DNA, 591 bp, Homo sapiens
aggcaatccaattatgtaccataatttgcacataattttcctgctgcttcttttattgttcctcctgtctccaaactagtgaagtctcttgccattgaagacagagtccttaagtctttataatcccgctctgaagctgtattacacaagtaataaacagaaaaaaatattgacaagcatacttttctatatttaatcaaaatagtatcctctcaactaaagcgatcctccagtttcaattagaaagactcagaatgatggacagttattacagccaagataccatgatgcaaatttacaacctcatgtccacctacaaagtccaacaaatgtccattatccacatttattgtcatgtcagacttcagaaacaataaatcccattcaaagcagtggttgcttacttcccaacggcaaaactggacattttkttgttgttgttcaagatttttgtggtaatcatattctttcttgtatacttaatgaagtcattttgatagatttttattctctgacagttaagacaaggtgatataaatacaaaataaatattttgcatagggataatacattctttacctgaaaatttgg

SEQ ID NO: 480868 - DNA, 405 bp, Homo sapiens
taaaatattactcttcttcagagaggaaaaatagctcccctgtttagccaggagacttacttttgctaaaacttggaaagaagaatcccctgaagatcaactacaaccaaaatggaagggcccttatcaggtgtcattgagtaccccctctgctgttaaacttcagggaatacctagctgagtacatctgtccagggttaacctatgtcttacgagtcacagctacaaaagggggacaccaacacctacatctgtgaacctttgggggacctctgctatttaaagaatcaacatctcagccagaagtagtaacatgatgctgtgggtgggaatgggagctacartttttctcttcttcctgattgtaatacttcctttgtatcactttagccaatcccttgggaa

SEQ ID NO: 480869 - DNA, 587 bp, Homo sapiens
ttatgtcccaaatattagccaacttgaggtgaaataaagagaagtgacagactttagtctctgagcgtacatcaaatgcattgtcttgtaggaacaactcttttacttcagttacaccaccatgctctttaaattctctgttatccagtgaaactttctacttaggatatttgatcagttgattcatacccagtgtgaaatgcttgagaagtttaatttcatgtagtatcagggcaataatctctttactttracccaaacatctttgactatgaaaaatcactgagaacaaaggacatcccacaaaggcatcaactttgttcttccccagcttcacactgtaagaaatttgggttctccacctattcctgggttcccagggaggtatcagtacaagaagataaaaaattgctccttcctattctaatttaataatagtaagggaacatatattttataaagcagtacctctgggcagataaatacactgaaatacagtgaaggcaaaaaatagggctcatattggcatgttagggaacaatttaagttaggaaaacttctatagcaagatagctgcaaaggacatt

SEQ ID NO: 480870 - DNA, 562 bp, Homo sapiens
agacaggcacacagggagagcctcagttgatgatgaaggcagagattggggtgatgagtttgcaagccaaggaaggcccaggattgttggcaacacccaaagctaagagaagggcatggaacagaatctccccargtgccttcagaaggagccaaccttgctgccatcttggtttcagacctctagcctccagaactgtaagagagtaagtttctgttgttttaaaccacacgtgtttgtggtcatttcttagagcagcactaggaaaaaaatacaccctttcattttcccccccagttttgtaagccaatgcatttcctccttgcttaagcaaaattatgtttctcttacttacagctaaagtcctgaataatacatgtcacctacactatgctatgtgctgaggattcaaaggcaaatgagaccctgtccctacctttaagtcatccatcctgtggctctaagcccagcatcatctaaccttgctggggcctaaaccagtgagaaggacaaaaagaaactcaaagtcatgctgagatggcaatgtcttaccccaaataat

SEQ ID NO: 480871 - DNA, 643 bp, Homo sapiens
ctgtggaactgagccttgtaaaaattccttgtaggggagaggggagtgtggtgtcatcaaagcaagcaggtgaaacaaaaagacagggtgttctcttactgaaatacatcagggaggcggggtgtggtggctcccgcctataatcccagcaccttgggaggccgaggcgggcagatcacttgagtccaggagtttgggactaacctggaccacatggcaaaaccctgtctctacaaaataatacaaaaatgagcctggtatcatcgctcctgcctgtagtcccagctactcaggagtttggggtgggaggatcgcttgagtccaggaggtcgagkctgcagtgagctgtgatggacccactaccctccagcctggatgactgagggagaccttgtctcagaaaaaaaaaaagaaagaaagaaagaaagaaaagaacagaacagaaaagaaatcatcagcgagaagagcaagaatcattctaatctggcctgagtgaaaaaggagccccaaggtagctaggaactggtttctctctattttgtcttaaaaagttattgctttccaaacttggttttcttgacttttaaattaagggttgactctatgtgtgtatgtttaataaagaggatgagaggaaagggat

SEQ ID NO: 480872 - DNA, 652 bp, Homo sapiens
tcccctctctgggtctcagcattctcatctatgaaatgaggagcttgcctttgacaagtrtttcacaaattgagaattgtgatccatcaagaggtctaaagccattatttaaaaaatgaaatagactagaaaagaaagtattggaatgccttgtgctttgcaaaggcaagtatattttttgagaaatgtttcccaggtgagtgtatgtgtatacaatctacatattaaaacgggttgcaatgaagtttaaatgacatcaggtcacatgatttctaaatttcctttcaactccagcttttttattccatgaatgagccaagaagaagacagagacatcctcagaaccagaaccagaggatatcaatggcttgctctgctcatagtcctattttatattggagccacatcagagaatatttataattactgggcatgccacaaacagccaatctatttcctttgccaagaatatccctcctttcctccccatcttactctgaccgcttggtacctggtgaagtcccacagatccctgaagagccagttcaaatatcactttgtcaatttccccaaggccccaggcagaatgaactgctgcttcctggatgggccctgcaactctgtacataaccctctaccaacactttttgtt

SEQ ID NO: 480873 - DNA, 526 bp, Homo sapiens
tgtgtcttaaaccaaatgctagtattaacttgttctctcatttgaaaagaggaaatgatgtgaaatggatttgactcaagaggaagctgaatgcaggactataggtgtcctcaccggaggagctggtgtgagattcagttgaaaagccataagtgctgttaaaaaaaaagtatttatcttagccaaaggattaaagctggcatagagcataaacctggttatccccagtatgtcacactttacatttgcgtaggagcttaataatgctctcacctgagtcattgcatttgggttcatatggcaactctgtgaaagagacaggaaagkgactggtaaccacattagaggacagccacagcaggagtgaggagctgccactttgctgcctctatagaggaggaatgccagtccacatttctcagtgcagagcttcatttcctggcctgggatgtcaggggaaagggttgacctggagtcctggcattctacttcccatggcaatcctcacgctcatcttagccccact

SEQ ID NO: 480874 - DNA, 526 bp, Homo sapiens
tgtgtcttaaaccaaatgctagtattaacttgttctctcatttgaaaagaggaaatgatgtgaaatggatttgactcaagaggaagctgaatgcaggactataggtgtcctcaccggaggagctggtgtgagattcagttgaaaagccataagtgctgttaaaaaaaaagtatttatcttagccaaaggattaaagctggcatagagcataaacctggttatccccagtatgtcacactttacatttgcgtaggagcttaataatgctctcacctgagtcattgcatttgggttcatatggcaactctgtgaaagagacaggaaagtgactggtaaccacattagaggacagccacagcaggagtgaggagctgccactttgctgcctctatagaggaggaatgccagtccacatttctcagtgcagagcttcatttcctggcctggratgtcaggggaaagggttgacctggagtcctggcattctacttcccatggcaatcctcacgctcatcttagccccact

SEQ ID NO: 480875 - DNA, 534 bp, Homo sapiens
ggggtgagttaatcaaaggtcatttggtttcgtgtaagcaatgtttctcaaagcgaagtcaacagactagcatcatcattacagtcctactaaatcagaaacttgaggtggggaccaacaatctctgttttaatgagctttatcattaaattagctattttgctgcacaccataatttgagatgtagaggaaggaccgatatttagcactcccaaatttctatccacttctgcttgcctttaaaggggaggatgcataatatatctgagtggagagctgtgagactaccatgaagtctgtggtattgagaggtgaaatagaaaccctaagccakgggccagctgtagagtggggggtagaatgttggaggcctatgcagcataagacatatcaaagatgaaactgagtcatgttgggaaaactcataggccaaggcaagagagaccagatcctgtggcacaccacaggtgggcttcacagcaggccaaggcaggatgctcagggatagaactagtggtgcttgaagggaacaaa

SEQ ID NO: 480876 - DNA, 620 bp, Homo sapiens
ctacttctcctccttccccttcttccttttcctctgcaagattgtcttggttattcttagccctttggatatctgggtgaaaattaaaggcacctcatccatgatgtgccaaaaaagattgtgttggctattcttgggactttttattttcatgataatttttaggatcagcttatcaaatacaaacagcaaaacttcttgggatctaaattgacattgcactgaatctatagatcagtttgcggagaactgatgtcattacaatactaaatgtcccaatccatgagaatggtgtttccctcctttatttatggctcctttattttcgctcaataaaagtgcacagtgttttgaggtagagttattactcatcttttgttagatttattcctagtatttgatcttattaacactattataaataatcaaatgttttagatgtccttttctgaccatctgttgttgttataaagaaatacaatgcatttttgtatactgacaatgtgtctaaaaaccttgctaagtttttaaatttattctaatgaaaattcttgtgtatattctacatgtataatcgagctatctgcaaaaaaakactatttaatttgttattcccctga

SEQ ID NO: 480877 - DNA, 666 bp, Homo sapiens
aaccctcatgacttaatcactctccaaaggccccacttcttaataccatcatatcgggcattaagttccagcatgtgaattttaggaggatgccaacatgcagaccatagcaaaaactaactatacagctataaagttataaagacagcgtggtattgataaaagaatagacacagaaatcaatggaagaggtaagaaagtttagaaatagacacacaaatatagtcaactgatctttgacaaatagtaaaaggcaattcaataaagactagtcttttwacaagtagtactggaaaaattggatgtccatatgcaaaataataataataataataataataataataataataataatgaatctagacacaggccttatactgttcaaaaacattgactcaaaatgcatcatggacctaaatgtaaaattcaaaactatacaacttctagaagaaaacaggagaaaaccaaagaggaggagatgctaaaaagtagtaggaaggggcaggtagggcacacagtgtgcatttgtcagacactgtcctgggtaactttgtgcttattgtttcatttaatccttatggcatggtccgattcttgacatcctgggtcagatggcgacactggaaaagttaggttcatgggagggcagggccagcctggcac

SEQ ID NO: 480878 - DNA, 625 bp, Homo sapiens
tttatataactatgaaagaaacaaggctacaacagtgatttattttcttctgatgtttaaaagtattctacgtaggcttggttttgcaaatttcacattttaattaacctagttcatatagattgctaaaaccaacttcgtaaattggatgaagtctttaacaatcaacatcagtcagtgacactattaaaatgtttaagctacttggcaatataaattaaggcaaagttcttaaaattacatttgagtttgaaaacatgtatttttatatttgtaacactttcatatacatgtatatttgtaggkatcagaaatggtttttcttctagaactttttgaaaagcttccaagtattttcatttcctggaaagtatatctagtcagatggagaaccattggtgcatatattccacaccctgacctttggtgttagtgacatcggctgttttgttaatgtgtgataattgtttttaaaatattactatgactttaataataattacgatttttttcaattttacaatttaaaaaaaatttgggacagagtctcactctgtcacccaggctggagtgcagcggcacaattttggctcactgcaacctctgcctcctgggctcaagggat

SEQ ID NO: 480879 - DNA, 574 bp, Homo sapiens
cttagtttcaggcaaacaattgttcaacagaagccccttcaatttttaattatgttctcttccctttccaagttcactgtattctctgatttttaatcttaaaagtcagtcagggtacattatttatgttatattcaatacggagaaaaagaagaaaagggattttattcaggacactaactctaaccttgaaatgttattttctgaacatttgttctgctcactgagcaaattttagtcttcaagtcagatgtctaaatacagcacttgagctctgcttaaaggctaaaaatacagacttctgcacaaggtgatggttacaaaggaaggtgtttagaatacggttcaatagaagctaaggtaattgagcattagctatatagttcagccagaagaattcctcttctacgctgaagctttggagtcaaatcgtaggctattatcctttraaatacattttacatggaaagagaatcaattaaagaagtggtttcctgaaaccttcaccaggtcctcagttttgatcatttgaagactagaagttacggaatcctttgtcaacctctctctctct

SEQ ID NO: 480880 - DNA, 556 bp, Homo sapiens
actcagtctgaggattcctccttcctgatatatatctatatctgtatctgtatatggacataacatatatatacatctctctattatctaatctgcctctatctatctatctatctatctatctatctatctatctatctattgatgcattccaagcttattcagttctagaaaatggaggagggatggaactcagtcctcagttcatactgatgtgacttctcctgggctccttgcttaggcatrtggggccaatttgatttggatgactccactggcagctggtttcactataggacagctgggaaaattttgcttcatctcccaaaggtttactgcttagtactaattctttctcccttgcaggctgccagcaggcatccccttgtggtatcgtcacatcagaggctatgctatcaaatgggttcatatgtcttccaacctgtagaattgcaacccctgacttttctatgtatctggaagctcttagacaccccaagggatggggccacttctaacactgagacctcctcttctcctccatcttcaaacaaaa

SEQ ID NO: 480881 - DNA, 556 bp, Homo sapiens
actcagtctgaggattcctccttcctgatatatatctatatctgtatctgtatatggacataacatatatatacatctctctattatctaatctgcctctatctatctatctatctatctatctatctatctatctatctattgatgcattccaagcttattcagttctagaaaatggaggagggatggaactcagtcctcagttcatactgatgtgacttctcctgggctccttgcttaggcatatggggccaatttgatttggatgactccactggcagctggtttcactmtaggacagctgggaaaattttgcttcatctcccaaaggtttactgcttagtactaattctttctcccttgcaggctgccagcaggcatccccttgtggtatcgtcacatcagaggctatgctatcaaatgggttcatatgtcttccaacctgtagaattgcaacccctgacttttctatgtatctggaagctcttagacaccccaagggatggggccacttctaacactgagacctcctcttctcctccatcttcaaacaaaa

SEQ ID NO: 480882 - DNA, 590 bp, Homo sapiens
actctcctttgttgcctcatgtccagtgtcttaaaatgtttgcttcaaatattttgtccatttttaattatttcaggtgggatagtaaatctggttcattatgccatcttgacaggaaatggagtttctgactcatagtaatttttatattacaagaaaaatgttttaaatgcttactttttcactttttattaagaaggctaattacctctctgcctcaattccctcatctaaaaattagaattatagttgtgcctactttcggagtggctgataaattttactgatrtaatggtataaatcactgaatagacacattgcaaacacccaataaattacttattttatcactattttatattacaaatcacatgaaacagtctttcatttgtaaatgctgtctgtccacttatattgaattcaatttctatttctattaaacaagctgaatatttgcgttatgtgcaagcaaagagtgaagtggatctactgaatgagagagaagaatcatacatcttgaaagacaggtggtaactgtgaatatagttagttgggtaaaatttcttgggagaaattgtattaaggacact

SEQ ID NO: 480883 - DNA, 480 bp, Homo sapiens
aaatgtccaaggaaatttatgttatataaattcttaacacagttataacatatttgacagagtttaatggaaacaatattaggcatatttcaaatcatcatagaattcagattatctacagaaaatgttgcctagtgtatggtgtgttcagctctgctgtgtctctacagaatattgagaaagggaagaaggagcgattttttaaactcaaaattaaaacagaaatttaagcatatttttatattaaagaatactttgcttaatgtacatttttaaaaacagcaaaatataaaacatagaaataaatttctaccttggatctaactagagagctcttttgccttctctacttttcttggattcagtaaaaataacaaccatttycgcatagattttatgggtactgaactgcattttctcaagaaaacattattttcttagtaaattcgcctttatatatgtatttacttctaacaaaaa

SEQ ID NO: 480884 - DNA, 572 bp, Homo sapiens
cagttaggtaggtggcttgtgcccaaatctcttagctacgtgactttgggcaagacacttaaacctctctgtcggtgtccttgtctgtgaagtgagagtggcagtaccagcctcctggtgtggtgaggatggaaggagcgtgtagcctgctgggaacatcatggcgcccgagggccggatgggcatttggcagcctctgcgcgaggagtcctcgcagtggttatgcatggtgctgggagcggagcgctggcttcccactcttcaggcgaggcagtggagcgggttgctcttgccagagaggttcctagtagggtcgcagagaaacgaagcggcacggcgaggattgggacccagggctgactccagagcccgagggccttccactgctccacaaacagcagcgcgtccctgtgcaagktcccaaacctgtgtggggctcagcttgcttttcaggaagggggcgggcaggtgagcagccgactcccttagcgccttcggccccggagggactggaggcctggaggggcctcagcgccgccgtgcccacctgtccgcccccagatggcctacca

SEQ ID NO: 480885 - DNA, 572 bp, Homo sapiens
cagttaggtaggtggcttgtgcccaaatctcttagctacgtgactttgggcaagacacttaaacctctctgtcggtgtccttgtctgtgaagtgagagtggcagtaccagcctcctggtgtggtgaggatggaaggagcgtgtagcctgctgggaacatcatggcgcccgagggccggatgggcatttggcagcctctgcgcgaggagtcctcgcagtggttatgcatggtgctgggagcggagcgctggcttcccactcttcaggcgaggcagtggagcgggttgctcttgccagagaggttcctagtagggtcgcagagaaacgaagcggcacggcgaggattgggacccagggctgactccagagcccgagggccttccactgctccacaaacagcagcgcgtccctgtgcaaggtcccaaacctgtgtggggctcagcttgcttttcaggaagggggcgggcaggkgagcagccgactcccttagcgccttcggccccggagggactggaggcctggaggggcctcagcgccgccgtgcccacctgtccgcccccagatggcctacca

SEQ ID NO: 480886 - DNA, 552 bp, Homo sapiens
agccaccaggatcagagaagagaggtggytgtgaaattcccaagacacaagaagggatcaagactggagggggtggggaaactgactagaaagtcttcaaggtaggagaccatgagagctcagatcaggagaaggggtagaaaggcgggacctcctctgcagcctccaccttgaggcccaaccccttgtcaagagacagggatgagggggtggagcaaatcgggcccagtttctaccttcccccaccttgaaatcctcccagctttctaaggttttaggatattgatctatgtgaaaaacagccgattcaatgtgacgcagtttgtgggcagtgggtaaagagggacctggcccagtgaggagtagctgccctccaaccaaagagtcagaaaaaaaaaaaaaaagtcagttttgaacacacctagtttaaggaacttgtgagtcgaccagagggagatgtcctagaggcaggaagaaggcctgagctggaggtttgggggctataagcatatggatggaagtgaatgaggtcatcccaaaaaagtgtgcaga

SEQ ID NO: 480887 - DNA, 459 bp, Homo sapiens
ttttgggggtaggttgggggaagggctgggagaccctgaggtctcattacagattgggcctccccaggcaagtcatgaaaggcaggtatatgtagaaatagaaatccaagatccttcaagatatcccagataggccaggcacggtggctcacgcctgtaatctcagcactttgggaggctgaggcgagcggatcacctgaggttgggggttgagatcagcctgaccaaagtggagaaaytccatctctactaaaaatacaaaaaaaaaaattaaccgggcgttgtggcgggcacctgtagtcccagctactcgggaggctggggcaggagaatggcgtgaacccgggagacggagcttgcggtgagccgagatggcgccactgtactccagcctggctgacagagtaagactctgtctcaaaaaaaaaaaaaaaaaaaaaaaaatttacccaggtgtgg

SEQ ID NO: 480888 - DNA, 459 bp, Homo sapiens
ttttgggggtaggttgggggaagggctgggagaccctgaggtctcattacagattgggcctccccaggcaagtcatgaaaggcaggtatatgtagaaatagaaatccaagatccttcaagatatcccagataggccaggcacggtggctcacgcctgtaatctcagcactttgggaggctgaggcgagcggatcacctgaggttgggggttgagatcagcctgaccaaagtggagaaactccatctctactaaaaatacaaaaaaaaaaattaaccgggcgttgtggcgggcacctgtagtcccagctactcgggaggctggggcaggagaatggcgtgaacccgggagrcggagcttgcggtgagccgagatggcgccactgtactccagcctggctgacagagtaagactctgtctcaaaaaaaaaaaaaaaaaaaaaaaaatttacccaggtgtgg

SEQ ID NO: 480889 - DNA, 469 bp, Homo sapiens
tcgggctaggcccgagccagagggctgcaggtggtggagggcaaaggtcggggggatgggaggaggctccagtgctggcttggataggagattctaggctgggcccagccctgaccccaggtggtccagagtcagtctctgatgctrgggtacagttgtgaactgtattacctgtgacagtggcagggtggcagtgttaacaaagagtaagtgcttatctgtgaggccacacaagtgacttccctgaagactgactacagccaaacaaggcgcagggtggcggggaagacaaacaccaaaatggtggtaactgctgaaactgagggtttagccttctcttgacttttgtgcacatttaggtatttccacaccaaaaagtttctgtaaaagttcatctttacctataatatcaataagctccaaaaaaagtagagttgctttaaaatggcagccttaatcattaacctca

SEQ ID NO: 480890 - DNA, 624 bp, Homo sapiens
tggtggtgggcacttgtggtcccagatactcgggaggctgaggcaggagaatggcatgaacctgggaggcagagcttgcagtgagccgagatcgtgccactgcactctggcctgggcaacagagcgagactcagtctcaaaamaaaacaaaaaaaaaggccgagcgcggtggctcacgcctgtaatcccagcactttgggaggccgaggcgggtggatcacgaggtcaggagatcgagaccatcctggctagaatggtgaaaccccgtctctactaaaagtacaaaaaattaggtgggcgtggtggcgggtgcctgtagtcccagctactcgggaggctgaggcggagcttgcagtgagtcaagatcgcgccactgcactccagcctgggcgacagagcgagactctctctcaaaaacaacaacaacaacaaaaaaacatgtccgtcaggcaagtatgaaacctgaaaatctgtcaaaatctggttagtaatctgggagatgcaatgacagtcaggaggttggggcagaatttacgtttcaagtttctcacaatgtagtcattattataagaatcacctggaggacttgttaacaacacatgctctgaggctacctgatcggag

SEQ ID NO: 480891 - DNA, 624 bp, Homo sapiens
tggtggtgggcacttgtggtcccagatactcgggaggctgaggcaggagaatggcatgaacctgggaggcagagcttgcagtgagccgagatcgtgccactgcactctggcctgggcaacagagcgagactcagtctcaaaacaaaamaaaaaaaaaggccgagcgcggtggctcacgcctgtaatcccagcactttgggaggccgaggcgggtggatcacgaggtcaggagatcgagaccatcctggctagaatggtgaaaccccgtctctactaaaagtacaaaaaattaggtgggcgtggtggcgggtgcctgtagtcccagctactcgggaggctgaggcggagcttgcagtgagtcaagatcgcgccactgcactccagcctgggcgacagagcgagactctctctcaaaaacaacaacaacaacaaaaaaacatgtccgtcaggcaagtatgaaacctgaaaatctgtcaaaatctggttagtaatctgggagatgcaatgacagtcaggaggttggggcagaatttacgtttcaagtttctcacaatgtagtcattattataagaatcacctggaggacttgttaacaacacatgctctgaggctacctgatcggag

SEQ ID NO: 480892 - DNA, 616 bp, Homo sapiens
atgcaataagccaaagggctggctgagctgataacacactgctttctgtggayggcggcggagctaaaagagtattgtaacatgccctctggggccttggggaaccccacctggatcctgccaagaggcctgcatgaagtttgctcctgccagcactaaagcagccagttttttcctgcactcactcacctgcacacttcctcctgcgatgggtgggacacagtcaacctgagtgagcagagtttgctcatgcaggcacctaaattgctggcaagttcctgagctcattcgcttcaattcccgtactcatttgcatgggtgctccctcccacaaggggttgaacaggacaggttgagtaaatggtgcacccctcttttgagtcccaccaagggtcaagaaaatatcctgcatcactttgtcaacttatgccacttaaaggacatgctgcctactttagacttatttacaagtttgcataatttttagacatagacaacgccgtttatctctgcaattactatcaattctaacctaggaagcaccaagttaatggcaataaaaaaaaaaagaataaacaactgtttccagcaacaaggtgactgtaccagtaattaa

SEQ ID NO: 480893 - DNA, 518 bp, Homo sapiens
acattaccttaagcatttttccttctgcaatctacgcaaactacagtctatctcaacagaacaggcaatgtaaacttttataaatataagtcagctcaggtaactgtttggctcagaatggcttccctgttcactcaaattaagagcccaaatccttgctacgacctgtgtacttggcctaagtcaytgtttattctcagatctcatctgcttttctcctacttgctctgtccactataaacacacatttccaggtattcttcagtctaaggcttctgaacctactgtttttttctccccccaatattcacattgttagatgtcacacctgcttcagaacttttctcaagtattaccttctcagccagggtttccctaacccttattttaaaaattataacctctcctctcctcctgacactaagtactctattcccttttcctgctttatttttctttctcacatataccaccttctaacatttactgtatcttacctttttataagaggtaagctt

SEQ ID NO: 480894 - DNA, 419 bp, Homo sapiens
tcagaaatgccaagctgcttccacaaaaccatctcaggggaaaatcattatctacggacattatgcaattttcccatcgaaattacaagctgtgtttgaaaagaaataaaaagaaattgaatttgaaatgcttctgtgcaaacgcatcatcttctagtggatctgctaatgggcttcagatactttcycttgctctaaaatagttgatcagacagcagcttgtgatggtggctgcttcccggggaacggggcatagaatgagcacttatgaacggccagccagcccacctgagccaggttcagaacctgtgagctctgaccacggttcccaaagtggtcactgtatgctgtcccttcccctcctctacctggcagtgctggcacggctctatgctgggactctcactgctcctccagcg

SEQ ID NO: 480895 - DNA, 419 bp, Homo sapiens
tcagaaatgccaagctgcttccacaaaaccatctcaggggaaaatcattatctacggacattatgcaattttcccatcgaaattacaagctgtgtttgaaaagaaataaaaagaaattgaatttgaaatgcttctgtgcaaacgcatcatcttctagtggatctgctaatgggcttcagatactttctcttgctctaaaatagttgatcagacagcagcttgtgatggtrgctgcttcccggggaacggggcatagaatgagcacttatgaacggccagccagcccacctgagccaggttcagaacctgtgagctctgaccacggttcccaaagtggtcactgtatgctgtcccttcccctcctctacctggcagtgctggcacggctctatgctgggactctcactgctcctccagcg

SEQ ID NO: 480896 - DNA, 420 bp, Homo sapiens
gctgctggtgaagttaactgagctgtatagcagtggaaacacttgtgacaagctagtaggttactggagctgtgcgtgctagagttcaggagtagatgacaagtgtatacaaccaagcaatatggggagagagggaggatcatattgttgaagaaaaatccatgtgtagatttgtggataacttgtatcaaatttataatgacgcaggtccaggatgttactgaaaasagcaaatacacattgctgtgagcttgcctgaataatagaaactttaagagcaagtctcagtgcaaagcatttaggggcagacaagacataatgttagtgcataaactgcaggctgaggactgtctctaatcttccaacgcaattaaaaaaaaaaaaaaacaactctggggaagaaaaaaacaagagatgcag

SEQ ID NO: 480897 - DNA, 518 bp, Homo sapiens
gttgcagtggctaagcacagcagaccttcccaaggctggggaggcagctaaaaaaaaaaccagttggaatctccaggaagtgagaaattggcttgggccttgactgatgaatcagatctgggtgctctctgccaggataatatgatagcttgttgactgatgtgcccctctctccactgccctgtccccatccctaaacccatattccaagagatatgggctggccagtttaccacttgccccagggagaaytgtcaggaagaaaaataaaaacagcaaacagattccagaatcttggctctagttcaaaagagagacaaaaatagttttgaaaagagatatcaactggcaaaacaagttttttttaccaccccatccaaactagggagaaggaaagaatttgcagaggaaaaaatcattatgagcaattagaggccatgtgtttggtgtcccacccccagaacaatgccacagtgtgtcaggtgggagctggggccctcacaggcttctccacgaag

SEQ ID NO: 480898 - DNA, 582 bp, Homo sapiens
tcctcccttctatctctctgttaactctaatcagccccctgctgccagatccttcccttcagtttagaatttaggctcaaatcttccttgtccctaatgctcttctcatctccctagcttccaccctcatctttcttctttactcttcccatgttccttaaagaaaatgttacacttctgtgtttcctctttctcccctcccactcattctcagccccactgcagtctgacttccttgtccatgacctcagtgggacagaaattgattgccaaggtcaccaaatctttatctttgtggagttttctgctgctttcatcacagtagatcattccactttcttgaaatctctccttattcagatttcaagacatcacactcctctgattttcctgacaccattcagatcattcattctggggcttctgctcctctgggaatctmtaaatgcagagtgcctctagggatctgtccccagctaacaatgtctccttgatcaaacattcatttgtatagcttcaattcttagtcatctaattatacctaacatagcaaagaacaatccttggcatctactaggtgct

SEQ ID NO: 480899 - DNA, 655 bp, Homo sapiens
ggggatggcaccagatagaattttaattcaaaaggaagcagaacttaaagattaagaaaattcttagcctatccatattgtgaaaactaagaaatcatgttcaggacagaacaccagtggtgtgtctatgtaaccatcggatgaggaaattagtatggatcaaccatctcagtggaatctgggtgctattcatcaaggcaatgaaagaatgacccaaagacatttcagatcagggctgccactcctatccgaggtgcggaatacaagggcatgagggacagaatgatttcaaaggaggggctgcaggtacttgtggggcttcagcactcactatcatgggccaccttgaggctctgctctccacattccatcacagggctcctaggctaccccaggtatggctccaacagatcctggtttagtgagtgctgtgctctgaaaagctgtgcgggcatggtaacctccacctagayttcaaaggatgctctggaaagccacagtgcgtaggcagaaagccaccatgtgcagggccaccatggagagattgcactgcgcaatgcccagtgaagcagtagggtaaggccacccctgaggccctagaccaattgaaccactggtatacaatttcagcctgggagagcctcgggcacccagc

SEQ ID NO: 480900 - DNA, 473 bp, Homo sapiens
gcctttgactcccctcattttctgcactgttttccgtacatttcctgttgaggactcaaaactatgtaattttatttatattttcatttaatttttgcttcactaccctcyccagtagacaaaatcacacgcaaatttcagtggccatttctgtcatgcctactctgtcttcagaaattgcaccatgtttgaaacagaaaaaggaaccacacatttgtttgtttaatgaatgccaaatgatagacctaggtctaacataaagcagaggaaattatcttttcttgagagagtattggtaattggcaatatctgccatgacttgttagcatgtccaaccttcaattcagtttccattttctaagaatttctcttacgttaatgagaaatgagaacagagttatataaatatggttgtttattacaataatacttataatattttaaaatttgaaaggataaaactaaatgtttaa

SEQ ID NO: 480901 - DNA, 473 bp, Homo sapiens
gcctttgactcccctcattttctgcactgttttccgtacatttcctgttgaggactcaaaactatgtaattttatttatattttcatttaatttttgcttcactaccctctccagtagacaaaatcacacgcaaatttcagtggccatttctgtcrtgcctactctgtcttcagaaattgcaccatgtttgaaacagaaaaaggaaccacacatttgtttgtttaatgaatgccaaatgatagacctaggtctaacataaagcagaggaaattatcttttcttgagagagtattggtaattggcaatatctgccatgacttgttagcatgtccaaccttcaattcagtttccattttctaagaatttctcttacgttaatgagaaatgagaacagagttatataaatatggttgtttattacaataatacttataatattttaaaatttgaaaggataaaactaaatgtttaa

SEQ ID NO: 480902 - DNA, 473 bp, Homo sapiens
gcctttgactcccctcattttctgcactgttttccgtacatttcctgttgaggactcaaaactatgtaattttatttatattttcatttaatttttgcttcactaccctctccagtagacaaaatcacacgcaaatttcagtggccatttctgtcatgcctactctgtcttcagaaattgcaccatgtttgaaacagaaaaaggaaccacacatttgtttgtttaatgaatgccaaatgatagacctaggtctaacataaagcagaggaaattatcttttcttgagagagtattggtaattggcaatatctgccatgacttgttagcatgtccaaccttcaattcagtttccattttctaagaatttctcttacgttaatgagaaatgagaacagarttatataaatatggttgtttattacaataatacttataatattttaaaatttgaaaggataaaactaaatgtttaa

SEQ ID NO: 480903 - DNA, 602 bp, Homo sapiens
gttagcccaagggatgctaagcatctgtatgttcttaaatatataaagctttgttgttataaacatcataggacaatttattgaaatattaatgtatgcacgttctccttaaaaactttttattcccctccttccatgtttagtaagtaaccaggttgggtttagtcttttgttcgtagagaggttcatgatacagggtccaaagcaggaattatttcctgccagtctttatagaagcttacacaaattgaagggattccattaggagtactcaaaggagaggaatcaaggtatgcgaagcagagagggtaaagaggatttgatcaagactggggtcaacggatccattcatatctcttgatggtagctgcctggggaccgttgcaagttgcatgaacatggcttgaaygctagatactggagtttctatcctcaacatagactcctcagtctccaacataggacagagacactaggttgctggaccacagggcttgtatttaaacagtgggccaacagtgttgaccagtgtggttgtgggaccaaggaccaggagacagccctgatgttgggagctgcataataatctaaaagctttgctc

SEQ ID NO: 480904 - DNA, 602 bp, Homo sapiens
gttagcccaagggatgctaagcatctgtatgttcttaaatatataaagctttgttgttataaacatcataggacaatttattgaaatattaatgtatgcacgttctccttaaaaactttttattcccctccttccatgtttagtaagtaaccaggttgggtttagtcttttgttcgtagagaggttcatgatacagggtccaaagcaggaattatttcctgccagtctttatagaagcttacacaaattgaagggattccattaggagtactcaaaggagaggaatcaaggtatgcgaagcagagagggtaaagaggatttgatcaagactggggtcaacggatccattcatatctcttgatggtagctgcctggggaccgttgcaagttgcatgaacatggcttgaacgctagatactggagtttctatcctcaacatagactcctcagyctccaacataggacagagacactaggttgctggaccacagggcttgtatttaaacagtgggccaacagtgttgaccagtgtggttgtgggaccaaggaccaggagacagccctgatgttgggagctgcataataatctaaaagctttgctc

SEQ ID NO: 480905 - DNA, 374 bp, Homo sapiens
tataagattctgctttcacttctatgtggaggctgcagcttgcagattctttttttcctaatgccagctcaatgaagcacttacataatttttttwaaaaaaaattccatccaacattttcattgcttcagttagaagagttatttagtgtatctaatctaatctggtaaattgcccaacccacttctttcatccttattgaataaatcagtgctgccaaacagaactttctgtgatgataactgaccaattcagaagccaccagccacatgtggtaattgagcaattcttttatatgactttttccctggctatggcattctgaattgtgtagccaagcatctcctctactcttctatatggaattctaagtt

SEQ ID NO: 480906 - DNA, 600 bp, Homo sapiens
cagtgtttacctgaattataagattctgctttcacttctatgtggaggctgcagcttgcagattctttttttcctaatgccagctcaatgaagcacttacataatttttttaaaaaaaaattccatccaacattttcattgcttcagttagaagagttatttagtgtatctaatctaatctggtaaattgcccaacccacttctttcatccttattgaataaatcagtgctgccaaacagaactttctgtgatgataactgaccaattcagaagccaccagccacatgtggtaattgagcaattcttttatatgactttttccctggctatggcattctgaattgtgtagccaagcatctcctctactcttctatatggaattctaagttttacctcataggaacatkatgtgtcagcaccgtcaatgggtgaatgaaggtctatttctgcacagttatagaatgtagccactagccacaagtggctatttaaataaattaaaattaagtgaaaataaaagtgcacttttaaaatcacgagtcacatttcaattgctcattttcttttttgtaagagaagaatttctggatgtgtggcat

SEQ ID NO: 480907 - DNA, 572 bp, Homo sapiens
ctgggcacgtctaattacccttcaagcataatgtggttataaagagcctaagctgctgttgtatatgcctcccaagtctccccccatcacctctggaggtggggacttaaccrgagaactctccctttggagtatttatggcctcaaggaggctggctttaaaactgaaatgtttctgacacctgagcatctagtacacggagatgggtcctctttgtgtctaaactgtatttgttctaaggactcaagtgtatccacacaggtttggagggcatgtgaggtgggaccactaagacagatttgatggagatctggaagtctaagccacaacgttgattcaaggatactggagcagtgtcacaggtaggggagtaccttccttgaagtagcccctgagtatgtttgagatgaaagggtggatagagactctcatagaagagcaaatgaaaaggtaaaattgcattattacactctccaggacacttggagagaacaattagccaacagcattggggtcagtagaaccaggaactggcactctcagcacaaatgtcagcagcctccatattaca

SEQ ID NO: 480908 - DNA, 535 bp, Homo sapiens
agagcctaagctgctgttgtatatgcctcccaagtctccccccatcacctctggaggtggggacttaaccggagaactctccctttggagtatttatggcctcaaggaggctggctttaaaactgaaatgyttctgacacctgagcatctagtacacggagatgggtcctctttgtgtctaaactgtatttgttctaaggactcaagtgtatccacacaggtttggagggcatgtgaggtgggaccactaagacagatttgatggagatctggaagtctaagccacaacgttgattcaaggatactggagcagtgtcacaggtaggggagtaccttccttgaagtagcccctgagtatgtttgagatgaaagggtggatagagactctcatagaagagcaaatgaaaaggtaaaattgcattattacactctccaggacacttggagagaacaattagccaacagcattggggtcagtagaaccaggaactggcactctcagcacaaatgtcagcagcctccatattacagatca

SEQ ID NO: 480909 - DNA, 563 bp, Homo sapiens
ttacccttcaagcataatgtggttataaagagcctaagctgctgttgtatatgcctcccaagtctccccccatcacctctggaggtggggacttaaccggagaactctccctttggagtatttatggcctcaaggaggctggctttaaaactgaaatgtttctgacacctgagcatctagtacacggagatgggtcctctttgtgtctaaactgtatttgttctaaggactcaagtgtatccacacaggtttggagggcatgtgaggtgggaccactaagacagatttgatggagatctggaagtctaagccacaacrttgattcaaggatactggagcagtgtcacaggtaggggagtaccttccttgaagtagcccctgagtatgtttgagatgaaagggtggatagagactctcatagaagagcaaatgaaaaggtaaaattgcattattacactctccaggacacttggagagaacaattagccaacagcattggggtcagtagaaccaggaactggcactctcagcacaaatgtcagcagcctccatattacagatca

SEQ ID NO: 480910 - DNA, 535 bp, Homo sapiens
agagcctaagctgctgttgtatatgcctcccaagtctccccccatcacctctggaggtggggacttaaccggagaactctccctttggagtatttatggcctcaaggaggctggctttaaaactgaaatgtttctgacacctgagcatctagtacacggagatgggtcctctttgtgtctaaactgtatttgttctaaggactcaagtgtatccacacaggtttggagggcatgtgaggtgggaccactaagacagatttgatggagatctggaagtctaagccacaacgttgattcaaggatactrgagcagtgtcacaggtaggggagtaccttccttgaagtagcccctgagtatgtttgagatgaaagggtggatagagactctcatagaagagcaaatgaaaaggtaaaattgcattattacactctccaggacacttggagagaacaattagccaacagcattggggtcagtagaaccaggaactggcactctcagcacaaatgtcagcagcctccatattacagatca

SEQ ID NO: 480911 - DNA, 609 bp, Homo sapiens
atgcttaagcgcttttttgaggatgaatgaattagatggattaaaaaggaacagtgaaagagtgaaccaagaattgaagaggactctctacggtaacgtcctacagacaagggacagattctcaaaatcctggataaatgttttgggggcagagatttactgtataagaaactgagatgaccacatttaaaactgagagggtttttcaagatataggaaatacatttcagttcaattacaatcagacaaagtaaaatgttcaaagcattcttctctttaattcccctgatgtcttaaaattactttcttcttacattttccataaattattattaaatctatcatacatggtaaactggattataaagagatgttttctccttatataagtgacggtcttcacaaacagaaaaataaactatgccatagatgtcataacaggtctgtgctcttatcaattcgacactgcttagaactgataaaaatagaaaactaaaacacaatggcttaaatagattagaagtttatttttctctcacataaattaagtttagaagtagacaacccaaagctagcacrcaagcacatggtgattgaaaactcaggctc

SEQ ID NO: 480912 - DNA, 589 bp, Homo sapiens
gtaagagtctcttacatgcttgttaaaaagtgcgtctaggccgggcatggtagctcatgcctgtgatcccagcactttgggaggccgaggtgagcagatcacctgaggtcaggagttccaggccagcctggccagcatggcagaaccctatctctactaaaataaaaatacaaacattagccgggcttggtggcgggtgcctgtaatcccagctacgcgggaggctgaggcacgagaatcgcttgaacccaggaggcagaagttacagtgaactgagatcatgccattgcactcaacctgggtgacacagcaagactccatctcgaaaaaaaaaaaaaaaaaaagtatgcctaatcagctacccaggggatttccgttcaggtggtccttgagccatastctaggaaaaacaaaacaaaaacctcctgtcttgttttaccttattttttaagtcctgggcttctcacttggtgatgccaacctaagctatgtgaaagttcactcagagtgcataattctcaattttggcagttcccatcattcatggaaacaaaaactttcacaaaagcttctgtaccattgtgttgcc

SEQ ID NO: 480913 - DNA, 650 bp, Homo sapiens
actctaatgtatgattagacaacaatttatatatccattctattgtcaataaatatttgggtagtttttacttcacagtggactgttacaactattaattttaatcctttgaaataaaaataaatcttggatgtcacaatatttataagttcaactttcctccaagctggccaagctaccatgtgcccacaccttgggctagggtagcaggccgacccacctccagcactcagttcattccccaggggccaagctgctgcatccttatgttctcagccagagaaacagcctagcaaacgcatccaatgtggcctttcctctgaattggataccctgccacacgtctgcatgyctgtacccctggtaagggaaatatctcagtgaccttactctgatgagaatttacatgtctgtggcctgagaatcagcccagtaggcccagtagggccagctggcaaagctacaccaccatgatcacaaacttccacagcctaggccacttagacacttgcaaatatcttgttaacataaaatataacctaagaaattgcatgaaaactaaactatattactgtgtcaacccagaaccaaaaccagtgcatcttacccagccaatatgctagagctcatctacaggaataagtcttttc

SEQ ID NO: 480914 - DNA, 365 bp, Homo sapiens
gctgctttcaaatttatagagttccactgcaggaaaaagaaaagagataaatggtatctctgcctcatagttgattaaagattttaccccttgctctacaaatyagagtgcacttaagatgttctaaaaaggcatatctttattatttagaagtgacacaacattttcaaggagaaaaataatcctctttatgtcttcatttgctatatctagttaaaattcttcacagttgttttttaacatctttctttagtgttcactttatattcagaaatttctcctttaaaattccctttgatcattgcagtgaggagccaaggaggacttaattgcctgtgttcgtcttactcaaaacttttcttttg

SEQ ID NO: 480915 - DNA, 473 bp, Homo sapiens
tgcctcaggtgactacctggctaacaagtgtcaaagctagaacataaactatggccacggcactctaaagtcagagggcttcctactttaccgtgctagctccttatcctayacaatgcttacctaggatagccaggctatcagtattttgagagaaaaaaatattgaaatatttagtctaaatgaatgctatgaattaaatacttaaaataatgaagtctggggtaaaaacatatcccatgaatctagtccaagtacccaacctatgcttagagtttcagaaaagaacttttacagtttgaaaaaggtaatactttttttgagagacaaatggtcctatggtatgggaaaatccccttataagacactcttttgtctttattttaataaaaagattatattttgaatgcttcctgtgaggtaggcagagtgaaactctccaggattgccttaatgaacccccataataatct

SEQ ID NO: 480916 - DNA, 500 bp, Homo sapiens
tttcttttcagatatacaacactgtatttggctgatgctaacaggaaagttcatttatatcataaatactragtaaattctaagatatttgggttaagtaagggcaaaattaaaatggttgtccattttaaaatgatggttgtccaatcaattcaatgtgttttctacatatagattcctttcttattgtagaaaataacatcctaaaatataatggtgaaataacacatgtagtatgggtatgattttataacagaaaatatccaattttaattgaaaaaaattaagttgcctaaaacttaaatactgtggttggtatggatttataaagcacataatattaaatttgatcagagaaacttttaattgacaagtgaggagttgatatctcaaaagggaaggatatgtattttaaagtttcattctggaaaagggcagaaagaaacttaggaaggatagaaatgaagacattaaaattaatgtctgaccttttaaaaagt

SEQ ID NO: 480917 - DNA, 431 bp, Homo sapiens
gagtaaattctaagatatttgggttaagtaagggcaaaattaaaatggttgtccattttaaaatgatggttrtccaatcaattcaatgtgttttctacatatagattcctttcttattgtagaaaataacatcctaaaatataatggtgaaataacacatgtagtatgggtatgattttataacagaaaatatccaattttaattgaaaaaaattaagttgcctaaaacttaaatactgtggttggtatggatttataaagcacataatattaaatttgatcagagaaacttttaattgacaagtgaggagttgatatctcaaaagggaaggatatgtattttaaagtttcattctggaaaagggcagaaagaaacttaggaaggatagaaatgaagacattaaaattaatgtctgaccttttaaaaagta

SEQ ID NO: 480918 - DNA, 505 bp, Homo sapiens
atgacaagcatccttgcttcatctggtgtaaatgaaaatgcttctagcctgtcatcattaaacattggttcctgagaagtattatcattctgttgaagtagttttgtattcttcctttcaaaatttttgttygttcatttttttaatcaagaataaatattgacagagtagaatagtggttgccattctactatggcaaatgtggagttgctcatcagtgggcatgaagtttcagttacgcaagagagagtaatgctagagagctgctgtacaacaccgtgcctgtggataatgatactgtatcacacacttaaacatctgtgaagaggaagatctcatgttaagtgttcttgacacaatacaataattaaaaaaagtaatagacaaggaaaccaatgaaacaaaatagacacagacccacacaaatataggaatgatgcattattgaactggcagatgcagatgagtggggacagattgggcagttcaacaaatagtgcatgga

SEQ ID NO: 480919 - DNA, 505 bp, Homo sapiens
atgacaagcatccttgcttcatctggtgtaaatgaaaatgcttctagcctgtcatcattaaacattggttcctgagaagtattatcattctgttgaagtagttttgtattcttcctttcaaaatttttgttcgttcatttttttaatcaagaataaatattgacagagtagaatagtggttgccattctactatggcaaatgyggagttgctcatcagtgggcatgaagtttcagttacgcaagagagagtaatgctagagagctgctgtacaacaccgtgcctgtggataatgatactgtatcacacacttaaacatctgtgaagaggaagatctcatgttaagtgttcttgacacaatacaataattaaaaaaagtaatagacaaggaaaccaatgaaacaaaatagacacagacccacacaaatataggaatgatgcattattgaactggcagatgcagatgagtggggacagattgggcagttcaacaaatagtgcatgga

SEQ ID NO: 480920 - DNA, 505 bp, Homo sapiens
atgacaagcatccttgcttcatctggtgtaaatgaaaatgcttctagcctgtcatcattaaacattggttcctgagaagtattatcattctgttgaagtagttttgtattcttcctttcaaaatttttgttcgttcatttttttaatcaagaataaatattgacagagtagaatagtggttgccattctactatggcaaatgtggagttgctcatcagtgggcatgaagtttcagttacgcaagagagagtaatgctagagagctgctgtacaacaccgtgcctgtggataatgatactgtatcayacacttaaacatctgtgaagaggaagatctcatgttaagtgttcttgacacaatacaataattaaaaaaagtaatagacaaggaaaccaatgaaacaaaatagacacagacccacacaaatataggaatgatgcattattgaactggcagatgcagatgagtggggacagattgggcagttcaacaaatagtgcatgga

SEQ ID NO: 480921 - DNA, 505 bp, Homo sapiens
atgacaagcatccttgcttcatctggtgtaaatgaaaatgcttctagcctgtcatcattaaacattggttcctgagaagtattatcattctgttgaagtagttttgtattcttcctttcaaaatttttgttcgttcatttttttaatcaagaataaatattgacagagtagaatagtggttgccattctactatggcaaatgtggagttgctcatcagtgggcatgaagtttcagttacgcaagagagagtaatgctagagagctgctgtacaacaccgtgcctgtggataatgatactgtatcacrcacttaaacatctgtgaagaggaagatctcatgttaagtgttcttgacacaatacaataattaaaaaaagtaatagacaaggaaaccaatgaaacaaaatagacacagacccacacaaatataggaatgatgcattattgaactggcagatgcagatgagtggggacagattgggcagttcaacaaatagtgcatgga

SEQ ID NO: 480922 - DNA, 507 bp, Homo sapiens
ttagatgtaagtatactcattatttttaaagaacttattataaattatgaatcttacctcttgatgtgccaaagaacaagaatgcaacaatccaaattccaagcatctaagctgattttttaaatcacataaaaatcttcttgaagatctttacttgtaaagtcacctcactataaaatactaagtggttttcctcacaatgatgcaactcaatgtttaaactctacgtttaaaagaacatgttattccaccttatgctctgcaaagtaaataaaattatcggggtgtgccttacatcttrtgattggcaatggaaacttccaaggttttgctgtttcattattagtaatattttggttaagcacaaactgagtcactcttgaaagttactttaaggttacaaggtgttagataataagcatttaaaaggtaattttttttttccaaaccaggattaggcactttcagaatatttttccctaactcatttctgtgtgtaagcatccc

SEQ ID NO: 480923 - DNA, 555 bp, Homo sapiens
gaggggatctggcaatttattgactttgcacataattttcaacaggcctccatattttagtaatcactgtcattttcatttcctgcggtacttggtattgctaatttatctgaggaaactgtgtataaataaggtttgcagctttaccaaccacaaagttgggattcagcttgcttagtgccactaagacagttcccacctatctatattcttacaagattccaatattttgtttgtttcctccagttctcttcatccttgcasatctattttaaagtatttttagttgtctcaaagggtttaagaagatagcaaaataatgtttatatcttcaatataccatagtaaattagcagttcacttaagaggaaaacatatgtatagtagcatatacacatacatacacacacttagattatgtaaattatgtatatgtgtagatatatgcaaaagaactttcattgctttctttattcctacaattacctaaattcacagctattaacaaactaatctctattccattgaaggaagctctgtattgggtaaaatagt

SEQ ID NO: 480924 - DNA, 510 bp, Homo sapiens
ttttaaagtgtgtaatccagtgaaaascctgtttaatcaacaggccaagtgttttcaacttcggtgtgatcactgttcacttgtgaagtatgtggtaagcaatgtgttgctattaatagctgaattaccaaagttattagaatgatttacttcaaaaaatggaaatcagaattaacaaaagattaccctgttcataatgccatccccatttccaggccgggcgtgttggctccgcctgtaatcccagcgctgtgggaggccgaggcgggtggatcacctgaggtcaggagttcgagaccagcctggccaacatggtgaaaccccgtctctactaaaaatacaaaaaattagtcaggcatggtggtgggtgtctgtagtcccagctactcaggaggctgaggcaggagaatcgcttgaacctgggaggcggaggttgtagtgagctgagatcacaccattgcactccagcctgggcgacagagcgagactctgtctcaaaataataataat

SEQ ID NO: 480925 - DNA, 510 bp, Homo sapiens
ttttaaagtgtgtaatccagtgaaaagcctgtttaatcaacaggccaagtgttttcaacttcggtgtgatcactgttcacttgtgaagtatgtggtaagcaatgtgttgctattaatagctgaattaccaaagttattagaatgatttacttcaaaaaatggaaatcagaattaacaaaagattaccctgttcataatgccatccccatttccaggccgggcktgttggctccgcctgtaatcccagcgctgtgggaggccgaggcgggtggatcacctgaggtcaggagttcgagaccagcctggccaacatggtgaaaccccgtctctactaaaaatacaaaaaattagtcaggcatggtggtgggtgtctgtagtcccagctactcaggaggctgaggcaggagaatcgcttgaacctgggaggcggaggttgtagtgagctgagatcacaccattgcactccagcctgggcgacagagcgagactctgtctcaaaataataataat

SEQ ID NO: 480926 - DNA, 510 bp, Homo sapiens
ttttaaagtgtgtaatccagtgaaaagcctgtttaatcaacaggccaagtgttttcaacttcggtgtgatcactgttcacttgtgaagtatgtggtaagcaatgtgttgctattaatagctgaattaccaaagttattagaatgatttacttcaaaaaatggaaatcagaattaacaaaagattaccctgttcataatgccatccccatttccaggccgggcgtgttggctccgcctgtaatcccagcgctgtgggaggccgaggcgggtggatcacctgaggtcaggagttcgagaccagcctggccaacatggtgaaaccccgtctctactaaaaatacaaaaaattagtcaggcatggtggtgggtgyctgtagtcccagctactcaggaggctgaggcaggagaatcgcttgaacctgggaggcggaggttgtagtgagctgagatcacaccattgcactccagcctgggcgacagagcgagactctgtctcaaaataataataat

SEQ ID NO: 480927 - DNA, 625 bp, Homo sapiens
tagagtggcattaccaatgaaaaagattgtttaatggcgtagaaacaattgtacatttatatatcacacacataataaattctacatgaattaaagatcaaaaaataaaaactaagactataaaaatactatgagaaaatataagagactatttctatagtcttgaggttggaaaggatttgctaactctgacacaatatccaggacacatggaagcgaaagattagacgactcaaaaacctaaacttttgtgcaagagcgctaccattcacatcattgccagggagaaaacatttgcaacgtacataaaagataagagttaaaaattcacaaacgtaaagtgtttctacayatgaataagaaaaagagaaacaaactaattgagaaaatacacaaaggataaataaatcacaaaaaagaaaagcatcgctaataaacctaagaagacacactgaattatgatgaatcataattttaaaaacgcaaaataaaaaaatttttggcaatcaaattggtgaagatgaaaaacactggagacaatgaggtgctggcaggagtgaaaattgccatcttttgttctgtaaaaaaaggttttgttatgcagagcaaggggagctcagtcctt

SEQ ID NO: 480928 - DNA, 400 bp, Homo sapiens
catggaagcgaaagattagacgactcaaaaacctaaacttttgtgcaagagcgctaccattcacatcattgccagggagaaaacatttgcaacgtacataaaagataagagttaaaaattcacaaacgtaaagtgtttctacacatgaataagaaaaagagaaacaaactaattgagaaaatacacaaaggataaataaatcacaaaaaagaaaagcatcgctaataaacctaagaagacacactgaattatgatgaatcataattttaaaaacgcaaaataaaaaaatttttggcaatcaaattggtgaagatgaaaaacactggagacaatgaggtgctggcaggagtgaaaattgccatcktttgttctgtaaaaaaaggttttgttatgcagagca

SEQ ID NO: 480929 - DNA, 424 bp, Homo sapiens
attctagtgttcccttgatccatggcaggccaatcagagccaatgagaaagagccaatctaaagatatataatattaagctcagaagggatcctgagctcaagataggaggcctcttagaaaccacattccccccsacccgttcactgaggcaccaaaaaaaatatccatcaagattctccaaggtaatcagaggagcaaaaaatttgacatttggggaataaggcggccccaactctcacctccagagttcccctccccgtaggtatccccctgcattgctactaccaccccaagctgtcctcaggagggactgctctccactacctttccacccaggcacaggtgcagacctcatttgaatggggtctgggagagcagagttgttctgaaaccaggctaagacatttgtgcagtcttggcca

SEQ ID NO: 480930 - DNA, 531 bp, Homo sapiens
tagtatacgtttatcccatgcaatatttgggacatactcatacaaaaaattattcatcatttatctgaaattcattttaagtggatatcctgttttttgtttgtttgtttgtttgtttttgagacagggtctccctctgtcacccagtctggagtgcagtggtgcaatmatggttcactatagccccgacctcccaggctcaagtgatcctcccaccttagtctcctgagtagctgggactacaggtttgcactaccatacctggctaattttgtttattttttgtagagacaaagtctcactatattgcccaggctggtctcaaactcctggactcaagcaatcctcccatctcagcctcccaaagtgctgcaattacaggcgtgagccactgtgcctggcccatcccgtatttttatttgcttaatctggcaacctttccttagaggctcctggaacgcgccgctgcagtcattccggcgcacccagttagagctcctgctctgggccactgagaccaaagagaaatgg

SEQ ID NO: 480931 - DNA, 531 bp, Homo sapiens
tagtatacgtttatcccatgcaatatttgggacatactcatacaaaaaattattcatcatttatctgaaattcattttaagtggatatcctgttttttgtttgtttgtttgtttgtttttgagacagggtctccctctgtcacccagtctggagtgcagtggtgcaatcatgkttcactatagccccgacctcccaggctcaagtgatcctcccaccttagtctcctgagtagctgggactacaggtttgcactaccatacctggctaattttgtttattttttgtagagacaaagtctcactatattgcccaggctggtctcaaactcctggactcaagcaatcctcccatctcagcctcccaaagtgctgcaattacaggcgtgagccactgtgcctggcccatcccgtatttttatttgcttaatctggcaacctttccttagaggctcctggaacgcgccgctgcagtcattccggcgcacccagttagagctcctgctctgggccactgagaccaaagagaaatgg

SEQ ID NO: 480932 - DNA, 545 bp, Homo sapiens
aagctgagaagagcaaccagcctgctgctatttctgaaggagcccagtgtggttactcagtgtgctgtaattaaactcatctataatttgataagtgggagtagccttacattttagagagtaattaagtctcaccaaaggagaagcacatggtgcttctgggacccagcatctcctgaggttggtccccattcactctccctgtctctacacatctccacagatgctgaggccrccagggtaggcctcagccacagctctctccaccctcaggcattccatcgacatccaggcccctgggagatagcacagacactgcagacacacgtgcgacgagacagggaagcctgggcctccctttccaggctgctccgcgaaactgcggactaggaggaagctggctgtcctgcttgcctgcctgcctgcctgccgctccttcgccacgtgcaaggcgaggttctgactgcgctgagtccagcccagctctgggccccagtgtggagactgaggcagcctgagggtaaaggaaggggctgcgggtatag

SEQ ID NO: 480933 - DNA, 619 bp, Homo sapiens
ccagactgcctgggttccaatcctagctccatcgcttttaagctgtgtgacttcaggcaaattactcaccctcttttgcttcaatttcctcatctgtatactatgagagactccaccttttgggttgttgtgaggctgaaatgagttaacatatacctatataggacttttcataatgcctaaagcatattaagctctaagtctkattgttatttaaatacacaggatttagtggatgattaaataaaggaggtgggggagagagaaaagagtcaaagatggttgataaggttgaatgataaagatgccaggtaaaggcacaggttaatttagtatgaggagccagtgagacatccatgtagagatgtctagttcacagccagatggcctgactttcttgttcaccaagtatccctgaagcctaggacattaagagctagagaatgataataaaattcagtccctgcttttgaggagctaaataagcagaatggtaagggtttgacagaagaatccactgggtgcacatgggatggctcctgcctaagctcaggtcggcagggaagaccttccaggggagaggtactgacctcggttgtgaaagccaagtaggagctac

SEQ ID NO: 480934 - DNA, 516 bp, Homo sapiens
gaaaatatgaaagtgtgctatggctgagcctgtcgcaatgttgaaatctgaactatctgccattgtaagtatgaaattgcttgggtacaatatgtcttcctcacagaaattcatcagaaaatgttcatatcctgaatatatcacattatggtttagggaattgcctaaatgcttgaaatgataactgtagacttaatctgcaaatgtatagattgaaacatacatgcctaattgacgtggtaatatatggaattctgtggctgatcattatcttaaaaaatatttggccaataatacattgaacatctactctatacctggttcttgaactcgcaatagaaacctgtgactttgtgtcattttagagagcattttctatgttattatctctagcaaagactccctataagctatttataagcgaggttcattcatgactcaaatttgcaaagaagttttaatamagttagttttacatcttataaaaaacattgaagtttacaaacacattgttat

SEQ ID NO: 480935 - DNA, 626 bp, Homo sapiens
agttagatacaaatacttagtcaagtgaaatgctataagyagtaacttataaagttgttactcttttgacctgagcagctactcataaagtgaaatcaaaatggactggagtagatttatttgatcaggatcgattaattcatgtatcattactgaagtatttcctttgattgagagctcattaaaggtgtctgctttacatcaaaatgtcaataatgcttctaaaatggaaatgccattttattaaggctgtgttttttaaagtaataacttaaaattatttacaattgcttttcaaaaaataaaatttacagtcctaatttttttaaaaaaattatatacactgttttacgaagcatacaaaaagagaaaataatgaaaaactatcatgttctgagttatgcctttggtcatcctgagaaaaggagttaataagtaattaacaaggcttgtcattctgtatatacaataactcatctcaaattgccttctcccttgatcccttttcagaaaaaaaccctgtatggaagtatgattgacctataaatagttttacatgcctcccttgatttcttcttaacttatataaccttcaatttaaaatttatacctcctttataaagagg

SEQ ID NO: 480936 - DNA, 626 bp, Homo sapiens
agttagatacaaatacttagtcaagtgaaatgctataagtagtaacttataaagttgttactcttttgacctgagcagctactcataaagtgaaatcaaaatggactggagtagatttatttgatcaggatcgattaattcatgtatcrttactgaagtatttcctttgattgagagctcattaaaggtgtctgctttacatcaaaatgtcaataatgcttctaaaatggaaatgccattttattaaggctgtgttttttaaagtaataacttaaaattatttacaattgcttttcaaaaaataaaatttacagtcctaatttttttaaaaaaattatatacactgttttacgaagcatacaaaaagagaaaataatgaaaaactatcatgttctgagttatgcctttggtcatcctgagaaaaggagttaataagtaattaacaaggcttgtcattctgtatatacaataactcatctcaaattgccttctcccttgatcccttttcagaaaaaaaccctgtatggaagtatgattgacctataaatagttttacatgcctcccttgatttcttcttaacttatataaccttcaatttaaaatttatacctcctttataaagagg

SEQ ID NO: 480937 - DNA, 626 bp, Homo sapiens
agttagatacaaatacttagtcaagtgaaatgctataagtagtaacttataaagttgttactcttttgacctgagcagctactcataaagtgaaatcaaaatggactggagtagatttatttgatcaggatcgattaattcatgtatcattactgaagtatttcctttgattgagagctcattaaaggtstctgctttacatcaaaatgtcaataatgcttctaaaatggaaatgccattttattaaggctgtgttttttaaagtaataacttaaaattatttacaattgcttttcaaaaaataaaatttacagtcctaatttttttaaaaaaattatatacactgttttacgaagcatacaaaaagagaaaataatgaaaaactatcatgttctgagttatgcctttggtcatcctgagaaaaggagttaataagtaattaacaaggcttgtcattctgtatatacaataactcatctcaaattgccttctcccttgatcccttttcagaaaaaaaccctgtatggaagtatgattgacctataaatagttttacatgcctcccttgatttcttcttaacttatataaccttcaatttaaaatttatacctcctttataaagagg

SEQ ID NO: 480938 - DNA, 626 bp, Homo sapiens
agttagatacaaatacttagtcaagtgaaatgctataagtagtaacttataaagttgttactcttttgacctgagcagctactcataaagtgaaatcaaaatggactggagtagatttatttgatcaggatcgattaattcatgtatcattactgaagtatttcctttgattgagagctcattaaaggtgtctgctttacatsaaaatgtcaataatgcttctaaaatggaaatgccattttattaaggctgtgttttttaaagtaataacttaaaattatttacaattgcttttcaaaaaataaaatttacagtcctaatttttttaaaaaaattatatacactgttttacgaagcatacaaaaagagaaaataatgaaaaactatcatgttctgagttatgcctttggtcatcctgagaaaaggagttaataagtaattaacaaggcttgtcattctgtatatacaataactcatctcaaattgccttctcccttgatcccttttcagaaaaaaaccctgtatggaagtatgattgacctataaatagttttacatgcctcccttgatttcttcttaacttatataaccttcaatttaaaatttatacctcctttataaagagg

SEQ ID NO: 480939 - DNA, 527 bp, Homo sapiens
aaaatagctgaaattacatttgcaatgaaattttatgagtaaaataaattgctctgaggtaaaattatcaaatatttgagattaagaatctttttgtgattggtaatttactcaactaatctaagtcattctggagataaataacctgtttcagaagccaatgtcctattagaaagcatcttccaaaaggatatgaagttgattttccaagaaaaacattacagcagtatagcattaacatcattaaaaatttctttatgtcacaaaacaataaaaaatacaactgaggacattttctttctttcatgtgctttatagtcttcatttggttgctatgatcatccataacttgtcaatttctcaaatgtaaactccaatctcacttaagaaccaaataacaatgattgtcatgaacatgatgacggaattatctgcagaccaacagaattttatcaaaccaaatataaatmaaactaataaaaaatgacagcttctaaaattatatcacagtttcactaaagaggtag

SEQ ID NO: 480940 - DNA, 572 bp, Homo sapiens
aaaaccaaaattatcccagtttaatttaaaagagccagagagaaatcctcttttcacaatttgactattcaacctatagatttcagagggtttctatccccctaacatgaataggagtaatattaaaatcttctaagcccacacgctgcctataatataagctgacacctttaaagtgttagcgtttgtagcyatcaacaccactccttgatgtcgcctgcacctggcacaccattcctatacgtccctccagtagagacaggcagaaactacatcccatttatgaactagcactagaaattgtatagcatcctttctgagatactccattagtcaaggcagttacaagccctgcctagattcaaggggagaaaacaaaccccactgagaagtgtgtcaatcgccttgtaaggaaatcatgtgagtttgataaccatattggtgccgccatctttagaacataaaatctgtgctctgtcgtacccttcctccaaaggtaaggcgggcccagttcttagacatataatgacctttctctcctggttcagttggaaccaaagacttactttact

SEQ ID NO: 480941 - DNA, 472 bp, Homo sapiens
tgtggcttaaaagcaaactgcaaaggacgtataaatggggtcttcatgtgatgttaaaattaattctttttgtcaaatatatccagatctctgccttctgagtacatggtaggatggtatttcttggaytcctgaggttggtggggttctgtggccacctctggtcaatgagatgtgagaagagatgatgtgtgtcgtttctggatcaggcttttaatcgccagtgcaaaactctccagcgcactctcttctttttgccaaaatgttctagataacagttattctatcagccaggcttgttagtacttatagacaaatacatgtaggttcactgcttcttctttatatgactgggtgggttataaaggttactagtttggtatacctaaatataaatgcctctctggggttgggagaggaaattcactactccactgtgtggttttgctgctagtgttactacagagctccc

SEQ ID NO: 480942 - DNA, 515 bp, Homo sapiens
ttttagcatgaattgattctagcccagcaatgccagtccttagcaagagggtctgctmtttcaaatggattcctcagcttttccctttccttagtgcctaaaagtacctcagaggagggaacctgttttcaaatataggttttattattatacatgtttgcccaggtcaacagatgaagatgattgccattgaaaaaaaaaaatttgttattgtcccagatcccaagagaagggagtagacgatgctactggtagcctcacgggaagcactggggttgataataaggcagagggagaggggaaaatgatggctaggaggcttccttgtggcttccacagaaagaaaccatgaggcagggtgaacaggctcaggattggccaatttgaataaattcagcaggctctggggcacagggagtgtccctagttgtctggtactttaaaatctactatacactggaccttgaactagttgcctatcaaatcttttcaagaacttggatgttatagtatca

SEQ ID NO: 480943 - DNA, 515 bp, Homo sapiens
ttttagcatgaattgattctagcccagcaatgccagtccttagcaagagggtctgctatttcaaatggattcctcagcttttccctttccttagtgcctaaaagtacctcagaggagggaacctgttttcaaatataggttttattattatacatgtttgcccaggtcaacagatgaagatgattgccattgaaaaaaaaaaatttgttattgtcccagatcccaagagaagggagtagacgatgctactggtagcctcacgggaagcactggggttgataataaggcagagggagaggggaaaatgatggctaggaggcttccttgtggcttccacagaaagaaaccatgaggcagggtgaacaggctcaggattggccaatttgaataaattcagcaggctctggggcacagggagtgtccctagttgtcyggtactttaaaatctactatacactggaccttgaactagttgcctatcaaatcttttcaagaacttggatgttatagtatca

SEQ ID NO: 480944 - DNA, 547 bp, Homo sapiens
aatacccatttaataaattcatggtgagaataatatatacaacgactgatgtgatgatgaggggtgtagaaggcttsgtataatgccttatattttgcaaataatcattaaagtttaaacacaattacttttattattgttaatgtgattcaaagggtacatcttgtgccaacactgcagagaatttgtgatgtaccctagaatgaaagcaagattttgcttttacctcttagggttaatacggatgacatgggaggaaagtgggcactaattctccttaacttactatgagttgctacatagccaagaagacaagaccctgcagtgtgtgttgtaaaaataggcataacctcagatacagaagtgccacaggctgaaaaaagaggggctaattttttcatataaaaagatgcaggatagatatctagaagaagagaagaactgacacatttatgggtgctctgtgacacaggctgcatttagcccctctgctgccttgtgccagttgattaaggctgggaacattttcccaagttgtgtgagagaa

SEQ ID NO: 480945 - DNA, 547 bp, Homo sapiens
aatacccatttaataaattcatggtgagaataatatatacaacgactgatgtgatgatgaggggtgtagaaggcttcgtataatgccttatattttgcaaataatcattaaagtttaaacacaattacttttattattgttaatgtgattcaaagggtacatcttgtgccaacactgcagagaatttgtgatgtaccctagaatgaaagcaagattttgcttttacctcttagggttaatacggatgacatgggaggaaagtgggcactaattctccttaacttactatgagttgctacatagccaagaagacaagacsctgcagtgtgtgttgtaaaaataggcataacctcagatacagaagtgccacaggctgaaaaaagaggggctaattttttcatataaaaagatgcaggatagatatctagaagaagagaagaactgacacatttatgggtgctctgtgacacaggctgcatttagcccctctgctgccttgtgccagttgattaaggctgggaacattttcccaagttgtgtgagagaa

SEQ ID NO: 480946 - DNA, 562 bp, Homo sapiens
tgggaactgaagcccctagatcagggccctattcttctgcaggatggggtcctgctgtcattcacatcactggccaaggtaaggatttatttattgcataggtcgctattcctgatttcaccagtgaatcctaaattcccctataaaagcatctgccagccacatggcctttcaagtgctttctactctaggctgaaatataatcgcagaaaaataggccatagtactcttctttgtttctttctttcctgtttttttttttcttaccctaattgtcaaatgacttgtggttgtataataacatgatattgtaaarttagctattactcatacacagtaagagttaatatttataaagtgcttttctatagtttattccctcttactggtacatctgtgtgtagccaattaaagacatgaatataatcttatctacacgtgttccgtcaatggagaatttcagggattccaaaatgtaaagaggtgatattagtaaaaaatacagcttaaagaacaactcttcacatttaataaaagattagttttcaaacttataaaccta

SEQ ID NO: 480947 - DNA, 621 bp, Homo sapiens
acatacacacatacacatgcaagaaaatcataaacccaacttttaagtgatagttctaagagaagaggcaaggagttgggaaccaggaagcagcgaatttcaaaagcattagctttattctctatcttagataaactggtaggtatcttggagttaattatgtttatattctttactctgtaaatatatattaaaatacttgtatatgtctattgaaaatttaataaaagcaatgtaaaaatttctatcataaaattaattatgcaaatcagctttggtatttcwaggaaaaattattgtgagttttaagtttactataatagacaatttaataatgttaaaaatctttagattcccagaaacttaatctgaaggtccaagaaatttttaaaccatttttttaaagcaggaaatagaaaagtaaaggaaaaatactcaagtgtcaaagacagcaaaggctgcatggttgagaactctaaagcccttgattgtattgtgggttcatagctttggtcacagagaagacttcacctttccatttaaaggacaaagcaaatgtaaatttgttctcgatcacaatatacccggtattaaatttagtaagagaaaattgcactaaca

SEQ ID NO: 480948 - DNA, 677 bp, Homo sapiens
tttttttttttttttttttttcgggacaaagtctcactctgttgcccaggctggagtgcaggggtacaattttggttaaccgaaacctccgcctcctgagttaaatcggttcttgggcctccgcctcctgagtagctgggactacaggtgtgcataaccatgcccagctatttttttttgtttttttaataraaacggagttttaccatgttggccaagcaggtctccaatttccgacctcaggtgatccaccctcctaagcctcccaaagtgctgaaattacaggcctgacccactgtgcctggcccaaatttcccctttttataaggaccttggtaataatggactaaaaccccaccctactgcatgatgatctcattctaacgtaattaattatacctgcaaaccacccagtttccaaaaacctcacattctgagttattgcgagttgggacatctacatattaatctggaggagagaccattcaatctgcaacaccctccatcctgggaagactaggcagaggatattttacctgcaaacaaaaacaaaaacaaaaacaaaaaaccttataatacggcagacattccaaggccctgctattctgtattcacctgccatcaccctagtaacccaggaagtgctggggggaccctgtgctctgacttgctgggag

SEQ ID NO: 480949 - DNA, 677 bp, Homo sapiens
tttttttttttttttttttttcgggacaaagtctcactctgttgcccaggctggagtgcaggggtacaattttggttaaccgaaacctccgcctcctgagttaaatcggttcttgggcctccgcctcctgagtagctgggactacaggtgtgcataaccatgcccagctatttttttttgtttttttaataaaaacggagttttaccatgttggccaagcaggtctccaatttccgacctcaggtgatccaccctcctaagcctcccaaagtgctgaaattacaggcctgacccactgtgcctggcccaaatttcccctttttataaggaccttggtaataatggactaraaccccaccctactgcatgatgatctcattctaacgtaattaattatacctgcaaaccacccagtttccaaaaacctcacattctgagttattgcgagttgggacatctacatattaatctggaggagagaccattcaatctgcaacaccctccatcctgggaagactaggcagaggatattttacctgcaaacaaaaacaaaaacaaaaacaaaaaaccttataatacggcagacattccaaggccctgctattctgtattcacctgccatcaccctagtaacccaggaagtgctggggggaccctgtgctctgacttgctgggag

SEQ ID NO: 480950 - DNA, 677 bp, Homo sapiens
tttttttttttttttttttttcgggacaaagtctcactctgttgcccaggctggagtgcaggggtacaattttggttaaccgaaacctccgcctcctgagttaaatcggttcttgggcctccgcctcctgagtagctgggactacaggtgtgcataaccatgcccagctatttttttttgtttttttaataaaaacggagttttaccatgttggccaagcaggtctccaatttccgacctcaggtgatccaccctcctaagcctcccaaagtgctgaaattacaggcctgacccactgtgcctggcccaaatttcccctttttataaggaccttggtaataatggactaaaascccaccctactgcatgatgatctcattctaacgtaattaattatacctgcaaaccacccagtttccaaaaacctcacattctgagttattgcgagttgggacatctacatattaatctggaggagagaccattcaatctgcaacaccctccatcctgggaagactaggcagaggatattttacctgcaaacaaaaacaaaaacaaaaacaaaaaaccttataatacggcagacattccaaggccctgctattctgtattcacctgccatcaccctagtaacccaggaagtgctggggggaccctgtgctctgacttgctgggag

SEQ ID NO: 480951 - DNA, 561 bp, Homo sapiens
ttacaggtgtgagccaccgtgcctggtcttgggcttgatctttaaactttctaggtctcagtttctaaaatgtaaaacagggacgcaaatatctaaatcatgtatgtggtgcactttatacagcgtctggaaccttgaaaggcccccgtaagtggcagcctttagyattattggtatattttattatggtcaatgatgcatgcctttgtgtggtgttctgcttcctcattaactgagcctgagtcgccggctactgagaaggcccctccagtttctggaagcagagcaatgtgaagcagaagctgttgcatcacggtttctcctggaaaggtctgtacctaacagtagaattttctgctcagtctttaccccaggaaaatgaaaaatcaacatgttctttctcatggctagtagctcctttcttgcaagtcggggccctggtctcgcactgctgcccctccaaagccaccctttgcagcacggggagactgcacaagggcaagctgaaggtccaggctcacatcaccaatgtcagcagcagcagcctccctggccacctgc

SEQ ID NO: 480952 - DNA, 653 bp, Homo sapiens
tcctggatggtttacatttgggaagcattgagtgccgtcrtgggatggggaaagaatggaggcaacgacctgtgagtccctgcagaatctaaacatctgtctggagtgggcacagagcagacttctggggtggcgcctccaatccgccatctggcacttgaaagcagagtctcaggcctgctgtttgtaattgcatctcccccaagcagggggtctgcccatctgtattccccaattcttcctggaccagcctgatccagggagagggaacatgtggcaggctctatgggatctgtttggaaaagagattttcagaaataactcagagctgtagagggacctgaacaagagccagtggaggagttctgtgtgagtatctgcaatagttcagaaatacgtgcagatacgaagccggccggggccaagttctcagcagcagaagagtaagagctaaaatcttatccctaatttccagcccagctctgtggtaggttcttcaatcgctggaccccagagaagggagtctgcttggtccttccaggtagagcaggaaacatgccttatggcagaggctggccttgagcatagccctgggtgattcttgtgtcttgaagcttgagagtcacccatggaaattagctagtgccttgtag

SEQ ID NO: 480953 - DNA, 525 bp, Homo sapiens
tctcctcctgcaaggtgagcctggagggccaggtatgctgtaacccccccatttcctcctctgggtcagctcctatagaacacgaggcacgaagtgactctcagtgcacacctcygctcatggctcctcgtcattccctaaaatatggggctgtttaaggatttttttttttttttttagatagggtctcgctctgttgcccagctcaggctggagtgcagcggcacgatctcggctcactgcaacctcagccacccaagtagctgggattacaggcatcgccgccactcccagctaatttggtatttttagtagagacggggtcttgccatgttgcccaggctggtcttgagctcctgacctcaagtgatctgcctgcctcagcctctcaaagtgctagtattacaggcgtgagccgctgcacctggccaggattttttttaaataagcaacacgcacataaaaaaaaaaaagtatagaaatggtacctggcatgtcgtaaatgctaaatgatgttgcctatta

SEQ ID NO: 480954 - DNA, 525 bp, Homo sapiens
tctcctcctgcaaggtgagcctggagggccaggtatgctgtaacccccccatttcctcctctgggtcagctcctatagaacacgaggcacgaagtgactctcagtgcacacctccgctcatggctcctcgtcattccctaaaatatggggctgtttaaggatttttttttttttttttagatagggtctcgctctgttgcccagctcaggctggagtgcagcggcacgatctcggctcactgcaacctcagccacccaagtagctgggattacaggcatcgccgccactcccagctaatttggtatttttagtagasacggggtcttgccatgttgcccaggctggtcttgagctcctgacctcaagtgatctgcctgcctcagcctctcaaagtgctagtattacaggcgtgagccgctgcacctggccaggattttttttaaataagcaacacgcacataaaaaaaaaaaagtatagaaatggtacctggcatgtcgtaaatgctaaatgatgttgcctatta

SEQ ID NO: 480955 - DNA, 670 bp, Homo sapiens
caggctctcctcctgcaaggtgagcctggagggccaggtatgctgtaacccccccatttcctcctctgggtcagctcctatagaacacgaggcacgaagtgactctcagtgcacacctccgctcatggctcctcgtcattccctaaaatatggggctgtttaaggatttttttttttttttttagatagggtctcgctctgttgcccagctcaggctggagtgcagcggcacgatctcggctcactgcaacctcagccacccaagtagctgggattacaggcatcgccgccactcccagctaatttggtatttttagtagagacggggtcttgccatgttgcccaggctggtcttgagctcctgacctcaagtgatctgcctgcctcagcctctcaaagtgctagtattasaggcgtgagccgctgcacctggccaggattttttttaaataagcaacacgcacataaaaaaaaaaaagtatagaaatggtacctggcatgtcgtaaatgctaaatgatgttgcctattactttttaacatcattaagattcattatacccaaagtgtgtcctagaataacctcctacggtttactcgtgtgcagaatgtggatgagaaggcctgcctgcctgcctcagaagtgcaagctgtgcatgtgttcaccatcag

SEQ ID NO: 480956 - DNA, 587 bp, Homo sapiens
ctttttccttctggtactgtgtctagcaacctatgmtaccaagctaccgcgtggtggcgccgtctgtccaccgctgccagccggcactttcaaattccactgtctctttgtaaggtgaggctgtgtagtgtggcaggatgagccaggaaaactgaagagaaggagctgccaatagatcactctagaattccagacagggtagtgtgataggttcaagagaagagcttgcctgcataaaataaaattgagagcacaatgtgcgattgcagataaagaatagaacaggattgtgccgaagtgactgaagggtgggaggggcatttttctgctgtgaaagggtggggacagtgggatcaagatgtcaaagtattttctccacaagtaccttagtgtcctcaggctgggtctccaattctcaggctaaaagccactctccagggagaccaggctgggaatgctgagacccaagttgctaggcagggaggaggttcagatcagcaactttgaggaagtaagggtctccctaggatgctccacgagtctgggagactgagtgctgcctggggcaggtctaggcattgcaagag

SEQ ID NO: 480957 - DNA, 587 bp, Homo sapiens
ctttttccttctggtactgtgtctagcaacctatgctaccaagctaccgcgtggtggcgccgtctgtccaccgctgccagccggcactttcaaattccactgtctctttgyaaggtgaggctgtgtagtgtggcaggatgagccaggaaaactgaagagaaggagctgccaatagatcactctagaattccagacagggtagtgtgataggttcaagagaagagcttgcctgcataaaataaaattgagagcacaatgtgcgattgcagataaagaatagaacaggattgtgccgaagtgactgaagggtgggaggggcatttttctgctgtgaaagggtggggacagtgggatcaagatgtcaaagtattttctccacaagtaccttagtgtcctcaggctgggtctccaattctcaggctaaaagccactctccagggagaccaggctgggaatgctgagacccaagttgctaggcagggaggaggttcagatcagcaactttgaggaagtaagggtctccctaggatgctccacgagtctgggagactgagtgctgcctggggcaggtctaggcattgcaagag

SEQ ID NO: 480958 - DNA, 587 bp, Homo sapiens
ctttttccttctggtactgtgtctagcaacctatgctaccaagctaccgcgtggtggcgccgtctgtccaccgctgccagccggcactttcaaattccactgtctctttgtaaggtgaggctgtgtagtgtggcaggatgagccaggaaaactgaagagaaggagctgccaatagatcactctagaattccagacagggtagtgtgataggttcaagagaagagcttgcctgcataaaataaaattgagagcacaatgtgcgattgcagataaagaatagaacaggattgtgccgaagtgactgaagggtgggaggggcatttttctgctgtgaaagggtggggacagtgggatcaagatgtcaaagtattttctccacaagtaccttagtgtcctcaggctgggtctccaattctcaggctaaaagccactctccagggagaccaggctgggaatgctgagacccaagttgctaggcagggaggaggttmagatcagcaactttgaggaagtaagggtctccctaggatgctccacgagtctgggagactgagtgctgcctggggcaggtctaggcattgcaagag

SEQ ID NO: 480959 - DNA, 504 bp, Homo sapiens
gtcttaacaacctgacaccaaaattctatgggctcttctcccagcaccccaggagaaggaggcaagagacagaaagatgtcttttcaaaggacacagcatgaggagcaaacaacagggtctgtggggtcttaagcccaagattagcatttaaattccaaaaggatgaaatacaacaggtcataaagaaaggcatctggattacaactccagtctatcacatggttgatgaccagcaagaggtgaagcagtggttctcaaagwgtgggccctggagcaaccacataagcagcagcctcacctgggaagctgttacaaatgtggactctcagactacagcgcaggccactgtattcctcggctcaggctgccacaacagaataccacacactggttggcttaaacaacagaattcattttctcacagttatggaggcgagaagtccaagatcaagttgacatcagagttggattctggtaagggctctcttccgggcttgtaaaca

SEQ ID NO: 480960 - DNA, 539 bp, Homo sapiens
acactgactgtagtgtatgcttcctgagtctcaatttcagtttggtaaaatctgctctgaagatgcatttgaaacacagagtactatgcctataaacagatatactatctaatgccctaataatacaatctttattatttaagaaactatacttattaacctgcaactattaataacaggtgacaaatctctcaaaagtgttctgaaaatccatggcaatcaccacaacactataaacattacagatacatgccagactacattcacggggcagtcagctcccactcctctctcaaattctgggacagaktcccgccatttcaggaataaatgcaaaaaaaaaaagcaataaaggagcttgcagtgagccgagattgtgccactgcagtccgcattccggcctgggcgacagagcgagactccgtctcaaaaaaaaaaaaaaaaaaaaaaaaaaatgcaataaaatagtgaggacaaaagggcaacattccattcccgtgaataaaaagcatggaatggctgaaatcgctaattatact

SEQ ID NO: 480961 - DNA, 539 bp, Homo sapiens
acactgactgtagtgtatgcttcctgagtctcaatttcagtttggtaaaatctgctctgaagatgcatttgaaacacagagtactatgcctataaacagatatactatctaatgccctaataatacaatctttattatttaagaaactatacttattaacctgcaactattaataacaggtgacaaatctctcaaaagtgttctgaaaatccatggcaatcaccacaacactataaacattacagatacatgccagactacattcacggggcagtcagctcccactcctctctcaaattctgggacagattcccgccatttcaggaataaatgcaaaaaaaaaaagcaataaaggagcttgcagtgagccgagattgtgccactgcagtccgcaktccggcctgggcgacagagcgagactccgtctcaaaaaaaaaaaaaaaaaaaaaaaaaaatgcaataaaatagtgaggacaaaagggcaacattccattcccgtgaataaaaagcatggaatggctgaaatcgctaattatact

SEQ ID NO: 480962 - DNA, 557 bp, Homo sapiens
aaagtaagtgtgcaaatatagttgccagaggccttttcaggatccttatcctttcaatgagacttagaacacgcctctgtcatttcctaacattttggtttgctgggtttttattaactacttgacatcgatttttagaaatcttctttgggggtagggactacattttttccacttcttattttcaatatttatttttccattctgaagcttaatctcagggggaagttccttggtcagtgtttgggaaaattacttttggggctgttgccagacctctrggtgactttgaagtccagacagcaccaaactaaacatggtcatagcccttttgctgctatttgtgttaagtgtctgttgcattgggtgcctctgggcaggcccagggaaactttggaaattagattgattccaatgaataaattaactcaacaatattgcacagataaaatcaacctgattttgatgactctggaatggatgaacatttgtaaatatgcctttacatttccaaaataacatgggctaaagaggtgacagaagtcattacttttaaa

SEQ ID NO: 480963 - DNA, 627 bp, Homo sapiens
ctgggaggctgctggtctaggtggggctaagctagggcatctaggctgaagtcattctgctccacatgcctttcctcttcctgggaacagagatctggcctggacatgttctcatggtaattggcagagcgtagaagagcaagcagaaacatactggtcttcataagactgaggctaggctcagagctgtgcactgtcacttttgccacattctattggctgaagcaagtaacataaccaaactcaagtcaagaagcagggaaatacatcctgcctcttcagaggaggacttgcaaagtcacatggcaaagggcatatagttacaggaaggagcaaagaattggggtcaatgatgccattctaccctgtatggcaatgacggtatcctacacataaatattgatctagagttgacaaagtatattcacaagtattttctcatttaatttgaacaactaaatgagaagggcagagtagatataattattacaactttactaaacaaaaagcagcggagaggaggtgggaaaacttagagaacttaagaaayttgtccaagatatacactattaagtggacacgatggaattaaaatccacattacagtagtcattttgggttatcact

SEQ ID NO: 480964 - DNA, 411 bp, Homo sapiens
tgcaaagtaccagcagttacttcaaggtggctcattaacaatccagctttgttgagatgatgccagcccaagatccaggtggacagggacccaygatagtcaccagaataagacacacagacattgtactcagcacaattcttgtatgtcttccttgtcaagttttcattttttaaactcctttttctcccccccaaaaaatcaaagtggttgctttggatgagaatctggccacttctcctttactagttttggttaataaagtcactttctttctgccagatgtcactctgttaattgagctctgcaagtagtgcaggattaaacttgccttcaactgaaacttcattcggttacaaaatctcaacttggaacacttagggaaattgattccctgggaaagaagaggag

SEQ ID NO: 480965 - DNA, 559 bp, Homo sapiens
ctgtaaaaaggggaacaaagcaatcatttaaactctccaaaggcactattgttgaggtaggatggacctgggaggagagacaggcttttatatccttaatagagacctcagagctcatgttcttcaggaatcataaaaataagcaagtcatgcagtgacttatgcctgtaatcccagcacattgggaggctgaggcrggtggatcacctgagatcaggagttcgagaccagcttggccaacatggagaaatcctgtctctattaaaagtagaaaaaattagctgagtgtggtggtgggcacctgtaatcccagctacttgggaggctgaggcacgagaatcacttgaacccaggaggtggaggttgcagtgagctgagatcgtgtcattgcactccagcctgggcaacaaagcgagactctgtctcaataaataaataaaaaagcaaacaagcaagtcagtcatatccaaaccaagaataatgagatccattaaaggttccccacatctctgaggaatatctcttttgtttatcacattatggccaacagaaacccagg

SEQ ID NO: 480966 - DNA, 340 bp, Homo sapiens
ctccaaatctcagcatcatgcaatatccctttttaacaaacctgcacatgcatcccctgatttgcaaataaaagttgatacagaaaaaaaacattaaattgctttctgcaagcaatttcaaggtaatcaaaatgtctttgatgaataataagtgacaatgagaagaaactactatatttttgataaattgtatrtgttaataagtgaggtaattcacccaccacctgggaggtggtgctgtcatccccaccccatgggcaaggctgggaatccagagtccttcagtagttgcctaggataaatcccctttgcaaacatatatctggattcaacatattct

SEQ ID NO: 480967 - DNA, 472 bp, Homo sapiens
ttaaccctgaatgaagagacaatgctcctgaacataaagagagggcaagaggaattgaagcctcagtcattcttttatcttaagtgattatgtaacttacatgtacctagttacgtagatttactacataaatatctgatagtagtgaaatacttaaaaaatgaagtgattagaaagaagattcctgcagagaaactaggttgaagataatactaatcatgcatgtacttgtatgaaacagtaaaaggagagaactgacacattttctatttctaaaaaaactgtcagccatatatcaaattgaaaaagcatattctaatcagcttgcacaaaatagggcctagaaacaaaaattatcaataaaagtgtcactggtagaggttcatgactgcaagctgtccaggttcttggcatttggaacaaagaattggacaaaacrcccagcaaagcaaagaaagaatgaagcaacaca

SEQ ID NO: 480968 - DNA, 582 bp, Homo sapiens
gctcacatgcctgtgctctccctgaagagctcaggccttgatcagcatgtacctcaaccaaagacaagaggaatggtctcgcctggccccagcatgaggtcctcatcacaggacgctcattgcagcacgcggacaatgagctcacagggatttgggagcacggtgccctgaagatgagcaccccaaagatgggccttcttcccctcccccacaaccccaggggacaggcctcccctgggcaagtggcataggaatatagaggccacagtgtgcttgagaggacaggggaaccctggggaaaaatgcagcacacaatcctcctaaaggctgcaggcctgggggaaccacgcccagccctgcycaactgaggactcagagcagcttacctctgaaagggcttcatgttcagatttctggccgagagcttctgccctcagagtgtgcagtgtgtctccacttctcagaaagccaagaatgaactgaataagtgggttgtcttcctgctttagcctacgggaggctgatgtcatagcccagcccagtgaacctgtctccttctgctaggtttctgccatggagata

SEQ ID NO: 480969 - DNA, 582 bp, Homo sapiens
gctcacatgcctgtgctctccctgaagagctcaggccttgatcagcatgtacctcaaccaaagacaagaggaatggtctcgcctggccccagcatgaggtcctcatcacaggacgctcattgcagcacgcggacaatgagctcacagggatttgggagcacggtgccctgaagatgagcaccccaaagatgggccttcttcccctcccccacaaccccaggggacaggcctcccctgggcaagtggcataggaatatagaggccacagtgtgcttgagaggacaggggaaccctggggaaaaatgcagcacacaatcctcctaaaggctgcaggcctgggggaaccacgcccagccctgctcaactgaggactcagagcagctyacctctgaaagggcttcatgttcagatttctggccgagagcttctgccctcagagtgtgcagtgtgtctccacttctcagaaagccaagaatgaactgaataagtgggttgtcttcctgctttagcctacgggaggctgatgtcatagcccagcccagtgaacctgtctccttctgctaggtttctgccatggagata

SEQ ID NO: 480970 - DNA, 582 bp, Homo sapiens
gctcacatgcctgtgctctccctgaagagctcaggccttgatcagcatgtacctcaaccaaagacaagaggaatggtctcgcctggccccagcatgaggtcctcatcacaggacgctcattgcagcacgcggacaatgagctcacagggatttgggagcacggtgccctgaagatgagcaccccaaagatgggccttcttcccctcccccacaaccccaggggacaggcctcccctgggcaagtggcataggaatatagaggccacagtgtgcttgagaggacaggggaaccctggggaaaaatgcagcacacaatcctcctaaaggctgcaggcctgggggaaccacgcccagccctgctcaactgaggactcagagcagcttacctctgaaagggcttcatgttcagatttctggccgagagcttctgccctcagagygtgcagtgtgtctccacttctcagaaagccaagaatgaactgaataagtgggttgtcttcctgctttagcctacgggaggctgatgtcatagcccagcccagtgaacctgtctccttctgctaggtttctgccatggagata

SEQ ID NO: 480971 - DNA, 510 bp, Homo sapiens
gtcaggagtttgagaccagcctggctaacatggtgaaaccccatctctactaaaaatacaaaaattaggcaggagtgatagtggacacctgtagtcccagctacttgggaggctgaggcaggagaattacttgaaccscaggtcttgccactgcacaccagcctgggcaacagagtgagattccatctcaaaaaaaaaaaaaaaaaaaaaaaaaaaagaaaagaaaagaaaaagaaaatgagaattcttaaattagtcttaactagggatgcctattgataggcaaaagcttctaaaaagattttaatatctttactgttttttaaaagagactttttacaaatggcaaataaaaagtttaagtgactaattgataagaaaatatctgttaacattttggtttagttattattctgccccaaaggcaaaaagaaagctatcctaaagtgtttacaaaagataagacctccggtaaagtaggcttgcttctttctcacagcaatccatgct

SEQ ID NO: 480972 - DNA, 510 bp, Homo sapiens
gtcaggagtttgagaccagcctggctaacatggtgaaaccccatctctactaaaaatacaaaaattaggcaggagtgatagtggacacctgtagtcccagctacttgggaggctgaggcaggagaattacttgaaccgcaggtcttgccactgcacaccagcctgggcaacagagtgagattccatctcaaaaaaaaaaaaaaaaaaaaaaaaaaaagaaaagaaaagaaaaagaaaatgagaattcttaaattagtcttamctagggatgcctattgataggcaaaagcttctaaaaagattttaatatctttactgttttttaaaagagactttttacaaatggcaaataaaaagtttaagtgactaattgataagaaaatatctgttaacattttggtttagttattattctgccccaaaggcaaaaagaaagctatcctaaagtgtttacaaaagataagacctccggtaaagtaggcttgcttctttctcacagcaatccatgct

SEQ ID NO: 480973 - DNA, 266 bp, Homo sapiens
ccggttccgatcgaggggcggggcggggtgtgtgtgtgtgtgtgtggaggggggggtcaccactcggtcaggttcaagtgcgcatgtgcgcgaggagtcgctcgggcacttattgagcgccgactgtctacgggcggccgggggtgtgtagcccargcgcgctgggggcgtgctgggcgggtgcgggggcgcggaggcgcggggggcgggcgggggtgtgtcccgagtgtcgccgctgggcgccggctggcaggggctggcgtgct

SEQ ID NO: 480974 - DNA, 650 bp, Homo sapiens
tgctgtgttgggctggagaacttggagtttctagtagaggcagaataacattcattatgtggaaacaagattttgtgtcctggggaaaatgactgtctgctttgaggttgtccacagattgtttggggarttggagacctctgaagagtgctaaacttccagatatccaattaccactgtattgcatcaacaaaagagaacttggaggataaagtggttgtgtggagatgatggatatttctcaaccgtgaaaggaaccatgctttcaggagttatgaaaaatgaagcacgtttctcattagaaaagaatgatccatttccttcttatattgccaaaggtcgtcttttgccaattcaatgagagtatgaacatgggattcattacttgcaggaaaaaaggtagcaagtgtactctggaatcctcaagagtcaatgataagtgggcagatggaattgaaaagtgagaatattgggggctgagcggggccttcatggcatcaaatgtgctgtgtagcaggatgcagtcaacagtatgtggacaagttctgatttgctgaaaaggaaacaaggtaaaatagctaaatttgctttgagcaaatttctgtctcaatcagtatcaaaacaatgaatgttattctttcccttggtag

SEQ ID NO: 480975 - DNA, 610 bp, Homo sapiens
agcctttgggattctaccacctgcaaattccttcaaatgtgtcctgcagacattctgaatgcactgtggtttcctgagtacatcatgatcccttstttctgtctcttttcacatactgtttgaactctcaccctcccttcagttgttgtcacacagatgcagtgtgtttgtcacctggcttactcctccaggcagccctccagattgtgcaggttcaaggcaggagctctacctttatggtctccttatatttatcataccgtaatgcatttgcctgtttccttatctattcttagagaccatgagttctttcaaggcaggctatgtgttttgtttccctttgtgccccaagtcctaccacagtgcctggtgcaggttaagactcaagaaatagttgaagaataaatgaacaatgttgaggaaatcaaaagagtgcaggcttcctctttatttaatgctcctgggaaaagccatcctgcccacttgagtctgcttctggcaagagcacagtgggatagtttggagagagatgcctcatttgtccccttgatgttcctctcacaggtctgggccaccttcacacctcagagcttttctttcatcactgggt

SEQ ID NO: 480976 - DNA, 610 bp, Homo sapiens
agcctttgggattctaccacctgcaaattccttcaaatgtgtcctgcagacattctgaatgcactgtggtttcctgagtacatcatgatcccttgtttctgtctcttttcacatactgtttgaactctcaccctcccttcagttgttgtcacacagatgcagtgtgtttgtcacctggcttactcctccaggcagccctccagattgtgcaggttcaaggcaggagctctacctttatggtctccttatatttatcatacygtaatgcatttgcctgtttccttatctattcttagagaccatgagttctttcaaggcaggctatgtgttttgtttccctttgtgccccaagtcctaccacagtgcctggtgcaggttaagactcaagaaatagttgaagaataaatgaacaatgttgaggaaatcaaaagagtgcaggcttcctctttatttaatgctcctgggaaaagccatcctgcccacttgagtctgcttctggcaagagcacagtgggatagtttggagagagatgcctcatttgtccccttgatgttcctctcacaggtctgggccaccttcacacctcagagcttttctttcatcactgggt

SEQ ID NO: 480977 - DNA, 488 bp, Homo sapiens
aagagacgagactggcctagcctgccagcctacatctatatcctgtgctgggatgtttcctggcctcaaacatcagactccaagttcttcagttttgggactcggactggcctccttgctccttgacttgcagatggcgtattgtgggacctcaccttgtgatcacgtgagttaatactccttaacaaactcctctttatatatacatctagcctattagttctgtccctctagagaaccctaatacacctccctaagagtcctttttccaaatacagttgcattggggtttagggcttcaacattttggggtacccagagcctataactttctttaacawatatttctgcaaaatgggaaaaaagccagatccattatgtgaagtcagactctaaataaagatactctcatgactgggtgcatttgccgtcacccaatttatttttttcaggaaaactatacccaagcaaccatcaacacttagttc

SEQ ID NO: 480978 - DNA, 301 bp, Homo sapiens
aagggccctgaaacaataacatcccagtagtaacaaacacacctggcactcagatcttggtttctaacaccattcttcaataaaagaaaccagagytcttcaggaaaaaacggttgattctaggactggtgcagaaactaagaggaacccagagtactttgtagtgccaaaaaggaagcgctaaacaccaaccccctgcccactcccctcccccacacataatgttgagagtttgtaaatgggatgaaagatccaattgaaagaggttcgcatgaccaaggttggaataaagtagtatttt

SEQ ID NO: 480979 - DNA, 301 bp, Homo sapiens
aagggccctgaaacaataacatcccagtagtaacaaacacacctggcactcagatcttggtttctaacaccattcttcaataaaagaaaccagagctcttcaggaaaaaayggttgattctaggactggtgcagaaactaagaggaacccagagtactttgtagtgccaaaaaggaagcgctaaacaccaaccccctgcccactcccctcccccacacataatgttgagagtttgtaaatgggatgaaagatccaattgaaagaggttcgcatgaccaaggttggaataaagtagtatttt

SEQ ID NO: 480980 - DNA, 612 bp, Homo sapiens
aaataggcaggaacacaatctgttcccttttcacgcccttgttgtagggctcatcatgtacacttcagatgcacgttgttgtctctccaggccacagtgtgtctgagagccagggagaatgcctctcttgcaactcyccatggaggtgtttttgaagcagaatatatttactcactcaacccaaatacagacagctttatggctcacatcttctttgacatattagtgttgctgcttcgtggaagtgagaggtctgcctttcagcccatgtggtgagtgtcatttgtggtggtgtaagctagttaggttagtctgacctcaggtgccaggaggactggataggtactagctgtgttagactgggctaggtagctcaccagtctccaggcccctagatggccaattggatgacatttacgagtcctgaaggggctggacctgggttgagccagcccagagttcagtgctgtctgtgtaatggggagagttgggttggtccctgggtcactggctgaactctcaggcaggtcaggcagaccagtcaggtggtgggaacctgagggtggataactggcctgtggttattgggctctccaagaggctctgggctgc

SEQ ID NO: 480981 - DNA, 612 bp, Homo sapiens
aaataggcaggaacacaatctgttcccttttcacgcccttgttgtagggctcatcatgtacacttcagatgcacgttgttgtctctccaggccacagtgtgtctgagagccagggagaatgcctctcttgcaactctccatggaggtgtttttgaagcagaatatatttactcactcaacccaaatacagacagctttatggctcacatcttctttgacatattagtgttgctgcttcgtggaagkgagaggtctgcctttcagcccatgtggtgagtgtcatttgtggtggtgtaagctagttaggttagtctgacctcaggtgccaggaggactggataggtactagctgtgttagactgggctaggtagctcaccagtctccaggcccctagatggccaattggatgacatttacgagtcctgaaggggctggacctgggttgagccagcccagagttcagtgctgtctgtgtaatggggagagttgggttggtccctgggtcactggctgaactctcaggcaggtcaggcagaccagtcaggtggtgggaacctgagggtggataactggcctgtggttattgggctctccaagaggctctgggctgc

SEQ ID NO: 480982 - DNA, 612 bp, Homo sapiens
aaataggcaggaacacaatctgttcccttttcacgcccttgttgtagggctcatcatgtacacttcagatgcacgttgttgtctctccaggccacagtgtgtctgagagccagggagaatgcctctcttgcaactctccatggaggtgtttttgaagcagaatatatttactcactcaacccaaatacagacagctttatggctcacatcttctttgacatattagtgttgctgcttcgtggaagtgagaggtctgcctttcagcccatgtggtgagtgtcatttgtggtggtgtaagctagttaggttagtctgacctcaggtgccaggaggactggataggtactagctgtgttagactgggctaggtagctcaccagtctccaggcccctagatggccaattggatgacatttacgagtcctgaaggggctggacctgggttgagccagcccagagttcagtgctgtctrtgtaatggggagagttgggttggtccctgggtcactggctgaactctcaggcaggtcaggcagaccagtcaggtggtgggaacctgagggtggataactggcctgtggttattgggctctccaagaggctctgggctgc

SEQ ID NO: 480983 - DNA, 496 bp, Homo sapiens
tcctctgcttgtctgctgttccccttggggcaggacaccaggctggttctcacatcaagagagtgctgagcttgcccacaagcttgtgcactgctcccacataggcaaagcaccagcctagtttgtccactgagggtgcatgcaggggcctagctctttgtactcagcttctgtgctgtgcacagcactaactattctctgggtttgggggtgggggtgggttcagtgtgccttgtgtatttggctgctacatttgcagctgttttgctggagccaggcttggagtaaccagggttggggtatggtagacactggaatggggtagatggaagacctcctaggcagcttgttccaaaggggagtgacccataatagtttggctgagtaatggtgtactactaggtatgagcatggtgtaatgatggcaaaacctcagggatggaggcatgamgtggttattgccctcatgagcaagacacaatatagcagtggctcc

SEQ ID NO: 480984 - DNA, 521 bp, Homo sapiens
gctttttaaaacttcacttgttgaaagcaggtagtttacaacaatgctaaatgttaaattatgttttttaaacaagaaaaaaaaaatagttgaggtgatggatatctcatttaccctaagatgattattatccattgtatgcctgtatcaaaaacagctcatgtatcacataaatatatatatmtactatgtacccacacaaattgaaaattaaaacttaaaaaaaacaaattacaaatgtcctgtatttcaaaacttatataatatagattgtagttcaaacttctttagatagtgtattctgcatgtagctaaatgctgtctacatggtctatgcaaaaatatttttaaatttaatgtataagaagacaactgcattaacaagacattcaatcaaaaactttagtataaaataaacgttgaccttaaaactgaggaaatcttagcattctgaatttgcccaattatgtgaattatgagtggaaagtgtggttcacataaatatgccttctacagagcca

SEQ ID NO: 480985 - DNA, 659 bp, Homo sapiens
atgagctttttctttctctcttcttaagctagaacatgcatcttcccctacccttggataytggagtttctgattcttgagccttccactaaatcacataagaatatatacctatatttatcctattggtttttttttcctctggacaatcctaaccaatacatcatctgaaaataatatgattttaattgtgtcatatattgtgtagtacaaatatgtatgtttgtacatatatttatgttgtattcacttatttttgcttttaaaatacatattgaaattgcataaatactgaaaaatattcaggaatagtttcttaaaagagagatgccaaactttaatactaaattaatactgacaaggataaatagggtatatatgaaacagtaagaatcttcctcagactgagctcctcctccctccactcttgtgtttatattccagcctgtgtagtttttccattctttatccaaacattttctgttccttatgcttgagtctgagtgggaaggctagctgttttactagttcaatatacacattagcttataaaatatatacttctccctatctcttataaatgaaatggagctataaacctgaattaggaaaagatttaaagcttcatcatctgagtagtgcagacaattttgtgatgt

SEQ ID NO: 480986 - DNA, 659 bp, Homo sapiens
atgagctttttctttctctcttcttaagctagaacatgcatcttcccctacccttggatattggagtttctgattcttgagccttccactaaatcacataagaatatatacctatatttatcctattggtttttttttcctctggacaatcctaaccaatacatcatctgaaaataatatgattttaattgtgtcatatattgtgtagtacaaatatgtatgtttgtacatatatttatgttgtattcacttatttttgcttttaaaatacatattgaaattgcataaatactgaaaaatattcaggaatagtttcttaaaagagagatgccaaactttaatactaaattaatactgacaaggataaatagggtatatatgaaacagtaagaatcttcctcagactgagctcctcctccctccactcttgtgtttatattccagcctgtgtagtttttccattctttatccaaacattttctgttccttatgcttgagtctgagtgggaaggctagctgttttactagttcaatatacacattagcttataaaatatatacttctccctatctcttataaatgaaatggagctataaacctgaattaggaaaagattwaaagcttcatcatctgagtagtgcagacaattttgtgatgt

SEQ ID NO: 480987 - DNA, 310 bp, Homo sapiens
gttttctaatttttagcatgtgtgtccaataaaatgactttatataatttttttcttkttggttcattttttttccaatcaaagtttctcctttagtttctcatataattgattcaaaactcctaagtgatgatcacagtaaccttaggtatttcttaattctccataataaatatagcatctgagtctaatttcttctgggagatttattaacttttaagatagcatgtgtcacttacataatctaacaatgcattttgcatactaaaatgatgaaacattcttaatgaatttaaatagctactttatc

SEQ ID NO: 480988 - DNA, 310 bp, Homo sapiens
gttttctaatttttagcatgtgtgtccaataaaatgactttatataatttttttcttgttggttcattttttttccartcaaagtttctcctttagtttctcatataattgattcaaaactcctaagtgatgatcacagtaaccttaggtatttcttaattctccataataaatatagcatctgagtctaatttcttctgggagatttattaacttttaagatagcatgtgtcacttacataatctaacaatgcattttgcatactaaaatgatgaaacattcttaatgaatttaaatagctactttatc

SEQ ID NO: 480989 - DNA, 310 bp, Homo sapiens
gttttctaatttttagcatgtgtgtccaataaaatgactttatataatttttttcttgttggttcattttttttccaatcaaagyttctcctttagtttctcatataattgattcaaaactcctaagtgatgatcacagtaaccttaggtatttcttaattctccataataaatatagcatctgagtctaatttcttctgggagatttattaacttttaagatagcatgtgtcacttacataatctaacaatgcattttgcatactaaaatgatgaaacattcttaatgaatttaaatagctactttatc

SEQ ID NO: 480990 - DNA, 310 bp, Homo sapiens
gttttctaatttttagcatgtgtgtccaataaaatgactttatataatttttttcttgttggttcattttttttccaatcaaagtttctyctttagtttctcatataattgattcaaaactcctaagtgatgatcacagtaaccttaggtatttcttaattctccataataaatatagcatctgagtctaatttcttctgggagatttattaacttttaagatagcatgtgtcacttacataatctaacaatgcattttgcatactaaaatgatgaaacattcttaatgaatttaaatagctactttatc

SEQ ID NO: 480991 - DNA, 588 bp, Homo sapiens
gttagaatgcaatgagaaaagcccgttctaattgcctagagacctaggccagatttgtccagaaggtggtgagcaatgaactggtgcagttggktggtacagagagctcatcttgtaacataataagcagcattaagcattaattgagaattttctgtgattgtgccattctaacagatacaggggaataattgtacaatttagttggagacctacttataaaaagataatacaaagccatacactctcagcatcaaatggatgatactgacagtaaaagctataggtcaggccaggcacggtggctcacgcctgtaatcccagcactttgggaggccaagcagacggatcaaaaagtcaggagctcaagaccagcctggtcaacatggtgaaatcctgtctttactaaaaatacaaaaattagctgggtgtggaggcgcacatctgtaatcccagctactcaagaggctgaggcagcagactcacttgaacctgggaggcagaggttgcaatgagcagagattgcaccactgcactccggcctgggcgacaaagcaagactccatctcaaaaaataaaaataaataa

SEQ ID NO: 480992 - DNA, 518 bp, Homo sapiens
gtagcactccacctgcttgttctcccctgttgcaaggagaagcaagcagatacgggaagcatgcccacctgggacctcccatggcagggtcgagagaatratgctgccacagaaatagctgttcagaacttcctgcagtacaccctgtgtccacaggcactcaggcatagcctagaagggaaaattatcagtctccttcctttggagatttttttttttttttaaagctttgctgctgtgtcatccatccacgttattcctcctggctgtagatattctgcttgctccctatctgtgtttgtcaaagccttgttcatcatggcaaaggcctagcaaaaatcacccatactggtgctgcccctacccctgactactcccctcctgcttctctatgttcacccttccctcaagctaaggatatactttagacttcacccatacatattagttaccaaaacacaatgcttccttcaaaaacatccatatttaagtatctattctcccctacaccaaatatc

SEQ ID NO: 480993 - DNA, 522 bp, Homo sapiens
taaacagcatccagcaagaaaaagcgtggcagcacaacttcctcatgtctgcttccagtttggggcagtgtttcattttgctgagagattacagagtcctgaaacagtttgacaccaggctccaagtggcagtgggatttcagaaggccaacatggatttgtgtccagcaatgccaacacagtggcagatgcttctctttggggctattagggatgtgttaacaacagcctctgtgggaggggcagggtatgtggaaataggagggttgtcttgttttggctgtgaagaatgtaaggaaacacctatggaggaagaggaattcttgagagcttgggcaaggtgacyttgaccttggatgtgctaagacctcagcatctgtaccttcagagggaagtcagggagggagaggtggggttggtgtttctcatgggtaccaaggcaagaccaagaccctggactcctgaccctcaccaagaaaagctgcatactctcgagtaaatctctgaatgtctcaatttccc

SEQ ID NO: 480994 - DNA, 503 bp, Homo sapiens
caagaaaaagcgtggcagcacaacttcctcatgtctgcttccagtttggggcagtgtttcattttgctgagagattacagagtcctgaaacagtttgacaccaggctccaagtggcagtgggatttcagaaggccaacatggatttgtgtccagcaatgccaacacagtggcagatgcttctctttggggctattagggatgtgttaacaacagcctctgtgggaggggcagggtatgtggaaataggagggttgtcttgttttggctgtgaagaatgtaaggaaacacctatggaggaagaggaattcttgagagcttgggcaaggtgaccttgaccttggatgtgctaagacctcagcatctgtaccttcagagggaagtcagggagggagasgtggggttggtgtttctcatgggtaccaaggcaagaccaagaccctggactcctgaccctcaccaagaaaagctgcatactctcgagtaaatctctgaatgtctcaat

SEQ ID NO: 480995 - DNA, 622 bp, Homo sapiens
atccttgaaggggtaatcaagttatttcatatatcttcatattagcagaaatcccaaagaagtccttttctcctttttttttttttttttgagatgaagtttcactcttgtcatccaggctggagtgtagtggcgcgatgtcggctcactgcaacctctgcctcccgggttcaagcaattctcctgcctcagcctyctgagtagctggaattacaggcactcgccaacacacctggctaacttattttttattttttatttttagtagagacggagtttcaccatgttggctagactggtctcaaactctggagctcaggtgatccacccaccttggcctcccaaagtgctgggattacaggcatgagccacctcacctggactccttttctcctttcttaaggatacaatgaaaggatacatcaggagataactggtgttaaaagaaaaactttagacaaattaaatttaacaaagtttaattgagcaaagaatgatttgcaaattgggcagccctaccaaccagaaaacatagagactatgatgctacattgtaagagagaatttatggacagaaaaaggaaagtgaggcacagaaaatggaagtgaggttcagaaacag

SEQ ID NO: 480996 - DNA, 614 bp, Homo sapiens
cgtaaggaattactgggtcatcagctctggggaatgtcttttgattatgaacacattttcagcatgtgtccactgaaggtaargggcaaagaattgcacgatctacttgaatgcctgtttaaatagataaaagtgggattttgggcacggcctggttatatcttcttaaacgtaggtagtagagccgcaactcagcgtagcaacaagagatcttttgaacaactgaacattcagatgaagcaactatgtccttcaaaccacatccttcctgctgcctgtgggaaaggggtgatatttgtgttgagctctgagcacatgcagaatagatctgtgtgtatttccacaaataaaaggacattgtgtgtgtgtttggcacctgggatggcaaaagcagttaattgcttccgaaagctttgttccaacccagggatcggcaggatttttaagcactgaactaggaactgggcactaaaaatacttatgcagaagacctatgatagcagtaagtttacagagcagagctaagacttgcaaaccgtgttgtatctgtgtctttacttactatggttgagaggaaaggatttacacgctgcgtttgcaacctgcaaagtaat

SEQ ID NO: 480997 - DNA, 499 bp, Homo sapiens
ggtagcacagtccctcatggctttccttggcttgggtagggaggtccctggctccttgcacttcctgggtaaagagatgccccrccctgcttctgcttgccctctgtggattggatccactgcctaaccagtctcaatgagatgaactgggtatctcagttggaaattcagaaatcacctgccttctgtgttagtcttgctgggagctgcagaccggaactgttcctatttgaccatcttggctcctccctcctgttattatatttttatgatgaatttagaatgaaccaaatttaataattcccatagggaactttgggacacctgagcatatgtccttggatttcatctgagagaaacagatttagggggagcaggggacagagtaatccaagaaggggaaacaaaagacgagaaggccctgggagtggtgataaatcaatgtctgattggctcattctgttgcaggaaaatctgggttcttgtcacagaccaggaa

SEQ ID NO: 480998 - DNA, 499 bp, Homo sapiens
ggtagcacagtccctcatggctttccttggcttgggtagggaggtccctggctccttgcacttcctgggtaaagagatgccccaccctgcttctgcttgccctctgtggattggatccactgcctaaccagtctcaatgagatgaactgggtatctcagttggaaattcagaaatcacctgccttctgtgttagtcttgctgggagctgcagaccrgaactgttcctatttgaccatcttggctcctccctcctgttattatatttttatgatgaatttagaatgaaccaaatttaataattcccatagggaactttgggacacctgagcatatgtccttggatttcatctgagagaaacagatttagggggagcaggggacagagtaatccaagaaggggaaacaaaagacgagaaggccctgggagtggtgataaatcaatgtctgattggctcattctgttgcaggaaaatctgggttcttgtcacagaccaggaa

SEQ ID NO: 480999 - DNA, 515 bp, Homo sapiens
tggggatgacaatggacaaagacatgacagcctgtataaagagaagtaataatacacagaaagacaaagtgacacacccagcaaggcaggccaagcccagaagaacagctagaagaggaagtgtgcgtgcrcatggagtgcccattgtattaggcattttactgacgttcttctgttatatttgtaacatttcatggcggcctgtgttatcaggtagctatcgttatctctactttataatgaagagactgactcagagacattatataacttccccaagcttagtcagggcccatgcttgcactaaaagttcaggtctgtccaaaactcatactctattttgtccagattattaatgaaattactaagaacagacctgaaattcatcaatgtgacaactacttcttcccacaagagagttagacactcttatcatgtgcttgcactcagttcattgtctacttttcagagtctggacaaggccaggaaaatatatactaatttgatgaataaga

SEQ ID NO: 481000 - DNA, 484 bp, Homo sapiens
ttccaaacatcacatggcaatgtctcgagcaggcatcaagatgggtggtggggagaaaaaaggctttcycattatgttctctcttatacactctgagaagtcctcaaaagatcttcagttatgttgcagtggctttaattgcactgtggtaccacagctactcctagagtgataactagccaatatcgctattctcctcttaaaccagtcataatacctcgcacagagccaggtatttagaagggaaaacaaaactagagttctctgaacatgaaagaaactgattctgggtatgggaaagaccaccagaaatgtgccacaggttacaagatagtaaagagagcactagatttaggccagagtgcctgggcattgtcctcgcctctttgtaaatccactgcttgggcatgtcattcattcttttgtacaacggggactataatacactcacaagggtgtattattatgttgtgagggttaaaca

SEQ ID NO: 481001 - DNA, 484 bp, Homo sapiens
ttccaaacatcacatggcaatgtctcgagcaggcatcaagatgggtggtggggagaaaaaaggctttctcmttatgttctctcttatacactctgagaagtcctcaaaagatcttcagttatgttgcagtggctttaattgcactgtggtaccacagctactcctagagtgataactagccaatatcgctattctcctcttaaaccagtcataatacctcgcacagagccaggtatttagaagggaaaacaaaactagagttctctgaacatgaaagaaactgattctgggtatgggaaagaccaccagaaatgtgccacaggttacaagatagtaaagagagcactagatttaggccagagtgcctgggcattgtcctcgcctctttgtaaatccactgcttgggcatgtcattcattcttttgtacaacggggactataatacactcacaagggtgtattattatgttgtgagggttaaaca

SEQ ID NO: 481002 - DNA, 559 bp, Homo sapiens
ataattttatttatacaaaaagtccagaatagtcatttgtttctagagagaaaagaaattatatgagtggttgtatagaactggggagatggggagattggaggtgactgctaaaggacacaggatttcttttctggggtgatgaaaatgttctaaaattgattgtagtaattgttgtacaactctgtgaacaaactaaaatcagttgaattgtatactttgaatgagtgaattgtatgttatatgaactatatctcaataaagatgtcaggaaagaaagaggaaagataggaagagaaagagagagggagggagggaaagagagcaacaggaattcatggtgatggtcattcraagagattaccacaacatttttgataggcatcaattcccttctcccttcctctttttttgtcccttaaaatggctctggaaaaggctacaattatacttgcacatactgccttgcaagatggaaccaagcttgtacacagcttttccatcttttgtctccatggggaaattttagatgttggggactgatgatagcttacagcaa

SEQ ID NO: 481003 - DNA, 607 bp, Homo sapiens
ctgggtgccctcttgttgaggggacttcaagtcccagcctcttttaactgtttagtgcttttggcatatgccttatactcctgtcttggtgaagcagaaaggtagaagttgcgcaggggttggatctgaggagctaggccagaaaaaccaacagaccatgcgaaaagaagcaactgaataggtatccacatttggggtagagagcaagcaggtccagcatttgacagctacaacttttggtggaaaccatcaggcctgaaaccaatgcactgcagagtggatcatcccaaccagtagttcttyacgcaattcctgccagagctggagctgatacccaagcagaggcaactttgaagagactacactgaaagtggaaagacgtgggatgtgtattataagtgagaatgtggaagcctgtggtaaatgtggctgtaggtgcagatcacatctgagcaccatgccacacctccatgactcccttgtatggattactgcagtcccttcctgatggtctccctgcttctacttttcttccctgcagtctattctcagtagagcatcctgtaaaatgtaaatcagatcatgtcacttttcagcttataatgct

SEQ ID NO: 481004 - DNA, 598 bp, Homo sapiens
caggccctccctaagggcctaagcatgtctgctacctgacacagctcctgttgctcccagtagctgtggctatggaaatgggcctcatcccatcacactcccatggtctctctgtaaaatccacatgctartactagtcctgccctgggagacaacagaatagatgtgagtccacctctccacagtgcttcacgtgttcccacgctgccctcttgtctcccctgacaacgcctttcttcatgtccatctagttcccaatcgtgaagttcttctcatttccggctctttcatgcccaatgtcttggtttgtacagtctcctattacatgttgtcaccagatatgggctccctagagcagagcagagccattttgtctcttttgttctgattctttacttgctaaatgtacctactgtggaaacaaaatgcaatgtatgatcgaatgtccttttgttaaacagccatttcactttttaaaactcagaactgtgagaaaactacaaaactcctgaagatttttcacacgtcttgctatgaaaacacatctccccactgcgggttattgtacaggaccagcaatcataattgaatagagttt

SEQ ID NO: 481005 - DNA, 598 bp, Homo sapiens
caggccctccctaagggcctaagcatgtctgctacctgacacagctcctgttgctcccagtagctgtggctatggaaatgggcctcatcccatcacactcccatggtctctctgtaaaatccacatgctaatactagtcctgccctgggagacaacagaatagatgtgagtccacctctccacagtgcttcacgtgttcccaygctgccctcttgtctcccctgacaacgcctttcttcatgtccatctagttcccaatcgtgaagttcttctcatttccggctctttcatgcccaatgtcttggtttgtacagtctcctattacatgttgtcaccagatatgggctccctagagcagagcagagccattttgtctcttttgttctgattctttacttgctaaatgtacctactgtggaaacaaaatgcaatgtatgatcgaatgtccttttgttaaacagccatttcactttttaaaactcagaactgtgagaaaactacaaaactcctgaagatttttcacacgtcttgctatgaaaacacatctccccactgcgggttattgtacaggaccagcaatcataattgaatagagttt

SEQ ID NO: 481006 - DNA, 614 bp, Homo sapiens
cctttagagggagaagaaagtataaactcttagcccatggtgggagcctatgcagactttccaggccagacttcagaggtccttgaggttggcttccaggaggatggtagccatggcctggggagagtaaaggatgcccaccagctagtcggggctcttgcccccaggatcctatgtgaagctttggttcacaggtcgtgagcagcaggatattctgcttgttaatataattttttatctactcttgcaaaaatatgatgagaacattaaatccagccctctccataatcatgcgtcattatctaatccctttgttacacagacggctaagctttaaaatgctgctataggtggaaacagagctatcagaagccacatctctcagccccatttcaaaagttgcccgtaatgagaagcaaagttaaataaccwtgcacagaatgacgcccacccctgtctgtccaccatcatactttctcgcaggcatcctcagctcaccaggaagtggcacctagggcaagtactgggggacaggagggcagagagcagaaagaaggaaagtgtgcgtgcagtggacgtcagcctttcacgcgtccccaccctgccctgtcagc

SEQ ID NO: 481007 - DNA, 616 bp, Homo sapiens
cacttgatgccagccctagtgctcttaaaagcaggccttctttaatgtatgtttgatgagtgtattgttcactgagagatgaacaaataatgatttggaattctctgtgtcactagacattatgtagagctttagtcatggrcaattagtaagcattaaccctcctggtgatttacactgtatttcttagattcagaatggtcattttctggaaaaacaaaagtatattccaacagggcatgtctttggctagacagaaggttctgcctgactttgaggggtaggaggtgggattcctaaagacagcggtacaatgatacatggacttatcaggcaaaaaaatatggtgtcagctcattattaatatttccctgaactctagagacatcatttatcatgtattaaggagggaaatgattatgttcataatgtagagctttaatgaattgaaaatgtacagacatcattgagcaactcttccttccataggtcaggctgactatgcttttactgaagagaatgggttagtaccatggagaacagtcattcttcttagatggcgagcatctgacactcaacttgaaagataacataagagtaaaatgatgtacgctga

SEQ ID NO: 481008 - DNA, 438 bp, Homo sapiens
ccagccctagtgctcttaaaagcaggccttctttaatgtatgtttgatgagtgtattgttcactgagagatgaacaaataatgatttggaattctctgtgtcactagacattatgtagagctttagtcatgggcaattagtaagcattaacmctcctggtgatttacactgtatttcttagattcagaatggtcattttctggaaaaacaaaagtatattccaacagggcatgtctttggctagacagaaggttctgcctgactttgaggggtaggaggtgggattcctaaagacagcggtacaatgatacatggacttatcaggcaaaaaaatatggtgtcagctcattattaatatttccctgaactctagagacatcatttatcatgtattaaggagggaaatgattatgttcataatgtagagctttaatgaat

SEQ ID NO: 481009 - DNA, 616 bp, Homo sapiens
cacttgatgccagccctagtgctcttaaaagcaggccttctttaatgtatgtttgatgagtgtattgttcactgagagatgaacaaataatgatttggaattctctgtgtcactagacattatgtagagctttagtcatgggcaattagtaagcattaaccctcctggtgatttacactgtatttcttagattcagaatggtcattttctggaaaaacaaaagtatattccaacagggcatgtctttggctagacagaaggttctgcctgactttgaggggtaggaggtgggattcctaaagacagcggtacaatgatacatggacttatcaggcaaaaaaatatggtgtcagctcattattaatatttccctgaactctagagacatcatttatcatgtattaaggagggaaatgattatgttcataatgtagagctttaatgaattgaaaatgtacagacatcattgagcaactcttccttccataggtcaggctgactatgcttttaytgaagagaatgggttagtaccatggagaacagtcattcttcttagatggcgagcatctgacactcaacttgaaagataacataagagtaaaatgatgtacgctga

SEQ ID NO: 481010 - DNA, 632 bp, Homo sapiens
ggcatggtggcgggtgcctgcaatcccagctactctggaggctgaggaaagttaatcgcttgaactcaggaggcggatgttgcagtgagctgagatcgcgccattgcactccagcctgggcaacaagagtgaaactccgtctccaaaaaacaaaaaacaataaaaaccatagaagacctctcagtagctgggctagaagggcccgtccctcccctgtgcccccctgtccttgcacagtgctgaccagcacatcatcagatactctgcaccgtccgcctgcctttttgtctcctagagcccactaggttgtcatctcctcaggggcaaggattgtgtcttactcacctcggtgtgcccagcagcttggcagggccagctcataggagatggccctggactgaagcccatggaatgaatgcactgaggaggcaagaaagatgaggcaaaaggtagaatagctgaggctgggcgcggtggctcacgcctgtaatcccagcactttgggaggccgaggcgggaggattatttgagtccaggagttcaggacccgcctgggcaatagagtgagaccttgtctctacacmaacaaattacacaattttttaaaagatggaaaagctcctctggatctc

SEQ ID NO: 481011 - DNA, 383 bp, Homo sapiens
cagctgtcatttcctccttctctctgcgcagtggtttgtatgccgactgtcaaaagccccaaattcatagtcttttagcatcaggtttctgtcactgttttttttttccagaagaaacacacagaaatcatctgtaccccctacccctgtggagaggagagggaagagctttaaacgcacacacacacacacacacacacacacacgtgcgcgcgcgcgcgtcggcagcaacctaaaaacaagttttttgatccgtcacaattaacactttcgaagaaaaggagcaggaatattaattgcactggtgtgttttgtggctgcagcctttccccttgcccrtgagccctccggaggctgcctgggagggtggcagccaggaagcc

SEQ ID NO: 481012 - DNA, 574 bp, Homo sapiens
ctgaccctgtgcaccctggtgagcccctgaggggaagctgctcaccagggattggggtccccactccttccgagccctctcaacaaggcggctttgtctggcagccccaaggacccccacgctcctccccaggccccctactctgagctctgaaaggaggctttatctgcatcccaggccagactgctgggaagtgagtggccgggactggcacatggggccaggcagcagccgcagccctgactcctggggctgcagacacagagagagccmaggacaaaagggtgccctggggaatcagcccggccccagaggaagacaagaggactacacaggctcccctgcgccccatcccctcccccgcaatctggtcacttgatcgcagtggtcagtgacacggccctttgtgcagcccctgcctcaggggagaaggaggcaggtaaggcagcgctgcttgtaatcggacctcccggggcctgcttcccgttccctttctctggtcctgggaagctttgggagggtgggaacggtttgtcaaggacggtacctttccaaatgaaaaggagcttcagga

SEQ ID NO: 481013 - DNA, 623 bp, Homo sapiens
ctcctcaaaaatactataacaatttgtaggccccaaactagagcatttatttcttgcactctggtggccaacattggctagtatcaattctgatatgcaaaaatgttatctttattcacattctccttatttcttaataaatttcaactttttgagtatttttctccatttttattttgtatatcatttgcttaacttgctgaagggccttttttattttaatttcttcaaacaatgatgccatttggtttaataaacattttattctccccttctaccatcatattttctgtttaaaaaatgacatacttttttttttatatctttaagaatagaaaaccatccctttataagattttcctttgttccatgaaagacattcatttcgggtgaagattttcctcttagtttttataacaatgawccttttatgtttcaaatacttctaggtccttgctccttgttgttctctgcttgcctcattcttgaaacatagatgttttattttattgttgtagcttatgcatatcgaaggcctgcttgttttattatgaaaattaccaaacaccacaaaggtatctctacaatggccccatatacccatcacccagatctcaaatatt

SEQ ID NO: 481014 - DNA, 550 bp, Homo sapiens
ttgtcttccttccttccctccccctttctcctttccttccttccctctttccttcctcctgtccttccttctttctgaaatattgtaaagcaaattctagatgccagatcatttcattctgaccttcttcagtttgctttcctgttttgaaaaattcggattttcttatataattatgatgctattaacacctaacataattaacaattctttgaaatcatccagtacccatttcaaatgtcactaagggcttcaaaagtgacttytgtaaagtcggtttgaaaaggtcacttttaaaatgtgttatcacttgcctatttgagtactttgggctctgtgctgtgatggtctaggactaaaaaagaaagtaaatggagggatggtccctgccccccaattccagctaatctccagtccccatctctctgtgtgctgagtctattgcagaatagtagtaaaattggtactaagtacttagggacagttcttagaatgaatatttgatttaccagcttcatttactaagtgctctatcaagccttttctgtta

SEQ ID NO: 481015 - DNA, 483 bp, Homo sapiens
tcaatttatgagctgattacgatggccaaaggagatccaatggatattttgggaaatggctcataaaatgcattcagatcaaccagaaataaactcaaaggctccaggaatcacatttttggaagcactagctggaggaggggaagctgagctgacattttgcacaggcacttctaattatatctcacattgtgtttttctctgcacctcttttttcgtaccaacagtaagtataattgctgaactgctctcagatagaataacacatctttcttttttttttttttgaggtaaagttttgctctgttgctcaggctggagtgcagtggtgcaatcatgggttcactgcaactttgaactcctgggcttaagygatcctcctgcctcagcctcccaaagctcagggattacaggcatgaaccaccttgctggccaatgcagcttttttttttttttttaatgacaagaggactccaagagcat

SEQ ID NO: 481016 - DNA, 657 bp, Homo sapiens
ccacctcagctggcctccctccccacccggcactagagcaggggcgagccattgggtatcctcccttgcgctccccaaccatctcctggggtgagctcagggagsctgcagctactgggacaggggcccactggcaccttgctggcccctactgccaggcagggtaccatcagccagctcgctcctcccagggaactgcctcttctccagcagcctggagtcccccacttcccagccccatcgtcctcatcccaagcctgatcccattgtgtcctgtgactccttgtcccttgttgggcacctgcatctgtcctccctcctcagcctcccatgccctctgcatcctgcactcctgctgaacgaatgacccaggcctccacttcccatcagaacatcctctgcaacacgtcccttaccggcaggcgtcactccctgagctcaccatttccctgcagccatgctacgtggctgctgcttaatgtctcagaggccccttctctgagacagggttgagacctggggtttgcaccccctctgccttgacgcatccagcccagtattcctcccacttgctcatggccagatgaggaagggaagtggcaccactgggcatttgattgaaagcagcaaagactccatgactcccttcccacactg

SEQ ID NO: 481017 - DNA, 608 bp, Homo sapiens
tgagcaattctctgtctgccagagtagaatttggagggtgtggtaccaagttcgtgtgtggttggtctcggcatcatggggggagtatgccttcataacagccaacggggggtctctccacaactccaagcccagcaacttgtaatctagttttgacagtcaaaaggtattcagtgaatggatgattaaatgaataatagcctggtagaacaagactaacatgtctctatatgtgtgtgccttgacctccgttacagagtcctagagtctatattttctccccctgtgggagacaaagaaactgagactgaaacagttctacaacttgctgatgtcacacagggacaaggctctattttctgacccctgggcttttttttcaacaactgtattccatttctgagtcaaagggagtgcagactagaacacgcatcccagttctctcgctggagcagaagctcctattccacccacaccaactctttcttcatctgtacgatgggataatktgccgtttcccctacctcactagagatagaggagggggatcctctaatgagacagcagggagaattatttgaaaaactaaaccaacatttaaggccagc

SEQ ID NO: 481018 - DNA, 466 bp, Homo sapiens
cctactccttcttattgtaaatttccctgaaacaagcgtacatttttctgcttttctttttgggtttcatgtcctcaaagctatcaatgatacattttgtcatttctgatgtcaataatctaggtatacagcgatctttcttgttgctgttcaaatgacacgtatacagatggccctaggtgggcactgcagccttccacagcctcctaggcaaagctatggggaagaaggcactctgtgggcctagcccggccatgtagtcctactgttcagccttccgcaacaatcacaggcagcctccagggatcagcatagccagagaattgattaacctccccagttgtttctgcacagtgagggggccgctgggtcacccaccagaaagcaaaacccacaactagctgcttcctgggaaaacayaggtggcatcatgggaagccagagaatgacatagagttagcccagg

SEQ ID NO: 481019 - DNA, 555 bp, Homo sapiens
atacacagctcttaaataagaaagaaaaccaagagaaaaatgggcaatgcatatgaacaagcaattaatggaagaaacacaaatggctattaaatttaggaaaatgtttaaacttactatcaatgaaagaaatgcaattaaagtggggaaatattttttctgccaaattggaaacatgaaattgaggctatctggtgtagtcagggtaggcggatatagatacagctgcacactaaatttgtagattgagataagtgtctcaaagatccttttaaaattatataycaacactttgactttctcatcctttgataggagaattccacttccaggaatttgtggctgtggaatggtagctcaagggcatgaaagtgtatatataaagatactttaaaaaaggttttgctggaaaagtgacatcaaaagggaaaaaaatccctttaattacctctccaaattgaaacgtgtttaaatttctttcctactgtgctggacaaaactttatgtagcaaggcaaaatgttaattttgcagtttgacttgacctctttagaaa

SEQ ID NO: 481020 - DNA, 594 bp, Homo sapiens
cctgtggttctgagttaacgttacctttccgagccatgtccctcacctggaaaacgggaatcattctaacagcacttcccttaccgggctcccctgagggttgagtgaaataatgaagggaacgtgctcrgcaggagacataccatgccctctataagctttcactcctgtcactgctggatctcactgtggccagcatagagatgttgctcagcgctgccttcaacaggaggtggtcgtctggatcctccacctgtcggctccttcagagcccacccttggcttttgaatccaggtcctactcttctcagggaggtcccagactgtgtagggtgggactagggtggggggttatggtaaaagggcctagccctgtctaccagtgtaggcctccatcaatgggaagcacttcgtgggggcaggggagctctgtgtcatctctttttccttctcagatgtcatcaccgacatgttcctgggtctaagtctgtttcctgaagaacccagcaggccagcttgtcagttcaccttacctgaccccgtccacctgagggctaaagccttgacctctgtgttatggccacggccttaaag

SEQ ID NO: 481021 - DNA, 594 bp, Homo sapiens
cctgtggttctgagttaacgttacctttccgagccatgtccctcacctggaaaacgggaatcattctaacagcacttcccttaccgggctcccctgagggttgagtgaaataatgaagggaacgtgctcagcaggagacataccatgccctctataagctttcactcctgtcactgctggatctcactgtggccagcatagagatgtygctcagcgctgccttcaacaggaggtggtcgtctggatcctccacctgtcggctccttcagagcccacccttggcttttgaatccaggtcctactcttctcagggaggtcccagactgtgtagggtgggactagggtggggggttatggtaaaagggcctagccctgtctaccagtgtaggcctccatcaatgggaagcacttcgtgggggcaggggagctctgtgtcatctctttttccttctcagatgtcatcaccgacatgttcctgggtctaagtctgtttcctgaagaacccagcaggccagcttgtcagttcaccttacctgaccccgtccacctgagggctaaagccttgacctctgtgttatggccacggccttaaag

SEQ ID NO: 481022 - DNA, 592 bp, Homo sapiens
ttgggttttcccaatggaagagccttctttttctggtagctgttctatgagttatcgtctctctcattaggttaggcagtatatctggaccatcactacagtgagtgtcacatggttattaattcactgctcatgtcctgaaccagagtttatcatggtggttgccaaatggtggctttctgacttcatgatgccatgtacctgtattagttggcattccactgtaagaaggagattttatttttccctttgtgtgtttgtatcagtattttatcactatttgttttgatgcttaaattgtcccagatttggctagtggaatagacaagatggcctcatgtcctttgataagttttcatygttcttagtgcacattcttatctccaggccaccaggcatagcaggatgtgccaggctgtgttgaagttttccaccttcagacctgaaaccagccatttctctaagaagccctgttttctcttctcccctccactcctcccctcccctccgctcctctcctctttttccttcccccactctctttctttttcttttttttttagtgtttagaaaccaagatcttggtggaagg

SEQ ID NO: 481023 - DNA, 531 bp, Homo sapiens
tgcccccttggagatagggacactcatgaaggaagtatagacactccaggtgcccctgactcagtgtgggaagtgcacctgcccagtccttcctgtgcctgtgcccaggtgcttggttgcagttgctgggtggaggtgggagagaaaatgctgagaataggtgatggggggatgtagagaggtggcggaaggcagggcagcctgtgggcccaggctcttaagctatggtcacaccttccattgtccctagacttcactcataaaacataaattaaaagagaacattattaagaattttaagatgatgaccacagaggattaaacctcagggcgggatccccttctgagggcatgactctgtgtgactgcactggttgggtgcccacaaagccagacctgcttatggcctccaaagtggaggatggcaagagcgaaagaygtggggaacagaggggagctctgcccgcccacagtttctgccgaagtgtcagatggatgaaaggcattttatcactctggattttcagcagg

SEQ ID NO: 481024 - DNA, 640 bp, Homo sapiens
ctgaatttctaattcaacaaactataagatgggtggcatgagcccatttgacagatggagacactgtcatgctcaaagagcatgaggatcttgcccaaggccaccaggccatgggtagtggagcttggatcaatgtacaggccctacagctcatactytttccatgaagccaaaatgcttttctagtggcccaatgagggatgagaaccacacaagacaatgcacctaccttcatagggtgccagtaagacacacaggatgccagtaagacacagacacccaacattgagtccctcgacatagaaattaaagttctgttactacattcctgtctttcatctcatgtgtacaaagcaaagacaccctagatcatttgataatattagaaacactctggcattgtgttattatcattctggaccattgtttcatcatgggaacagaaccacacacacagacaccagtcatcaggaacaaaagcattattgtctgggctcaggcaatcatccttgacaataggatatgctctgtctgattatcacataggctactatacagaacagcatgcgtgtgcatgtgtgtgtgcatgtgtgggtgtgtgcactgtgttgctactgattgtaacactcatatgtctgct

SEQ ID NO: 481025 - DNA, 640 bp, Homo sapiens
ctgaatttctaattcaacaaactataagatgggtggcatgagcccatttgacagatggagacactgtcatgctcaaagagcatgaggatcttgcccaaggccaccaggccatgggtagtggagcttggatcaatgtacaggccctacagctcatactctttccatgaagccaaaatgcttttctagtggcccaatgagggatgagaaccacacaagacaatgcacctaccttcatagggtgccagtaagacacacaggatgccagtaagacacagacacccaacattgagtccctcgacatagaaattaaagttctgttactacattcctgtctttcatctcatgtgtacaaagcaaagacaccctagatcatttgataatattagaaacactctggcattgtgttattatcrttctggaccattgtttcatcatgggaacagaaccacacacacagacaccagtcatcaggaacaaaagcattattgtctgggctcaggcaatcatccttgacaataggatatgctctgtctgattatcacataggctactatacagaacagcatgcgtgtgcatgtgtgtgtgcatgtgtgggtgtgtgcactgtgttgctactgattgtaacactcatatgtctgct

SEQ ID NO: 481026 - DNA, 608 bp, Homo sapiens
ggggcaacctggaaggagtgtggagggggctggaggtgctactggctggagccccactgcacccttgcagttgaatgtcaagttttctcctgaagggagatgtctgctgtgctttctcgtggacgctgcagcccatcccttgctccctggccctctgcttctccatacatgtgctggagctgcacctgcagggtggcagtgggcttctctttgtgagcagaaggagggtgccagtggtactccttttcaccctcctccactatctgttgtaaattcacctcaccctgcaccatccactcggcaggtctagggggcttacctagtggtgtgacctagacccccatcccaggaggaagagttctcgatcgcatccctyctcaggctggggctgctgcgtccctccattcgtcatcacaatgtgtcaagaaaacactaagaagttcacacaagtgcgtcacctgagttcctcgtggatccctcctgaccctactgtgttgaaagcagtcttgacccttctgaagaccagagccgatgacctctgccaagatgataagccctcttttacccactgatccctgggtggaaggggctcacagggctctgcaggc

SEQ ID NO: 481027 - DNA, 481 bp, Homo sapiens
aaataaacaaattggtacctaaaagagggagacaagacccaccccacccacaggagcagcttgcccccaaagcggacagtgaagtagatgtgctgtggaaacaaagccttcctcttgctttgggttggtgcacaaacattggattgttgccgggctggcagcaggtgttcctctgtcaacacatgtccttttcctttgataatggtgtccagaatccttgatgaacagttgggtaaattccctaggtttctgggtgaggactcaaatcmatagaactgtgacacccttgaaagataatactggctttagttaacaaaggtgtctgtgacaggctgttacataatcttgcatttctttttttattattttttaagaccagccagaccaaatactcaaaagctatgcttgtcacactagataatgacttttttcacaactaagttttccttaatactataacaatttgatatttgaaatgtgt

SEQ ID NO: 481028 - DNA, 601 bp, Homo sapiens
acatataatgaagcatcctgaatggaatcctgaaacaaaaaggaaaaaacacataaacaaaaaaacactcgccactttactaaagaaatttatgcaaaacataaacattaataaaaatgtattagtattgatttgttaattataatgtgtcatactgatgtaagatgataataagggaaactgagtgtaggagatataggaattctctgtactattttctcaatatttctaaatactagaacctttctaaaaaaatgtttgttttaaaaaatagttcaccaacactttaacaaataatgtatttctgacatctagcaggaaaaaatgagtactactgacagaccctgttgatatgagcttaatacatggtgtaataaagggcatttaatattactgtttttcagttgggataaataataggaaaaaattaataataccagcgttcatagacctctttcttcttcctccaaatccaataccccatggaagaaaagacaaargataaaagtttgtgcaggccaattctcactacagaggaagtcagagctggagaacagggctgtccaggacctgttcatggtgggaatggtgtgtgcatgca

SEQ ID NO: 481029 - DNA, 541 bp, Homo sapiens
ttaaagcccagattctggaactaggctgcctgagttccgattggcrtgagccattactagctctatgtatcagttttcaaatctataaaacaagaatattaatagcatctacctccctaggttgttgtgaaaattatgtataaaattatatgtatgtcacatagcaagtgcttgataaatgaaagatattcttattgtgggatatttaaatagtttttttcattattataaatactatttgattgttttggtatgtttattaatataggtgccattattcttattggacaacacttagaaatagaatttccaggtcagaatatgtgatcatttcaaaggctttcgatactaattctcaccagaaagatacccaagaacagatgtaaaaattaatttctccctcttccctttaaagataattcttacaattaaaaatgcatattttaattaacaggtaataattaatatgctcatatttacacatggaatttgtaattgtgatatcattagtagaaatttgttttcttttgtaaattgccca

SEQ ID NO: 481030 - DNA, 541 bp, Homo sapiens
ttaaagcccagattctggaactaggctgcctgagttccgattggcgtgagccattactagctctatgtatcagttttcaaatctataaaacaagaatattaatagcatctacctccctaggttgttgtgaaaattatgtataaaattatatgtatgtcacatagcaagtgcttgataaatgaaagatattcttattgtgggatatttaaatagtttttttcattattataaatactatttgattgttttggtatgtttattaatataggtgccattattcttattggacaacacttagaaatagaatttccaggtcagaatatgtgatcatttcaaaggctttcgatactaattctcaccagaaagatacccaagaacagatgtaaaaattaatttctccctcttccctttaaagataaktcttacaattaaaaatgcatattttaattaacaggtaataattaatatgctcatatttacacatggaatttgtaattgtgatatcattagtagaaatttgttttcttttgtaaattgccca

SEQ ID NO: 481031 - DNA, 562 bp, Homo sapiens
tggatttcactgtgggcctcactgtttattcactgaatttcaatttcaggagtgatggtaagaattaaaagtgaggctccctgtgaatctccaagtagaggatgcaccagaaccggtcctaccctcccctgtgttttccacttcaactgcctggtccaygctccaatacatataatgctcttattatttttcatcatttcctgtgggatgttttctttgggtctctagtgagatccacaaccatgctgtatgctctgtttattgcagaactaaatgaagcatgccgggcagcatctgaaaacaattaaaaataattgaaatgagctgtggactctactagtctcattaagttttttatttcagcctctacacattgggagatttagatctgaaactccaatccctgtggcctcctgctggcaggagagattccccttcccagggcagataaagggccatcagttttcaatgttaaggctgcactcaaaacgatcaggaagggaaaaagcctgatcactgccaagaggattctgtgggaggagatgtcgttctccactagctg

SEQ ID NO: 481032 - DNA, 562 bp, Homo sapiens
tggatttcactgtgggcctcactgtttattcactgaatttcaatttcaggagtgatggtaagaattaaaagtgaggctccctgtgaatctccaagtagaggatgcaccagaaccggtcctaccctcccctgtgttttccacttcaactgcctggtccatgctccaatacatataatgctcttattatttttcatcatttcctgtgggatgttttctttgggtctctagtgagatccacaaccatgctgtatgctctgtttattgcagaactaaatgaagcatgccgggcagcatctgaaaacaattaaaaataattgaaatgagctgtggactctactagtctcattaagttttttatttcagcctctacacattgggagatttagatctgaaactccaatccctgtggcctcctgctggcaggagagattccccttcccagggcagataaagggccatcagttttcaatgttaaggctgcactcaaaacgatcaggaagggaaaargcctgatcactgccaagaggattctgtgggaggagatgtcgttctccactagctg

SEQ ID NO: 481033 - DNA, 588 bp, Homo sapiens
gctatgtagtgatttccatgattatagagtttcataaacatggcatcatttttcatcattaaatacctgtggatctcaagacttgataattatgttgacaattatggagtatgtctttgttacktctttgtgggtatttcaataagtactttgctttcaataagtacttttaacattttctgtagacctttctctttcctactaatactattaaaataaccaacatattgcatagaactatagaagcttacaaacatgatataaattcacagatgagcgaagacttgtttttttaatcttgcaaagtgactctctagttaatactctaagacatgtaatataatgcatacaatttatacaatagttttctcaaagacatatgatcaaatgtgaaatgtagaaagcgggtaaattcacatgtgaatatgccttaatttggctttcccaaggagcagatagtgagataaggacttgagtaacaggagattatttagaaggcacaacctgtcttcctaaataccttttaggcaaatagacaagtgacataagaaaaatcagaaagcctactagaagtgcattatctaacaa

SEQ ID NO: 481034 - DNA, 643 bp, Homo sapiens
tcaaacatggcctgagagttattccatttgaaaggagaggaagatgggggatacaccaactcctgtttatacactaacttctgttagtcattgggtaagggctcctcctggagtgtgttaatcatacaactttagtgtgatgcacttctgcagaaaacagatttcaacatccattgaaagggttcaagccaaaaatgaagatgctgaaagataaaattcagaccagagtacacccagatagtgagagaaaaggagatgtgggctggatactaccagcatctgctatagaattaaggtacaaattttacagcatcattgttaatacattgcattattaaaattatgatttatcccatttatttattcaagccacaagcaattattgagcctttttcatatgtrccaagcatattgctaatagctgagggttaaatattaaagagacatttcatgctttcaagtagtagtaagcacacacatgcaaagagaatagttataatagcaggtagtgaatacgactgcaaaatcagaaacaatataatttggaaacaaaaagtagagtactcactcttcattgatgagtgaaggcttcacctagatggtaacatttaagctgagttttgataatcagtaagaatttggt

SEQ ID NO: 481035 - DNA, 595 bp, Homo sapiens
  misc_feature (1)...(595): n = A,T,C or G
acccccattttacagatgagggaataggtccaagatgctaaataacttgcccagtgtcacatttctagtaagtggcagagcacgcattcaaaccctcaactgtctgacctcaaggtgtcaatctagccctcagctccacagctctctggtcttccctgtgtgtgtcacatatgtgagtgtggatccactttgtagtggctgggtatctggccttcctcacttaacaattattgtgaacattctcctgtgttagcaacttggcatccatcacatatgatttaatagcttcatggcattttatcaacactaatatcccatgctttatataacttactccattagtaaaaaaaaatcagttccactttaaattaatatacaaatattatcttgattaacattactgtatrtaaatgttagaatatctccaattatttcattaggataagttcatcaaaaatagaattgctgatgtggtctcaggagtcagtgtgcccaagtttgaatcctggctctactgatgcagggcagacaagccccaaattggggattagcctggnnnnnnnnnnnnnnnnnnnnnnnnnnnnnnnnnnnnnnn

SEQ ID NO: 481036 - DNA, 524 bp, Homo sapiens
tgggaggaggcagccccaggttcagccagtcaggaaagagcaggagaaaaccttgctctagtcctcagggtctgtaaggggaactcaggtccttcctsgggaggccaaggattccagccccagcacagggcctggtgtgtagaagaagctcaataaatatgtatagaaagaaagagagagaaagaaagtgagagcaaaatgaaagaaaaagagagagagaaagaaggagagagagagaaagaaagaaagaaagagaaaggaaggaaggaaagaaagaggagagggagggaggaaggaaggaaggagaagaaaaaaggaaggaagaaagaaagaaaaagttttttctctgttacacaacaaaaatcattaagaatataggatcttgtttctgtggtcttgggttcaaatcttggctctgccttttacctgactctcaagtcattttacctttctgagcctcagtttcctcatctgtgatatggggattatcatagcatccttagagaattgctaggataattaaa

SEQ ID NO: 481037 - DNA, 624 bp, Homo sapiens
ctggtaaacattgttaagatgcttccagggagcataagcacctcccaccgcctacctcccgccttggctatgctcgctcttctgctcctggccatccaggagaaactggggtgttcacggcaatgttcaargcccttcagggtcccttgatcaagagatacctagaaattgtatatcccaatgggtctggagtcccagggaaaagtactggcttggccataacttgctaggtaactttggacaagtcccttcccctctctgagcttcagtttctcagtccgtccagtgagaaaggagattgtcaaactaatggtttggggctctttcaactcagttactccagggtttcatgactgacctctgcctgaataatgctgcaacgatgtgaagctttcatcccagggaggcgcatctataaggggatctctccttgagtggctttgtggctcttctaggcaggtcttaggcctcaatgagcatgtttcatcccatgctttttgatggctaaggatgcgggattggagtcacaggccaggcgctgcccctagaaagctgtgtggcctcagcaaagtctctttacccctctgaacatcagtttcctcaactggcaaatgtgtatggtaa

SEQ ID NO: 481038 - DNA, 556 bp, Homo sapiens
  misc_feature (1)...(556): n = A,T,C or G
actctcctgcaggacttcagagtggttgcccagggtgtgggcatccctgaggactccatcttcaccatggctgaccgaggtacatagcacccctccgcctcaaattcctgtcccctcttcgtcccttgtgggcgccagagaccatcccagcccctgggtccttactataaccctctgagataaaaaggcgccacagcctcccctccatagtgaatcangaagccagtggatttgctccaagtctcacagcttattcctagcagagcttagactagaacccattcagtgttcattctactgccatgtgtctcagggaggttgtagccagaatcyacagatacctcttaggaggcaaaagagttttgggattaagaaagtgggctcaggaatcagagtgttacgggatctttggggcattgcttttctggctggaaacctctgtggccagtggtgcctttgcctgagttttgcttgggcctgctgggcttgttccacccacttggcctggtagaccgtgcttggctcatgctactggcctggatcccacacctccaag

SEQ ID NO: 481039 - DNA, 338 bp, Homo sapiens
ttaaaaacttcaccagaaatattcattttcttaattatgaccttcattaacacaccactgattaaatataggcattctgctaatcctaggactgtatttccctgcccttgaggagacagttttgggagtgatatcaaaaggaagtaaaatcctgaagaattttagatagaagtgagaggaaaacaygttcttaaaaacaaattactctataaactaaccttggatcgttaagtaatttagatgcctaagcaagaacttgattgtggggttattccacaatgtatacatatgaaataatcaagttatacaacttaaatataccctattaagaaaaaaca

SEQ ID NO: 481040 - DNA, 558 bp, Homo sapiens
ctgtgccctctgcagtggtggctgctgcgttcataaccagcacccgattaggcgctaattcagttccacaaatgctccctgagcctgacccagccaggctcccttggggattatagccttgacctcagaaccctgcggacctgggtttgaattttgttgtaccacttgtcaggtgtgtgagcttggaaaaatccattcacctccctgaatctcagtttccttgtctgcaaattggggggatcagaattccagcctgaggccgggcgcagtggctcacgtctgtaatcccagcactttgggaggccgaggcggctagatcacttgaggccaggagttcaagaccaccctggccaacatggcaaaaccccgtctctactaaaaatacaaaaaattagctgggcgtggtggcaggcatctgtaatcccaggtacttgggaggctgatgggggagaattgcttgaacccrggaggtggaggttgcagtgagccaagatcacgccactacactccagcctgggcaagagagtgagactctgtctcaaaaaaaaaaaaaaaaaa

SEQ ID NO: 481041 - DNA, 323 bp, Homo sapiens
aggggggctttttggatgcttgggggaggaggggggtctccgtttggggccgtctcggtgtgttccggtgtctcrgtgtctgcaggtcccaagcctgtacgtctccgtttctatctgttcttgtgaaattgtccgcaagtttctaggtcaccaggtctcgggttctgctcctgtctccgtgtctgtgtggctctgcacgtccccgcgtttctggaaatctccgcgtgtgtgtgtgagtcggcctgggtctgtgtgtctgtgtttcctgcttctcggttcctgtccctttcacgtgtgtaagagagaaaaagtgagagccagca

SEQ ID NO: 481042 - DNA, 622 bp, Homo sapiens
tcacccaaagagagtcacaactggctgggccaggcagcatgggtgaggtttcccctatccactgggtgggtttctaagctgacaaccagcagtctccaggtgtcccccaaagaccatctgcagctaaagggcaaagtctcaagccctgacacctggcaaatgtgaccagcacagagctgctrtgagtcagaccactgtgagccctgcagggcataggaaagggctgttcttgcccaaacttttcaggtaactaattaacagcaataagaaaaactaatacttgttgagcacttactagataccaaatactttacaggcatgatctcacttgattctctcagcaatctatggagcaggtactctttattatcctcactttatagagggggctcaaaaagagtcagagggaataacttgcagcttaaaaaaggcacagcccaagtttgaacccaggccacctgactctggggtctttgtgcttagccatgatgctattctgcctggggcctcccaggcttgttggaaagcagggtggagacacatccagcaccccatcaaggatgaagagatgggggacaggggaatgaattcagcccaacgccaagatagaaggagcctgcca

SEQ ID NO: 481043 - DNA, 622 bp, Homo sapiens
tcacccaaagagagtcacaactggctgggccaggcagcatgggtgaggtttcccctatccactgggtgggtttctaagctgacaaccagcagtctccaggtgtcccccaaagaccatctgcagctaaagggcaaagtctcaagccctgacacctggcaaatgtgaccagcacagagctgctgtgagtcagaccactgtgagccctgcagggcataggaaagggctgttcttgcccaaacttttcaggtaactaattaacagcaataagaaaaactaatacttgttgagcacttactagataccaaatactttacaggcatgatctcacttgattctctcagcaatctatggagcaggtactctttattatcctcactttatagagggggctcaaaaagagtcagagggaataacttgcagcttaaaaaaggcacagcccaagtttgaacccaggccacctgactctggggtctttgtgcttagccatgatgctattctgcctggggcctcccaggcttgttggaaagcagggtggagacacatccagcaccccatcaaggrtgaagagatgggggacaggggaatgaattcagcccaacgccaagatagaaggagcctgcca

SEQ ID NO: 481044 - DNA, 591 bp, Homo sapiens
ggttaaggaaatgcttaatgacagtaatctcttctgactgattgccagagtttgtacaagctgaaagtattattgtccgacaggtgaaactgaggctcgttggcatgacttatgaggcctctacaatatagctccaaactacctttttaagcaccattacttcccagtccctgatgtatactagacgcttgtggttattttcacttctccagtttcttgcacctcctgttgcctttatggaattccaagctccctcgcttgacttcccattgtacgtctattcatctttcatgaatgagcttgagtgtcaccttttcttttgaagctctccctaacatctcgagatgtaatcagtcccttttcacacaccatttgmctcatactgtaacattaccatattagattacagttagctctatattgaagttttgtctcttttcctggcttaaatggtccttgagaatagcaagcatattttcatctctgtatgataaaatccaagaatataccttgctgcttatacatttgttgaatgaatgaatgacagcatagaaaatgtcatttttagaaggtaactatcagcccactaaa

SEQ ID NO: 481045 - DNA, 591 bp, Homo sapiens
ggttaaggaaatgcttaatgacagtaatctcttctgactgattgccagagtttgtacaagctgaaagtattattgtccgacaggtgaaactgaggctcgttggcatgacttatgaggcctctacaatatagctccaaactacctttttaagcaccattacttcccagtccctgatgtatactagacgcttgtggttattttcacttctccagtttcttgcacctcctgttgcctttatggaattccaagctccctcgcttgacttcccattgtacgtctattcatctttcatgaatgagcttgagtgtcaccttttcttttgaagctctccctaacatctcgagatgtaatcagtcccttttcacacaccatttgcctcatactgtaacattaccatattagattacagttagctctatattgaagttttgtctcttttccyggcttaaatggtccttgagaatagcaagcatattttcatctctgtatgataaaatccaagaatataccttgctgcttatacatttgttgaatgaatgaatgacagcatagaaaatgtcatttttagaaggtaactatcagcccactaaa

SEQ ID NO: 481046 - DNA, 591 bp, Homo sapiens
ggttaaggaaatgcttaatgacagtaatctcttctgactgattgccagagtttgtacaagctgaaagtattattgtccgacaggtgaaactgaggctcgttggcatgacttatgaggcctctacaatatagctccaaactacctttttaagcaccattacttcccagtccctgatgtatactagacgcttgtggttattttcacttctccagtttcttgcacctcctgttgcctttatggaattccaagctccctcgcttgacttcccattgtacgtctattcatctttcatgaatgagcttgagtgtcaccttttcttttgaagctctccctaacatctcgagatgtaatcagtcccttttcacacaccatttgcctcatactgtaacattaccatattagattacagttagctctatattgaagttttgtctcttttcctggcttaaatggtccttgagaatagcaagcatattttcatctctgtatgataaaatccaagaatataccttgctgcttatacatttgttgaatgaatsaatgacagcatagaaaatgtcatttttagaaggtaactatcagcccactaaa

SEQ ID NO: 481047 - DNA, 543 bp, Homo sapiens
tttgttgatgctgactaaataaaaaataatagaattttgatgactagagagttagccgagagaaaatactaagtcttggagttagacgtttcatacatataattgaaagctggatgaagtaagattatttcaatgtgtgtaatataataccgctctgttaatttaaatttaatgctattttcaaattgcattgagggctatgccgtcacagagagtttaattagttaatccttctgtttaattatatgctttatcagataaagatccttttggaagttttgtctgccacttatatgaaacaacaaaataggtccaacattcactttgttaataggtatcctatttacttttctggattacttttagtgtaaaagcaaacaaaaagtgttaagtaaagttctggataaaaatgagttccatttaaacaatggtggggaaagtctgtgamtaatgctggcttatccctgtaacttctgatttattaatattatcattccacttctgatttgtgacactaagaaggtcttacatagaggcatctaa

SEQ ID NO: 481048 - DNA, 526 bp, Homo sapiens
caatgattgaaccagactggtgtagtcctcagtattagctctaagttctctctttctaaataagctggcggtattttcattgtatttattaaagtcaacgttatcactatgcagscaattataaaacttcccaggagtaaccattattgcttcaaaagttaagtatttcctgactcatgcaatcagggaaatacacagattgtttgggactaaagagcaaagctttagctttctttaaaaagaaacattttaattttgatgactgtagtctttattatactgtttaaataatcacaagtgtcccatgcttactaattatggatataagagaagattaatctacagtacaatgtcttttttattcacacggttcactgataacagatgaacttcaataaatgtttaaaaatagatatgacggatatcagcgtgagaataagcttcctaaaacatatttaaacaaaaaagaactgtatcaattattttacaattgatataagcttcactgcttgatattattaatctt

SEQ ID NO: 481049 - DNA, 565 bp, Homo sapiens
aatttttcatttaatattttcagacctcagttgacctcagataactgaagtcctggaaagaaaaactgcttatgagggaaactattataaggggtacatgctattgttttctcttttgttttcttaccttcttactttgcttatcttatacttaatttctattttctttctccagtcctcttttcccaaagttatatctatctcagatctcccagtaattcccatcatttcctacygtaattggtgcctagggatacaggcagtgttgactctcctagttactattcctacaataatacaatgtagaaaacattgggattgaactaaatattttatttactatcaggtgcatgaggtctataaatattaatacctgggcactacaatgaggtattctctgaaacctcataaataagggaaatgtgatattctttgaagtgaaatcaataattttgctctcatctacaaggtcgctttagacagaatacttcctggatctgaaagctttgactgtgatctaattgaatatgtttgcacagctaaagaaggattaggttaattagaa

SEQ ID NO: 481050 - DNA, 565 bp, Homo sapiens
aatttttcatttaatattttcagacctcagttgacctcagataactgaagtcctggaaagaaaaactgcttatgagggaaactattataaggggtacatgctattgttttctcttttgttttcttaccttcttactttgcttatcttatacttaatttctattttctttctccagtcctcttttcccaaagttatatctatctcagatctcccagtaattcccatcatttcctaccgtaattggtgcctagggatacaggcagtgttgactctcctagttactattcctacaataatacaatgtagaaaacattgggattgaactaaatattttatttactatcaggtgcatgaggtctataaatattaatacctgggcactacaatgaggtattctctraaacctcataaataagggaaatgtgatattctttgaagtgaaatcaataattttgctctcatctacaaggtcgctttagacagaatacttcctggatctgaaagctttgactgtgatctaattgaatatgtttgcacagctaaagaaggattaggttaattagaa

SEQ ID NO: 481051 - DNA, 554 bp, Homo sapiens
tatatatatattcttacctctgggagattcttacctgccataattgggagaagatggggttgatcaagaagaggaggtctgtcatgtggcttttgacaccgcgcccctcgtccaycccatcctccaccacagttcccagccagtttagaaccgctggactagataaatcaccagggttctttccaactaaaacaatctctgattctatgactcattgaatcatgaaataatctaatagatgtgacctaatacaagggatctcttgcctctgaattccatgacatttgaccacaaatagcctatagaggataatgaagtttctgtggctgagcactcccacctccctgcaaagaaacctttgcaccctccctttaacttactcaaagcagtttcaaataggaaccagaatcaaattagaaaagtaacctagcagacagaaatgtgccacgcatttgcagaataggaatatagaaagtaggaaaagctgtttttactatgaaatttgtaaaagcaactcacttccattctggaatcttcttcctaatgaaatcatt

SEQ ID NO: 481052 - DNA, 554 bp, Homo sapiens
tatatatatattcttacctctgggagattcttacctgccataattgggagaagatggggttgatcaagaagaggaggtctgtcatgtggcttttgacaccgcgcccctcgtccaccccatcctccaccacagttcccagccagtttagaaccgctggactagataaatcaccagggttctttccaactaaaacaatctctgattctatgactcattgaatcatgaaataatctaatagatgtgacctaatacaagggatctcttgccyctgaattccatgacatttgaccacaaatagcctatagaggataatgaagtttctgtggctgagcactcccacctccctgcaaagaaacctttgcaccctccctttaacttactcaaagcagtttcaaataggaaccagaatcaaattagaaaagtaacctagcagacagaaatgtgccacgcatttgcagaataggaatatagaaagtaggaaaagctgtttttactatgaaatttgtaaaagcaactcacttccattctggaatcttcttcctaatgaaatcatt

SEQ ID NO: 481053 - DNA, 541 bp, Homo sapiens
atcagctgcagaatattaagaattattcttacaacactgtagactaacacttatcaactgaaatgtctttggtagatacttaccaaaaacagtcttttaactctttgaaattatatttatgaaatattctcatcaattattttgtagtaggaaaaaatagaaatatatatatgctggtgggaagcaatttatcttttaaaaatatttcattccaggctaaccacaaactattcagcaacacttaaaagatkgctttttttctcttccgttaaagttgagaagaggctctgattaaatgtgcactaaaattgctgtttgtcagcactgtgaacacaaaaaagtgtgtgtgtgtgtgtgtgtgtgtgtttaaatggttcaattagtattctgtggtaatctgctcatcacatagaaacagcatctaagcagagggcttgacattcagaatcaatactgtgctgaacatttaagtgtcacagcaaatatcaataggcccaaagtcgttcatgtgctgggcaaagtctaattggcaatgcaacca

SEQ ID NO: 481054 - DNA, 621 bp, Homo sapiens
gaaaagctttctcttagtattctgtaactttaaataaaatgtatttcccagcaaacaattttattttaaaaagtttgtacctgatggagtggggaaaaaataccttatttgttccaaatcgtttcatttcaccctcctaaaatttgattgatgcccaaataaaatagagtaattttgccacatgcctggaatgccatctgttgcaaagaataacactttgcagcaattccacaaactgtatccaatgagtaaggttagaatctgctctccaaaatagtgagtggaactgtcataaatcctagagtgttgtgagcaacatctccckgtaactaaccttgagtaagacatctttttctctcacacagactggcatacactaagaaaatttcaccggtgcttctgtagttaccattgccctcattctctcactgatttccctgtgtgccacaggagacagagagaaaaagagattcacttcaagcggctagataaaatcatctatcctaacttcttcagcaaaacaatgaggaagtaatatttctaaggtgagtcggctagtatgagaaagggcccatgatggccccccaagataattttttaatatatataatgtccttgtat

SEQ ID NO: 481055 - DNA, 562 bp, Homo sapiens
aatgggatccccttcagcccaactgtttcctgtccttgggtctgacattggagcttttttctccaggacagagagctttattgagtatgaatacatcagagagcacaatcttgaaattcctgccaggattcctattctgtctcagcttgggatccagttctaggctaggkgagtaagacagcaaaggagtaagggtaggcgagaaggacatgtcctaagcagtggcaagcattcctcaatttttttgcccaagtccctcctcaatgcctaccaggctgccagctcccaaattctgggctttgcctctttaatggctcttgctctctgtcctgggtgaagcctgagtggataagaagacccagccctcctcatctccatccttcctccattcctgggggcaggggccagagagatatctgttcgcttctgcagatacacacatcacccttctccattctgttctgtgccctgaaagctgatttctgtcttctgccccaacaaccaagcttgcttgccttcaggattcctatggggtttgacacatggaggacattagagaacg

SEQ ID NO: 481056 - DNA, 625 bp, Homo sapiens
ctcccaactagggttcaggccagctcacctaggcaaagaggaggtgaaaggtgctggctggcctggggtgggaggagagcaaacaggctgcctggggcctgcccagacccttccccggggcagcctggaatggccattacagggccacttcttgcggcaccacgagccattaaagcaggagtgctcggggagccatcagcccagtgcagatgacttccccagatgtggcagtgggcaggatgtggaagcccccagccccaactctacagacaaaacattcccacactcaccatcctcggaaaccccacagcccagagcccctcttacagatgctttctagaccatttagcaggaggcagtgtttatttttgaacatatgttcttccccatctctckccttccttctcccttactagtccttccagacccaaagctgctctctggatgggctgctgttggttgtgactgccaagctccaaggccagtgtgggtagcacgctttgttttggctttgtgagtgcttaagcatatgcatgcatgcacacacagtcctacttgctctaactaccattagtggaatgtatgtaccacaccagctccaggagggcagggcctcagaagttat

SEQ ID NO: 481057 - DNA, 606 bp, Homo sapiens
ttaggacagctgcagacacctttgaggagtgcaacgtagctgctttgctacactccaggattgaaagagtttaatgattccctgtgagcaacagacaatgagttggttgtattttgggggtatacaaagggctatgtatagcattgttgggattacacacagttggacaaaatattcacagggccaggttatttgaggactgaggaagttgaaggagcatcagagatacagctcccatctcatgcccatcagggcttatgctcattaagtgagatggtgcacaaaattgtccaaataattaaacttgctggctcttggactggaacacatagagtagaattggagtcagttccaggcacctgccatacatccccactgtaggaacaaagggtcttaagacactgggagaggagaagtctgctctgaaattgcctgggagaaggtggtgcagrtcgctccaggtggcgagttatgaacaggtgctcagcacacttgagaaaatgaaagaattctagtggtgcctcctttggatgagacccgaatctcatgggtgaccaccgcctgctgcagaagcccagcctgctattccccatgccgtgctggacc

SEQ ID NO: 481058 - DNA, 503 bp, Homo sapiens
ctctgagctttaaagttagattgggcctgatgtggtggtggctcargcctgtaatcccagcattttgggaggccgaggtgggcggatcacctgaggtcaggggtttaagagcagcctggccaacatggtgaaaccctgtctctactcaaatacaaaaatcagtcaggcatggtggtaggcacctgtaatcccagctactcaggaggctgaagcaagagaattgcttgaacctgggaggcaggggttgcagtgagctaggcaacagagtgagactctgtctaaaaaaaaccaagaaacaaaaacaaaacacacacacacacacacacacacacacacaaacagttagacttgttcatcatccccgaagaaaaggtgtaattgctgcttttatttgtatatgtagacgcggtgaccaatcgtcaggacagaatttcctcacgcctgtggtcttgactatgttgagtcttgaattggctctgtgggaactaattctctttttgtgg

SEQ ID NO: 481059 - DNA, 584 bp, Homo sapiens
ctaacaagtttaactttaattgcatgcaagactgacagccattaaaaggttttaggcaggaaagtgatgtgatcagagctacagtatgctgaagaataaattaatgtgatgagccaaaatcagaygcagggaggttacgggactgcagcaaagcttcagggaaaggcagtagtaataggatgtgcaggaaaaagtaatgcagattgcagaaacttaaaatgggtgaaagaaagagagagaggcaaaagattgactgtggcttacagtttttgataaataataatgccaaaaatcaagatctggattaagagggagatctagtgtgaggaagaaagaaaatcagttagcattgcaggtttttatctgattctgtaaaatcaacaactgtccagtaagcagttataaatatttttctggcatgagttgagactcagctaaagatatatattccaaaaccaatagtttaagcgtggaggtaaaaacctccatgcatagaggtatatgaaattggctatggacatttttgagagagaaaagggctaagtatagagtccacaaagaagactaaaaggaaggttttgaac

SEQ ID NO: 481060 - DNA, 602 bp, Homo sapiens
acatgaaaaatgcaagttagccaaaatagattgcagtaaacagggactatgcctccttgatttagactgtatcttgcccttcattcattctttcacccatgggatatttattgagcacctgctaggtagatgccatgcactatggtagatgctgtgcatacatagatagatatgccttttatgatttcaaagtcaaataaaaaaagacataaatatctgtctacacttagaatgaggaatataagaactaatggttgcatggcaataaataacaagagccagtagtaattgagcacctactatayatcagaggcttactaaaccattgctgtgtactaatgtgttgaaaatttacagaccctttaggatagatccaattagcatcccattttacagatgagggtatcaagccttagcaatattaaataacttgcctagcatctatagctggggcatttaaaaccaagctcctcaggctttggtttagagctgtttagctccagagctatgatctaaaggggcctgggtttgatcctagcctggtcacttagcagccataacacaggttgcagtgaggactaaaggcaaaatgcatgtgaggt

SEQ ID NO: 481061 - DNA, 631 bp, Homo sapiens
gaggtttgacaaatataagacagtagctatcatctgtgtgaccgacacttcatggtttacaaagcacattcacttatattatcttgattataactactatgccataagaaggctcaaagaggttaaatgaccaaaatcacaaaagtagtagagccaggactcaaacttgggtcttctgattccaagttccatccatccatgggacggtaagcatgtggccagggcagatgtctggcactatgaatctagacacttctttccacagaacctgtatttaactttctgcacagcggattatccagttgctgcccatcaatctgagttggcatatgaatgtgaaacttctttaccatcctgaactacagcatgcatgtggtcataacaactaggagcaggaccgacttgactcattggtgggtgaggcttccttcaactgcgttgttcaaaggttaggattggctctagacacagtatgcttgcagatgagggctgagtgyggttttgggccatatatatcaacaactgctgataaattcgttggaaagggggaaattttgcttctataagaagaagtctggtaatgggaggttgtcaggttgtaggcttcagcggctcaatgatattagggatc

SEQ ID NO: 481062 - DNA, 615 bp, Homo sapiens
cctaatggttaggaaacttgatagaaactccgtaagagggagccttactccttaagagaataaagagctcactgggggtgtggtcatctcaagtaaccactgaacccagtgcaacagaaataggaacccaggagcaatatctagctagttgcaaggatatgggagcaggaagtttttgggatccattacaaagggaatttgggattgactgaggtaatgctgggagtagagggagaagaacagagttgtttattcgtaggtcaacatatcagatgcctataaatttttcaggtattgtaaaaatatttattaactattaatacataaagaaaatttcaaagccaaaattaataaatgaataattaggtgttttcaaaatgtaacattaggccattcatgtaataatggattatgtataggtctcatatagytataggtaaatatgaaatgcttggatcataaaaataaaataatttattcttcacaaactcaaatgtatgaaaattgaacatcctttcaaaaaatttatagcaaaacaatgtagaataatatataatatagataagtatgtatagaactctgtaactctcttcttctgcctatgtgtctctaaat

SEQ ID NO: 481063 - DNA, 615 bp, Homo sapiens
cctaatggttaggaaacttgatagaaactccgtaagagggagccttactccttaagagaataaagagctcactgggggtgtggtcatctcaagtaaccactgaacccagtgcaacagaaataggaacccaggagcaatatctagctagttgcaaggatatgggagcaggaagtttttgggatccattacaaagggaatttgggattgactgaggtaatgctgggagtagagggagaagaacagagttgtttattcgtaggtcaacatatcagatgcctataaatttttcaggtattgtaaaaatatttattaactattaatacataaagaaaatttcaaagccaaaattaataaatgaataattaggtgttttcaaaatgtaacattaggccattcatgtaataatggattatgtataggtctcatatagctataggtaaatatgaaatgyttggatcataaaaataaaataatttattcttcacaaactcaaatgtatgaaaattgaacatcctttcaaaaaatttatagcaaaacaatgtagaataatatataatatagataagtatgtatagaactctgtaactctcttcttctgcctatgtgtctctaaat

SEQ ID NO: 481064 - DNA, 604 bp, Homo sapiens
gctggctattcttagaataagctcagttttcttagccataaaatgttgaaagcaatgtctaactcactgggttgctatgagaattacctggaattgagtgtataaaatgccatgtrgcaggtaggctctcagtaagtgttagttctctttccccatcatgttccaccctcattccccagcaggtgatagaacaggatttttaaaagtttgttaaatgaatgaatgagtgaaactacgcaatgcatggagcttccaaagtaatcatccaagacactattcataatgtcatcctcctgcttaagaatccgcagaacctttgagttgctaaacagaactctgggtccaccaacctctgctatccattccccatgcctcctgcaggcaaacctcaagggctcttctgacggctcccagccctccctctgacacagaccgtggtgccacaacctagtgtatgtttacaactgccccctgctggcacaggagccaactgaaacagctgccactggccaaggcacaagcaatttaccaacctgataaagtagtactgtatcataacccaaagtataaattaaatgtccatgggtccatactgatataaata

SEQ ID NO: 481065 - DNA, 499 bp, Homo sapiens
agttttcaagattttgagagtacaattgaattacccttattttaaaaagttgtcttcctcacagcacagtgtggttgtaagcctatcatgacattgcgccccctatgaaacctyccacacatgatcatgagacttctggccaccaacagggagggagggaaggcctgctctgtggctgccaggcatttccacgtatgagtttaaagacaccgaggggattacatcaaccttagaataacatgtcatataattaagtggaaaataattctttaaagactgaagaaatgggtcggatttgtagcaaagaggaaaatcatatataaaggtttccaattattagtcacactaagtattttcaggaaaataactcttgtgatttccatgttcaaaagtgatcgtgaatttgtgccttaatctatcctagaaaagtttttctgtgcctaggagtatggtaccagaaatagcctttaagtgacacagataaaattttcctgaatga

SEQ ID NO: 481066 - DNA, 499 bp, Homo sapiens
agttttcaagattttgagagtacaattgaattacccttattttaaaaagttgtcttcctcacagcacagtgtggttgtaagcctatcatgacattgcgccccctatgaaacctcccacacatgatcatgagacttctggccaccaacagggagggagggaaggcctgctctgtggctgccaggcatttccacgtatgagtttaaagacaccgaggggattacatcaamcttagaataacatgtcatataattaagtggaaaataattctttaaagactgaagaaatgggtcggatttgtagcaaagaggaaaatcatatataaaggtttccaattattagtcacactaagtattttcaggaaaataactcttgtgatttccatgttcaaaagtgatcgtgaatttgtgccttaatctatcctagaaaagtttttctgtgcctaggagtatggtaccagaaatagcctttaagtgacacagataaaattttcctgaatga

SEQ ID NO: 481067 - DNA, 596 bp, Homo sapiens
actaaaaatacaaaaattagccagtgcggtggcacatgcctgtaatcccagctactcgggaggctgaggtgggaggattgcttgagcctggggggttaaggctgcygtgagctgagatagcgccactgcactctagcctaggtgatagagtaagactccgtctcaacaaataaaataaattaaaaatcagccaggtgtgatggtgtatgtctgtagtcccagctactagggaggccaagatgagagaatcacttgatcccaggagtttgaggctacagtaagctgcaatggcatcactgcactccagcttgcgcgaaagagcaagactctgtctcaagaaaaaaaaaaaaagttttctgttaggttatcttttccctaatgtacaccataaatatgtttgcatgaactggaggaaaatatgtgggtacagaaaaataggacaaaagaggaaagagctgttgcacttcatatatcatgtatgacatgctgtgaagtggaggaaaggactgacctgaagagtttgaacttaatgggcacaaaatacaatttctgtttatattttaagaaggtgtctgctctataatgggtaatatgta

SEQ ID NO: 481068 - DNA, 596 bp, Homo sapiens
actaaaaatacaaaaattagccagtgcggtggcacatgcctgtaatcccagctactcgggaggctgaggtgggaggattgcttgagcctggggggttaaggctgccgtgagctgagatagcgccactgcactctagcctaggtgatagagtaagactccgtctcaacaaataaaataaattaaaaatcagccaggtgtgatggtgtatgtctgtagtcccagctactagggaggccaagatgagagaatcacttgakcccaggagtttgaggctacagtaagctgcaatggcatcactgcactccagcttgcgcgaaagagcaagactctgtctcaagaaaaaaaaaaaaagttttctgttaggttatcttttccctaatgtacaccataaatatgtttgcatgaactggaggaaaatatgtgggtacagaaaaataggacaaaagaggaaagagctgttgcacttcatatatcatgtatgacatgctgtgaagtggaggaaaggactgacctgaagagtttgaacttaatgggcacaaaatacaatttctgtttatattttaagaaggtgtctgctctataatgggtaatatgta

SEQ ID NO: 481069 - DNA, 596 bp, Homo sapiens
actaaaaatacaaaaattagccagtgcggtggcacatgcctgtaatcccagctactcgggaggctgaggtgggaggattgcttgagcctggggggttaaggctgccgtgagctgagatagcgccactgcactctagcctaggtgatagagtaagactccgtctcaacaaataaaataaattaaaaatcagccaggtgtgatggtgtatgtctgtagtcccagctactagggaggccaagatgagagaatcacttgatcccaggagtttgaggctacagtaagctgcartggcatcactgcactccagcttgcgcgaaagagcaagactctgtctcaagaaaaaaaaaaaaagttttctgttaggttatcttttccctaatgtacaccataaatatgtttgcatgaactggaggaaaatatgtgggtacagaaaaataggacaaaagaggaaagagctgttgcacttcatatatcatgtatgacatgctgtgaagtggaggaaaggactgacctgaagagtttgaacttaatgggcacaaaatacaatttctgtttatattttaagaaggtgtctgctctataatgggtaatatgta

SEQ ID NO: 481070 - DNA, 637 bp, Homo sapiens
ccaactaatggagttatttggggcagggacaggtattgacccgagggcartgcaaaagatcttcctacagaaatactgatctgaattttgaaagatatatgggggttagctaggggaaagcattctaagaacatgggtgaatatgtgcacagagccagacgtgtaaaatagcatctgagtaggaggttagcactgaggcacatgactggtgtagtgatgggcaagagtcacaggtgaagcactggcctcagcaagagctttttctacaaactcagacctccgatttagaacccatagctggaaggcataaggaaccattaaacaatttaaataagaagcagaaaagctctgttttacattttgttttgttttctttaagatctctttgatgggggaatggaggttggcccaactcaggacacctatgacaaagggttttgcagtaatccaggcaagaaccaatgagtgcttaaaagcagtcagaggcagaggatctgcagagaagggtgctgataggaaaggtactgaagaggcagggtccacagaactcggtggctgacggggtagctggtggtggaggagaggtgggtgttctggatagcttttttggtttggcttgggtgtcatttgccacaca

SEQ ID NO: 481071 - DNA, 637 bp, Homo sapiens
ccaactaatggagttatttggggcagggacaggtattgacccgagggcaatgcaaaagatcttcctacagaaatactgatctgaattttgaaagatatatgggggttagctaggggaaagcattctaagaacatgggtgaatatgtgcacagagccagacgtgtaaaatagcatctgagtaggaggttagcactgaggcacatgactggtgtagtgatgggcaagagtcacaggtgaagcactggcctcagcaagagctttttctacaaactcagacctccgatttagaacccatagctggaaggcataaggaaccattaaacaatttaaataagaagcagaaaagctctgwtttacattttgttttgttttctttaagatctctttgatgggggaatggaggttggcccaactcaggacacctatgacaaagggttttgcagtaatccaggcaagaaccaatgagtgcttaaaagcagtcagaggcagaggatctgcagagaagggtgctgataggaaaggtactgaagaggcagggtccacagaactcggtggctgacggggtagctggtggtggaggagaggtgggtgttctggatagcttttttggtttggcttgggtgtcatttgccacaca

SEQ ID NO: 481072 - DNA, 590 bp, Homo sapiens
ccaggcgatagagaatgtaaacaataattccgaggcctgacatagccaagcgaggttgctgcattgctctgaaaggcacagatactctagrgggaaggggttgctttgcattttgagcacaatttggccatgcaagaatctccttaccaaaataagcatcttgagcttgcattttctttctggcaggaaaaaggcctagaacttcccaagtgaacaagctacacccacttttcaaatattgtcacaagtcattgtaaaaatactctctcataaacgctctggctataagaggaaaatagaaccacaccaaacacctcaccccaatatttcagagtcccacattgggagcagtaaataagattagggattatagcctgctctgcgttcatctctgtacagaaatgtactgcagaaaccacacccttgtaaaagggaaaagcaggaggaagtggacccgtaaaagctaagtagtcagaggacatccagctggggataaaaggcattttaggactggctcagtgaagtgctgcaaacacaagttcactgtagaataaatagcctgggctgtctgggctggaaggtggcagctg

SEQ ID NO: 481073 - DNA, 590 bp, Homo sapiens
ccaggcgatagagaatgtaaacaataattccgaggcctgacatagccaagcgaggttgctgcattgctctgaaaggcacagatactctagggggaaggggttgctttgcattttgagcacaatttggccatgcaagaatctccttaccaaaataagcatcttgagcttgcattttctttctggcaggaaaaaggcctagaacttcccaagtgaacaagctacacccacttttcaaatattgtcacaagtcattgtaaaaatactctctcataaacgctctggctataagaggaaaatagaaccacaccaaacacctcaccccaatatttcagagtcccacattgggagcagtaaataagattagggattatagcctgctctgcgttcatctctgtacagaaatgtactgcagaaaccacacccttgtaaaagggaaaagcaggaggaagtggacccgtaaaagctaagtagtcagaggacatccagcyggggataaaaggcattttaggactggctcagtgaagtgctgcaaacacaagttcactgtagaataaatagcctgggctgtctgggctggaaggtggcagctg

SEQ ID NO: 481074 - DNA, 632 bp, Homo sapiens
ttgcctcggcctcccaaagtgctgtgattacaggcrtgaaccaccgtgtctggccttatcttgtaatttttaagtaaaacaaaaattaccgagtaacaacttcactgactttagagtgtttttaatgcttggggaaaaactgttttatggattcttctgccttaacactataccatactaagatttatagatagccttctagtgtttgtctacgcacatattttatgtagttatgctgaaattttatattcatttctttgccctgtatttttaatttaacattttaatattgcaatgtttttatgttgatgtattgtctgaataattatcatttttatggcttcataacatttcagtaagtaaatgacaaaatgtatttaaccatatttcctaccattactttttagaggaaatacacacttatctgatctattctttacagagcataatttcaggtatttaaaaacatgttttgatgcagaaatttttctttagcagagcacttacgtctggcatctactaaaaaatgcaaagcaatcaaacttgaaggccagtgtaaattgggtcagattattttgtacccactcgggaatgccccttcatctattttgatttgaaatgtcaatttctca

SEQ ID NO: 481075 - DNA, 603 bp, Homo sapiens
agaaggcattttctaaaatgagaagcttaaaggaagaatacattcgttctgatgtaagcatgtttggtttgaggtgtccactagatatctaaatgcagatgtgtaaggggtctggagttcaggggacaaagttagataaaatggtgagctactaaatgctaacttgtaagggagaaaactcttttggccaaagtgatgttaatatcagtgcatgatgtgtgacttcactaaaaatgcttgtcacttttatttctgtccaaatatttaacttatgaattctccagtttctataatttacacattttttwaaaaatgtataattccatatttctataatattatttaaaactggatataatattttatcataagaaattcaattatctacacacagagaataaaaaatagcataaaggcattcttatataccaagaaaaatagtgactatgcatgaaatttaattctatcagaaacagacatggatggcaatcattgagaatataaacacatatttgaatgttaccctttatttttttctaagcattatctaaaatctttatgcatatgttcaaaaaatattcctatttctggataagtgtgatc

SEQ ID NO: 481076 - DNA, 656 bp, Homo sapiens
ctgactaaagaagaaaagtttgagcttggttcagacatgggtcagcttagcatgcgaatgcaaatcacaaacggacagcagttacactaccctcactaaggaatggtgtgcaaatctggggccagggaaaatcctcccattgtgcagaactctggcattgcacttggtcatctactttgtatgacaatagtggtctgagaaaaaaatttaaaatgggctcccctctccaggcacaagaaatattttactgctgaattgcatcacatgctttgattctagtcaaactcacatgcttactttttgttagttttataatcagaaatatttaataaaccatgtcttcatttatttttttggcttcctgaaaagttagagtcaaatttaaagcccaactgtgacacttctgctggttcacattgataatataattgtgttttcttccataggattttgatttttctattaataggtattttctcccattctaattttcccatttagacttctttttaaatataatgccttgctgtgcccctcaggggtgctttgtgaaaargaaactgatgattgatatgtaataaattgacaggcaaataagtattgctacatatttttaaaagcaaacaaaaatatgagactaatgctaagacaaaact

SEQ ID NO: 481077 - DNA, 515 bp, Homo sapiens
tcacgtgataataaaggtttattgtggttttaagctggtaagtttgaagttaatttgttatgcaacaataaataactactctattgtaagcagttatatattatatatggaaaataatttagtataaatatattggtaattcaaggaattttgggaagatttkggagaaccaggtttattcagtgagcagccacatcacagtcacactgcagaactggtccatggaggacattatcaaggccttgctgctaatgactgaaacagttgcctgaggggactgggtaccgccaccaacattgctccttctcagaagctcagtctccctgcaaccactgacaccatctaagggagtttttgtatttcctgtgactctttcatagtttcagtggaagctggtcacatttcagtttctttaatgtggtgtataggtttttcttcctaccaaggttcataagatgggtgaagcctctcctcatataaagcgtggtcagataatgggcagccagaatcagcaa

SEQ ID NO: 481078 - DNA, 509 bp, Homo sapiens
catgaattacaatgttgttgaccatgagtttaatgttaacaaatcagtaatacagtaaattcagaaaagaggaaatgtgccaatctatatatcaggctgacccaggaagtacgcaagtaacttctattgtattaggattcaagctatatggtaacaactttgttgttgttgtttttgttttgttttgttttgrgacggagtttcgctcttgttgcccaggctagagtgcagtggtgtgatctctgctcactgcaacctccgcctcctgggttcaagcaattctcctgcctcagcctcccaaatagctggaattacaggtgcctgccactgccactacacctggctaatttttgtatttttagtagagactaggtttcaccatgttggccaggctggtctcaaactcctgaccttaggtgatccacctgtctcagcctcccaaagtgctgggattacaggtgtgagccactgccaggtcagtaacatcttaaaatatgcagaagatgaaa

SEQ ID NO: 481079 - DNA, 509 bp, Homo sapiens
catgaattacaatgttgttgaccatgagtttaatgttaacaaatcagtaatacagtaaattcagaaaagaggaaatgtgccaatctatatatcaggctgacccaggaagtacgcaagtaacttctattgtattaggattcaagctatatggtaacaactttgttgttgttgtttttgttttgttttgttttgagacggagtttcgctcttgttgcccaggctagagtgcagtggtgtgatctctgctcactgcaacctccgcctcctgggttcaagcaattctcctgcctcagcctcccaaatagctggaattacaggygcctgccactgccactacacctggctaatttttgtatttttagtagagactaggtttcaccatgttggccaggctggtctcaaactcctgaccttaggtgatccacctgtctcagcctcccaaagtgctgggattacaggtgtgagccactgccaggtcagtaacatcttaaaatatgcagaagatgaaa

SEQ ID NO: 481080 - DNA, 626 bp, Homo sapiens
attttttaaaatcgagccatacttaatatataaagaaataaagactgtttactaaaactgggggatatgatacttttttttttttgtcagttcctacaagaaaattaaagaggaccagttcttaactactaattctttaaaaattagatacactcctggtcaaataaaagatttatactttttttgtaaccagagaattatgtaagaaaggaatataacccattcagaaattatacaatccttctttcatctcaaagaatactaagatctgaaacatgaatatytcttgagattgatgccaggttcataaagaatagtgacaggctttggcaaacaagtttcagatattaaattctggttactacagaaatctaataaaagataacataatacaaaacttgtgggatattttacaacaaaaggcggaagaccagaacgtgttttagtgcattacacttctccattgttagtagatttttagtagattttctcaacattattacgtttattttaatgtgataaaaacatattcaggcttttatttttagcttatctgaaagggccatttcatttgctacttttctgttttaaactttaactggttttaaaacagaaatgatttcaga

SEQ ID NO: 481081 - DNA, 626 bp, Homo sapiens
attttttaaaatcgagccatacttaatatataaagaaataaagactgtttactaaaactgggggatatgatacttttttttttttgtcagttcctacaagaaaattaaagaggaccagttcttaactactaattctttaaaaattagatacactcctggtcaaataaaagatttatactttttttgtaaccagagaattatgtaagaaaggaatataacccattcagaaattatacaatccttctttcatctcaaagaatactaagatctgaaacatgaatatctcttgagattgatgccaggttcataaagaatagtgacaggctttggcaaacaagtttcagatattaaattctggttactacagaaatctaataaaagataacataatacaaaacttgtgggatattttacaacaaaaggcggaagaccagaacgtgttttagtgcattacacttctccattgttagtagatttttagtagattttctcaacattaytacgtttattttaatgtgataaaaacatattcaggcttttatttttagcttatctgaaagggccatttcatttgctacttttctgttttaaactttaactggttttaaaacagaaatgatttcaga

SEQ ID NO: 481082 - DNA, 524 bp, Homo sapiens
aaggaacagaatgataatatggtagcaggagatataaatggaaaggtctgttgcaggaatgttataagtgcgttgtaaaacaaggactttcgattwtattcagtaggcaaaggagggcttacaagattggtaagcaggagaaagtgattctatatgatatatgtataactgggtggctggtgagaaatatattgatttattaacttctttgtatgtccaaattgaggaaattggcatttgtgaattgtggaggatgtcagcaactggaggaagacaataaattacttgtggaagagaattcctgggtttgggaaaaaatgactatggtgggtattttgtttaagactaatttaaagtcagtgcttgctcatcattcctggagaaaagtgagatgtcgctataaatctggattcagaggctaaagactgagagatattgatgtgttttgttgagaagcttatattaagtttgtgtttagccattctgtgcccttgaagaattagagaaatgctttttataactat

SEQ ID NO: 481083 - DNA, 557 bp, Homo sapiens
tgcagattcttaaattcctttgaggaattagtcagtttccattgttgttatgttcctggctccaaatatgtatactaattgcaacaattcattgagttaaatcacccaattactstccacttttacagatatagcaaaagttgggaacatgtatacatacatatcgttatcaaaaaattcaatatgtatttgtactcattgtatgtatattttctaccagtaaattgcaaatacagccttcctagtagacaaaaactttatctatttttgtgtgtgtgtgtcaccacatccccagaaaaagagaaccaataggatttatagatgtgcatatatatatatacacacacatatatattatgtatatatatatacacataaaatatatatatacacacatatatatagtattttatgtgtatatatatatttggagagcaagagagagagagagaaagagaaagaaagggagagaaagagaaagagatattaaggaattggctcatgcaattatggagctggtaagtctaatgttttcagggcaggaattggctcacgca

SEQ ID NO: 481084 - DNA, 611 bp, Homo sapiens
agtcctgaaacttaaaaaaaaaaaagtagaaaatttcgaagtgtatgttgactattctggccatgttatgattaacatattagtttgttagaagaccaagttcagttgggagatatggtttcttctaatgcctttttccttgacttgcagatagctgcttcctcattgggtcctacatgtttttggttttgttttgttttcakttttgggggggggggcggcgggaggggggctgtgcatccctggtgtctctttatatatccaaattgtattttcttattcagggcctcagtcagattggattggggtccacactaacattttatgtcatgacttctttaaaggacctatttcgaaaacagttacatctgagatattgggggttatgattttgacatatgatttgagaggacacaattcagcccacaacactgctgtcagcacctccaaaattcatgtctttttctcatgcaaaatatttttacctccatcccaacagcccaaaagtcttacctaattcaagcatcaattctaagactcaaatttcgtctatttatacattaactcaagtgtggataagacttgcagtatgatttaccctgaggctaaat

SEQ ID NO: 481085 - DNA, 505 bp, Homo sapiens
ctgcttgggaagctggggcagaaggattacttgagcccagaagttcaagcctgcagtgagctatgatggaagtactgtactctagcctgggtggcaaagcaaaatcatgctgaaaagaaaagaaaaaaaggagaggagagggagagggagaagggaagaggagaagagaagggaagggaagagaagagaagagragaggagaggagaggagaggagaggagaggagaggagaggagaggagaggagaggagagaagaggagagaagagaggagaagagagaagagaggagaggagaggaggggaggggaggggaggaaggggaggggaggcgaaggtgagctaccttgaaaggatggaggaaattgaaatgaaaagaaggaggggacagtagaaatagcttggaagacagcctatttctcaactttcataatgagaagtaaataaataatgtccaaaattgagaaatcaagaaataaaaatgtaatcaatatgtttagaaaaacc

SEQ ID NO: 481086 - DNA, 479 bp, Homo sapiens
tcacttaaagccttaaaattgatttgtattacaccttattaggatagcataagtttaaataaagtgcttattttgtctttatctctattttccagtttccttaagacattcaaattgcatatatgttatatatttttaaaatatcttttttaaatttagattatactgtacgtctagagtaggactgttttttaaatatttcatgtttycttacaagattatgggttttctaatggtttattttcaattatatggtttaaaactgtgtttttacaaatattttccttatgcatctatcaatcactaggagagatttgttaaactttccactttgaagctatatttataacttttctgaatagtactgtaaattcacttaaatatattttgagtctattattatatgacttttcttaagtaataaagactctattcttgaaagaagcattttgcattaaaaatattttgtctaatattat

SEQ ID NO: 481087 - DNA, 479 bp, Homo sapiens
tcacttaaagccttaaaattgatttgtattacaccttattaggatagcataagtttaaataaagtgcttattttgtctttatctctattttccagtttccttaagacattcaaattgcatatatgttatatatttttaaaatatcttttttaaatttagattatactgtacgtctagagtaggactgttttttaaatatttcatgtttccttacaagattatgggttttctaatggtttattttcaattatatggtttaaaactgtgtttttacaaatattttccttatgcatctrtcaatcactaggagagatttgttaaactttccactttgaagctatatttataacttttctgaatagtactgtaaattcacttaaatatattttgagtctattattatatgacttttcttaagtaataaagactctattcttgaaagaagcattttgcattaaaaatattttgtctaatattat

SEQ ID NO: 481088 - DNA, 583 bp, Homo sapiens
tgcatttctaagtgtgctacattattattttctagattccccccaccccccacaactctcctctggcccaactaccattgttcaatgtaaatgcccagaattgtccaatgcattgtcttcatcctaactgtgacctcaacctgcaatgctttcccccacccagtgtgccagctaacttcctaacatcctcctagaggccacccaaatgccatctcttccagaatgggttcttccaaaaccccactagtcaaatttagcttccttcctctattctctagttcaggggttttcaaagatatgtgcaagatgatttgggggagtatagtaagaaatttatatgtaaattgcattcacatataaatttaatgtaaatgtyatatgtgttttataatataatgttagcacaataatacaagtatataacataaatatataaaaaaacaaatattcctatagtgggagttgcacaagagtattttaccaagagaggtatacaatcaaaaaaagtttagagactacaactctagcttaacatttttcactatgggcttcttatttaaggtaattttggctctgtctctcc

SEQ ID NO: 481089 - DNA, 541 bp, Homo sapiens
gacttcagtttttttggaagttgacatatcattttagcactaaacagtgttaaagcaatccctcagcggaatctgaacacataccaccttgttacagcaataaccatgggggttctctttttctttcttgtcacttaacaaagatatgtgaagcagattctgtacatgaatgtggaatgaataagacttcaaatttcagatacatgaactgtaagtgtcgccaatagagatttaagatataggcctatggcagctaccatgtgttgaaagaagtaaagtaacttgcccatgtccacgttgcttgtcgtattaggataacaatgcttacctaggcttatctccaaagtgcacattctrtgcactacttggtttgcctctatataagcattaaattggaatatttttcagcccataatcatcagtcattgattcagagtttgaaaaattgtgttcgtaccaagacagtttaatggtttgggtcagccccatgacgaaatcatcttgactgtgcattgacacattgtattatgcaatatgacta

SEQ ID NO: 481090 - DNA, 541 bp, Homo sapiens
gacttcagtttttttggaagttgacatatcattttagcactaaacagtgttaaagcaatccctcagcggaatctgaacacataccaccttgttacagcaataaccatgggggttctctttttctttcttgtcacttaacaaagatatgtgaagcagattctgtacatgaatgtggaatgaataagacttcaaatttcagatacatgaactgtaagtgtcgccaatagagatttaagatataggcctatggcagctaccatgtgttgaaagaagtaaagtaacttgcccatgtccacgttgcttgtcgtattaggataacaatgcttacctaggcttatctccaaagtgcacattctatgcactacttrgtttgcctctatataagcattaaattggaatatttttcagcccataatcatcagtcattgattcagagtttgaaaaattgtgttcgtaccaagacagtttaatggtttgggtcagccccatgacgaaatcatcttgactgtgcattgacacattgtattatgcaatatgacta

SEQ ID NO: 481091 - DNA, 565 bp, Homo sapiens
ctgtagtcccagctactcgggagggtgaggcaggagaattgctkgaacccgggaggcggaggttgcagtgagcagagatcacaccactgcactccagcgtgggcgacagagtgagactccgtctccaaaaaaacaaaaccacagttcagtaaaatggccagataagataaacattcaaaaccaccaactgttctaagtgcaaactctaaacagtcagggggaaaaaacggtattttcacacagtagcaacaaaagcataataacaggtcaggcgcagtggctcacgccccaacactttcagaggctaaggcaggaggatcacttgaagccaggagtttgaaatcagcttggtcaacatagctagatcccatctctacaaaagaaaaattaaaaaatgagccgggcatagtggcttgcacctgtagtcccagctacgcaggaggctgaggcagaggacggcttgaacccaaaagttcaaggctgcagcaacctatgaccgcatcactgccctccagcctgggcgacacagtgagacccccccaaaataaataaacaaataaaaatg

SEQ ID NO: 481092 - DNA, 565 bp, Homo sapiens
ctgtagtcccagctactcgggagggtgaggcaggagaattgctggaacccgggaggcggaggttgcagtgagcagagatcacaccactgcactccagcgtgggcgacagagtgagactccgtctccaaaaaaacaaaaccacagttcagtaaaatggccagakaagataaacattcaaaaccaccaactgttctaagtgcaaactctaaacagtcagggggaaaaaacggtattttcacacagtagcaacaaaagcataataacaggtcaggcgcagtggctcacgccccaacactttcagaggctaaggcaggaggatcacttgaagccaggagtttgaaatcagcttggtcaacatagctagatcccatctctacaaaagaaaaattaaaaaatgagccgggcatagtggcttgcacctgtagtcccagctacgcaggaggctgaggcagaggacggcttgaacccaaaagttcaaggctgcagcaacctatgaccgcatcactgccctccagcctgggcgacacagtgagacccccccaaaataaataaacaaataaaaatg

SEQ ID NO: 481093 - DNA, 565 bp, Homo sapiens
ctgtagtcccagctactcgggagggtgaggcaggagaattgctggaacccgggaggcggaggttgcagtgagcagagatcacaccactgcactccagcgtgggcgacagagtgagactccgtctccaaaaaaacaaaaccacagttcagtaaaatggccagataagataaacattcaaaaccaccaactgttctaagtgcaaactctaaacagtcagggggaaaaaacggtattttcacacagtagcaacaaaagcataataacaggtcaggcgcagtggctcacgccccaacactttcagaggctaaggcaggaggatcacttgaagccaggagtttgaaatcagcttggtcaacatagctagatcccatctctacaaaagaaaaattaaaaaatgagccgggcatagtggcttgcacctgtagtcccagctacrcaggaggctgaggcagaggacggcttgaacccaaaagttcaaggctgcagcaacctatgaccgcatcactgccctccagcctgggcgacacagtgagacccccccaaaataaataaacaaataaaaatg

SEQ ID NO: 481094 - DNA, 386 bp, Homo sapiens
gtcaacggcgtgttctgtggaatgctgggatgcatcacaggtatgctggaagatgtatagaattttacttctgttattctggtaactcagagtcctgttcagtcagtttccacgtcaggwtgctgtcctggttttaaagagaatgaacgcagccgaagttgaatcgaggcagtgatttcactcagtgcgttgggtctttccactcacctggccctccagaaccccagggccttgagtgcatgggctggtacaagagcccagtttttggctggggaggcacttcctatgggagggggacgcctgtctcagtgctgaggcaaccaccaccgaggaccctgggctggaagctgggctgagatgtctggtggtaggttctgaggcaggac

SEQ ID NO: 481095 - DNA, 614 bp, Homo sapiens
tttttttttttttttggtagagacagggtctggccctgtggtccaggctgaagataaacttcttaagatgtggaaatactcatctgcataaacctccttagcatttggtatagccccatacagagagagtatagagtaaatgttaattgactgcttaaacttcagcttgggggtttgttataaatacaattccttatacttctcatgtgaaaactgcagtagtcatgtgtttaacttttacaataggaaagcctctggcagggaaagaaaagtaaccctgggaattctttgtcagatagcaaagaagcacttaaaggctaatagggtggtggtaaaaggacacaggaaccagcttgatagtttcccattggccaaatttgagaccagtggagcatcaaaatttgatactgcatgtttttacatacattcaagaacccaaatatacstggatcatctgaggtcaggagtttgagaccagtctggccaacatggtgaaaccccatgtctactaaaaaatacaaaaattagccaggcgtggtggcgtgcctgtagtcccagctacttgggaagctgaggcacaagaattgcttgaatctaggaggtggatgttgcag

SEQ ID NO: 481096 - DNA, 519 bp, Homo sapiens
cgcctcccccgcgcggctgcccgcattccaactctctgaggtcacgggccgccgccgcctccccggatccgcccgcccggctcagggggagggacgcctgggcccggccgccccgctgctccggccgcgcgtcccgcgtcggtccgacggtctgtccgtcctcctgccaccccccgcccccacggggcttctttgtgcggcgctcctcgccggccggtcccacctccaggcctcgcccctcgccgtcgccaccgccggactctgcccaggggaatggtctgcgagccgggtttttggagacaggaagtgaggcgtgcgagccccatgagcgcgccgcggcccgggctggcgtgcgggtgcggctgcggcggccgcgcggcggggccccgggaggcgggtcgctgagcggggcgckcggccccgaggatgcgggagcgggagcgggagcaggtgagggcgcggtccccggccggcgggaggggcgggcggctggcccgagcggtggggtgtgtccactcg

SEQ ID NO: 481097 - DNA, 466 bp, Homo sapiens
ttttttacagagatgggagtttcaccatgttgcccaggctgttctctaactcctgggctcaggcaatcctagtgcttggattcaaaatgttgggactacggacatgaaccaccacacagagcccctagacrgtttcaaacaaggatgagaaagtcctcaaccacatgacacttacacatattaaagtatatgtgatgaattacttatcccagattatagttatttcaaaattaaaacgatcctataagacaattagtcatctgcttcatgccctgtaaaacagtccccacaatttctttttagttggagaaatggaaagccagtggctaatctttactttaaaaactctgactagtaacttagtaatataagagtttgcttaccttgtttggtagaagttccctagcactggaaagtaaagccagagaaaaatggtttctgatatttcagaccaggctgatattaa

SEQ ID NO: 481098 - DNA, 466 bp, Homo sapiens
ttttttacagagatgggagtttcaccatgttgcccaggctgttctctaactcctgggctcaggcaatcctagtgcttggattcaaaatgttgggactacggacatgaaccaccacacagagcccctagacagtttcaaacaaggatgagaaagtcctcaaccacatgacacttacacatattaaagtatatgtgatgarttacttatcccagattatagttatttcaaaattaaaacgatcctataagacaattagtcatctgcttcatgccctgtaaaacagtccccacaatttctttttagttggagaaatggaaagccagtggctaatctttactttaaaaactctgactagtaacttagtaatataagagtttgcttaccttgtttggtagaagttccctagcactggaaagtaaagccagagaaaaatggtttctgatatttcagaccaggctgatattaa

SEQ ID NO: 481099 - DNA, 639 bp, Homo sapiens
atgcttagtaataagcatcactttagtcctcacttgttagtcactcatttgctcagcaaaggcaccagggataccacatcttgcctccacggagcttacagattagttggggttggggagcaggttggacacatgattgttagacacatacactcaggaatctgacagacctgctggttcaaatgccggttctactacttgtttgccatgtgaccaggagcaacttactgaacttacgtatcactttccttatctgtaaaatcaggataataactggacctcccttatgggtttggtgttcacattccacgagataatcatgtacagtccttagcacagtttcaataaataatattgattttacttgggctggtagacttktttcttttttttaaagacaccaggtcctagtatcccagtttcccaggtagaatatggtgggaattcgcagatgggatcgtagtgcactacagccatgaactcctggattcaagggatcctcctgcctcagccttccaagtcgctggcactacacgggcatgtgccaccacgcctggctcagcctttttaatttttattttgtcttctttggcacacagattctagtgatttcttctcagttatttagcagcacccatc

SEQ ID NO: 481100 - DNA, 514 bp, Homo sapiens
tccactgacctacagggtgaagttccaagctctttcatttgggatgctgtttccccagccagccacccgcaatctgtgtatgcgtgcttttttttttttttttaagatggagtctcattctcacccaggctggagtgcagtggcacaatctcggcttactgcaacctccacctctacttccaggctctagctatcctcccacctcagtctcccaagtagctgggaccacaggcacacaccaccaccctggcgattttttttttttttgcatttttggtagagatgggtttttgccatgttgcccagtctggcctccaactcctgagctcaggtgatgcacccgcctcggccttgcaaagtgctgggatttcaggtgtgagccaccacgcctggctgtgcatgtaaataaaaacacacatcacatgcctttggaggcccctaggagctggcccctgccccttccctctgcccattcccacattcrtccccgtcctgccacctgaggctctctgaa

SEQ ID NO: 481101 - DNA, 494 bp, Homo sapiens
gaccccagcagagatgagtcggarcagtcgctcaggtgtggccgtgagctgcgtggtgaacgtagcattgggctccattctgtttcaaacacacaaggacaaagtagaaaccagccagccccaaaggccgccttccccattcctgctaagcctccttttttcacagaccccctgcatgtagtgggcccagataaggcctgtccttggcacacattagcccctgcagacctcatgacaaccccatgggatggactccattagtaccctgggttcaaatcctgcctctgctgcttgctagctccagtaccctgggatttatttatttatttatttttttagaaacagaatctcactctatcacccaggctggagtgagatcttgactcactgcaacctccgcctcctaggttcaagcgattctcatgcctcggcctcccaaagtgctgggattacaggcgccaccgcacctggcccctgggagagttacttaatgt

SEQ ID NO: 481102 - DNA, 494 bp, Homo sapiens
gaccccagcagagatgagtcggagcagtcgctcaggtgtggccgtgagctgcrtggtgaacgtagcattgggctccattctgtttcaaacacacaaggacaaagtagaaaccagccagccccaaaggccgccttccccattcctgctaagcctccttttttcacagaccccctgcatgtagtgggcccagataaggcctgtccttggcacacattagcccctgcagacctcatgacaaccccatgggatggactccattagtaccctgggttcaaatcctgcctctgctgcttgctagctccagtaccctgggatttatttatttatttatttttttagaaacagaatctcactctatcacccaggctggagtgagatcttgactcactgcaacctccgcctcctaggttcaagcgattctcatgcctcggcctcccaaagtgctgggattacaggcgccaccgcacctggcccctgggagagttacttaatgt

SEQ ID NO: 481103 - DNA, 494 bp, Homo sapiens
gaccccagcagagatgagtcggagcagtcgctcaggtgtggccgtgagctgcgtggtgaacgtagcattgggctccattctgtttcaaacacacaaggacaaagtagaaaccagccagccccaaaggccgccttccccattcctgctaagcctccttttttcacagaccccctgcatgtagtgggcccagataaggcctgtccttggcacacattagcccctgcagacctcatgacaaccccatgggatggactccattagtaccctgggttcaaatcctgcctctgctgcttgctagctccagtaccctgggatttatttatttatttatttwtttagaaacagaatctcactctatcacccaggctggagtgagatcttgactcactgcaacctccgcctcctaggttcaagcgattctcatgcctcggcctcccaaagtgctgggattacaggcgccaccgcacctggcccctgggagagttacttaatgt

SEQ ID NO: 481104 - DNA, 630 bp, Homo sapiens
aagagcaggtcagatggcgtgatgttcatcatgaggctgtgggtcagggagtggagcgggtggggggagcccgggccccggcccaccaccagcagcatgagcccattagctgacagccccaccagcaggatgaggccacagaccccagcagagatgagtcggagcagtcgctcaggtgtggccgtgagctgcgtggtgaacgtagcattgggctccattctgtttcaaacacacaaggacaaagtagaaaccagccagccccaaaggccgccttccccattcctgctaagcctccttttttcacagaccccctgcatgtagtgggcccagataaggcctgtccttggcacacattagcccctgcagacctcatgacaaccccatgggatggactccattagtaccctgggttcaaatcctgcctctgctgcttgctagctccagtaccctgggatttatttatttatttatttttttagaaacagaatctcactctatcacccaggctggagtgagatcttgactcactgcaacctccgcctcctaggttcaagcgattctcatgcctcggcctcccaargtgctgggattacaggcgccaccgcacctggcccctgggagagttactta

SEQ ID NO: 481105 - DNA, 469 bp, Homo sapiens
gaggagctctgccccctaagcccggtggtgcttttcccctccttatcaatgctgtgagttgcctctcaaaattgctctgccgtcattaacaccgtggattaggtcagatgagagcatgtttgcagtcttggatggcaaaggcaaaacgctgatgctgattattccagatcttctgggcatggcccattccgtgcttgacgttcttaatcagagggacgagtggtagttaygtggcgggtgggccagggccatggttgtttctaatctggctgccaggcacagacggcacgtctgcagcacctgccagcccacgcactggcctgcctggacatcacaagtgaccagggttactcggcactatcatatctctcaaagaagaaacaactcctccaacggcaacatctgtggggctgcttttgaactatcagcaattcatttgagcaagagctgggagcatttttcccctggg

SEQ ID NO: 481106 - DNA, 509 bp, Homo sapiens
ggcctgcaaggatgaaggcatgatttatcaggagaggagaaggaacaggggctagcatggtgagcagtggttatgagggtgcggtctgaagccagaatgccctggtgcccagtcccagcttccctgaacgctatttgcgtaacttctttgagttacttaaccactgagcctcatctataaacagggataataatagcatctgcttataggcttgttgtgaaaattaaatataaagtacttagaatagtgcctgacatatttctccgggaaaatgggaacagtgacatcactgtatgaaagtgtgtaggctgctgtcttcagagcttgggggtgtgtgaggctgcatggcaaggggtggctagaaatgaagggtgagtagggctgggttcagttgtgcaagatcctgtttactgagctttgccttgaccctgttggcratagagggcctgagctaaccttttgctcaggacagaggatggcccgatatgtggtgagggctgagggctggt

SEQ ID NO: 481107 - DNA, 533 bp, Homo sapiens
ttcttatattaatccttttggtatgtgtattgcaacataatctcccatttgtaacttgtttttaagttgtctccttaaaaagtatgttaatatttttattgaaaagatgtataggtttaacaaattgtagtagctccactatccagacaaccattttcatttttattgaccttctagtccctgtacacattaaacaaactccaccccagagttacatactataatgagtaactcaatgcaattatcaatttctacaacatgcaatgctaccctaagaactgccgcaaattttaagtccagaagayaaagaaacagaaacttagcaaaagataaatatttacaaatacagtgtagaaaactgcaaaatatttcaacagttttaaaaaatgctttctttcaggcagactccagggacaacagtgagcagggaaccgcggacagtctccagatctcagaaagaggaacttgagcaaaaacgaaacagaaaaaaaaaaaaacaagaaaaactattctttcgaaaccttccagccacc

SEQ ID NO: 481108 - DNA, 650 bp, Homo sapiens
aggccagagaacatcaccaaatgtgcagaatgggtaccttggaataccagcccaggggctcaaaggtgcctcacagggtgagcataaatgaggcttggttggggggagtctccatggaaggcagaaggacaggacttcaagctgagctgctcttgtgtgcaaaggccaccagccagccctcttcatctgcaccctcaggtctgaaggacaagttagtatcaagctgtggagagaagttttcgcagaagcaggtagatctgggttcaagtcccacctccaggcacatcacctgtgaggccctgggcaaacttagtcacctctctgagctcccctttccccctgggcctaagggtgggaaaacgccttgtctgcccaccccttggactgctgggagtatcacagcagggaagattgggaactcacattatagctgagcctttgtgtctggagtggagatgctggtggtgattgttcggaagaggctgygtggaatccctcctaccccagggtaggtggggacctggtgttggggagaaggtggcagtggaggtggcaacagagtccaatgtctttctcagcctgagacaagtacaactacatatcagggttagagccatggttcccagcagacaaatgccacgggcccaacc

SEQ ID NO: 481109 - DNA, 590 bp, Homo sapiens
aatccaggtttggatccagggggcctgagtcattgggacgtcaggccattcacttagcctcactgagctttaggttctccatctgtaaaatggggatccttggtaaccatgaggatcmtatggaaagactggaaatcacaaaatgctctacagtgtcagggccccagtccttttttttttcgtggcatttcatctcttgcttgcagcggtcccagttcccagtgctgcacatggaggtgattgtgcacctgctgctccagatatctgatgccctgagatacctgcatttccaggggtttatccaccgctccctcagctcctatgctgtccatatcatctccccaggtgaagcgaggctgaccaacctggagtacatgttggaaaggtgggcataacatggagtgggactttctcctgaagttgatctcccttggggacccttcctatagagacagaatctgatctgggtgggactcctcattggtgagatgaacctgttcatcagttgctgaacctgtcccaaatgccttaccctgtctgccaaggctagaggaatttggagacattttaataaacatttaacaagtaag

SEQ ID NO: 481110 - DNA, 518 bp, Homo sapiens
tgctaaatgtttggcgatgggttgggtgtggaaggaggagttggtggtgccggggttctgattactgccctgaagaacccccctgcatgacctgactctccatgctcagagacatcctttcaaagccccaccctgccaagctcactccactttattgtgaggaactgtttagctcccatcccttggagcttccacattgagagccaggccctgaaaggaggtggcccgaacttcaagttccactatcccgggttactwgtgtttgagggagtggagggagtggatgaggagcgagttacttcagctcttcaatttttgttacttcatcgatataggataataattataatacctgcctcctagttaaatgaggttctaggtagcacagggcgtggagtttgctgaaggatcactcacacaagcggctgcccgctgttcctggctcagtgctcaccactgcacgtcacaaggagcggcaccatggctcccgtaacaggaaaaccctgcatttgctactc

SEQ ID NO: 481111 - DNA, 584 bp, Homo sapiens
aatgtgatatgccatgcataaacaaagtcagacagatgaccataaaaactgtttgctacctcctcttatgcatgttgagctagaccagtggaacaccatgttggtaggacaaattttgacagaaagactgcagttagagttgcagaatttgcaaaatcacatttttaccaaactcaccctaccccaacagaaaacctaatgaatgaatccacacagaaaggactttaggtaaacctacacaaataatgtaacatgctataagaaaaggataccttttggtttattttcagtacatagcctacatttcattggtgcccagtaaaatagaaactgcaatggaaaagatactttgttttcccagaactaacaatgaaaagwacacagtatctaatgcttctgtctttaaatgggtaatcataggaaatgccaagaatagatccattaggttagcttaagtatttatctataaatttgtttccaaagttatgctttaaaaaaaaaaaaaaaaaaaaaaaaagcttcacctggaaaccacatcaataccaacagtcataactggactgcaaacctaagagttaatttcc

SEQ ID NO: 481112 - DNA, 584 bp, Homo sapiens
aatgtgatatgccatgcataaacaaagtcagacagatgaccataaaaactgtttgctacctcctcttatgcatgttgagctagaccagtggaacaccatgttggtaggacaaattttgacagaaagactgcagttagagttgcagaatttgcaaaatcacatttttaccaaactcaccctaccccaacagaaaacctaatgaatgaatccacacagaaaggactttaggtaaacctacacaaataatgtaacatgctataagaaaaggataccttttggtttattttcagtacatagcctacatttcattggtgcccagtaaaatagaaactgcaatggaaaagatactttgttttcccagaactaacaatgaaaagaacacagtatctaatgcttctgtctttaaatgggtaatcataggaaatgccaagaatagatccattaggttagcttaagtatttatctataaatttgtttccaaagttatgctttwaaaaaaaaaaaaaaaaaaaaaaaagcttcacctggaaaccacatcaataccaacagtcataactggactgcaaacctaagagttaatttcc

SEQ ID NO: 481113 - DNA, 641 bp, Homo sapiens
tagaaatgatactagaatgtgttcaagtctttattggccaaggttgaagcctagttcagaagagagctcaaaggagcctggctgaagtttggtcaaggagagaatctttgtcaaacaccataaagaatttcgtcattgtttgctcagatccagtctcgtakacaccactaaaattgatgtcatgtgtatcaccagcatttccatgatcattttattgctttggatgtacaggaattcttaatctggaattaagtactttaaaaggtgtattacctaaaattgatgtaatatcaaatgtgtatgtgtacatgtagatttttctgggaagagagttcattactttcatcaaatttgcaaaagaatctctgacactaaaaatgattcttttgggctgggagtagtgcctcacacctgtaatcctagtactttgggaggccaaggcaggaggataactggaggccaggagttcaagaccagcctgggcaagagtgaggacctgtctctataaaaaatttaataaaaagtattttaaaaatattatttattgtcttggtccagtatccacagataatatttctaagaatccagcttcactacagacaatttgagagaatttatttctatacaagaagcatttattg

SEQ ID NO: 481114 - DNA, 641 bp, Homo sapiens
tagaaatgatactagaatgtgttcaagtctttattggccaaggttgaagcctagttcagaagagagctcaaaggagcctggctgaagtttggtcaaggagagaatctttgtcaaacaccataaagaatttcgtcattgtttgctcagatccagtctcgtagacaccactaaaattgatgtcatgtgtatcaccagcatttccatgatcattttattgctttggatgtacaggaattcttaatctggaattaagtactttaaaaggtgtattacctaaaattgatgtaatatcaaatgtgtatgtgtacatgtagatttttctgggaagagagytcattactttcatcaaatttgcaaaagaatctctgacactaaaaatgattcttttgggctgggagtagtgcctcacacctgtaatcctagtactttgggaggccaaggcaggaggataactggaggccaggagttcaagaccagcctgggcaagagtgaggacctgtctctataaaaaatttaataaaaagtattttaaaaatattatttattgtcttggtccagtatccacagataatatttctaagaatccagcttcactacagacaatttgagagaatttatttctatacaagaagcatttattg

SEQ ID NO: 481115 - DNA, 586 bp, Homo sapiens
ctcaggtaacacaccaatatatggcagaggcagccttgggagccttgttccccaatttctggcccaaggttctcactgctttactctgtgcatgcagagaggatctatagaggcctctcgtagtggggtgactcatgtcagcgacttatgtttacgyggcttcttcctgcagcttggcttcttccgggtctagtggggagccacaatgggctggccgctggcattcccaatccatgttggaggaatcaactgagctatgcttacaattagaagtcttctcattttgtccacaactgagaaggtatctggtgtataaggttttcaatgctaaaccagtagaatctagggcaaactaggactagttggtcacccccactaggctgctcacccagtatcttgaggggtcactatgctgaataacttcatattgcttcctcaccccctagatcctctcttcacctttttctaccctgttctgtttcccaaaaagggatcccttaccctttggattccagatgagctggatcatgggtggtattattaggaagaggtgagggtatttattctcctgcttcccccttgccac

SEQ ID NO: 481116 - DNA, 586 bp, Homo sapiens
ctcaggtaacacaccaatatatggcagaggcagccttgggagccttgttccccaatttctggcccaaggttctcactgctttactctgtgcatgcagagaggatctatagaggcctctcgtagtggggtgactcatgtcagcgacttatgtttacgtggcttcttcctgcagcttggcttcttccgggtctagtggggagccacaatgggctggccgctggcattcccaatccatgttggaggaatcaactgagctatgcttacaattagaagtcttctcattttgtccacaactgagaaggtatctggtgtataaggttttcaatgctaaaccagtagaatctagggcaaactaggactagttggtcacccccactaggctgctcacccagtatctwgaggggtcactatgctgaataacttcatattgcttcctcaccccctagatcctctcttcacctttttctaccctgttctgtttcccaaaaagggatcccttaccctttggattccagatgagctggatcatgggtggtattattaggaagaggtgagggtatttattctcctgcttcccccttgccac

SEQ ID NO: 481117 - DNA, 590 bp, Homo sapiens
taatgaccaagtgagtaaaactgtagggtcttacaaagtattttattttacggtgaccaaccatcccggtttgcttggaactgaggagtttcctgggacatggggctttcagtgctgaaaccaggataactgggatagttagtcacccaaataacaccatgtatcataggccttttccttcttccttccccctcctggtgttcctccctccccaaagctgccatttccyttagttccatgtctgttaggatggtggcattcttggcagatgctgtatcccttcccttcaggcatccagagctctctgccttttaggtcagtggaatttgagaataagtacacttaacacttctcacagcaagctcacattccttgtagcatttgattttcataacaattcagagaagcagcaaaggcaggtataagccccagttgatacctgctaggtaggtatcaggaaaacaggagctcagagaggttgctggttacttccctggatgacagagctcgatttgactctccatctcctcacactaagggcagtggtcctttcagttcacagtgctgaggcttccaaatttttgtgacat

SEQ ID NO: 481118 - DNA, 608 bp, Homo sapiens
tgcagatggaattaaggttgttagtcagccgaccttaatataagcagattatcctggactatctatgtgggtgcaacgcaatcacgatggtcctttaaatgcggaagaggtaggcaggaagtcagagtcagagagaaatatgaagwtgctatactgctggctttgaagatgaaggaaggggctgcaagccaggtaatgtatgtgacccacagaagctagaagaggtaaggcaacagattctcccctaaggcccccaaagtaacacagcctgccaacacttcaagctcagtgagacccatgtcagacctttgattttcagaactataagaaaataaactttgttttatgctactaagttttgacgtttgttacagcagcaataagaaactaacgtagcacactttagccacacaaaatggctttctcaaattctaaatgttgtttgttacctttatatacacctttccttcttgccaactctcctccattccttgtctgcctggcaaattctattcattctttaaaaccttattcagatatcctactgtggcagctctgtcacaaaagctttcctaactatcctctaagtcttcaccacggggctggaa

SEQ ID NO: 481119 - DNA, 608 bp, Homo sapiens
tgcagatggaattaaggttgttagtcagccgaccttaatataagcagattatcctggactatctatgtgggtgcaacgcaatcacgatggtcctttaaatgcggaagaggtaggcaggaagtcagagtcagagagaaatatgaagttgctatactgctggctttgaagatgaaggaaggggctgcaagccaggtaatgtatgtgacccacagaagctagaagaggtaaggcaacagattctcccctaaggcccccaaagtaacacagcctgccaacacttcaagctcagtgagacccatgtcagacctttgattttcagaactataagaaaataaactttgttttatgctactaagttttgacgtttgttacagcagcaataagaaactaacgtagcacactttagccacacaaaatggctttctcaaattctaaatgttgtttrttacctttatatacacctttccttcttgccaactctcctccattccttgtctgcctggcaaattctattcattctttaaaaccttattcagatatcctactgtggcagctctgtcacaaaagctttcctaactatcctctaagtcttcaccacggggctggaa

SEQ ID NO: 481120 - DNA, 456 bp, Homo sapiens
aataactcaggaatggaaaaccaaatatcatatgttctcacttrtaagtgggagctagatatatattaatataaaaatatctaaaatgcccttagcacagtgcatggtatatagaagatgcttaataattgtgtacagaagaaatgcctagatgtgtctattagtccctaatgtccactgattctcatttatcctgagtgtgtagatgcttacattgagaaaaggacattcataaagagcttctttaaagttgcaatctaccttttctccaataagacacttctcttggtctgaagcgaaggctgggtagggggacccactggaaactaatgcagttgctgaagcagcaaattaacctactatacaaggagaggggcctcagggctcgaagcagggacttaataaggtgaaatgtgattaatagattgggactcaagaacaagagccttcttaatg

SEQ ID NO: 481121 - DNA, 640 bp, Homo sapiens
tgtgggttgtgcactgcacaactccatgggatgacatcagcatagactagagtgtatttggtactccctggagttgtctctcccctctgcttctcagccctgaatgcccctggcttctagatgtgtgctggctctgcagccccgcccagcagcctgctcctgactccaggccctgctgtactggcaggcttctcagcacttctctaccccttgaggagccataggcaatttctgggtcactaacccctccacaggagacaaggggtgctgtctcttaggggagaaagcaggcctctccttcacacccacctttctcagtcccatcaggagagcyggggcctccctcaccatgactcttgaccctgccagatgtagagggttaactgagtttcttcccatcaaagctttgcttttgacagatgaggcagcagaagggttgggcgacccccattccctctgtcgcaatggcctgtggccaggaggaatgagggcttctttgtcccaggtggcatccaccctccaggaaacatgggtttagagggcacgaaatcatcacacagttccaccccaccctgcaggggagggcactggccattataattgttccttcattttacagtggagaaactgaggctgagaa

SEQ ID NO: 481122 - DNA, 640 bp, Homo sapiens
tgtgggttgtgcactgcacaactccatgggatgacatcagcatagactagagtgtatttggtactccctggagttgtctctcccctctgcttctcagccctgaatgcccctggcttctagatgtgtgctggctctgcagccccgcccagcagcctgctcctgactccaggccctgctgtactggcaggcttctcagcacttctctaccccttgaggagccataggcaatttctgggtcactaacccctccacaggagacaaggggtgctgtctcttaggggagaaagcaggcctctccttcacacccacctttctcagtcccatcaggagagccggggcctccctcaccatgactcttgaccctgccagatgtagagggttaactgagtttcttcccatcaaagctttgcttttgacagatgaggcagcagaagggttgggcgacccccattccctctgtckcaatggcctgtggccaggaggaatgagggcttctttgtcccaggtggcatccaccctccaggaaacatgggtttagagggcacgaaatcatcacacagttccaccccaccctgcaggggagggcactggccattataattgttccttcattttacagtggagaaactgaggctgagaa

SEQ ID NO: 481123 - DNA, 640 bp, Homo sapiens
tgtgggttgtgcactgcacaactccatgggatgacatcagcatagactagagtgtatttggtactccctggagttgtctctcccctctgcttctcagccctgaatgcccctggcttctagatgtgtgctggctctgcagccccgcccagcagcctgctcctgactccaggccctgctgtactggcaggcttctcagcacttctctaccccttgaggagccataggcaatttctgggtcactaacccctccacaggagacaaggggtgctgtctcttaggggagaaagcaggcctctccttcacacccacctttctcagtcccatcaggagagccggggcctccctcaccatgactcttgaccctgccagatgtagagggttaactgagtttcttcccatcaaagctttgcttttgacagatgaggcagcagaagggttgggcgacccccattccctctgtcgcaatggcctgtggccaggaggaatgagggcttctttgtcccaggtggcatccaccctccaggaaacatgggtttagagggcacgaaatcatcacacagttccaccccaccctgcaggggagggcactggccattayaattgttccttcattttacagtggagaaactgaggctgagaa

SEQ ID NO: 481124 - DNA, 640 bp, Homo sapiens
tgtgggttgtgcactgcacaactccatgggatgacatcagcatagactagagtgtatttggtactccctggagttgtctctcccctctgcttctcagccctgaatgcccctggcttctagatgtgtgctggctctgcagccccgcccagcagcctgctcctgactccaggccctgctgtactggcaggcttctcagcacttctctaccccttgaggagccataggcaatttctgggtcactaacccctccacaggagacaaggggtgctgtctcttaggggagaaagcaggcctctccttcacacccacctttctcagtcccatcaggagagccggggcctccctcaccatgactcttgaccctgccagatgtagagggttaactgagtttcttcccatcaaagctttgcttttgacagatgaggcagcagaagggttgggcgacccccattccctctgtcgcaatggcctgtggccaggaggaatgagggcttctttgtcccaggtggcatccaccctccaggaaacatgggtttagagggcacgaaatcatcacacagttccaccccaccctgcaggggagggcactggccattataattgttycttcattttacagtggagaaactgaggctgagaa

SEQ ID NO: 481125 - DNA, 552 bp, Homo sapiens
gggagacccctctgctcagaccctctagtggcatcttttaacacatgaaatgcctccacacatgtgcacacatacgcrcacacacactcaaacatacaaacacacacatacactcatgcaaacacacacacaagtgcaaacacgcatgcaagcacacatgcacacacaggcacacgcatgcatatactcaaacatgcaagcacacacacacatgcaagcacacacacatgcaagcacacacatgcacatccactcacacatgcaagcacacatacacacgctagcacacacatgcaagcagatacacacaggcacactcacacacacatgcacacacacatgcaagcacacatgtacattcacacatgcaggcacacacgtacactccaccatgcaagcatgcacacatatactcatatgcaagcatgcacatgcacatccactcacacatgcgagaacacgcacacttggacctgcttcccacctctctccttcccgtgcacacatgccaacctccctgtcccttggcacacaggttcatcttccccctat

SEQ ID NO: 481126 - DNA, 503 bp, Homo sapiens
tgtcaccttccatatgccaaatttttgaggctttggtgtcctatttttctctctaagaaaagactataaatgaaagttgctgtcwgtgcttatttcttaagatattttattctttaaaataaaatgggaaatgctaactggagatgagatgataatgaacgtgaagtggccaaaagaaagggggtctggaacttgacgggccttccttaaatggtataaacattgaagaagatgatggtaatttctttttcttttttttttggagacagagtcttgctctgtcgcccaggctagctcttggctcactgcaacctccgcctcctaggttcaagcgattctactgcctcagcctcccgagtagctgggattacaggcacacaccactacacccagctaattttttgtattttagtagagacggggtttcaccgtgttgccaaggctggcaatttctttacagctttcacactgttcgtggtagagctgggagaaccaaataactc

SEQ ID NO: 481127 - DNA, 503 bp, Homo sapiens
tgtcaccttccatatgccaaatttttgaggctttggtgtcctatttttctctctaagaaaagactataaatgaaagttgctgtcagtgcttatttcttaagatattttattctttaaaataaaatgggaaatgctaactggagatgagatgataatgaacgtgaagtggccaaaagaaagggggtctggaacttgacgggccttccttaaatggtataaacattgaagaagaygatggtaatttctttttcttttttttttggagacagagtcttgctctgtcgcccaggctagctcttggctcactgcaacctccgcctcctaggttcaagcgattctactgcctcagcctcccgagtagctgggattacaggcacacaccactacacccagctaattttttgtattttagtagagacggggtttcaccgtgttgccaaggctggcaatttctttacagctttcacactgttcgtggtagagctgggagaaccaaataactc

SEQ ID NO: 481128 - DNA, 503 bp, Homo sapiens
tgtcaccttccatatgccaaatttttgaggctttggtgtcctatttttctctctaagaaaagactataaatgaaagttgctgtcagtgcttatttcttaagatattttattctttaaaataaaatgggaaatgctaactggagatgagatgataatgaacgtgaagtggccaaaagaaagggggtctggaacttgacgggccttccttaaatggtataaacattgaagaagatgatggtaatttctttttcytttttttttggagacagagtcttgctctgtcgcccaggctagctcttggctcactgcaacctccgcctcctaggttcaagcgattctactgcctcagcctcccgagtagctgggattacaggcacacaccactacacccagctaattttttgtattttagtagagacggggtttcaccgtgttgccaaggctggcaatttctttacagctttcacactgttcgtggtagagctgggagaaccaaataactc

SEQ ID NO: 481129 - DNA, 451 bp, Homo sapiens
cctttggacttggactgaattaaactgctggctttcctggtgttccagcttgcggacagcagattgtgagatttctcagcctctgtaattatgtgagccaattcctataataaatctcctgttataaacctcgctatattccattggttctgttttactggagaattctgaccatacactttatttctctacagaggaatttattattttgtagctagaaacaaagatttgcygttcatgtaggttttctgtgcgtttttcttgggacatggttgtgcttcttagctgatctaaccaattgacatttctagagatttttcatatagaattgatagatgcaggaggcagatgagggggaaggtcccagggaatctctaacaggcctgtgcactgggaggacagggtggggccgcaaaaagttcctgctgcttgcagcggggaggagcctggc

SEQ ID NO: 481130 - DNA, 644 bp, Homo sapiens
tccttattctaatggcagttagatgtacttctttagaggagggaatgatagatgcaggaggctggtaaggtccctggagaatccccaaccagcctgtgcaatgggatgatggggtggggctgcaggaagtttgtgccgcttgcagggaggaggagcctggcctctcctgttcctaggtggtgacctgggattccaactgagagatggaaacctgttaacgggaacccctctcactttgctgtgttgtttttcttttttccttttcacccaatatattttgtaacctctcactcttcaaagtgcctgcatgcctaatctttcctggtcatgtgagaagaactcatttttttcctacaacagaatcaggtgattggagaaaagatcacaggcctaggcacccaaggcttgaaggatgaaagaatgaaagatggacggaasaaaattaggaccttaattctttgttcagttcagtgtaaatctacttagcccttgagaggacaaaagaaaggtcttcagtggattcttccctgttctctcgtttctggtagagcttaagagtttccttcctttgtgcctgtttcacctgcccctgtgtctctaacatctccctgccagcacccccgacactacattgttcttttcag

SEQ ID NO: 481131 - DNA, 615 bp, Homo sapiens
tgcaggaggcacaatcaaccttgcttgtgacctgccaaggcaacagagtcctccatgcaggtgagggaccaggattatgtcagttcggggtctccaggcagcagggatgccccaggctaccaggctggcaggattcctacacctttccagcyagaatggtgggccctgtgtcatcttcttcactgagcaccatttttttttttttttttttagcactattcctttcaccaaggaaagaatatttctaccactccttgggttgattttgataacaatatttgaagtctgaactaaacaccagtggagcacagatttttgaacaggatgtaatacagagcatttttcaaataagttccctgacagattacaaaaagatatttttctatttttggataaaaagaccaccataataaaagctttaaaatagaaggttcctggcattttttgtacttcttaatgcttagtattttatcaccttttatccttcatgattacctgtggggcaggaattgttgttcccatttaaggagaagaaaattgaaagctcaactaagaaaaatatttatggaaagttatcctacttacacacaataaattggtacaattggtgctttc

SEQ ID NO: 481132 - DNA, 530 bp, Homo sapiens
ctgggacttttgctctgtcagtctctatcctggtgaccttggagaagtcactttctgagccgcacacatcagaggccttggagagaactgaatgatacaatgaggattgagggcctgggtgggctcagacactgaggaaacaggcttttctgcatgtcctccctttgcataagtaaaagaggcacatgaggccatggctcctacagcctccagagggcgcttttctgccactcttcccgtgccctggtctctaaattgctttgcacctggcaccgccccatccttcaagttgacctccataacaatccaatcatggggcggggggtcggggcggaccctyagaaaccaaggtgacaggtttccaggctcctaacttgggagcctgcagccctagactcctgggaatacatcacaatgcctcagcccaagggacaggaggagttagggaagcaagaagttggcttgtcgagggaagggagagagttaccttgtggagtcaaaggttcttaagtgggcaaagggagaggtga

SEQ ID NO: 481133 - DNA, 630 bp, Homo sapiens
catgtgctgtgaactcgacctgggaaaatcttcatccctttttttcatctaaatgactcttacttttgcctaaaacatggtccaagcatcagccccacatctggacgttcagtctagtggctactgagatccattagacatccattctctgtgcccctagtccacttcaggcttttctcatccatggcactcggccactacagggaaatatttsacttaatagggactcccttactaaatcagtggttctcaactaggggtgattttgaacccccagccagggcacatttggccatgcctggagacatttggtcgtcacaactactgctgatataataatggggagcactattgccatctagtggggagaagccagggatgctgttaaacatcctgcaatgcacaggaaattcccaacaaagaattatctgtcacaaatatcaatagtgctgaggttgaaaaactgaatggtaagcttttgggcctgaaactaccatgttcaacttgtatatacaggatctagcacagtatctggaatgtcgcaagcactaaaagtattattacaatgttgaaagaaggaaggaagtaataaaacattcaatcttctgattaacaaaatgtgtctaacct

SEQ ID NO: 481134 - DNA, 630 bp, Homo sapiens
catgtgctgtgaactcgacctgggaaaatcttcatccctttttttcatctaaatgactcttacttttgcctaaaacatggtccaagcatcagccccacatctggacgttcagtctagtggctactgagatccattagacatccattctctgtgcccctagtccacttcaggcttttctcatccatggcactcggccactacagggaaatatttcacttaatagggactcccttactaaatcagtggttctcaactaggggtgattttgamcccccagccagggcacatttggccatgcctggagacatttggtcgtcacaactactgctgatataataatggggagcactattgccatctagtggggagaagccagggatgctgttaaacatcctgcaatgcacaggaaattcccaacaaagaattatctgtcacaaatatcaatagtgctgaggttgaaaaactgaatggtaagcttttgggcctgaaactaccatgttcaacttgtatatacaggatctagcacagtatctggaatgtcgcaagcactaaaagtattattacaatgttgaaagaaggaaggaagtaataaaacattcaatcttctgattaacaaaatgtgtctaacct

SEQ ID NO: 481135 - DNA, 630 bp, Homo sapiens
catgtgctgtgaactcgacctgggaaaatcttcatccctttttttcatctaaatgactcttacttttgcctaaaacatggtccaagcatcagccccacatctggacgttcagtctagtggctactgagatccattagacatccattctctgtgcccctagtccacttcaggcttttctcatccatggcactcggccactacagggaaatatttcacttaatagggactcccttactaaatcagtggttctcaactaggggtgattttgaacccccagccagggcacatttggccatgcctggagacayttggtcgtcacaactactgctgatataataatggggagcactattgccatctagtggggagaagccagggatgctgttaaacatcctgcaatgcacaggaaattcccaacaaagaattatctgtcacaaatatcaatagtgctgaggttgaaaaactgaatggtaagcttttgggcctgaaactaccatgttcaacttgtatatacaggatctagcacagtatctggaatgtcgcaagcactaaaagtattattacaatgttgaaagaaggaaggaagtaataaaacattcaatcttctgattaacaaaatgtgtctaacct

SEQ ID NO: 481136 - DNA, 591 bp, Homo sapiens
ggactgctgtatagtggaaagagtgtggactttgaagtaagagaactgagttccaatctctgctctgtagtttatatttcacttaggaaagycattaactcagattcaatttcatctgtaaaatgaagctaatatttattcattcaacaaaaatgtgttccacacctagtaaatcccaggctcaaggtaacttgttaacatacattggtgattaaaaccaatgtggttttctgtctctagtgagcttatgataaagtcgagaagacttctgtctctaatgaacttatgataaagtcaagaagacatataataagtaaacagacacattcattgctagaaatctgacaaggagaccaagagaatgcagtaatgaagaatgggagggtgacaggtagggtggctcaggaaggcatcttgagtaaatgggaagatgaattaggaaaccagtttcagtaatcaaggattaagatgatggtggtccggagacagaagctgagatctgaaaggcaagaagctggatttcaaagaaaggaggcaagagctctccaggcggaagcactgcatgtgggtgcgaggggcatgaggactgga

SEQ ID NO: 481137 - DNA, 591 bp, Homo sapiens
ggactgctgtatagtggaaagagtgtggactttgaagtaagagaactgagttccaatctctgctctgtagtttatatttcacttaggaaagtcattaactcagattcaatttcatctgtaaaatgaagctaatatttattcattcaacaaaaatgtgttccacacctagtaaatcccaggctcaaggtaacttgttaacatacattggtgattaaaaccaatgtggttttctgtctctagtgagcttatgataaagtcgagaagacttctgtctctaatgaacttatgataaagtcaagaagacatataataagtaaacagacacattcattgctagaaatctgacaaggagaccaagagaatgcagtaatgaagaatgggaggktgacaggtagggtggctcaggaaggcatcttgagtaaatgggaagatgaattaggaaaccagtttcagtaatcaaggattaagatgatggtggtccggagacagaagctgagatctgaaaggcaagaagctggatttcaaagaaaggaggcaagagctctccaggcggaagcactgcatgtgggtgcgaggggcatgaggactgga

SEQ ID NO: 481138 - DNA, 591 bp, Homo sapiens
ggactgctgtatagtggaaagagtgtggactttgaagtaagagaactgagttccaatctctgctctgtagtttatatttcacttaggaaagtcattaactcagattcaatttcatctgtaaaatgaagctaatatttattcattcaacaaaaatgtgttccacacctagtaaatcccaggctcaaggtaacttgttaacatacattggtgattaaaaccaatgtggttttctgtctctagtgagcttatgataaagtcgagaagacttctgtctctaatgaacttatgataaagtcaagaagacatataataagtaaacagacacattcattgctagaaatctgacaaggagaccaagagaatgcagtaatgaagaatgggagggtgacaggtagggtggctcaggaaggcatcttgagtaratgggaagatgaattaggaaaccagtttcagtaatcaaggattaagatgatggtggtccggagacagaagctgagatctgaaaggcaagaagctggatttcaaagaaaggaggcaagagctctccaggcggaagcactgcatgtgggtgcgaggggcatgaggactgga

SEQ ID NO: 481139 - DNA, 602 bp, Homo sapiens
caattttccaatgttaaataacatcctgggtttgttatcccagaaaatgttttcggtactgcacttgaatctccctaaggctcctattctgttcacgttgatgcctgtcttctcccgttgctcagtttcattagggtccaggtctcagtctttgtgttctccctgcctctggctcccaaaccccctcagttgggctgctcttctcctttgtacactggccctcaggtacaactcctggaactccttgaatggtggaagatgcagtcatattttcccaggcggcccactggctgctaggtccctggcaaggcaccaagttgatgcctctctgctctctggccttctcacactcatccagcctaaaagtagagaaagtgggaacccctttattcaggaccaccatggcaccttgggaggcagaggagagtggcacktatagttaccgagtccagtgttacactctcccttttattttcccttcattttttccttctcaaatgatcttcctttctttacatagattctgttttcctacttacaacattttccttctttctgaagaatttattttcacacttcttgaaacataggttgactggtga

SEQ ID NO: 481140 - DNA, 468 bp, Homo sapiens
gaagtgcaaaggaattaatttttctattttatgttattttaaaaataattttaccttttattttagattcagggrgtacatgtataggtttgttacatgggtatatcgcatgatactgagttttgagttatgaataaccctgtcacccaagtagtgagtatagtatccaatagttattatagtttttcagccctttcccctctttcttactggcccctacccccagtagtccccagtgtctactgttcccatctttatggccatgtgtacccaatgcttagatgccacttataagtgagaacatgtggtattttgttttctgttcctgtgttagacattaaccctttaagtcaaagtcttctatagtttagttactgcttttcttcaaagtgtgatttattattcacctcttaaggcatgagtgtcagagcacattcacacgcacacacactggatgctactgggttt

SEQ ID NO: 481141 - DNA, 596 bp, Homo sapiens
ctttaatggaaaaaattatatcctaagaacttttccaatcgaaatgccaatcttcatgattgaccataaatttgtgactgaagttacctttgctatccttgtatccgagattgtcaacataagtactttcttggcaacaccattgttttattttcagtggcacctttctgtcctggggatatgcctttctattcctgtttccgttccctgggtggactgggctggcaaccctagaagtacaagggaagggcacacctactcgtcacctttaagcctcggtcacatgccaagcagccagctctatgcttttctatctcctttggcaccccagtgtcaaagatgctgcccacattgagtacttactctgtgccaagtatttagctgctctatatgaaatggccaagtggccactaagggtggtatgttccatcaacaatttcccttcctcaccttccccccaccccaaaatacacctcaaataaacctagctgctcagcaaaaacagyttgcttagtatccagatgcagcttcaaaacaaatctcttatattccagatagcaataccacctttatagaaattaggagatattgttgtc

SEQ ID NO: 481142 - DNA, 507 bp, Homo sapiens
gttcaccaatgccattacatctcagagtcaggctgggcaatttcatgccatttgacctaacaacctggagacttctgagtaatagtgactcctagtatgggtgttctaatgtctgtcacaacatgaaaggtattcatttaacagagacaaaacaaaatcagataaacaaaagacatgtagatctaattgattgcragggttggaatgagtggtttactctcattcaattaaagataaaaattatttacaccaaataaaattagaaaccggctacaattgtttcttctcagtccatactatgagattggggagagggtccttttttaaaaagaaatggctttattgagatataattcacatagtatacaattcactcacagtatacaactcaatgttttctagtatattcatagagttatgccaccatcactgcaatctaattgtataacaaacattttatctcccctaaaaaaaaccttggctgccacttcccaatctctgtgccca

SEQ ID NO: 481143 - DNA, 507 bp, Homo sapiens
gttcaccaatgccattacatctcagagtcaggctgggcaatttcatgccatttgacctaacaacctggagacttctgagtaatagtgactcctagtatgggtgttctaatgtctgtcacaacatgaaaggtattcatttaacagagacaaaacaaaatcagataaacaaaagacatgtagatctaattgattgcgagggttggaatgagtggtttactctcattcaattaaagataaaaattatttacaccaaataaaattagaaaccggctacaattgtttcttctcagtccatactatgagaytggggagagggtccttttttaaaaagaaatggctttattgagatataattcacatagtatacaattcactcacagtatacaactcaatgttttctagtatattcatagagttatgccaccatcactgcaatctaattgtataacaaacattttatctcccctaaaaaaaaccttggctgccacttcccaatctctgtgccca

SEQ ID NO: 481144 - DNA, 625 bp, Homo sapiens
tgatgtttatgagagagattggagtataaatttcctttcttacaatgaccttgttatgttttggtatcacggtgatgttaacattgtaaaaagctaggaagtaccctctcttttctaatttctgaaatagtttgtataagacgctaggtgatttacaaacgttattcctcataaactttaaatgagtatttctattatacccattttatggaaaaagcggaggcctagagggagaagaattatgttactgaggtcataagaaaggtactaagtggccaagccaggatttaaggccaggtatttctgactccagaacccaagcttttggcctactctactctgctgtgaactcataaatgcatggctgattgagttagaattctacaggacttawcatttcattctatggtagtgtatacctcctatggaggggaaatatactgccaaagataacaacaacaacaaaaatacagctttgcttttggaacctactacaagagactccatcatagttagcttctcaaatctcccctatttcctaccctctgcataggtgtcagatcctggagcagaatttgtgttcacaataatagcttattattttcctctgtttttttgcaactaa

SEQ ID NO: 481145 - DNA, 653 bp, Homo sapiens
gaagaatgtatatcctgtgtttgatgggtggagtattctgtagatgtccaattggttcagtcacattgaagtcaagaattaaatttaagtcaaatttaagtccagaatttctttgttagtttttctgtgtctatgatctaaagctgtcaatggggtgttgaagtctccaactattattgcgtgactaagtcttttcataggtctagaaggttttatgagtccgggtgctccaatgttgggtgtgtatatatttaagatagttaagtcttcttgttgaattgaactcttaatcattgtgtactatccttctttatctttttttttctgttgttggtttaaagtctattttatttgatataagaatagtgactctggttaaataatttttgaaaatttaatctgagatgattaccaaatagggttccatattaatttgattaacaaggggcaaggagcctagtcagtaaaccatttgcaagccatgacataattaggtaaaatattaaatacagttaaactctctccaatttggtgacatctgtaatccattcattttaattgattcagcagttactatatgccagactgtccggawgcagaatttaaggagatgaaatctccaccttcgagatactcacagtccaatggaggga

SEQ ID NO: 481146 - DNA, 481 bp, Homo sapiens
gtcataaaaatactctcagaagggtactgatctcttccatcagtatggttaaatctctttcttcctatttgtagttcttgttgtcatgagcatttctactttattttcaaagcaccagcatttagctttaaatatcagttctatttttaactctaatttattaattttaactgcaatttttatcaacgccttcctcttttagcttacttaaatttttatttttctagctcttaaattaaactgcttatgtactttaaatactgccwggtaacaaaatcattttctaaataataaaatggttaaaaacattcttcataagcattatagacagtgttctcgtttctgtcatttctaaatttttataagattctttttattttaaattttaaaatgcctaacaattttagttgtggctgttattgttaatatctaattttatttcattgtggttacagcatgcggctttaaagatctctatttt

SEQ ID NO: 481147 - DNA, 481 bp, Homo sapiens
gtcataaaaatactctcagaagggtactgatctcttccatcagtatggttaaatctctttcttcctatttgtagttcttgttgtcatgagcatttctactttattttcaaagcaccagcatttagctttaaatatcagttctatttttaactctaatttattaattttaactgcaatttttatcaacgccttcctcttttagcttacttaaatttttatttttctagctcttaaattaaactgcttatgtactttaaatactgccaggtaacaaaatcattttctaaataataaaatggttaaaaacattcttcataagcattatagacagtgttctcgtttctgtcatttctaaatttttataagattctttttattttaaattttaaaatgcctaacaattttagttgtggctgttattgttaatatctaattttatttcattgtggttacagmatgcggctttaaagatctctatttt

SEQ ID NO: 481148 - DNA, 625 bp, Homo sapiens
aaatgagaaacctttgttttcataaataatcaagggcaaaaaacaatcgtacaaaccatagaaggttactctggtaagatggaatcttagctatacaggtggattacactgaaggtacaaaagaaacttttctttttttaagacgcgtttattcagcatcgtgatcagattattacatttagcaatcaacagcatgggtacaaaaaatcatctatattaaaaccctttgttggaatgctttgtactttccacggaacagaaactaaaacaacctgttctacaattaatcacaaatacagtccttgagattttgcccatacacatgagtatttgtcaaaaacatggcttctttgtagcagctaggccctgccaccactgtgcttggctgagttcacaattctgttgtaacctgtagcttccccgtcacttctctggctctcctctcctgctaagctttgtttcctgactgtaattaaaatcttctgccactgccatagctactgctgctactggaaccaccccagccaccttggtttygtggtttggcaaagtactggcttccaccaccataggggccagagcttctgcctccaaaatttactctcttcatgggtccaaaatttga

SEQ ID NO: 481149 - DNA, 474 bp, Homo sapiens
agggttaatatgactaaatatactttaaccactcagaacactggctggtacacagtaagtgctgcataattgttacactcacctgataagctgtgtgacttacccgagtttacatcatgtatagcaggttctcatgcagaagattaagtattctgagaagatgaatatgtttcataagtatttttgaaaagatgcatttcttctttgaatggtagttttcctcattactcttyttatccctatggttttatatctgtgtgatggtatgctatatatatatatatatatacacacacacggttaaaatgtttataaattatatttatatatttatctaaatataaattatattatgcatacatttgtcaaataacatattattctgacaatagttaaaatggtaagggagattttatttagggctatcatattaggcgtcaagaccatcggacaatggtgagactccaaatacaa

SEQ ID NO: 481150 - DNA, 632 bp, Homo sapiens
cagccattggctaaaaactgcaccctgaaggaatatacatttccaggcacttctagctttctgtaaataaggaggaagcatctcagcctgaggatagacctctgaaaaagagttgcatgtccaagccactrgagagcaatgcagaggctttcagaaaccaggaagcacacagaaattatgaaaggacattgagtagatctgggcagagctctgcattggacagagctccgcatgttcactatgaggattcaaatattaatgaattaaataaatgacaaatgtccatccttttcaataacctggagcacttctccaattctgcaattaaactttgggatatagggtgatgtaaacaatgtagcttctaattcacaaaaactagcttttgaataccaaatggccacctaaaagcaatgtaacctcggcgagtcatttaatctttctgattctcagtttagttatctgttaaatacaactattggtgtctgttttattcaatcccttagtgaagctatgtgacataatacttctaaatgatatttgcatttattgaatcaaaatagaaaattaataaagattttctttctttcatagcctttcttttacatctattcactgaatgagtgagaaca

SEQ ID NO: 481151 - DNA, 634 bp, Homo sapiens
atatgtctctgacattttaggcattcatttcagacacctgcatttctaaggtatccacctgcatcctcattattaacacagaagctcatttttatttgattataagtaagtagaccatcaaagaaaagccaaattgagtaaatacatttacctgactatctaaacaaaagaaatgcattttgaaaataaaagaatagttacgtgtgattttgctttgtatctttgattctttgtattcctactgctttaatcttggtctagagaagtagtatagagagtttgattttgaaggttaatagcatgatggtgtaattattcaaatttggtttattattggaatttaagtattacacttctatattgtgaatggaatatttgttgtttgtgtttacaatataaccgacatcaagtatttaccatataattgacatataattaatcagagtgctttgttcttctttaccctttggttggggttaacttatctatgtattttaaataattcttcataatttattttaatactgttggtgctttactgcatctctttctttactctttttttggaaacatttgtgagaaaactgctaacttgrtgttgcatcatccccaaatgctccagtgtgaaccttcc

SEQ ID NO: 481152 - DNA, 566 bp, Homo sapiens
gtagttgactacattgccattgattataactggaaatattgtcaaagaaaaatatctggatgaattggaaattaaaaactcttttttggacatattgagattaaaatgccaaaacagaataagagagcaagcagtcaggtaagtgagtctgaactttagataggaggtcaagataaaagatacaaactgggacccaatattaygcagatggtatttaacaacaaggattagatcattttaccaaaggaagaattgatcacagacggaaaaatatttaaaaccctattaaatattagtgaaaggacaattaagatctatttttttgtggttacaatgagagttttttaagtggtagcaagagggaatataatgggaagaatttaaaacagtaagtataaacaagtcatatccagtattttactgtaatgaggagcagtgtgtgagctgcaaataatatgggtgttttttaataagaatgaatactgttatagcgacactgatggtggtgagtcaatagagccactcaaatgtagaaaactgatgcaactggagaaataaaatgtgga

SEQ ID NO: 481153 - DNA, 418 bp, Homo sapiens
ttcagagccttatacccagcatcacaaagcaaaatataggagaagtgatgaackgagagacaatggttgttattcgactaaaagtgtcatatatgtgtttggcccattgataggttaaaattctgttgaattgccacttttgatattacaccagttgatgaacccaaaaaagattctagggtcacgtgtgtgaattcagcacctaccgtgtatgtgggaaatgtactgaataaacacagaaatatatgcttcattctcatctcagacatttaaataaaactcacaaaggctttaaaaaaagaatgtgggaaagaagggtagctaaggcattgcaggaaatattatttgagtatttcaacaattatctgcagtcaggggttcaacttcagttttgggatggggttggataatagactat

SEQ ID NO: 481154 - DNA, 508 bp, Homo sapiens
cagcttaataagcatttcatcatgggtcacccaggcaaggcctgcgggcactgtgcaaaaagccctgcctatttttacctagagggcttttctacctgaacacgtgtgtgtgttgcgtgtgtgtgaggatggggagtgactttcttattgctcccagtaatggaattaattcctaagaagattcttgaacaattggttcactttggtttgtcgttaattcaagtttacytctttgttatgattccaagcacctcacagagtcctaagcacctccaagaagtttaataaatgtttgttgaattggaggaaggggtagaaatcactagcattaaaatatgaaacaaataccatgtccactagggtgagggcttttctaactgtgcaagcccacctgcctgagcacagaaatatttacgttaaaaagtgttcaaactccaagcccttctgtcctgctgaacatgtacccagcagacccaaatatattctgaatgatactgggctcttccca

SEQ ID NO: 481155 - DNA, 654 bp, Homo sapiens
tcaaattagtaatgttatctctcttgggtttaagttgatctacttaamagatcctcacttggacatgaactatagaggccagtaaatggaaaggaaaataaccacacaatatagactaacaccattatttcatgatgttacacaagttttctcaaaaatatctggccatgttgtaccacagccttagtcctttgaccaatatgttctgatgcatttataatcactagtaaatgcctggcttaaaatactttataacattttcactgcataggaagcaaatcccctactttttttttttaatactttaagctttagggtacatttgcacaatgtgcaggtttgttacatatgtatacatgtgccatgttggtgtgctgcacccattaattagggacatggatgaaactggaaaccatcattctcagcaaactatcgcaaggacaaaaaatcaaacactgcatgttctcactcataggtgggaattgaacaagcagaacacatggacacaggaaggggaacatcacactccagggactgttgtggggtggggggagggggagggatagcattaggagatatacctaatgctaaatggcaaatcgcctactcttgatggtcaggagatggtgtgggacttgtcagagatcctgacag

SEQ ID NO: 481156 - DNA, 534 bp, Homo sapiens
gaaggtggcaaacagtgaagggtcartgaccccaggagaggtatagaaagacgctggcagcggccaggcacagtgtctcacgcctgtaatcccagcacttgggagcctgaagcaggcagatcacttgaggtcaggagtttgagaccagcctggccaacatggtgaaaccctgtctctactaaaaatacaaaaattagcctgtaatcccagctacttgggaaactgaggcacaagaatcatttgaacccaggagttggaggctgcagtgagctgagatcacgccactgcgttccagcctgggcaacagagtgagactgtcttaaaaaaaagaaagacgctgacagcaagggagggcagccggcaacatgaggtttctgagttccagacagggctgtgcatgcagaaaggccttaagggacccagagaggagcaggtgactgacacatggtgaagggtcttgacagtcatggagaggacatccgtggagcggccacgagggctccagagagagccatgtggagggacctaggccag

SEQ ID NO: 481157 - DNA, 546 bp, Homo sapiens
gggaatattttcttctcatgacgatgagatttctttttaccactattcctaagtctcctatttcaggccaagtgctagaattcckctagttagcactgaggagtagacagcaggcctgagatctcagctcaaagctaacagaaaggaaaagggtaggtgtagttatatcttccatctgcagggtcagaatgatcttgggggtaaaaaaaaagaaaaaaaaagtctcagggtcaaagagtttgcatcaccgtctgagctctctcaccgcagaagcagagaccccgacggaaagcgtttcagagcctgaggtggccacgaagcaggaactgcaggaggaggaagagcagaccaagcctccccgcagagctcccaagacgctcagcagcttcttcagtgagtttcccttgctcaccccacctcccggggttgtacaggcaggaggctggtgagcctctctccagaggcctgagatgctgcgaagacccttcttcctttcctgctggttggaaagtcggccttgtctctaccagcctgtctcccatctcc

SEQ ID NO: 481158 - DNA, 541 bp, Homo sapiens
tcatttgtagaggcatgacatcaaagagattttggactcactgcgtcatactttttaacccacctgtcctttctgctgaacagcagggattattccaaacccctttaatttctccatgttggccaggttggtctcaaactcccgacctcagtgatctgcctgcctcggcctcccaaagtgctgggattacaggcgtgagccaccacgccaggcatgactgcttttcttgcaccattcctagcctggtcacttcccctctgtctccaatggctgcctccaagagacaggcaaactttcccactctccaatttcctcacctctcagatgggggcacagtgatgagaggaagcatgttcttccacccactcttccccacgtgccaggcactcagcaacgggctttccctgacscaatgctccaaatcctcacaacactgctgggagtagattctgttgttatcctggtttcctgggtgagaaaagtaaagcggggaggtgggacagtattgaggaccggctaggaatcccagctccacctctct

SEQ ID NO: 481159 - DNA, 541 bp, Homo sapiens
tcatttgtagaggcatgacatcaaagagattttggactcactgcgtcatactttttaacccacctgtcctttctgctgaacagcagggattattccaaacccctttaatttctccatgttggccaggttggtctcaaactcccgacctcagtgatctgcctgcctcggcctcccaaagtgctgggattacaggcgtgagccaccacgccaggcatgactgcttttcttgcaccattcctagcctggtcacttcccctctgtctccaatggctgcctccaagagacaggcaaactttcccactctccaatttcctcacctctcagatgggggcacagtgatgagaggaagcatgttcttccacccactcttccccacgtgccaggcactcagcaacgggctttccctgacccaatgctccaaatcctcacaacactgctgggagtagattctgttgttatcctggtttcctgggtgagaaaagtaaagcggggaggtgggacagtattgaggacyggctaggaatcccagctccacctctct

SEQ ID NO: 481160 - DNA, 623 bp, Homo sapiens
ccaaagtgctgggattacaggcattgagctatcatgcctggcatcccctcttatttttatccacactcatgaattagatgatgttcaactctctctctctcacacacacacactgataatagctctgctcacgtttgctgagaacgtcacctgccaggctcatcttggcattttgcataaattctacmcttcaaccttcaccgcattccttggagtgagctctctgaggcttcttttataagggattaatccaaatcaagagggctccaccctcatggtctcaacacctcccaaaggccccatctcttaataccatcaccttggggttgccatttcttttttgttgttgttgttgttgagacaggttgtcgctctgtcaccaggctggagtgcagtggtacaatcaccagcctaccatcccacaacattagttagccatttgcaggttggagatagattctccttccagacttgtctataaccagcatatggtgaatgctgatgtcaaaaaacaacattaaagcccgccatgtggcaagaagttggctctctgcaacccagaagagggttccccagaatccaaccctactggtactctgatcttgggcttccagcctccagaa

SEQ ID NO: 481161 - DNA, 623 bp, Homo sapiens
ccaaagtgctgggattacaggcattgagctatcatgcctggcatcccctcttatttttatccacactcatgaattagatgatgttcaactctctctctctcacacacacacactgataatagctctgctcacgtttgctgagaacgtcacctgccaggctcatcttggcattttgcataaattctacacttcaaccttcaccgcattccttggagtgagctctctgaggcttcttttataagggattaatccaaatcwagagggctccaccctcatggtctcaacacctcccaaaggccccatctcttaataccatcaccttggggttgccatttcttttttgttgttgttgttgttgagacaggttgtcgctctgtcaccaggctggagtgcagtggtacaatcaccagcctaccatcccacaacattagttagccatttgcaggttggagatagattctccttccagacttgtctataaccagcatatggtgaatgctgatgtcaaaaaacaacattaaagcccgccatgtggcaagaagttggctctctgcaacccagaagagggttccccagaatccaaccctactggtactctgatcttgggcttccagcctccagaa

SEQ ID NO: 481162 - DNA, 526 bp, Homo sapiens
ctcaataaaccttaacacacctcttttgattgaagactctgagtctcagattacataatttatcctaggtcaagagatgataggttgctgaaacagagtttgaattcaggtctgtataactgcaacatcttgtccttaaaatgatgctataattcattcacatgtataatggcatttgctatgtgaaactgtgtcattactggagggctacaatatacctgaaagcatatgttaaaataggaaaatggtattttaaaaatctctacattaaatcaggaactgtaccaaaaaatgaaaataaaatattactacattccttccatgttacttcctaaggatattatgtgtaacaatgctagacaggattgtaaatcatatacagagattaactaaggctcaccaatcattcaatgtcgtagagcattcacttgactgtagataagatcttctaagtaacaagacttactgtgttattatatagmtatatgaagttccacattactatacagagtaaggcagacagcag

SEQ ID NO: 481163 - DNA, 647 bp, Homo sapiens
gggtcactaaggaaatgaatctgagcagcacattccagtgtgatatttgttgtttccaaaggccaaacattgctccccacttttaaaaattagtgctacaggatgtaagaaccaataaattatcttttatctggagtggaattcctaaaacattccaacgactgaacacccagaaattcaaaaatgtaatgtatctgtcagtctctgtcttctgtagatttcaccaaaatacatagggcacccactacttgttaacctcattttataattagcatgatacaatcacagtaataggtgatcatggtactccataaataaataaataaataaataaataaatatatatatatgtgtgtgtgtgtgtgtgtgtgtgtttctatggtataccatgatcacctattactgttatatatatgtgtgtgtgtgtgtgtgtgtgtgtrtatatatatatatatatatatgtatatataaatccttacaggcaaaactgacatgttaccttataatttacaatttctgtgattatatggcaaaaaaacaaggtcttgtcatctaaaaactttttaaaatactttgactgtagaaaaataaattcctagataaatatctgcataccaaatgccagatatatttactcaaacacactg

SEQ ID NO: 481164 - DNA, 647 bp, Homo sapiens
gggtcactaaggaaatgaatctgagcagcacattccagtgtgatatttgttgtttccaaaggccaaacattgctccccacttttaaaaattagtgctacaggatgtaagaaccaataaattatcttttatctggagtggaattcctaaaacattccaacgactgaacacccagaaattcaaaaatgtaatgtatctgtcagtctctgtcttctgtagatttcaccaaaatacatagggcacccactacttgttaacctcattttataattagcatgatacaatcacagtaataggtgatcatggtactccataaataaataaataaataaataaataaatatatatatatgtgtgtgtgtgtgtgtgtgtgtgtttctatggtataccatgatcacctattactgttatatatatgtgtgtgtgtgtgtgtgtgtgtgtatatatatatatatatatatatgtatatataaatccttacaggcaaaactgacatgttaccttataatttacaatttctgtgattatatggcaaaaaaacaaggtcttgtcatytaaaaactttttaaaatactttgactgtagaaaaataaattcctagataaatatctgcataccaaatgccagatatatttactcaaacacactg

SEQ ID NO: 481165 - DNA, 519 bp, Homo sapiens
  misc_feature (1)...(519): n = A,T,C or G
cggntcttgactctcctgcttcctcacattcctggacatttctttttacctacattggtttatactcctctttcaatatagcaagttcctccctagactgtaaattctctctaaacaaaaggttatgtttgttcatacctatatagccaatgcgacacaatgctgactcataaattattagttcattttaaaagttagggggggggttttttttattttctgtctactaacttggtctctctaacgtatccaaaacacataagtttatttttgctttggtgcytttgcaatttttggttccctctgcctaaaacgtttcatcacaggaaaaatattcaaacagctccctcacttatttcttgtttcctccacaatgtgacattttaaaatatgttcctgagaatggggtgtgaggtgctggtgtggatatattccaggtagtaagtaagctctgtaatgcttgggacttcgtttatttttcaacactgtaactccaagttttaaaaatgcagccgggca

SEQ ID NO: 481166 - DNA, 429 bp, Homo sapiens
ttgattattataaacctgtagtgctactagaaaagacaaagtaaaatacataactaataacataaattaaatcaaaccaatatgagaaaaactggagaggctctatagatatcatttgcttttaacctaaaattttaaacaatatagcccacagcccagacacagtctatctttgcaattgacataaattttaataagtgttatgtagaacccattcattttctcctaaaatttgcttagataaaattatttctttgaacytgaagtataagagggtttcttcatacttttcactatcttccaaatcctttccatctagagaaataacaactttgttgagcaaataatataagtggcacacagtgagaatagagatcagaataagatgtgggtctatcataaaaatatatttcccaaattccattataa

SEQ ID NO: 481167 - DNA, 429 bp, Homo sapiens
ttgattattataaacctgtagtgctactagaaaagacaaagtaaaatacataactaataacataaattaaatcaaaccaatatgagaaaaactggagaggctctatagatatcatttgcttttaacctaaaattttaaacaatatagcccacagcccagacacagtctatctttgcaattgacataaattttaataagtgttatgtagaacccattcattttctcctaaaatttgcttagataaaattatttctttgaacctgaartataagagggtttcttcatacttttcactatcttccaaatcctttccatctagagaaataacaactttgttgagcaaataatataagtggcacacagtgagaatagagatcagaataagatgtgggtctatcataaaaatatatttcccaaattccattataa

SEQ ID NO: 481168 - DNA, 616 bp, Homo sapiens
attccttttttcttcctttctttccccttggtgaacatcccaatgtcataaatctcgagtttatctataaaataatgctactcagtttatttttctttggatttcgaatttctgttctgacttttaatctgtatgattcagaatttggcaatcacaatgtgtgtaatatgccaggaaaatcatctgtttagaccaatatcatttttacaaattttaatatataaattacaaatcccatcccaattaagaaatcttaagcaaagaacattttagttaatgctattaaatgarctggcatccatctccatcaataattaatggaataatacactctgctcacaattatgctttcctattatctaatgggtttttttgttgttgttgttgttggaacatcaacatgttactaaaaataacaagacttgagaacaaaattctaacaagcaaaaacctagacatcagctaaatgaataggacattaggttcaaaacaaaaatggtaacatttagatcagcgtattaacttgccaattgccagatacatgtggtgagcccaataaatggtgtaactaaaggcttataaaaatattattggttacatattgatcatttcactc

SEQ ID NO: 481169 - DNA, 633 bp, Homo sapiens
gaagcttcttacaaaaccatcagatctcatgagaayttactatcatgagactagcatgagggaaactgcccccagtgatttaattacctcccactgggtccttcccaccacatgtggggattatgggaactacaatttaagatgagatttgggtagggacacagccaaaccatatcacataaccacaagtttatccttctggaaatggcaatgccctgtttttgctttttttcctaaaataaatattctgattccaggagaacttgtactggacagaggcaatatgtgactagtagtcacgattacagaaagctataactttatctttgagaagaaaaaattgtcctttaaagcttttaatagaaaatgtttactttttaattaccaagttaattttttaaagtttatcttaaattaagtttgaaaaatacaataattattttttgtttgtaacctactctgtgctgaatatttttaatataaaagtatttaaatataaaaattactttaatatattattttagttaatcttcagacatattattactcctctattttaaaaatgaggcaatttaagcccaaggaaagcaaatatctagagcacaggtggaaagaaatagagccagaattaaa

SEQ ID NO: 481170 - DNA, 582 bp, Homo sapiens
agtttaatgtactgaggtactaaactgggtaacgataagtccccattactaccactttgattcttctgcatgcttctgaaaatttttctccttaatttcacagtctaacaacaccatctaaatttagcacttggaaattattttccagtttattttctgaaatacttctaattttctacccataataccttcataaaactatyaatgcaccccttttcttctgacattgtctcatgatacttagttcttaagctgaatatctctgcttaatcatttcatacatgttttagcaagtatctatggagggcctaggcaatgtgttatgtattaggctaacaatcaattttccatctgtacttctctgttctggtaaacaaagtgacatgtttcctgaaaagtttagaagaacacctattgtaaaatgcaaaaagttctcaggaaattaatttagttaagtcctttgcttacttaaggcggtaacattgagttagaggccaggaactcagggttcttttctgagttccagactccttcagatctctctgctatttagttttatggacaagtgtgtcatcatatgtg

SEQ ID NO: 481171 - DNA, 582 bp, Homo sapiens
agtttaatgtactgaggtactaaactgggtaacgataagtccccattactaccactttgattcttctgcatgcttctgaaaatttttctccttaatttcacagtctaacaacaccatctaaatttagcacttggaaattattttccagtttattttctgaaatacttctaattttctacccataataccttcataaaactattaatgcaccccttttcttctgacattgtctcatgatacttagttcttaagctgaatatctctgcttaatcatttcatacatgttttagcaagtatctatggagggcctaggcaatgtgttatgtattaggctaacaatcaattttccatctgtacttctctgttctggtaaacaaagtgacatgtttcctgaaaagtttagaagaacacctattgtaaaatgcaaaaagttctcaggaaattaatttagttaagtcctttgcttacttaaggcggtaacattgagttagaggccaggaactcagggttcttttctgagttccagactccttcagatctctctgctatttarttttatggacaagtgtgtcatcatatgtg

SEQ ID NO: 481172 - DNA, 633 bp, Homo sapiens
tcgcacttcttcctgtagtagtattcgttgaccacacagggctgacagcacttgcaccagggataaatatgggagcgacagcagttactggagtaagtgtcgatgaggaagtcgatgaacacagyggcctggggagaatgcagacaagcgctgcgttagtcacttccttctccaaaccattttcctaaagcatggaaaagagaatctcttaccagaccgaagtaggagagggttgagccgatgtacacaaccagctggataatgtcaaattttcctccctaaaaacagagtgggagagtttactcaggtgaaattcagagcaacgctcttttgcttcaacgtgcaattgttggttctatcagggagcggagcctcatgctgtgacttggatagatgcgttcaagtgctggctgaggcagagactacgcagactgaaactgactctcaggcatcctgcttcagccgtgcagggtgtgcttggacccataaaggttttacatgagcaagcactggggcccacacattaaggggagacccactgaagggctatcatttctccatacaaggtgagggtttcagacaagcttctcctccaaaaggtttgacattacttcagaagcagagggaaggaat

SEQ ID NO: 481173 - DNA, 564 bp, Homo sapiens
caaaatagttgctatggtgaatgggaggagagagccaacagggaaaacaggaattccagagtagtggtaagaattagagaccatgaatttgttattgccaacagtctaggtgactgagattatggtagaggcctgggccttcccaccaataggaaccgcctcctacctccacactcagtaaccaccaggacttgccaactggttcacatagttttaagatgtgtcatcattggtatctactatgtttgttatggtgttgacatgtgttactgggacagtagctagtcaggtccaagatacaggagcaaaaggctgattcagttgctctgcccataggtcaccctcccctggggcttgcacccctgccaggcaggaagcttctctttgtcccctaactcaactcagccactgggaatgacttcgttcattcaacttaatctgagtataactaccctacctccttatgaatgctggatttcttttaacctcaagatctyccctctgttcccctctacccaagccaaatacccatgctatccttgggaactttaaaaaatatctatt

SEQ ID NO: 481174 - DNA, 560 bp, Homo sapiens
tgttccctaccgaaaatcagggagccagacattgaagacaaccaagaattcctgccaccagtacccatgaaacagtcctctgagctggggctgaatgagtcctacacatggaaggaaatctttgggtttccaggggatctgggcagctctgaggcatataacatagcccagccaggaaaaagctcccaaaagagaatttatttgtccaggaatgtacaggcaaaaaatcaccattctgtgtttttccatggggtagaggcctgaccaacctcatgtggtttgttccgtccagcttggcactgacagaggctggtggggcctgggggagggtctgaaaatccagggtctcaggtatgaactactgctctgatcaactgctaggctgtgtcctgtgggaatgtgctgggtttctacatgacccagaggtcactgatttcacaagatctgcaaacaatccaatattcaaatatttaactatagcagagattgatagatttttctgccatgcccagtatccccctmtagctcaatctgaaatcaacagaccttcatatccacag

SEQ ID NO: 481175 - DNA, 580 bp, Homo sapiens
tgtggttccaggtcatgataaattgctgtgggaagccacagagcagacagctcatcacacattgtaatggattcattgtcttctctcgtggccccctttatctcaaactctcagcagacaagggttaaaagggastgagctgagtgagggcctgtggatgctgctcttcaggaaaaggagggaaaatgagcccagacaggatcatcgttaaccggctccaaggtcaagagccgggttagaacgttagaattagagatgggggcagggatggcggcgggactctctccatcaccacaccctatctaattcatttattcaacaaatatttattgagtaccagagactctttgggcatatgtgagttaacaaaacagatgaaatccttaccctgttggaatttatattttaaagaagcaggatgaacaatggacacataggccggacataccatgtgtgaggggccctgtgcattaggagaaaaatcaggtagggagggaagataaggcatgtttggggctgagtttttccattgaggtgaaattcaaataacatgaaattaatcatttaaaagtgaacaatt

SEQ ID NO: 481176 - DNA, 580 bp, Homo sapiens
tgtggttccaggtcatgataaattgctgtgggaagccacagagcagacagctcatcacacattgtaatggattcattgtcttctctcgtggccccctttatctcaaactctcagcagacaagggttaaaagggagtgagctgagtgagggcctgtggatgctgctcttcaggaaaaggagggaaaatgagcccagacaggatcatcgttaaccggctccaaggtcaagagccgggttagaacgttagaattagagatgggggcagggatggcggcgggactctctccatcaccacaccctatctaattcatttattcaacaaatatttatygagtaccagagactctttgggcatatgtgagttaacaaaacagatgaaatccttaccctgttggaatttatattttaaagaagcaggatgaacaatggacacataggccggacataccatgtgtgaggggccctgtgcattaggagaaaaatcaggtagggagggaagataaggcatgtttggggctgagtttttccattgaggtgaaattcaaataacatgaaattaatcatttaaaagtgaacaatt

SEQ ID NO: 481177 - DNA, 580 bp, Homo sapiens
tgtggttccaggtcatgataaattgctgtgggaagccacagagcagacagctcatcacacattgtaatggattcattgtcttctctcgtggccccctttatctcaaactctcagcagacaagggttaaaagggagtgagctgagtgagggcctgtggatgctgctcttcaggaaaaggagggaaaatgagcccagacaggatcatcgttaaccggctccaaggtcaagagccgggttagaacgttagaattagagatgggggcagggatggcggcgggactctctccatcaccacaccctatctaattcatttattcaacaaatatttattgagtaccagagactctttgggcatatgtgagttaacaaaacagatgaaatccttaccctgttggaatttatattttaaagaagcaggatgaacaatggacacataggccggacataccatrtgtgaggggccctgtgcattaggagaaaaatcaggtagggagggaagataaggcatgtttggggctgagtttttccattgaggtgaaattcaaataacatgaaattaatcatttaaaagtgaacaatt

SEQ ID NO: 481178 - DNA, 331 bp, Homo sapiens
tggttatttacagtatgtaagttttaatatcctgtaaaagggggacaataatggcatccatttgatagggatgttaaagatattaaatgacactgtccatgttaaataactttttgagatatattgagatgtttctgtacttccttgttctggccttcttgttgaaccagaggaatctattgccatgaaaagcaataaaactgttatagtagaaattaaaagtgagtaggaacttatttaaaaatcatcattctccttttcaatgcaaaaataagaactagaaaattttaataaggcaatagtcygaagaaataacttatggaagataata

SEQ ID NO: 481179 - DNA, 396 bp, Homo sapiens
ctggtcttcaggcgcagctrtctgtaagatgctcctgcagtatagttctatgtctttctgcacagattcagtggatcctgtgatttttttacatggaatagcccctttattttttgcagagaagctagacaattcacagtaacctatggcctagtacattttatttcttgatcaacacaactctttatagatgcttgtggtccaaaaatgcagattcctaatcatccccacgaataagggggccattgcaaggcaacctaggagggagtttaggattgctctgaggcagtgaaatctattgaaattcccacatgagggggcaggaaagggaatccacgtgttttgatccctccatgttctgggtgtaacttggtcctcgttaaattgcaccatttt

SEQ ID NO: 481180 - DNA, 264 bp, Homo sapiens
aagtcctttttgcaatacagttttaagaccctctttcatttaaatttaaatttttgaaacttagtgtccttcctaaaaataaaatgaaatgaastttcctaaagtgttgtattattagtactatctaagtcatcatcctggccttatgaaatattggcattttctactggtgtaacttttattagaagcatctcatcataactagtaggatcatctcaaaggggttacaacacattagcaggtaatgaaatcaatgtagtgttt

SEQ ID NO: 481181 - DNA, 264 bp, Homo sapiens
aagtcctttttgcaatacagttttaagaccctctttcatttaaatttaaatttttgaaacttagtgtccttcctaaaaataaaatgaaatgaactttcctaaagtgttgtattattagtactatctaagtcatcatcctggycttatgaaatattggcattttctactggtgtaacttttattagaagcatctcatcataactagtaggatcatctcaaaggggttacaacacattagcaggtaatgaaatcaatgtagtgttt

SEQ ID NO: 481182 - DNA, 539 bp, Homo sapiens
tctggcttttgcctggcaatctaggctgtgtttcatgtcatctgcacttcctttctcattgttttatctcccacagccaacagggtaggcctaaaagcaaagtccatattccttgctgggtttctcctctgggcatggacaaatcccacaggttgcactgagatccaatcgagctgtggtaaggaggattgaggctggacatgaagaagtacttccaggtcccacagtctgggaccattttcttgctggggctttaaagtagctgtccttctgtgagcacagtgttgtcaccgtcttccagggaaggacttgtcttcctcagtttccagttagccttgtgcgaggcattatgctgggaatgttggggttccagatacctggtctctgaccatgggatttctgctctagacatgggtgaactgacatctccctggcatcctcccagtcactgccagctctgcagcatcatgaaacccctgagtccttcacaactcccagrtcatctcatccttcctccttgctctgggaagaccatgtct

SEQ ID NO: 481183 - DNA, 504 bp, Homo sapiens
aagcaatatggcaaaaccccatctctacaaaaaaaarcaaaataattagctgggtatggtggcacatgcctgtagtcccagctactcaggaggctgaggcagaggataatttgaacctgggaagtggaggttgcagtgagccaagatcatgccactgcactccaacctgggtgacagagtacgatcctgtctcaaaataaaaataaagaataaaaccagtgtttccacatctggaactttcttttcaagtttatatcacctctccttccaaatcaggtctcccctcctccaggaagtactccttgattaagccaaaaatgttttaattttcaccacttgtcctattactctgcatccccacagcacttgtagtttgtacttattccctatcctgtttaagtgtgtgttcatcatcctaaccatactgcataagcaggcactattttaagtaggcttgatagattatcagaaattgacaagaaaaaattcacaccaagaagaaag

SEQ ID NO: 481184 - DNA, 556 bp, Homo sapiens
ctggaagggaagacacgcctctccataccgagtcagaagttcaccgcgaaagaaaggccgccgccccaaccccgcgtcctaaagctcctccagcagagcccggtgttcttcctggctgaagagtggttccagcagagtgggctcttccacgtccttcagctcccmcagtggcgccggatctaggaaaggttgtgccttttgctgaaactctagggtcgacaggagctcatctaataggctgggggtgagtgcagaggagcgccttgcctcctggagcggttgggaggctcctgaatggcttccatctgtgcttgacacggaggcctccggggtcacgagcttcggagttggaggtgcccagtctttggtttcccatgcagccctggcgacctggggctctagtcccaccgcagactctggtgggacgtgggtggcgcaagcacaccttggccctgtgactcagcttgagggggcccaagctgtcccactgagcacgcgcccagcaggccgtcgtgctgtgggtcctggtcctcctggcatttgttggggtgcagag

SEQ ID NO: 481185 - DNA, 556 bp, Homo sapiens
ctggaagggaagacacgcctctccataccgagtcagaagttcaccgcgaaagaaaggccgccgccccaaccccgcgtcctaaagctcctccagcagagcccggtgttcttcctggctgaagagtggttccagcagagtgggctcttccacgtccttcagctcccccagtggcgccggatctaggaaaggttgtgccttttgctgaaactctagggtcgacaggagctcatctaataggctgggggtgagtgcagaggagcgccttgcctcctggagcggttgggaggctcctgaatggcttccatctgtgcttgacacggaggcctccggggtcacgagcttcggagttggaggtgcccagtctttggtttcccatgcagccctggcgacctggggctctagtcccaccgcagactcyggtgggacgtgggtggcgcaagcacaccttggccctgtgactcagcttgagggggcccaagctgtcccactgagcacgcgcccagcaggccgtcgtgctgtgggtcctggtcctcctggcatttgttggggtgcagag

SEQ ID NO: 481186 - DNA, 633 bp, Homo sapiens
gtttctcattttcatggcttaggcaattcctttggcttaaaattttctccccttcttttctaatgactgaaatagaaattctgacaatcattgaaggttcagttccaaccctctttctctaaattctagtaagaatctctactagttctgcaaatycccatatttcctcctctttatctcttgtatgctattatttttgagtagttgtttattaatgcctttatcactagattttaaatttgcttacacaacttattacttttattccccccagtgtcaaaaacagttttgtgatgtttaataaatgcttattgaatgaataaacaaatgaataaggagctacagatacaatcgtgatttttttgggggggaactatggatttctgttttgccagtaagatggagaatgacaaaatgatattaaatttcacaagtctggtttcagggatgcatgttgggtaaaattcagtgaattcagtgacaaatatagatcattattttatctggagataattcattaaatctaagactgataccattagaacaaagattggtaactagtgtttcaaatgagtaaatttttagactttaatttcttccaataaaaaattatcttcaggctggttcaagtgc

SEQ ID NO: 481187 - DNA, 608 bp, Homo sapiens
ctgggcagttcttttgccctctctcttgggttcttttaggcagggatagtcagaaagaagcttggctggtttgctgggacagtggggcctctttctctcttcctgtaggcttagaacctgtgtctccccatgtggcctctccaggtcatctttcaatgtggtcttcccagaagggcagccagacttcttatgtggaggygcagggtctccaaaaatgtaaacgtggaagcttccaggcttataacacataagcctctaattggcaccatgtcagttctgctatttttgttaattaaatcaaatctcagggaagcccaaatttaatgaattcacaataaaagtgtgaacatggagaggtgtggctcattgggagccatctttggagacgagctactgcctgtggctgttcatgattcgtgaacttcctatataaaaaatacactcacccttgcaaatctcattccaatatggtatcagcttgaagtccaggatattgtgcactaaatcatgtcccagaatggggcttttgggatgaagttccttatgtgcattttctcagttgcaaggaccaaggaaagaaaaggacaagtatctatatctcactcact

SEQ ID NO: 481188 - DNA, 608 bp, Homo sapiens
ctgggcagttcttttgccctctctcttgggttcttttaggcagggatagtcagaaagaagcttggctggtttgctgggacagtggggcctctttctctcttcctgtaggcttagaacctgtgtctccccatgtggcctctccaggtcatctttcaatgtggtcttcccagaagggcagccagacttcttatgtggaggtgcagggtctccaaaaakgtaaacgtggaagcttccaggcttataacacataagcctctaattggcaccatgtcagttctgctatttttgttaattaaatcaaatctcagggaagcccaaatttaatgaattcacaataaaagtgtgaacatggagaggtgtggctcattgggagccatctttggagacgagctactgcctgtggctgttcatgattcgtgaacttcctatataaaaaatacactcacccttgcaaatctcattccaatatggtatcagcttgaagtccaggatattgtgcactaaatcatgtcccagaatggggcttttgggatgaagttccttatgtgcattttctcagttgcaaggaccaaggaaagaaaaggacaagtatctatatctcactcact

SEQ ID NO: 481189 - DNA, 437 bp, Homo sapiens
gcttcagggtcatggcttatagaaagctctgtgactagagaatctagatgaagcagatagtgtcacctcaggaaaaggcgccagccaactgctggctccatgactgtatctgtgatgttctcaatactgcctgagccaccaacacaagatctggytctggacttggggtagtggggagaggatggaatgggggttgatgattgatagagaaggttaggtgagggcaactgcaaaacagcttgccagaaaggggtgtcaggttgtggggatgggaaagagagttagcaagagaaagaaaagaaattcctacttaagctgagcctgcaaacaaaaatccaaaaacacatgaggaaaatacataagcaaaacagctagcaaggttgataatgagatttattcacttcagaagatgaattcttgtccagaaaaggaataga

SEQ ID NO: 481190 - DNA, 668 bp, Homo sapiens
ctgacatttatactttaagaaatgtttatctcataaaaatttctagcaatgacttataaataatgaccacatctttaaatacttcataaaatagtaataatttatcaagagttttaaatcctttccctctgcctacctcagttcctcatcagaaaaatgtgaaaaaatgaaactgatgctcttaaaggttcttttcatctggggcacttttgaatctggctagaatctgaagtatgtggttctaatcctcactgacttctactcaaagcttatgcagtcagttacctggcaatatgtaaatcatacacagaactttctggaacacatacttactttaaaattaaattaaatatttcctttcctttcttgaattaaaagttaatggactcacttggactgtgtgctccttattcgccttctgtatcctcartgcctaacacaacatatagtatatagtaggtacttcataattactaattttccaataatggctaccactttttgagcatctagtatttaaaagacgttttaaaatagggtttctaaaatcctcacaacagtcctgcaagggtagcatttttacatttataatcttagtaaaattgggctgcctataggtcagtctcagcatagtgtcacatccaaaataaatacaaatccaaacccaa

SEQ ID NO: 481191 - DNA, 552 bp, Homo sapiens
cttttttttccctttctttaagtatcaggccaagatataaaccaaagggtaacaaaatagagaaaatagtagagttgacatcataatgctccactaaaagaaatcaaagtcagcaactctaatactgtatattaaacttaagcagggtaaccaggctgagtactacacattaaaccagttcgtcccraagttactttacagattgaaacactgggactcttgacaatggagtgatgcctattatggaatagctaatagttatatcttttatttttatctcaagacttctaatatactatggtaactgcagttacaagtgggcaagtctgtgaagcagttttagccacctactgggaagattttatcgggtttctaagggggcattttgagccaattaaatgccacccccctttaaccaaacaagcaaaatatataatacagtatataatacagatctatcctgtactataatgaagaatactgaaataaataagtatcttcctaggctgcagggatccatgattgtgccactgcactccagcctggggacca

SEQ ID NO: 481192 - DNA, 552 bp, Homo sapiens
cttttttttccctttctttaagtatcaggccaagatataaaccaaagggtaacaaaatagagaaaatagtagagttgacatcataatgctccactaaaagaaatcaaagtcagcaactctaatactgtatattaaacttaagcagggtaaccaggctgagtactacacattaaaccagttcgtcccaaagttactttacrgattgaaacactgggactcttgacaatggagtgatgcctattatggaatagctaatagttatatcttttatttttatctcaagacttctaatatactatggtaactgcagttacaagtgggcaagtctgtgaagcagttttagccacctactgggaagattttatcgggtttctaagggggcattttgagccaattaaatgccacccccctttaaccaaacaagcaaaatatataatacagtatataatacagatctatcctgtactataatgaagaatactgaaataaataagtatcttcctaggctgcagggatccatgattgtgccactgcactccagcctggggacca

SEQ ID NO: 481193 - DNA, 643 bp, Homo sapiens
tgaaggaaattgacaatgcctgcccacccgtgggcagctgattaatgttatgatttgatgctattagctccrgtggcagtttcaggggaccgaaacctgcctgtttttctcagacacctaagatcttcataagaccatgggggacgggtggaagagcaaagccccagccacctgcctgcaggccctatggagggactgaggtcagctcctggggctttgggctcctctgctgagttcccagctggctcctgctgccggggccagatgaactccctgtttccgaacacatccatatctagtctgcttgtgaggtcagccgggagcctggcacctggagcttgcatttgcccagagattctgtctggacgttctggatcagagggtgggctggcacacaaaccatgtcagtggcacctctgagggaaaggaagcctgggcctccacaccctcttcagagtaaacgagcacatgagaggcacacagcctgctcccagggcagtggggtgcagtcctctggcaggtatggggcccctgtactcacccccctgcagcaccccttgctggggcctctccccaggctggaagaggatggagccccctccagactccctgagccatggcggccctcactcaccgactatct

SEQ ID NO: 481194 - DNA, 591 bp, Homo sapiens
taatgttatgatttgatgctattagctccggtggcagtttcaggggaccgaaacctgcctgtttttctcagacacctaagatcttcataagaccatgggggacgggtggaagagcaaagccccagccacctgcctgcaggccctatggagggactgaggtcagctcctggggctttgggctcctctgctgagttcccagctggctcctgctgccggggccagatgaactccctgtttccgaacacatccatatctagtctgcttgtgaggtcagccgggagcctggcacctggagcttgcatttgcccagagattctgtctggacgttctggatcagagggtgggctggcacacaaaccatgtcagtggcacctctgagggaaaggaagcctgggcctccacaccctcttcagagtaaaygagcacatgagaggcacacagcctgctcccagggcagtggggtgcagtcctctggcaggtatggggcccctgtactcacccccctgcagcaccccttgctggggcctctccccaggctggaagaggatggagccccctccagactccctgagccatggcggccctcactca

SEQ ID NO: 481195 - DNA, 573 bp, Homo sapiens
ccccatagtccgcagcaggtgagggagcagagccgagaaatgggcaaagaagaggcagagggtatgttggtagcaaggactggatctctactggtgatccaagtctttgtctccttagcacttgaagaagtgaaatggcattctgttttacagtaggacttgaaattactctcctacttctaattattttggcggtagttcttttcattttgttttatttttgagttgagggtaggaaaatttggtagtgtttgttttaaaagattgtagaatgcaaatargagtagaaatcccagttattaatatttaaagaactacatgaaacagctccaaactggagcatcctccctcagcatcgcaattgcttacaccaaactcctgctgcactactttccactggtttgcataaaaccggccggttccctctgcctttccctttagcatggtaaccaaatggtgaagccatcctcccagactctcatatcccccagggatgcccagcgcgcaggcccatgggtcaacagggtgctgactgcgtgtgtgtgcatgcagaacaggctatgcactaaatgg

SEQ ID NO: 481196 - DNA, 587 bp, Homo sapiens
ctgcttagcaaggtcgagagctgtcccgatcgggtcctggtccatgctccgtaactagtcccagaacagccccatctcagtccggttggccactgtaacaaataccttagactgggtagtttacatactgcagacatttattgcacacaagtctaagactgggaagtccaagtctaagactgggaagtccaagatcaaggtgctggcaggtgcagcgtatggtgagggctgctctctgcttctgtggtactttctgtgtgtcgtcacatggtgcaggggacataaatgtgaaggacgaycttccttcatgtctgcatggtctctcagtcatgtcattctgtaccaaggtcttattactccccaaacccaggcattcttttgaggcatcaaattctgaggctgggagtttgatgagtttcttgcctctcctgtcccgtggtaggtgtgcccaccacctgtggacactggtgctgctcaccacactcttccctggcaccacgctcttctcctggacaccaccggcttcccttccctgtgttagggttggcagagcctgaaaagctgggaaagtggcacagactgtatcg

SEQ ID NO: 481197 - DNA, 622 bp, Homo sapiens
ctggtggcagcacttcattaatgaccaggtgaagatgtcatctctaagccaagcttcttgtttcatctgccttggacacagccactatgaagcagaagcraatggcacatggggtggcacccctgaggcatgctgctgacacacctcactggaggtcctggaggaccatggacaagaaagaccttgcagaagtacagccagcaccaggggtcccctcctcttccaggcagacatgctgcaggacatctgccaggcaggatctcatgaggctccattcctgaaggctgtgtgaactcctctattccctttccaggagggagtttctagagaggattctgcctctgcttccctatcatgctttggatgggtgtgctgggagtcctcaatccctggacacatcaagtcaccccacactcaacagactgctcaggtatccgggaccctgggctggatgcagcactggacaggaacttgtttttgtttgtttgtttgtttgttgctagtttggtagtaaatgtatttggcctacatttggaaaatagggtcagtctgactatctgctggccagagcagtgggctgtggcagggatggccagccatatcccagaattccacattttcc

SEQ ID NO: 481198 - DNA, 622 bp, Homo sapiens
ctggtggcagcacttcattaatgaccaggtgaagatgtcatctctaagccaagcttcttgtttcatctgccttggacacagccactatgaagcagaagcaaatggcacatggggtggcaccccygaggcatgctgctgacacacctcactggaggtcctggaggaccatggacaagaaagaccttgcagaagtacagccagcaccaggggtcccctcctcttccaggcagacatgctgcaggacatctgccaggcaggatctcatgaggctccattcctgaaggctgtgtgaactcctctattccctttccaggagggagtttctagagaggattctgcctctgcttccctatcatgctttggatgggtgtgctgggagtcctcaatccctggacacatcaagtcaccccacactcaacagactgctcaggtatccgggaccctgggctggatgcagcactggacaggaacttgtttttgtttgtttgtttgtttgttgctagtttggtagtaaatgtatttggcctacatttggaaaatagggtcagtctgactatctgctggccagagcagtgggctgtggcagggatggccagccatatcccagaattccacattttcc

SEQ ID NO: 481199 - DNA, 622 bp, Homo sapiens
ctggtggcagcacttcattaatgaccaggtgaagatgtcatctctaagccaagcttcttgtttcatctgccttggacacagccactatgaagcagaagcaaatggcacatggggtggcacccctgaggcatgctgctgacacacctcactggaggtcctggaggaccatggacaagaaagaccttgcagaagtacagccagcaccwggggtcccctcctcttccaggcagacatgctgcaggacatctgccaggcaggatctcatgaggctccattcctgaaggctgtgtgaactcctctattccctttccaggagggagtttctagagaggattctgcctctgcttccctatcatgctttggatgggtgtgctgggagtcctcaatccctggacacatcaagtcaccccacactcaacagactgctcaggtatccgggaccctgggctggatgcagcactggacaggaacttgtttttgtttgtttgtttgtttgttgctagtttggtagtaaatgtatttggcctacatttggaaaatagggtcagtctgactatctgctggccagagcagtgggctgtggcagggatggccagccatatcccagaattccacattttcc

SEQ ID NO: 481200 - DNA, 495 bp, Homo sapiens
tggtggcagcacttcattaatgaccaggtgaagatgtcatctctaagccaagcttcttgtttcatctgccttggacacagccactatgaagcagaagcaaatggcacatggggtggcacccctgaggcatgctgctgacacacctcactggaggtcctggaggaccatggacaagaaagaccttgcagaagtacagccagcaccaggggtcccctcctcttccaggcagacatgctgcaggacatctgccaggcaggatctcatgaggctccattcctgaaggctgtgtgaactcctctattccctttccaggagggagtttctagrgaggattctgcctctgcttccctatcatgctttggatgggtgtgctgggagtcctcaatccctggacacatcaagtcaccccacactcaacagactgctcaggtatccgggaccctgggctggatgcagcactggacaggaacttgtttttgtttgtttgtttgtttg

SEQ ID NO: 481201 - DNA, 556 bp, Homo sapiens
aaattaggggttctcaaacttttttttttttttttgagacagagtcttgctctgttgctcaggccggagygcaagtggcatgatctacactcgctgcaacctctgcctcctgggttcaagcaattcttctgcctcaggctcccgagtagctgggattacaggggtttgccaccacacccagctaattttttatatttttggtagagatgtggtttcaccatgttggtcaggctggtctcgaactcttgacctcaagtgatccacccgcctaggcttctcaaagtgctgggattacagatgtgagccaccgtgcctggcctacgattctcaaacttttatgggcttaaaattcacctgggatagttgtgacaatacagattcctaggacccatccaaagaatcactttcaacaagtctggagtgggacatcaaaagctgaattttgataatcacccaaaatgattgaatatagattctctggggactgttttgggagacactgacctatgatagtactcaaagcatggtctccagaccagcagggtcatctggaaac

SEQ ID NO: 481202 - DNA, 556 bp, Homo sapiens
aaattaggggttctcaaacttttttttttttttttgagacagagtcttgctctgttgctcaggccggagcgcaagtggcatgatctacrctcgctgcaacctctgcctcctgggttcaagcaattcttctgcctcaggctcccgagtagctgggattacaggggtttgccaccacacccagctaattttttatatttttggtagagatgtggtttcaccatgttggtcaggctggtctcgaactcttgacctcaagtgatccacccgcctaggcttctcaaagtgctgggattacagatgtgagccaccgtgcctggcctacgattctcaaacttttatgggcttaaaattcacctgggatagttgtgacaatacagattcctaggacccatccaaagaatcactttcaacaagtctggagtgggacatcaaaagctgaattttgataatcacccaaaatgattgaatatagattctctggggactgttttgggagacactgacctatgatagtactcaaagcatggtctccagaccagcagggtcatctggaaac

SEQ ID NO: 481203 - DNA, 556 bp, Homo sapiens
aaattaggggttctcaaacttttttttttttttttgagacagagtcttgctctgttgctcaggccggagcgcaagtggcatgatctacactcrctgcaacctctgcctcctgggttcaagcaattcttctgcctcaggctcccgagtagctgggattacaggggtttgccaccacacccagctaattttttatatttttggtagagatgtggtttcaccatgttggtcaggctggtctcgaactcttgacctcaagtgatccacccgcctaggcttctcaaagtgctgggattacagatgtgagccaccgtgcctggcctacgattctcaaacttttatgggcttaaaattcacctgggatagttgtgacaatacagattcctaggacccatccaaagaatcactttcaacaagtctggagtgggacatcaaaagctgaattttgataatcacccaaaatgattgaatatagattctctggggactgttttgggagacactgacctatgatagtactcaaagcatggtctccagaccagcagggtcatctggaaac

SEQ ID NO: 481204 - DNA, 556 bp, Homo sapiens
aaattaggggttctcaaacttttttttttttttttgagacagagtcttgctctgttgctcaggccggagcgcaagtggcatgatctacactcgctgcaacctctgcctcctgggttcaagcaattcttctgcctcaggctcccgagtagctgggattacaggggtttgccaccacacccagctaattttttatatttttggtagagatgtggtttcaccatgttggtcaggctggtctcgaactcttgacctcaagtgatccacccgcctaggcttctcaaagtgctgggattacagatgtgagccaccgtgcctggcctacgattctcaaacttttatgggcttaaaattcacctgggatagttgtgacaatacagattcctaggacccatccaaagaatcactttcaacaagtctggagtgggacatcaaaagctgaattttgataatcacccaaaatgattgaatatagattctctggggactgttttgggagacactgacctatgatagtactcaaagcatggtmtccagaccagcagggtcatctggaaac

SEQ ID NO: 481205 - DNA, 652 bp, Homo sapiens
tcttaaacatgagagttttattctctctctctgttatttctaatttaattttataacaaacaatgaatatgatctggtaagataagacttaaagtgtatttttttgctgctttgtggtttagcttgtgatcaatttttatagtctgtgttgtaaaaaaaagaatgtatatcgcccatttatgaagatcaacatcccatgttaattttgttgtttaaatcttccatagcacctttaaacttcatttattttttccttcttgatctattaatattcaaaagatatttattcaatctccctttaatyccatcatgttttactgctttctgaataacttctacagatctttcagtttactagttcattctttaccgtggtctaatagaaatttaaatgtgggaatgattagtacatccatcttacatgtgagaaaactaaacttcagagtaacttggctaagaaagtacatttggtatttaatggttgaaccagagtctaattatacagggcttcaaaatctattcagctttatccctaacacaataaagaacatttttctaaagaacaagaaagaattggattgatattctagcaatcacatagagacacctagctagaatgataatattggggattcagcttcatttgaaacca

SEQ ID NO: 481206 - DNA, 321 bp, Homo sapiens
tgacctctaagcaggaagactctcataaaactggttttyctcaccgctgcttgaagtagtagctgtctgagttaggatttgttcaagtaatggaatcttgactgtcttttatgttatctttagtacacaggctgaaggctttatctttatcagtgtcatgattctaacaacaaaatagctctcgctaacatatagtgacaggtaaatcatttaaaaacaattgtacaaaaagtttcttccagttgtgattatctttcttaatagtaattcctaaacctgtctattttaatgattcatgaaatcactctgtaatactaataa

SEQ ID NO: 481207 - DNA, 619 bp, Homo sapiens
tttaatttggctcttgttttactaagaattctcagtagtgctttcaaaacattctaaaaacacaaaaattaatcttattcctagatgtccataacttagttttccaaattgttatttgttaattagcatgaagcaaaataactattaacctaaaaatatgtctgattaattctgctgtcacttcaatataattagacaattgtggacacgttttctcctagggttcttacctgcatttacatttctgcagttagggtgaaggtgcatgtgtgcttgtaggtggaccatgaatataggaagtagggctggaaagagtggacagaggcattcaaccgagtgtctagaatgtggacatgccagcaaataattctccactctgatgtgtgcacttttcctgtgatttcttcaaagtggaaagcatctgaggttgaatttcctacagagaggtagactgacggggcgagcctggcccctgggctgcctgccagttccctaagctgtgacaccaaccacctcayggtgtccctcccctgggcctccattccctgttctgtagaataagggcatttgacaagctgattcctaaagtgtctctcaaatctatgattctactacttta

SEQ ID NO: 481208 - DNA, 528 bp, Homo sapiens
tgaaaggaacataattacagaggtgaaggatttgggttcaacgtggactttctgttattactatttaggatgatatatctgtgtatatgtatgatatatgcacacaaataactgtatataaaatgatatatataacacatatataactatatgcatgtatatctatataataattgtatatgtactacagttatatatttagttatatattattgtatataataatatatgacatctgtaactacatttagttatatatttagttatatatattatatataataatatatgacatatataactacatatatagttaaatatatagtatatatggttatatatgtgtcatatgtattgttatatacatatacatatttatgtgcatatatattcaataaaacatatacatacccctttactcttagaatcattatttttttwaaaaaactgctttatatactagattttgaatatttcttatcctcaaaaattatgctcaaatacaatttgcagcagaagctgaaaagt

SEQ ID NO: 481209 - DNA, 545 bp, Homo sapiens
aattgaagatacagagttcatgaatgttcagtttgctcagagtaccaggcaaagttaatgagagaataagaaagcctattctatagatatttcagtcttttggttgacagggatactgggaaagatggtaaattttaaagccaagaatttccatcccaaagtactgatttattgtaatgattaaatacccctagaaacctaaatgatctcaagaattaatgaatggcatgactagcatcaaaaacacaaaataaattagcaggattcaaaagacaatattcttattgctcagtaacctggaaaacagagttcttagaggcaatagccagagttcccaagcatagtctctgccccatgtgtcctaatactgaaattacctataaagtaatgttttacgtttcattgartaaaaatagaaataattcttatctgatatagacatagaatcagacctactatggaaaaaaattacagtttatcattaattgtatctcatcacatttaccatccacacttagagctctccaaagttcttcacatgtttt

SEQ ID NO: 481210 - DNA, 506 bp, Homo sapiens
taatcatgcaatgcagatctyttgagtacttaatacagtcttttctcagtatttgagggggattggttctagaaccactgcaggataccaaaatttctagatgctcaagacccttatataaaatggcatagtatttgcatgtaaccctcatacatcctcctgtatattttaaataatctctatattacttgtaatacctagtgcaatgtaaatgctatgtaaataattataatactatatttacattatttttattgtactgttattttgaactttttccttaatatttttaatcatggttggtagaattcatggatgtggaacccacagatacagaagattagctgtataggccaggcttttgatctggggttagacctttgaagcaggagaacaaaaattccttcctttataaagcttaaattttggtgggtggggagagtaacaccataaacaatcacgaggtcagatagtgataagtgcaatggagaaaaaaaaaaaagcag

SEQ ID NO: 481211 - DNA, 669 bp, Homo sapiens
tatctgcatatgtgctatatgtgtatttgtgctttatgtataataagtacwatattttatttaaccctaagaactaatttttgtccccttggaggtgatatcacctctactgagaatgcttggactagatcacatattgaacaattgatgtactaagcaacatacaagtatagtctaatttaactaataagaaaattctatgagatgagtactactagtatctccagttttcagtgagacaactgaagtgttttttttaaatctgtccaagattttatgattcctaaacggctgaggcaagacttgaactcagagagtgtgatactagttttccctctttatcaccatgtcagactcttccagattaaggatttgaaactcggctttgttgtgcttttccatggctatagactgaaatctatctttttaatttgactacagtgcatctcagcacctgtgtattgcctgtagttaaaatctatatgcttatatttttattactattttattacttgtattaaagataatactttagccaataagatacactattttctggtagcattctagtgcatgaggagaacatggaaacttaaaaacaactgatatgctgtagaattttatgaatttttttcttttgcttaaatagcagacatgttataaaaagtt

SEQ ID NO: 481212 - DNA, 669 bp, Homo sapiens
tatctgcatatgtgctatatgtgtatttgtgctttatgtataataagtactatattttatttaaccctaagaactaatttttgtccccttggaggtgatatcacctctactgagaatgcttggactagatcacatattgaacaattgatgtactaagcaacatacaagtatagtctaatttaactaataagaaaattctatgagatgagtactactagtatctccagttttcagtgagacaactgaagtgttttttttaaatctgtccaagattttatgattcctaaayggctgaggcaagacttgaactcagagagtgtgatactagttttccctctttatcaccatgtcagactcttccagattaaggatttgaaactcggctttgttgtgcttttccatggctatagactgaaatctatctttttaatttgactacagtgcatctcagcacctgtgtattgcctgtagttaaaatctatatgcttatatttttattactattttattacttgtattaaagataatactttagccaataagatacactattttctggtagcattctagtgcatgaggagaacatggaaacttaaaaacaactgatatgctgtagaattttatgaatttttttcttttgcttaaatagcagacatgttataaaaagtt

SEQ ID NO: 481213 - DNA, 339 bp, Homo sapiens
ctgaaatgctaaaaatgtatccaattttggcctttattattgcattgacagataaaaaatatttatattctgcttacttcactgggcaaatactcacaggttcctaacaataaaaattcaattgttcctctgtgtttaatgggggccaagaagaaattctcattccagatttgtcraggtacatctataaatgataacagtaagaagtgaaagcatttataagaaaggaaagtaatgggcgaacaaccccgctggttcacttccacacaagagcaaaataaaacctttgataacaactactaaggtaagcagtaagctgtatacagtgcctttatggca

SEQ ID NO: 481214 - DNA, 639 bp, Homo sapiens
aaagtaaatgtcttggaaaagttgtatagcttgttcaagatcatactgctagtaagtgatgaagatacaattttaatccaggtatttcaatgttaaaagggacagagatctcagagttatgccattttcaagcttctgttttactccaaaattagtgttttcagagactcaacacaacacaacgaggaagggttctgtgaggctgagagtttgtggtaaaaaggcatgcactgcatctccatcttctgcatttgagataaggaatgatacaaatctaaggggtcattttagcaaaawattaacaataagaatataaggaactgtgttcaatcaacactagttccaactgggaagtggggatgtgagtggctaagagttttgacaacagaaacctgcctttctaatgcacacctcatatcaggtttcaggaagagccaggctgcagcccaccaccagaacctgttgggtcagtaacccatacccttcacacatcaccaaatcactaattcatacagaaaactatttttttcttactttatttttggctgcagaaatgagtttctagtcatagaagttacaagaaactataagaaaaatgcctatcttgaatagctacagatttaacagatacagttcagg

SEQ ID NO: 481215 - DNA, 590 bp, Homo sapiens
ttaactgcaaacaggtatgagtgaactaaaaagtgttctaaaactggattgtggtgatgattgcacatctataaatgtattaaaactcattgaattatatacttayaatgggtgaaattcatagtagatgaattcatacctctataaaactggttttttgcagcaaaatatttattgctatgtttttattcaagtgtggtgaattattgctatgtttttatccaggtgtggtgtctcacgcctataatcccaacactttgggaggctgaggtgggaggatcgcttgagccaggaattcaagaccagcctgggcaacatagggagaccctgtctctacaaaaacttttttagaaattaaccaggcatggtggcacgtgcctttggtcccagttactcgggaggctgagatgggaggattgcttgaacccaggatatcgaggctatagtgagctatgattgtgccctgcactccagcctgggtaacagcacaagaccctgtctcaatataaaaaaagaaaagaatcattaattctgaaattagactgaatgatcattttttaatatttttcagacaagactacttttgctta

SEQ ID NO: 481216 - DNA, 590 bp, Homo sapiens
ttaactgcaaacaggtatgagtgaactaaaaagtgttctaaaactggattgtggtgatgattgcacatctataaatgtattaaaactcattgaattatatacttacaatgggtgaaattcatagtagatgaattcatacctctataaaactgkttttttgcagcaaaatatttattgctatgtttttattcaagtgtggtgaattattgctatgtttttatccaggtgtggtgtctcacgcctataatcccaacactttgggaggctgaggtgggaggatcgcttgagccaggaattcaagaccagcctgggcaacatagggagaccctgtctctacaaaaacttttttagaaattaaccaggcatggtggcacgtgcctttggtcccagttactcgggaggctgagatgggaggattgcttgaacccaggatatcgaggctatagtgagctatgattgtgccctgcactccagcctgggtaacagcacaagaccctgtctcaatataaaaaaagaaaagaatcattaattctgaaattagactgaatgatcattttttaatatttttcagacaagactacttttgctta

SEQ ID NO: 481217 - DNA, 634 bp, Homo sapiens
cttgggaggctgaggcaggagaatcactcgaacccaggaggcgaagggcgcagtgagctgagatcgcaccactgcactccagcctgggtgacagagcaagactgtgtcttaaaaaaaaaaaaaaaaaaaaaaagtgagaaagatgaaacaaaaaaactttttttaaattaaagaattatagaacctttctcagaattgaaggatgaatatctagaaaggtccaagaggggctgggcgcagtggcycatgcctctaatcccagcactttgggaggctgaggagggcggatcacctgaggtcaggagttcaagaccagcctgaaaccccgtctctactaaaaatacaaaaattagctgggcgtggtggcagatgcctgtaatcccagctactcgggaggctgaggcaggagaatcgcttgaaccccagaggtggaggttgcagtgagctgaggttgcaccactgcactctagcctgggtgagaagagtgagactccttcccccctgcccccacctaaaaaaagaaagaaatgtacaagagggaagaagaaaagaaaaagtaaatgccatcaagcatatcattataaaatatcagaagataagaataaagagaagatccaaaaagctttgggaaata

SEQ ID NO: 481218 - DNA, 519 bp, Homo sapiens
atcacaaacttagcaaactaaaacacttcatattataatatgttttcatgctcctatatagtcatagtcataattttgaatgactgcatgatattccactgagttgccattgtttatataacaattctgttggctatttaatgttttgttactttgcaaatggagacagtttttttcagatacggcttggtttctagacttggttctcccctcccttttcatatgataactatagcattcttaccaacgagattactgtaccatttattctgaatggtgcaaccctgacctgaagcaagagacatcatttaaacaactcttgtgttgcagccttagattccagactaaatccrtcttgctctcagactaaatccagactgctctcagtcccagtttggaaaactcagtctaccccagtgctctttgtcccctgtccttattactgggctcctaacttggtttctggccctgggactttaccagctgattattgtttaggtagaaggtcagagactgcat

SEQ ID NO: 481219 - DNA, 611 bp, Homo sapiens
tgataaagagaggtctgtgaattgggaggagctgggtttaatgcatgcagccaggggcccttgtcaatagctggcccatgtggcctggaggcacagcttctcattcattcttagcagcattgtatcacattatattttgataactcttgacttcatggcataccttttcatacattggcctgtagattatttcatttatttcttacagaaactttcacagaggaacacaaggcttagaggagctaatgcattttccaagaaaatagcagctttcaaattcaagggtcttttctttcacactacaactgtctctgagataaacccagattgacttctagttaccctcttcctcatcttacagaacaaaaaaacaaaacaaaacaaaaaaaacatgtattgacagtgaatctctggggttgaactatagtaatcataagtacmatggcaatcgtaactcaaataggttttaaaaatatttacaaagtattaagcactgtgcctggctcatagtaagtgctatgtgtttgttaaataaaaatgaattaaaaatgtttttcttgagtacaggaacaaaacgtctgttttagaactcaggatagattgatggatat

SEQ ID NO: 481220 - DNA, 540 bp, Homo sapiens
taaccattactacctgttatatcttttaagaggatgatgtttttcaagtaccatgagagatctaatagtaattactgaacagttaatgtctttgtccctttattttaatggcactatcaattttaaagatgaaagtttgaatgaaaactttaggaaactttagttgtaggtactcagccaaagtagaattactgtgcttaggagcttcaaagaaaataattcactgaaacttatgtatatatgcttttttttttttttttttccatgagacggaatctcgctctgtcrcccaggctggagtgcagtggcacaatctcagctcactgcaagctctgcctcccaggttccagcgattctcctgcctcagcttcctgagtagctgggactacaggcacctgccaccacacctggctaattttttgtatttgtagtagagacagggtttcaccatgttagccaggatggtctcgatcttctgaccttgtgattcacctgcctcagcctcccaaagtgctgggattacaggcattagcaccacgc

SEQ ID NO: 481221 - DNA, 573 bp, Homo sapiens
gctgcagtaagcattgggatggctgcacaccattctgtggaacggatatagagtcatttgttaaccagtgatactgacagagagcaagcagatcagtgaagacaggagcagggcccccgagccctgagaaaaagcagggaccttgccaggtgaggaaaaaaatggtatgaggtagggctacactacgctcccagaracgtctccatggacagtgagctctttagaggggaaaggagtaagcttttgaaccatttgaattatttagaagaaaaaaacacagtgcctttcttacacacttttcagaatttcctgtgttttcacctgccattagctggttactgtttgggcttcctttcatggtggtaaacacagtttgttttgtttagccatttccttccccctcaaataccaacacagatcaattcagtctttgcctgagtcatacatggttcatgtgtctctttccttccatctatctccccttaattcacactatttactgaactcctcctgtgcacccaagtctccagaaggagctggagaaggagcagggtggcaggggtgggaagggga

SEQ ID NO: 481222 - DNA, 549 bp, Homo sapiens
ctgggcaacatagcaagatcccatctgttaaaaaaaaaaattagctgggtgtggtgatgtgtgcctatagtcccagctactcaagaggttgaggtgggaggatcgcatgagcccaggaggccacagtgagccatgttcgtgccactgcactccagcctgggcaacagagcaagacagcatctctttttttgttgtaagacaaacaatcccatagcatttattgccatcttgtaataacataagggtaatcaaaacaatatgaataaatgttcatattggacaaaggacagctaaaaacaaactgtatccttctcaacaatttctcacttcattgatcatttctagctggagacactttgtagcagaggaatacctccttttagcatgatccgacccagttgttttcttgactttgttttagaatgaatctcttccgcatcatctaataacaaggttcgtrtactcattaaaaccaatgatacagccttctgtccgcatattcacttgctcatagagccacacctgaatctgcgatctattttgtaagta

SEQ ID NO: 481223 - DNA, 592 bp, Homo sapiens
ctcctgggttgttaagaacctttggcgatattgggctgggtagggtcagagaggaagataatttaaaaatagatggtgttctcccattcaggttaaatttccccctaactgaattttattattctgtcaaaacaaaacaaaatagttaaccaaatttttaatagtggttttctttgggaatgtgattgtaagaggcttatacttcggtttagttttgtttttttgagccaggctctatttttttgagccacctctctctgttgcctaggctggagtgaagtgatgtgatcacagctccctggagccttgaactcctgggctcaagtgatcctcctgccccagcctctcaagtgactgggactacaggtccatgccactatggctggccaataattaaatttttaattttttgtagagacagagtctagctatgttgcccaggctggcctcgaactcctgggctcaagtgatcctcctgcctcagcctcccaaaatgctgtgattgcaggyatgagccactgtgcctggcccatattttatgtacctttacattgttagacttttttgagaggagttttttttataggccctg

SEQ ID NO: 481224 - DNA, 482 bp, Homo sapiens
tggggcaaggactgggcagggtggccaggagggggagagggggcraaagttcattcctgtgaggacagcccgctccttggcatgtcacaacagaggaactgaattctgcctccagcccggcctgtttcctgcaggggcttgtttgattccccggattaagccctggtcccttggtgcccaggagcactgggtggggggaagggaggacagcagtgctggcttcccgagcacccctggcagatttgggccacagtgccttcccgccgttctagcctggctcctgcccacccagaggcctgtcccctagcctatgtgtctgaccccgtgccaagaccacatcaactgatgggcaggcccgggcccaggtatttgcggtttccccggtcaacaatgtgggtctttactgagcaggcaagagctggctggctcttgccctcggggagctcacggctccttgtgtataacaaatctgtggcctggac

SEQ ID NO: 481225 - DNA, 482 bp, Homo sapiens
tggggcaaggactgggcagggtggccaggagggggagagggggcgaaagttcattcctgtgaggacagcccgctccttggcatgtcacaacagaggaactgaattctgcctccagcccggcctgtttcctgcaggggcttgtttgattccccggattaagccctggtcccttggtgcccaggagcactgggtggggggaagggaggacagcagtgctggcttcccgagcacccctggcagatttgggccacagtgccttcccgccgttctagcctggctcctgcccrcccagaggcctgtcccctagcctatgtgtctgaccccgtgccaagaccacatcaactgatgggcaggcccgggcccaggtatttgcggtttccccggtcaacaatgtgggtctttactgagcaggcaagagctggctggctcttgccctcggggagctcacggctccttgtgtataacaaatctgtggcctggac

SEQ ID NO: 481226 - DNA, 630 bp, Homo sapiens
ttactggtagtcacattgtacattgtcctaggtctgggatccagagaggtcagactttcgccctgcctgcaaggagctctcagtccggtggggcagccagtacatacgaattcttacatgattaacgcgatcaattcttatgtggcaaatatgtgataaatgcagcaaaaagaatgtataccaagtgctatggaagagcaactcatttactygacttagtgagcatctactataatgctaggcattgttgtaggcaccgggggtatcacagtgaccatatgagataaaaacccctgacccagagcacacacttgagggggtgagaatattcagcaactagcttagtttgatcaaaaccataggcttcaaagaagaggtgagttaaagctggaaattgaaacctatgcatttatatgtgtgtgtgcagggaacactaggcaatgggaacagcttgtgtaaaagcctgaagatataaaaagaccaaagatatcagagcaaaaatgctaagggaaacctaagaattgggagacacagccttgaatgccatgctaaccctcccaaggtcactgtctcatataatggggatgtagctgaaagctcacagggcattggccagagccaccctcacag

SEQ ID NO: 481227 - DNA, 630 bp, Homo sapiens
ttactggtagtcacattgtacattgtcctaggtctgggatccagagaggtcagactttcgccctgcctgcaaggagctctcagtccggtggggcagccagtacatacgaattcttacatgattaacgcgatcaattcttatgtggcaaatatgtgataaatgcagcaaaaagaatgtataccaagtgctatggaagagcaactcatttacttgacttagtgagcatctactataatgctaggcattgttgtaggcaccgggggtatcacagtgaccatatgagataaaaacccctgacccagagcacacacttgagggggtgagaatattcagcaactagcttagtttgatcaaaaccataggcttcaaagaagaggtgasttaaagctggaaattgaaacctatgcatttatatgtgtgtgtgcagggaacactaggcaatgggaacagcttgtgtaaaagcctgaagatataaaaagaccaaagatatcagagcaaaaatgctaagggaaacctaagaattgggagacacagccttgaatgccatgctaaccctcccaaggtcactgtctcatataatggggatgtagctgaaagctcacagggcattggccagagccaccctcacag

SEQ ID NO: 481228 - DNA, 544 bp, Homo sapiens
agcactccaggtgcagctatggcactgatgctgggaggggaggccaaatgcctgacttcaaggtgctgggagctaagtattcctgtctcggcacgtaggagggaggaaaaagccagagaagacttgaggactgagaatacaggctaaggccaggcccacgcctggaagagaagaactttctctttgtctccttgcccactgcctgtccctgagcctgcgggactgggagggcagaggacacttctggggtttggcccagagaatttatttcttcttttcttgttttccgctacaccacgtggcttcagaccatgacatttctgttcaatgccgtcagtgccttggtttgaggagaatgtctgtgtacccagcttccatggccaagaagaaatggtgsccggagcttgctggcatctgctcttgccctgtctcccttcctctctctcctgcgtgaccagcagccaagggacagttccttctggccaggcagtgggatggagctaagggggaggagatgcaggagcaaggcccagacccccgtcct

SEQ ID NO: 481229 - DNA, 453 bp, Homo sapiens
gggagtgggactcagaacttctgctgaaagtgtgatcctcatggcccccagcccacccttaagcctcttgtcactagaaacctctctttggggwtgatgctgagccaccctctaaccatacgtagggccgaagtatatagtactggctgaaaagcccctttttactaattttttttagagacaagttcttgctctgtcacgcaggctgcagtgtgcagtggcacgatcatagctcactgaggcctagaactcctgagatcaagggatcttacagcctcagcctcccaagtagctgggactacagatgcacaccaccacacctggctaatttttttccccattttctgtagagatgggggtcttgctatgttgcccaggctggtcttgaactcctggcctaaagcaatcctcccgcctcagcctcccaaggcactgggattgcaggcatgagcc

SEQ ID NO: 481230 - DNA, 499 bp, Homo sapiens
gcagatggggtgcggcgtttgggctgggtgatggcatttgtaacagtgtgaggaccccccactctcccgggactaacagtgtaaataagaattggggcatttacgccaatgaagagaacagaatttccttgtgctgacaatctagaagatccgcttgtggacagttgaaatgctaattataagctaactctgttttcaacctttgtgaacccggtttgggctattttgtatcaataagactgctttcagaaaaaacaaatttactaattaactccctttattttaaatacatgagactttcctatggtgtctgttgtttttttttttttaaagaaacrtgtgcgctatgaggtgtttccacagctctttttggggtatgtaatagtcctcctgatattttaattgatatttgaaccaagtaaggacccgccaatagttgaaagtccccggtttcggggatgcctttccaagcaaccagggattcctgtctgacatcccg

SEQ ID NO: 481231 - DNA, 499 bp, Homo sapiens
gcagatggggtgcggcgtttgggctgggtgatggcatttgtaacagtgtgaggaccccccactctcccgggactaacagtgtaaataagaattggggcatttacgccaatgaagagaacagaatttccttgtgctgacaatctagaagatccgcttgtggacagttgaaatgctaattataagctaactctgttttcaacctttgtgaacccggtttgggctattttgtatcaataagactgctttcagaaaaaacaaatttactaattaactccctttattttaaatacatgagactttcctatggtgtctgttgtttttttttttttaaagaaacgtgtgcrctatgaggtgtttccacagctctttttggggtatgtaatagtcctcctgatattttaattgatatttgaaccaagtaaggacccgccaatagttgaaagtccccggtttcggggatgcctttccaagcaaccagggattcctgtctgacatcccg

SEQ ID NO: 481232 - DNA, 540 bp, Homo sapiens
ataaaataaaatactgtaccgcagattttccaatggattgctggatttcatttaaaaattctagctgctgatctgcatcctgtaattgcccttctatcaactgacattggataaatcctaaaatcaaacagcagaaagacagtcaaagtccacaccaattcagggatgcactcttcaagctaacataacaacattaataaaacaccctttcccccatcacaatacttaacgttttagaytaaaaacaacagaaagaaagaaaatgaagagtgaaagaaaataaaatgggtagccttggaccttataaaatcatttactgaagaattcataatttataggaaccacgttataaaaatctattctctcaagatattatttgtgaattaaaaattttaaagacatgactttttcgagtgtgggcagtagagaacaatttaagtttagaaaaccacaaaatccatgtgttcttctctaatggcaagttaaaagcaattgctacttgtatctatattataaatatttatgaaaacagttgtcata

SEQ ID NO: 481233 - DNA, 632 bp, Homo sapiens
gggtagtgggcctgaacacaagatgttcaacaggcttactgtccacacaaagtgacaggaaaagtgatgtggagacattaacaaaagtcaagacatgaatcctctccccttcttttttatccctccaaattactgcttatctagcagacttgttcccaacatataatttctttttgctgagtcaaaaaaaaattaaggcatttagatagcatcaatggggattgaagaaagggtcctacttaaatatttccatccatcagtaagttctaatgactccttcaattgctcatccctcaaaatgtatgtccgatcatgttatttctctgttcaaaactttgtattggctgcctgtctctctaatwgaaggtagaagccaaaggccttacagaacaggccaggcccaccactcctcctcacccccatcccacctttcttcctcaggccttcacttctgttctctttactcaacccactttggcctccttgctagccctgaatacaccttagggtacctgaactcatcatctcctctatttgaaatactttccccagatgcctgcagggctttaaccctcacctccataaatgtgtttgctcaaatgtcactttctccgaccacttcatgtaaaact

SEQ ID NO: 481234 - DNA, 442 bp, Homo sapiens
ttagttttctcatttttatagcatgttacaagagaacaacatccattaagaggaatgtgttaaatattcttctaattgttgatagtagaagtgtggcmtttcactatcagtaattgtgataattcttaccagtcattgatgactaatctgccttcctctgtgtcgctctcctatgtgctctgtcttctcaccatactccaagttcattaactccctgtgtgtcctaccactggccttaatccatgcagtttcctctgtctgagagtgtccttgattcccaccctagcctagtttatgcctcattcttcagatttcagacatctcttgatacccttcaggttctttatggtaactcacttggcctggatctttctttcataacatttatctcagttttgaaattatttactcatgcaattattttaaaatgtactttttctcc

SEQ ID NO: 481235 - DNA, 617 bp, Homo sapiens
attccctactccttgatcatccagagttctctcaagttagagagcagttaccaccttttcccttcccccacctttgtgcataatatcagggatgggtatcaagggaactggccagactcaaagctaattaactcttcgggtaacaactgtggaaacacaaattgaagagttgttttattattgttgttgttttggggatagggtctcactatgttgcccaagcaggtctcgaactcctgggctcaagggatcctccctcctcagctttcccagtagctgagactacagacaggtaccattgtgctgggctttaatmaaaaagttttgatcctgtagttctactctgacccattcattgtactttagagaaccttccagaagaaagaattgcaattatttaaaaatgttatatacacaagaagttcatttgcaatgttgtttaaactaatggaaaactataagtagcctgtatgtctaatagtaagggaactgatcagtaaatcatcagtatttatttactgagctctttatgattatgaatacagagactaggggacaacacagaacatgataatgataaatgatctaatattttatgaaacaagtttatttaaact

SEQ ID NO: 481236 - DNA, 452 bp, Homo sapiens
cccggtatctatcaatgctgcagataytgggaatacatttagagatcatcttctgcagaggtaggtccaccttcttgaagtacagacagacctgcatggtgcactacatgtgaaacttaaaagataaaaacaattcaatttctcaatagacagaaacaagtttatgctagacaaccagaaggtgatccagtaactcctatcccatgtgctctttttccatgggatgtcctccatcaagagataaaagatatttccccttcccttaaaactgggccaccctgtgatgggctttggttgttagaatgctttgtaccttttgagactgggcctgaagagatttgcagcttccacttgctctttcttggagccctgaatcaccatggacagagatctggctaccttgggagcggtttagtagggtggctcagatagtttccagttgtttcaccact

SEQ ID NO: 481237 - DNA, 598 bp, Homo sapiens
gcaattatgggaaattatgtagggcaggggagagcagggtaacacttgtaaatttaagggcacagtaaggagatgtgtgcagaggtctgagagtaatgcctgtgactgatctagtgtcacatgtgctcagagaagaaggtacgttgccttcagtgggttgaagggtaaatgggagattaataagtgaagtatttgagtttcaaggactatctatacctttcagtatgttagaatcaagctggagggaacctggagtcaggagaggcattttttagggtggaaaagatgtaccttgagttcacaaactaaggggaaggcccctggaagaagggaggagggggattaaagacaaagtccagaagaagtgggtggctggacatagtgggaaggcacactggaagggctgaaactggaggaaaagtgaggaagggtgcagaaaagtatcttaagtttgtaggacattgagtgatatcatgtctaatatcctcagttttcttratgaacattattccgtacgacaatgttatttactaagagtggggaaaagggtggagaataatcattcaggaaagtaggatgtacccaaggataaatagaa

SEQ ID NO: 481238 - DNA, 561 bp, Homo sapiens
atctgaactactgcataaaagtagcatcttgttttttcctcagaagttaaatctctaatatgtatatggttctttcatattacttttaggctctttggttgttgccactacttttgttacactgtggataatcaaattgcctctaggcatcatttttaaaaaggtatgttatrctgatgcggtggctcacgcttgtgatcccagcactttgggaggctgaggcaggaggattctttcagcccaggagtctgagactggcctgggcaatgtagcaagaccctatctccaaaaaaaaatcatttttttttaattagctgggcatggtggcatgtgcctgtagtgctagctatttgggaggctgagatggaaggatccctgaagcccaggagttcaaggttacagtgaggttactgattgcgccactgcactccagcctgggagacagagggagacccaaccctgtctcaaaaaaaaaaaaaaaaggaaaataaaaaataaagtaaaatttttaaaggtatgctttataaatttaaaaatgaaaaggactatgaaatgttttag

SEQ ID NO: 481239 - DNA, 476 bp, Homo sapiens
tgggaggctgagatggaaggatccctgaagcccaggagttcaaggttacagtgaggttactgattgcgccactgcactccagcctgggagacagagggagacccaaccctgtytcaaaaaaaaaaaaaaaaggaaaataaaaaataaagtaaaatttttaaaggtatgctttataaatttaaaaatgaaaaggactatgaaatgttttagtaggaaaagatttagaaaatgccttcctcacaattactaatatttactttagtttcctttaggtcagatcaaactctgggaggctaaagtggaagaggttgacagatcttgtgattcagatgaagattatgaagccagtggacgaagtctgttatccacacattatactatcgttatccatcccaaagaccaaggtccaacttacctcctaattggatccaagcatgaaaaggtattcaaagacttattggttgatttagaatgat

SEQ ID NO: 481240 - DNA, 610 bp, Homo sapiens
gaggcaaagtggcagaggggatccagttagtgcggcaataggcattgtccagcacaccttccatgcttaagggagaatagggtccccagatgtgggaactgataaggcaaagaatggcagaaggggtccagcatctgcggcagtgagggcactggggaagtgagaggcaggaggctgtgctcagagagggtgtcctcagactctgaaatcctgggagcraaaccattttgagtaatatttaagtccaagacatggtgagtgatgcagattaggtagctggagccattggaattgagattcgctaattaggaaccactgatgtggatggctcatcaagaaggttaaagagcttgaggaaaatgataggggagaggagcaaaaagaatgactctggtccagatgctataaaatcatcaaaggcaagaggatgttttaaacatcacagaagacaacaatgaggaacggcattgatagcataagcaaacttcatgatttgtacagaggaaaagtagatggccttgaagagtaagtggtaaggaggggcgagtataagacatgccaacattttttgcttactctacaaatgggataaagagcagccatgcctaat

SEQ ID NO: 481241 - DNA, 410 bp, Homo sapiens
cacgtgcctgtaatttcagctactcaggaggctgaggcaggagaatcacctgaacctgggaggcggaggctgcagtgagccaaaatcatgccactgcactccagcctaggtgacagaacaagactccgttcaaaaaataaaaaagacaaagcacaaaccaacctaatgtggacaatgtcatgtcaatacatccagatctatggttcctcccgctgcttctccttctgtctgtgcctttcactgatccatttctctctctccgccacctgcacaaagtctgttggttgttcccaaggctagaggcgcactctctttgaaggccccttttgttttctctctcagcctatcacacactacttcctgtcacggtcttcctttgcwgtaatagattatccaccccttgaaggcag

SEQ ID NO: 481242 - DNA, 424 bp, Homo sapiens
tgaagaaaaaaaaaactcagaaatggggtagagagggtggcccaagagactgtaagattttatataaatatacacacacatatatatatacacatatagagaaacacatactcaatgtttatrtatatgagcatgttagagctattgtttagtactaatattcatatatatacatagatatataaacaatttactattgttggattttctgatttatgagcatgtattactttgactttttaagttgctacaaaaccagttagcactgacaatggaaaccatttgagaaatgccttttgggctggcctggatcagttctatgtttctagattcaatttgccaaatgaagcaagttgcctttatggagcggtttgtcagacatgcgtctcgacagtaacacttgttcccacatttcagaactaac

SEQ ID NO: 481243 - DNA, 424 bp, Homo sapiens
tgaagaaaaaaaaaactcagaaatggggtagagagggtggcccaagagactgtaagattttatataaatatacacacacatatatatatacacatatagagaaacacatactcaatgtttatatatatgagcatgttagagctattgtttagtactaatattcatatatatacatagatatataaacaatttactattgttggattttctgatttatgagcatgtattactttgactttttaagttgctacaaaaccagttagcactgacaatggaaaccatttgagaaatgccttttgggctggcctggatcagttctatgtttctagattcaatttgccaaatgaagcaagttgcctttatggagcggtttgtcagacatgygtctcgacagtaacacttgttcccacatttcagaactaac

SEQ ID NO: 481244 - DNA, 424 bp, Homo sapiens
tgaagaaaaaaaaaactcagaaatggggtagagagggtggcccaagagactgtaagattttatataaatatacacacacatatatatatacacatatagagaaacacatactcaatgtttatatatatgagcatgttagagctattgtttagtactaatattcatatatatacatagatatataaacaatttactattgttggattttctgatttatgagcatgtattactttgactttttaagttgctacaaaaccagttagcactgacaatggaaaccatttgagaaatgccttttgggctggcctggatcagttctatgtttctagattcaatttgccaaatgaagcaagttgcctttatggagcggtttgtcagacatgcgtctcgacagyaacacttgttcccacatttcagaactaac

SEQ ID NO: 481245 - DNA, 541 bp, Homo sapiens
caaaagtaacaaatctgcatatgcactatctgtgtctggaaaaaactgaaattataaaaaccaagagaatatgtttctaatgaatgtagactttatttgatggactggattagaatataatatttttttaaggggaaaggcattgggggatgcacaatgtctacaggtttctaaacctctctggtttctcacctaattcatagtctcttatgtcattttcatagttttcatattctgcctttccacctcttctttttaacaagtaaaattcctcatagcatacaaaaaaacaattttataaaaaacccatattatagatcagggacctgtggattatatgctattagaactatacaaaatgtctctatatagttttctgtatctttggaatatctttgggtgaagctgcagaccttcttggtgagtgttacagytctgcgcagagccaaacagtgagcagcagcaagactgcaaagagcaaaagaacaaagcctccacactgtggaaagggaccctagcacgttgctgttgctggctctgg

SEQ ID NO: 481246 - DNA, 604 bp, Homo sapiens
gtaaagttgaaacaaatgggtcaatgcagtagcccataaaatattttaaaaacacataaaagaaatatcactaaaatttaaacataaaaaaaatacaaaaaaaccctgagctataggaagggaagtatcctctaaatgcccaagttgaaggtagtcctcttagaaaggsacagtaagaagcagtgtttgatgggaacgtgatttttcaagtatttgaattttcaaactcaccacattaactgagtaaaatgaaaaaaatatataaacttcctctgaggcagaaaaaacatttggcattttcaagatagaattataataaaaatatctcgccccaatagaatacaaagaagcatccttaagcaaatagaaggcatctacggaaatatcacactgaagtgtgaactaataaattattcatttaagatccagaagaagacaaagtgtcctctttcactattgttctctctactgtatgggaggaattaaccagtgagacaaatcaaataaataagtaaaacatacacagttaagaaatgaaaaatacacttctaaatttttaaacaactccattacctacacataaacttctagtgactgtaaaaat

SEQ ID NO: 481247 - DNA, 604 bp, Homo sapiens
gtaaagttgaaacaaatgggtcaatgcagtagcccataaaatattttaaaaacacataaaagaaatatcactaaaatttaaacataaaaaaaatacaaaaaaaccctgagctataggaagggaagtatcctctaaatgcccaagttgaaggtagtcctcttagaaagggacagtaagaagcagtgtttgatgggaacgtgatttttcaagtatttgaattttcaaactcaccacattaactgagtaaaatgaaaaaaatatataaacttcctctgaggcagaaaaaacatttggcattttcaagatagaattataataaaaatatctcgccccaatagaatacaaagaagcatccttaagcaaatagaaggcatctacggaaatatcacactgaagtktgaactaataaattattcatttaagatccagaagaagacaaagtgtcctctttcactattgttctctctactgtatgggaggaattaaccagtgagacaaatcaaataaataagtaaaacatacacagttaagaaatgaaaaatacacttctaaatttttaaacaactccattacctacacataaacttctagtgactgtaaaaat

SEQ ID NO: 481248 - DNA, 453 bp, Homo sapiens
tcctcttagaaagggacagtaagaagcagtgtttgatgggaacgtgatttttcaagtatttgaattttcaaactcaccacattaactgagtaaaatgaaaaaaatatataaacttcctctgaggcagaaaaaacatttggcattttcaagatagaattataataaaaatatctcgccccaatagaatacaaagaagcatccttaagcaaatagaaggcatctacggaaatatcacactgaagtgtgaactaataaattattcatttaagatccagaagaagacaaagtgtcctctttcactattgttctctctactgtatgggaggaattaaccagtgagacaaatcaaataaataagtaaaacatacacagttaagaaatgaaaaatacamttctaaatttttaaacaactccattacctacacataaacttctagtgactgtaaaaatcag

SEQ ID NO: 481249 - DNA, 303 bp, Homo sapiens
tatatctgatttctgagctctgggcgtggaggtctgtctgcagaggcccgggcctgggcacaaagggagaggggcctccattgtcccgcaggggccaaaatgcagaccgtgcatccccggtgacctcggggaccgttctctgatcatcaggattttcttggactctggggtccttgtcctgctcaggcatccctgccctgctctccttgagggccctcaacactatcttccctggacacaagtctggggacagccgggtgttgwggaccccaaaggggtgactacctgctcctgggccccaca

SEQ ID NO: 481250 - DNA, 529 bp, Homo sapiens
ggccaggttggtcttgaactcctgaccttgtggtctgcctgcctcggcctcccaaagtgctgggattacaggcgtgagccaccatgcctggcctaagtgtgtgtgtgtgtgtgtgtatttttttttttttttttttttttgagatggagttttgctcttgttgaacaggctggagtgcaatgtcgcgatctcagctcaccacaacctccgcctcccaggttcaaacaattctcctgcctcggcctcccgagtagctgggattacaggcatgcgccaccacacctggctaatttttttttgtatttttagtagagatggggtttctccaygttggtcaggctggtctcgaactcctgacctcaggtgatccatccacctcggcctcccaaagtgctgggattagaggcgtgagccactgcgcccggcctataatttttgatagatgattttggattattttccagagataaaattttaaatgtttccattatatcactgatttatttctgcaaattgaataaattcttaa

SEQ ID NO: 481251 - DNA, 529 bp, Homo sapiens
ggccaggttggtcttgaactcctgaccttgtggtctgcctgcctcggcctcccaaagtgctgggattacaggcgtgagccaccatgcctggcctaagtgtgtgtgtgtgtgtgtgtatttttttttttttttttttttttgagatggagttttgctcttgttgaacaggctggagtgcaatgtcgcgatctcagctcaccacaacctccgcctcccaggttcaaacaattctcctgcctcggcctcccgagtagctgggattacaggcatgcgccaccacacctggctaatttttttttgtatttttagtagagatggggtttctccacgttggtcaggctggtctcgaactcctgacctcaggtgatccatccacctcggcctcccaaagtgctgggattagaggcgtgagccactgcgcccggcctataatttttgatagatgattttgrattattttccagagataaaattttaaatgtttccattatatcactgatttatttctgcaaattgaataaattcttaa

SEQ ID NO: 481252 - DNA, 501 bp, Homo sapiens
cattctttgatgcatgttccctgtcttgggcagcttggaatactgtaagaaaataccatagaccgggtgacttaaacaactgacatttatttctcagagttctgaaagttgggaagtccaagattaaggtgctggtatatttggttcrtggtgagggcccactccctctctggttagtagatggcctccttctctctgtgttcacatggcctttcctggatacatgtttacggagagagaaagagaagggtggttgggtgggaggtggtctagtatctccaccttttcttataagaacactaacattatcatgagaacaccacacttaggacattatctcaacctaggttcctcccaaaagctccatctccagatactatcacactgccaattaatagatcattgaaaataatctattaatatttgaacaatgccaatcatcttcaatagattaattttagggagacacaaatattcagttcataacagttcctttccttg

SEQ ID NO: 481253 - DNA, 602 bp, Homo sapiens
agtatttttgttaaatgtactaaatgcattttttacctaaaatattttcaacttatgagtatatccagatccatcataacacatcttggcctgtggttatcaggatataactcattataagtcgaggtagatttgtattatatcccatgtacacacacacacacacacacacacacacacacacacacacacacacacacacagacttaatctgtttacagaaataaaaggaataaaataccgtttctwttatacaccaaaactagccatcttgacagatacttcactctgaaaaataacgttttatagctactttacagattagtataataatttggtgtttctgtttcagagattcgatttcacatttcaataagtaggccgctccctctgctaagcctgggaatgtaattcttttgaaaaactatctgtgctgtaaaattacatgtcatattgggaaaaggacaatcgcaaacagtagtcacacataaaatcaagcaacacagacatccttttcacatacagtgaagacccttgtcaattttgagattacacaggaaaacagaatgggggacaagtgtctctgacacatagaaaatccc

SEQ ID NO: 481254 - DNA, 602 bp, Homo sapiens
agtatttttgttaaatgtactaaatgcattttttacctaaaatattttcaacttatgagtatatccagatccatcataacacatcttggcctgtggttatcaggatataactcattataagtcgaggtagatttgtattatatcccatgtacacacacacacacacacacacacacacacacacacacacacacacacacacagacttaatctgtttacagaaataaaaggaataaaataccgtttctattatacaccaaaactagccatcttgacagatacttcactctgaaaaataacgttttatagctactttacagattagtrtaataatttggtgtttctgtttcagagattcgatttcacatttcaataagtaggccgctccctctgctaagcctgggaatgtaattcttttgaaaaactatctgtgctgtaaaattacatgtcatattgggaaaaggacaatcgcaaacagtagtcacacataaaatcaagcaacacagacatccttttcacatacagtgaagacccttgtcaattttgagattacacaggaaaacagaatgggggacaagtgtctctgacacatagaaaatccc

SEQ ID NO: 481255 - DNA, 598 bp, Homo sapiens
tgcggggtgagtgggcagaacagagggaggtttcctgcagggtctgagaaaccactgcaggtcactaaacacgcagtgatgggggaaagccacgaggcagcagggattcctgttgaatccattaaatcccattcccctctcaatgtcctcctctcagatgcaagcctgtctggtgctgacgctgtcatctgtatgcccctactgatcctgatgcttcccaccaagtgtaaaagtaaatacaggggatgatgtagtgcttgtttgaaggagagcacctaacatttactcagtgcctgttatgtaccaaacactgtaggagggcctttgccttttactgcttctcacatccaccctgtgaaggtggaactgtccatttcacaatgaaaaagaaagctgaccgcaacacctgtaggctgcagygtccatgggcaacatttattgagtgttgcgatgcgccaatcacggtgcaaagcatttcacacacatcagggcattcaatccctgcagtggggctctgagaatgtggcatcttcattatttccatttggcaggtgagagaactgtggtgcagggaggttatgtggatgggactgtaagt

SEQ ID NO: 481256 - DNA, 505 bp, Homo sapiens
agcagggattcctgttgaatccattaaatcccattcccctctcaatgtcctcctctcagatgcaagcctgtctggtgctgacgctgtcatctgtatgcccctactgatcctgatgcttcccaccaagtgtaaaagtaaatacaggggatgatgtagtgcttgtttgaaggagagcacctaacatttactcagtgcctgttatgtaccaaacactgtaggagggcctttgccttttactgcttctcacatccaccctgtgaaggtggaactgtccatttcacaatgaaaaagaaagctgaccgcaacacctgtaggctgcagtgtccatgggcaacatttattgagtgttgcgatgmgccaatcacggtgcaaagcatttcacacacatcagggcattcaatccctgcagtggggctctgagaatgtggcatcttcattatttccatttggcaggtgagagaactgtggtgcagggaggttatgtggatgggactgtaagtgctac

SEQ ID NO: 481257 - DNA, 598 bp, Homo sapiens
tgcggggtgagtgggcagaacagagggaggtttcctgcagggtctgagaaaccactgcaggtcactaaacacgcagtgatgggggaaagccacgaggcagcagggattcctgttgaatccattaaatcccattcccctctcaatgtcctcctctcagatgcaagcctgtctggtgctgacgctgtcatctgtatgcccctactgatcctgatgcttcccaccaagtgtaaaagtaaatacaggggatgatgtagtgcttgtttgaaggagagcacctaacatttactcagtgcctgttatgtaccaaacactgtaggagggcctttgccttttactgcttctcacatccaccctgtgaaggtggaactgtccatttcacaatgaaaaagaaagctgaccgcaacacctgtaggctgcagtgtccatgggcaacatttattgagtgttgcgatgcgccaatcacggtgcaaagcatttcacacacatcagggcattcaatccctgcagtgggsctctgagaatgtggcatcttcattatttccatttggcaggtgagagaactgtggtgcagggaggttatgtggatgggactgtaagt

SEQ ID NO: 481258 - DNA, 526 bp, Homo sapiens
attattccagtatatccattatagcaaatactcttaagaagcaaggcttgaattcagaaataaattgcactcacagatcatatctgcgaatgtgcatcattagtgtttaactggcaaaactagatacaaggaagatagatgatcccattggaaaaagccaaatcggattttgaagagactttgacttgccccctttcactttttcttcctggcaaaggaaaagcaaaaactaaatggcttcgcatatggtttttgtgcatttgcaacaagtcaggagaggcacattggtcttcggctggtcagctctgtgggccgtttatctgttattgacatcacagagaaagcctgggatggaaacaactcctcatgtttgcgtcaagtactgttaatatttgtttgcagccctccttttcttcttagaactgaaaaccagccatctatttccctcagactagaatctattatttatgaattatttctctattcatcgctttgctctgaaaygcggtactgccaaacccttcca

SEQ ID NO: 481259 - DNA, 592 bp, Homo sapiens
cttgaactcagtctccctgaggctggaccaggcactctttgggccacactgtcgtataggaagtagtcagggtgttctgttctttcctgcattcccagattcagggtgggtgcagcgtttggatgcactggtaatattttcatgctgtttctgctaaaggtcaaattgacaatgctgctctggccatttctggagtctctggtgagttatttatgctttcattagcatgtcwatgtacacagcacacataccatttacacacgcagagatgagatctatgcatttgaagaatgtttatggccatagcctctctgttattttacaaaaaactccaggaaatatggtgtttttctcagaatgccaatataaaagttgatataaagattggtgatgtgtaagctttgacattacataaatatatgtaggcgttgtaaaagttaacaaccgttttatttataattatactgcagattgatatttttatatccatattgtcgatggtaacctttctatcttcacttcagtctgggcccaagaatgtttatattagacttttatgtctgtgtttccttctgtaacatcagggcacatg

SEQ ID NO: 481260 - DNA, 602 bp, Homo sapiens
caccttctcccttccctctttcctcagccctgggcagaagcatggtactcacctgcaaggggttttgagtgtttgggatgagacttaacacttgagtccatgagaygaacatgcaagacagggtgtttcaggaagaggaacagcaaaggctaaagtgaggagctgtggaagggcatggcaagtttgaggatggataactaagcaagtgatgtggttgacatgtcataaaacatgggctggagatgagcctgggaagctatatatggagctagattttaaagagcattgagagctctgccaaggagtcttactcaatcccgtaggctatggcgttcctgatgggatgggagatgggggtgatactacatcatcagtgccttagagtcatcattctttgacagcttctaacaaggaacagttctacggctctacagggaagctcttgtggaggaattttaaccccctgatagccaagggagagaaacatattggagggagaggctgagggcttcccaggaccccatcaacttaaattaccaaactgcttatagctaagactccattgcttggtaaccaactgaccaccatggcctcagaacctg

SEQ ID NO: 481261 - DNA, 656 bp, Homo sapiens
gtgggaaaggagaaaagggatggagcatgttccccacatcagtgcttaatggtttgcattgattatttcagttaattctaaaaataatcctatatggtatgtgccatttaatagactgggaaactgatgttcatgaagtttgggtaattgaccaatatcttttagctggtgattgacatttgaatccacttcagaggttgtataacacttccttgcaccagggaaagagatccagtgttggggcatttagcttcctttcctctcccagagaggcctccttccagagacttacaaaggagtggggttcctcacctccccaggcactccttccctgcatagcatcaagaggtgtccctgtgcagataagagtctggcataggggtcactttgtgtctcacttctgtctctttctagctgtacaacactgatagagttacttcacttctcttggtctcaatttccttatcactaaagggaactgcaggggtagatggtaatascccataggattatattgaggtttagagcaaagagtgtgtgcagcataacttgtactgttcctagcattgagtatataccaatgaatggaagtagtcattgccaggcaattcttcggcacatcaggtttagtttgatccatatctaggaacacctga

SEQ ID NO: 481262 - DNA, 656 bp, Homo sapiens
gtgggaaaggagaaaagggatggagcatgttccccacatcagtgcttaatggtttgcattgattatttcagttaattctaaaaataatcctatatggtatgtgccatttaatagactgggaaactgatgttcatgaagtttgggtaattgaccaatatcttttagctggtgattgacatttgaatccacttcagaggttgtataacacttccttgcaccagggaaagagatccagtgttggggcatttagcttcctttcctctcccagagaggcctccttccagagacttacaaaggagtggggttcctcacctccccaggcactccttccctgcatagcatcaagaggtgtccctgtgcagataagagtctggcataggggtcactttgtgtctcacttctgtctctttctagctgtacaacactgatagagttacttcacttctcttggtctcaatttccttatcactaaagggaactgcaggggtagatggtaataccccataggattatrttgaggtttagagcaaagagtgtgtgcagcataacttgtactgttcctagcattgagtatataccaatgaatggaagtagtcattgccaggcaattcttcggcacatcaggtttagtttgatccatatctaggaacacctga

SEQ ID NO: 481263 - DNA, 387 bp, Homo sapiens
aaaaagacttgtggctggtgattgttcttcctgggaccagttagttccttgcttttgatttccacagwttaaatcttaactatttgttattgcaaaattctatgtcttatttttccttataaagctagcttgagttcatgtctataatttgcaaacaataaaaaattctccagtaagccctttgctgtgatgtttcccctttttactgtagtcctcccttgatatccatggggagggggttggttccaggaccccctaaagataccagaaatctgtgggtgcttgagtcccgtgtgtaaaatggtataggcatttgcttataacctacacacatcctcctatatgctttaaattatctctagattacttatgatacctaataccatg

SEQ ID NO: 481264 - DNA, 578 bp, Homo sapiens
ctgatactccctgggatccagataaaaagacttgtggctggtgattgttcttcctgggaccagttagttccttgcttttgatttccacagawtaaatcttaactatttgttattgcaaaattctatgtcttatttttccttataaagctagcttgagttcatgtctataatttgcaaacaataaaaaattctccagtaagccctttgctgtgatgtttcccctttttactgtagtcctcccttgatatccatggggagggggttggttccaggaccccctaaagataccagaaatctgtgggtgcttgagtcccgtgtgtaaaatggtataggcatttgcttataacctacacacatcctcctatatgctttaaattatctctagattacttatgatacctaataccatgtaaatactgaatagctgttatactgcattgtttttatttgtggtttttattgtattgttatttttcactgttttttttttttcctgattattttcaatctgcagttggttgaacctggggatgcacaacctgtggatatggagggatgattgtatttaccttttggtg

SEQ ID NO: 481265 - DNA, 578 bp, Homo sapiens
ctgatactccctgggatccagataaaaagacttgtggctggtgattgttcttcctgggaccagttagttccttgcttttgatttccacagattmaatcttaactatttgttattgcaaaattctatgtcttatttttccttataaagctagcttgagttcatgtctataatttgcaaacaataaaaaattctccagtaagccctttgctgtgatgtttcccctttttactgtagtcctcccttgatatccatggggagggggttggttccaggaccccctaaagataccagaaatctgtgggtgcttgagtcccgtgtgtaaaatggtataggcatttgcttataacctacacacatcctcctatatgctttaaattatctctagattacttatgatacctaataccatgtaaatactgaatagctgttatactgcattgtttttatttgtggtttttattgtattgttatttttcactgttttttttttttcctgattattttcaatctgcagttggttgaacctggggatgcacaacctgtggatatggagggatgattgtatttaccttttggtg

SEQ ID NO: 481266 - DNA, 527 bp, Homo sapiens
ctgctatgctaggccgagctcagcagaatcatcgagtcgcttccaatctatgattttctgctgatgctgacaaaggccacccccatgggctggagaagaaacactgtatttactcacataattctcttcttccaaaggcacctgacttccctggaaagctagtgagaaggagatgagcagacgtgctctcacrctcttccagcccttgtggccaggagcatgggcagggggagtgaggcaataaatggatatgactcagacaccaagctattaattaaacctgactcttggccgtctaggtgttgaaactccaggttgatcgcgatggctaatcagcctgcaaagggcagtaactgctatgaagtgcaaccaagtgacgcctcgtgacctctgacatttcttctgaaacagccgcaccagggaatctcagggatcctggctccacagccacctgactgccaaaaaagaactgggacatttagactttgcttttattcttacaacattttaaactctccagttaaaga

SEQ ID NO: 481267 - DNA, 600 bp, Homo sapiens
tgcttcctgttaggctccacactaaggggtaatacagggagagaggagggcaggagaggacaggccttgctctttcctctttgccttttgttcctgcgagcaccaccccagtgatgcttcttcactggtcagtgtggtgcttccagcttccacctttgtcccagcatgcccggaaacagcctcaccggctccctctatggtaccagcagaagctgaacagctcccttctcttacagggatgagtctctgcctggtggagacttgtccagcatacttctaggttctgatactccaaactttgtcttttctctctccagctctagggatgattgctggtttctgcagtgactagttctrtgctatctccacattcctttttgtgcagaaaagagttaatacagcaggccccgctgctattcttagaaagacctgtttgctacgttggcttttggctggcatgtgggaacttggatttcgggagagtctccatcattcctaaaactgagaagactgcctaagctctttgtacaaaccatatggtttatgctgaatacctgctttcctcctggagtctggaattttggtatgtgctagacagag

SEQ ID NO: 481268 - DNA, 579 bp, Homo sapiens
tctaaaataacaatattacagctgttgtttcagatgtgccctcagttacattaaaatattctcaagttgacattaatgtctctaataaaaagracaaagatttttaaatattttttaaaatttatcatttaagatagataattaccaaacattaagtcttttcccaaataatttgacattattaaggtgtgtgacagctctttctacagcatactcatcacccatttctaccagtgctgtaccaggaatggtcttcataaattttacctgtaaacacaaaattccaaaaaggtgaccatttaattcccttttacagtaaaagaaattttaaaacacaatacgacctaagtggttaaagtaaaatacggaagatcacctggattttaactatactctgccatgttatgagatacccttaactcttatcaaagttcaatagttaaaaaggaacactattgtatagcccactgaagaacagcacaggctcaccctaactctgttatgtattaattgtgtgatttgagggcaatatacttaacttctctgagccatggattgtcgctgaaaatacagataata

SEQ ID NO: 481269 - DNA, 631 bp, Homo sapiens
ctgtaaatatcattttaacccacgcgatgtttaatcacattttttccctactaaattaaataattatgtctcttggtctttttctctttgtaaagaagcacatctaaaacatagggaaactaactttcctatccaaagtttttaggtacatttgatcacawaacagagcaaagatgtaaaattatggccatatgagtcaagtaactttttttatttttttttttttttgagacggagtctcgctctgtcgcccaggctggagtgcagtggcacgatctcagctcactgcaaccgtcgcccctccaggtttagcaattctctgcctcagcctccggagtagctgggattacaggcgcgtgccaccacacccggctaattttttgtatttttagtagagacgaggtttcaccatcttggccaggctggtcttgaactcctaacctcgtgatccacctgcctcagcctcccaaattgctgggattacaggcgtgagccaccgtgcccggccaagtcaagtaactttttaaaaaacaaactttttttttttttgctcatgtaatagaaatcatttggttttgcctacccagaattccttacccgttctgtttaaaaataaaaacataaaaacaaa

SEQ ID NO: 481270 - DNA, 631 bp, Homo sapiens
ctgtaaatatcattttaacccacgcgatgtttaatcacattttttccctactaaattaaataattatgtctcttggtctttttctctttgtaaagaagcacatctaaaacatagggaaactaactttcctatccaaagtttttaggtacatttgatcacataacagagcaaagatgtaaaattatggccatatgagtcaagtaactttttttatttttttttttttttgagacggagtctcgctctgtcgcccaggctggagtgcagtggcacgatctcagctcactgcaaccgtcgcccctccaggtttagcaattctctgcctcagcctccggagtagctgggattacaggcgcgtgccaccacacccggctaattttttgtatttttagtagagacgaggtttcaccatcttggccaggctggtcttgaactcctaacctcgtgatccacctgcctcagcctcccaaattgctgggattacaggcgtgagccaccgtgcccrgccaagtcaagtaactttttaaaaaacaaactttttttttttttgctcatgtaatagaaatcatttggttttgcctacccagaattccttacccgttctgtttaaaaataaaaacataaaaacaaa

SEQ ID NO: 481271 - DNA, 626 bp, Homo sapiens
atatttcaaatagctcggcacaaaaatctaaagtaatagctaacaccgtaacaagactgagagaaaaagttccttttttaaatgtgttgcaaagtttgctctcacatcctggtaactggaaactgcaacgctgggtgactgaccagcctttttttttattatttaaaaattcaaacggctataaagggcttctaatgtgcgtcttatttttaaaaggtaaggtaaaaacccttttaacctaatartaggatatatgtgtacagtttcgtaattctgttaaagtttgcagaattaatcacaattcatgtgttaaatgtttaaataacatctaagtcattaaaaccgcttaagtgcaccaaaaaagggcaataacgtttgctccgctttgtttccttaaagtctccatccaactgaagctaactacttgctgtggacaaaatgatcacattccttctgcctccccctaacatttctggtaagagaaagacctggctctaggaatgtgtgtttaatgcaaccctgagctcacttcatcctttcatggggcaaatgtggaataaattaccaatgaaaaactttagtaattttaagatttgttttacttgaaggtaggggtgtaccaacag

SEQ ID NO: 481272 - DNA, 558 bp, Homo sapiens
atgacatttcaaccctgacccagcaactgagattggcttcagttttacgttggtttatacagaggtctgtttctaytcttcttcagattgtaatctaggtttgggacaccaaatattccatttaaaacatctagggctgggtgctgtggctcacacctgtaatccccacactttgggaggccgaggtgggtggatcgcctgaggtcaggagtttgagaccagcttaaacttatataattataacttatataactgtatcctgacttagagctgatcctgaccacagtggagcctctaggatgcaggtgaacacacagccaggggaactaggcatcccagcagaagatgagtgtgtgagcatgaatccctccctctctctacacagggatgtacgcttcacaaggccctgaaccttgcagtcagccagggggaaaagcagggctggtagcagaatctctatttccctaggaagaaaactctggctcttagaggtcaaatgaatttcctatagtcctctagataggactgtaaaatatctggcttgagttcagtgtcttt

SEQ ID NO: 481273 - DNA, 483 bp, Homo sapiens
tgggagatcatgacatttcaaccctgacccagcaactgagattggcttcagttttacgttggtttatacagaggtctgtttctactcttcttcagattgtaatctaggtttgggacaccaaatattccatttaaaacatctagggctgggtgctgtggctcacacctgtaatccccacactttgggaggccgaggtgggtggatcgcctgaggtcaggagtttgagaccagcttaaacttatataattataacttatataactgtatcctgacttagagctgatcctgaccacagtggagcctctaggatgcaggtgaacacacagccaggggaactaggcatcccagcagaagatgagtgtgtgagcatgaatccctccctctctctacacagsgatgtacgcttcacaaggccctgaaccttgcagtcagccagggggaaaagcagggctggtagcagaatctctatttccctaggaagaa

SEQ ID NO: 481274 - DNA, 565 bp, Homo sapiens
gccaacacagccagcacagagtctacatgcagcaaggcccactggcccaccccatattccagtcctagctccccaacagccagccagccagccccacatttactgcctctaggcaaatggacacaagcatctgcctgccccagcaacagagtcctgcttcccacagaaaccggttccaaagccggcagagacggcgctttgaacttgctcaggccttttgaccatcaccatgctgcatattgtgactctgttagtagctaggagctggaacttaattttgtggtcgaaataaccctgagaccttggtgccaaccagggaaatgccaactccacttaactgtttctgtcttccgctcaagtcggtctacttattgagaactcactctgtgcttagcgtggcatcactttccttagagttgcttctgcaaagatggtcattctgcagccaacatattgcactcagtgtgcaactcatcaaaaagcatagctacaaatwattattaaaacagtttttgtttttctctccaaaacctcagagacctatgtttgtttggggaaaaaaaaa

SEQ ID NO: 481275 - DNA, 569 bp, Homo sapiens
atagctttatctgaaagaattaaatgtgtttggctttctgtactaaatattctttaaacactcttcactayggactatctctattggagcctttttttttttttttttttttttttttttttttttttttttgaaacgcagtctggctctgtggctctgttgtccaggctggagtgcagtggcgcaatctcagctcactctaagctccgcctcccgggttcacgccattctcctgcctcagactccggagtagctgggactacaggcgccggccaccaagcctggctaattttttgtatttttagtagagatggggtttcaccgtgttagccaggatggtctggatctcctgacctcttgatccacccgccttggcctcccaaagtgctgggattaacggtgtgagccacctcgcccagcctggagccctttctttaatataaacataaatgttagtcaacttgtttaaatataaacatgtgagctgcttgagcacagggactacatcataatgttttttgctctcttacatgtctcatcaacgaatggattaggtaagtgctataaat

SEQ ID NO: 481276 - DNA, 630 bp, Homo sapiens
ctgcagcagcatctgggagcacggtgctaccaccctgccaactcagaaaaggatggggctcctgcctgttcctgtttcctactgagtccgtggagcatgcagcctcagcagtacttcccaactccagcagtggctgtgtcgtacgggctgagagctgtcatcaatagtgaattaaatattttgttattacttttcattactttttaaatttttggtaatgtttttgaattaaaatcagtcattttctaatgtctgtaattgtgtcaagtatatgtgatatattgtgatacatatgtgtgtgaaaaatatatgtgatatatttttcttaagtttgcttcaagtgttttctaatttaatattttacatgtgtgtttttgataggaaataagtagagtttttaaaaaatctattattatatgtgtagtttctaaacataaaatttatagctacttgtgtttatttgtgagatactatatttcatttttaatatcttttagtagaccttacacttttctgattatagttcctcatctttcttttgtgagagtgggacagagcaatagtcatttatgcattcatctagcyaagtgaatctgcagttttacacatgttaatattgaacgggcagag

SEQ ID NO: 481277 - DNA, 630 bp, Homo sapiens
ctgcagcagcatctgggagcacggtgctaccaccctgccaactcagaaaaggatggggctcctgcctgttcctgtttcctactgagtccgtggagcatgcagcctcagcagtacttcccaactccagcagtggctgtgtcgtacgggctgagagctgtcatcaatagtgaattaaatattttgttattacttttcattactttttaaatttttggtaatgtttttgaattaaaatcagtcattttctaatgtctgtaattgtgtcaagtatatgtgatatattgtgatacatatgtgtgtgaaaaatatatgtgatatatttttcttaagtttgcttcaagtgttttctaatttaatattttacatgtgtgtttttgataggaaataagtagagtttttaaaaaatctattattatatgtgtagtttctaaacataaaatttatagctacttgtgtttatttgtgagatactatatttcatttttaatatcttttagtagaccttacacttttctgattatagttcctcatctttcttttgtgagagtgggacagagcaatagtcatttatgcattcatctagccmagtgaatctgcagttttacacatgttaatattgaacgggcagag

SEQ ID NO: 481278 - DNA, 610 bp, Homo sapiens
aaaatatatatatcaatctctaaattataattatgataatcccatggttcaggagaaacttaagaaaaaatattttgttgtcaacagtgttcaagtatatggtctttcaagggtatatgcaagcaagagtgtaaaacctttgttcttggaaggtcacttttgtggctggcaactgagaaacctctgaggaatcaagaaccacataagaataactttgccaaartttggcaagttgaaggatttacctactaactctcatccctcataggttgagggttgctactgagggtgttaaatgttcaacaatattgggttgccccgtgcttggactgaacaatctccaatgtcactagagaaaggcttcaggcagaccaaagagtcagaggtggaatctactagcatgtagggaactgtacattgtagcaatggacaatgaactcagagatgtgaactcagagatggactgaagagacatggagcatggaatcaaaggtatcttgcactactcatgctccacattgaatcctctctactactgacatttgatggtggttgctgaccacagtttctagagatgacttcaaacaggaagttcaatgaaacaagcagt

SEQ ID NO: 481279 - DNA, 517 bp, Homo sapiens
ggacaatggtaggatttgtacatgttttgcgctctaattaagaaatgaagggtttttttgttgttttgcttttgttttttgcagcaaggtagaagtatagaaagtcaagacaaagattgctagcaatctttagggaaaagctaacaaaaattaggcattcttaggaatattaagtaacgcaatcaatattttgcaaaatattggagggtgcaagtgtccataaaaatcaatagaaaacatttctactaaaagtgagctttgagcatatgaagacacaatggtaaagaattttctttatgtcattaaaaagaacccccgtatgtrgaatcaatccatcccaatacacaaagacaggggtcaagaacaaggtggggcatacagaagagtatcagggatgtccacgtaagttcagaaaagattattttcttccacatccaaattaaaagtcctcctgcttaccttggtaaaccactgcctaattttcatggagtattgttctatttgtaacacagtattg

SEQ ID NO: 481280 - DNA, 635 bp, Homo sapiens
tttttccaagttccagacacatatcacaaggagggatatcagttgccattcagttyggatcagtttagccatttttttcatttttgaagcttgattcatactgtatttttccacttactgcaacaaatactttatctgctttctttaaaaaatgaggtaaacactatcagctaatggagaaattggatttgcccttcttcacatttttccatggtagtaaaataaatgtctttatatagacatgagtgttatgtatatgctgagagatgctgaaagtttctttcagtttgaataccctgatgggaattagaacgttgaatttattccatctgaatgtccttctcagtcctgtgtttcagctgttcatactgacccactgtctttccttcctgttaagcagtaaggcagacagactagctctttttaagaactcgttagcttggtttgtatgtgtttgggtaagtcacaaatgtatttcaaatcttgatgatttgtggagaaggcatcaccaaccaggagagtagaatcagggaatcctgaaaggaaaggttcattacttgtcccataacatctttcattattttacttaacaaacaatgaacaatatattataaacataaagaaaaaatattaaa

SEQ ID NO: 481281 - DNA, 229 bp, Homo sapiens
ctgggtgccgcaggagactgtgaataaatytgagagggagaatgagatgacagttcccccttcttaatgcattcaccccaaggtgctgctgggcatctgttccataattaaccagactctcccctccaccaacccctccttccccttcacctcctcctgtggctgctcaaacatttgccataattattcccccgccccacttttcaaaggagccctctggaaggagttt

SEQ ID NO: 481282 - DNA, 620 bp, Homo sapiens
ctgagaaactcgggggttccgatgtccaggccctttagagccccaagagcgcagtctcctaatccctccctttgtttctggccaccgctgaaatagaggagcgggggagaggctttcccgactcctccacaaagcaaatgcgcgaggaacagaaccccggctccctcaccttccgcggcagggtccctcccgcaactcacctgctgggtgggaagccccgccaggcggagcgcaggacccctcaggctcggcccctccatctccaacgcgaactgtccgggccgtcgccactccttcaaagggaagatttgaaaagcccgcccctggcaggagccgcagaggacgccaaccgcccggccgtaccaagtcccagtcgcaggggccgggggcgcaggaggagccgggccgaagcgcacgcgcagtgggcgsgccttgcgctctgcagctcccgccgccggaagttgccgagaccccaggctctagcgcggcggggcgggggagagggcggcggtgccggacttaagtcccggacagggatgtgggcgggcctgggacgggagtgggaggggccgcggggaaagcttcggcggcggagcgcacctgtcccagctcaggtttct

SEQ ID NO: 481283 - DNA, 622 bp, Homo sapiens
tctatacttttagctaaacatcttgaaaaagagcttctcctaaccagtagtgtaataatgagagggatgtttgtactatgaagtcaaatatgattaatttgagaataaatccatttttacaaaatgtattagaactaataaaattactgcagtactattatattagtatattataattaaaaagaaaatgagcatatcaaatttaagggatggaaacatgatttataatatccataaagattaataacttataagagaataactaattcttttaaccattttgatttattaaaaaatagaagtgtgaaatcactaggactcatttcatattgacctattttagaaaaaawgtaggttgattattaggaaagcaaatgagagccaagataaataatccataataattgatcattaattaattttgagtggttattcttgctagacatttgtatggaattattaatactgaaagtacttcaatcaatttagccaagtatttgacataagttattttaatgacacatgaaagatatcttgttaacattctggatgaataattttattcaaacaagcataaatatgatgatcataataacagaatcagatttgtagtcttattttt

SEQ ID NO: 481284 - DNA, 579 bp, Homo sapiens
catttaatttaaacattcagcaaataattacacagtacaaaggcctgtgtgataatgaatataaatatattcttctcctcagagacatgcacattatgatgtgatagtcaaaatctttctcgctgtaggacgtcctccagacagagcccgggttactagacatccttctaggggctttgcagtctctctcattctatacttccccaaagtggagctgacgagatggagtcagtccttctccctttctcctttccccttcagtgtttgtccacctctttgttgcgtacttccaccttcccttgctcctcccatcctggttctacttgtgaaatacagaccttgagaccttctctatcttcccagaaatcgcatcattctcacagctttattagtytctttgggaaaattcccaaatttaagaacctcaaatgtatgtgatatctaacagtgatgtaaatatcccttaaatttcttaaattcaatctggccaaaatggaatgcctgatcttcccaccaaagccaattattccaccctccttccttatttcagttaagagctccagtaggctcaccacaacc

SEQ ID NO: 481285 - DNA, 518 bp, Homo sapiens
gaagcttatttccttgcatcagttaactactgcctatatatttttatgaggcctcttcagtttattttgctgccttaastccacttagtaccagtttcattgtagcaagcctttaaacttaaagtaagtgttatgtaaaatattatttagattttacataaaatgtatcttcagaactttcaagtgctctagggcaaaaaggagaaaatcttctaagaaaaaaatcttaatattccagatataatgagtttgttttacattatctttcttatttttcccccctctggactattttcacttgggttcctttcatatcccagttagcaaaggaattgaccagaactaagaacagccctagagcaatagctaaaattctgctgtgcttgtcagataccgtctgaccaccgattactgcccgaggggagtttgttttctttataaactttttggtgggtttttatcgccagaaaaacagcttttattcctctcaggagaaacttcaggattgtgttgaggaa

SEQ ID NO: 481286 - DNA, 518 bp, Homo sapiens
gaagcttatttccttgcatcagttaactactgcctatatatttttatgaggcctcttcagtttattttgctgccttaactccacttagtaccagtttcattgtagcaagcctttaaacttaaagtaagtgttatgtaaaatattatttagattttacataaaatgtatcttcagaactttcaagtgctctagggcaaaaaggagaaaatcttctaagaaaaaaatcttaatattccagatataatgagtttgttttacattatctttcttatttttcccccctctggactattttcacttgggttcctttcatatcccagttagcaaaggaattgaccagaactaagaacagccctagagcaatagctaaaattctgctgtgcttgtcagataccgtctgaccacygattactgcccgaggggagtttgttttctttataaactttttggtgggtttttatcgccagaaaaacagcttttattcctctcaggagaaacttcaggattgtgttgaggaa

SEQ ID NO: 481287 - DNA, 628 bp, Homo sapiens
ttcacgtattacagaacacatcactgaaagtagtagacattcaattaatatctgtttaattgaattaaatatatggacaagaacccaattttcccaaaatcagagcctacagatcaagaattgaaagcttttctgtaaagagctagatagtaaatattttaggctgtacaggccatatggtctctgttgcaacaattaaacccttttatatagcatgaaagcagctacagacaaaaaaagtaagcttggctgtgttccaattaatttttttaatggcccctcccccctgaattttatatacattataagtgtcatagaatagtattcttcttttgattagtatgcaaagatttaaaaatgttgaaacaattagctcaagaactaggcaataacatgcaggcagctggacttttcccatattgactatacttgttgatctatgatacagtatagtctacagttttagttccttatttggtcaattctttatatggaccacatttgatttcttcccttctactaactgcytagcgtatttgttatttgacataattcatattaatagcattgtcttattctagcagccattttagacatacccttaccagaaagtcttccaggtcactga

SEQ ID NO: 481288 - DNA, 530 bp, Homo sapiens
tgaggattagtggaacccaaggaggtctcttatcacccacaagcctccaacactgatgaagtgggtggtttgcactgaaactggtgcctttcaacatggggctaaacatcacctggcccagaagccagtgacacygaaggaggaggcagggaaggagctggagttcactttggacgtggcagctgcctcactgcaacagaggcagcatatcagtaacagcccacgtggctgcagcagcccctggggactgctgttgtattgaaatgatacgtctgctgcttcacttctgctttccaaatttcccacaaaatgtctcttgtggcccagacaaacccaaaactatgtagggaagggaatctaggacatgtagtccaatgggctcagctgacacagtacgaacctgccacaggctgtggcaagctcagtccagctaaggcactatgttgttttctagtttgcactttacataatttctttgactctagtgataggcaatatgtactgattaatgatataaaactggacaaata

SEQ ID NO: 481289 - DNA, 530 bp, Homo sapiens
tgaggattagtggaacccaaggaggtctcttatcacccacaagcctccaacactgatgaagtgggtggtttgcactgaaactggtgcctttcaacatggggctaaacatcacctggcccagaagccagtgacactgaaggaggaggcagggaaggagctggagttcactktggacgtggcagctgcctcactgcaacagaggcagcatatcagtaacagcccacgtggctgcagcagcccctggggactgctgttgtattgaaatgatacgtctgctgcttcacttctgctttccaaatttcccacaaaatgtctcttgtggcccagacaaacccaaaactatgtagggaagggaatctaggacatgtagtccaatgggctcagctgacacagtacgaacctgccacaggctgtggcaagctcagtccagctaaggcactatgttgttttctagtttgcactttacataatttctttgactctagtgataggcaatatgtactgattaatgatataaaactggacaaata

SEQ ID NO: 481290 - DNA, 530 bp, Homo sapiens
tgaggattagtggaacccaaggaggtctcttatcacccacaagcctccaacactgatgaagtgggtggtttgcactgaaactggtgcctttcaacatggggctaaacatcacctggcccagaagccagtgacactgaaggaggaggcagggaaggagctggagttcactttggacgtggcagctgcctcacygcaacagaggcagcatatcagtaacagcccacgtggctgcagcagcccctggggactgctgttgtattgaaatgatacgtctgctgcttcacttctgctttccaaatttcccacaaaatgtctcttgtggcccagacaaacccaaaactatgtagggaagggaatctaggacatgtagtccaatgggctcagctgacacagtacgaacctgccacaggctgtggcaagctcagtccagctaaggcactatgttgttttctagtttgcactttacataatttctttgactctagtgataggcaatatgtactgattaatgatataaaactggacaaata

SEQ ID NO: 481291 - DNA, 530 bp, Homo sapiens
tgaggattagtggaacccaaggaggtctcttatcacccacaagcctccaacactgatgaagtgggtggtttgcactgaaactggtgcctttcaacatggggctaaacatcacctggcccagaagccagtgacactgaaggaggaggcagggaaggagctggagttcactttggacgtggcagctgcctcactgcaacagaggcagcatatcagtaacagcccacgtggctgcagcagcccctggggactgctgttgtattgaaatgatacgtctgctgcttcacttctgctttccaaatttcccacaaaatgtctcttgtggcccagacaaacccaaaactatgtagggaagggaatctaggacatgtagtccaatgggctcagctgacacagtacgaacctgycacaggctgtggcaagctcagtccagctaaggcactatgttgttttctagtttgcactttacataatttctttgactctagtgataggcaatatgtactgattaatgatataaaactggacaaata

SEQ ID NO: 481292 - DNA, 537 bp, Homo sapiens
tcttcttttaactgaatttagcattttctatttcatttcccaacctgacttccttttttgactagaaatatggatacttagaccggccacctctttactttggaattatggtacattaattttcttccttttacagtatgaagaactaagtcaagcttctcttgattcaataacccacagatatcaaaacccatggtaagcaaatatgaatatatttttattaattactgtgtttctttcctaaattggtaacaggattcatttttgtaaacttttaagtrtattaacactttctttttatttcatgtaggtttttgataaatttacgaatttttatttctaataaacacagtaaatatgcactatctgctaaattttaattaaggggagaaaaggaataacgcaacatagttagaatgagaaactgttagactatagtaaagaaaaggagaagcaagcctgaagctatgaagaatggcaactggattagtagattagctttaactttataaataattatctctgtggaagaaacaa

SEQ ID NO: 481293 - DNA, 537 bp, Homo sapiens
tcttcttttaactgaatttagcattttctatttcatttcccaacctgacttccttttttgactagaaatatggatacttagaccggccacctctttactttggaattatggtacattaattttcttccttttacagtatgaagaactaagtcaagcttctcttgattcaataacccacagatatcaaaacccatggtaagcaaatatgaatatatttttattaattactgtgtttctttcctaaattggtaacaggattcatttttgtaaacttttaagtatattaacactttctttttatttcatgtaggtttttgataaatttacgaatttttatttctaataaacacagtaaatatgcactatctgctaaattttaattaaggggagaaaaggaataacrcaacatagttagaatgagaaactgttagactatagtaaagaaaaggagaagcaagcctgaagctatgaagaatggcaactggattagtagattagctttaactttataaataattatctctgtggaagaaacaa

SEQ ID NO: 481294 - DNA, 606 bp, Homo sapiens
ttgaccccaccattattcagggagttgactcaggcctgggacacatgagttggaagccatttcttgaagtgctcagggaagtgtcacaaggacagccccgagcttatgcaggtaaactggggccacaccacaccctagagtctctgtctctgggcttcagttgtctcatcttaaaaattgagagtatcatgcaaatctgaaagcggagaaatcaaccaattattttgtaaagtctattcaaaggcttacatttgtgactatatgatattctatccatgaaatgcccttcaacaaattgagggaaagaaaggagattatgtttgtgtcttgcaagagtcagtggcatagtggggaatagcacagtttttggtgagggctgcctgagtgtgaatcttggctcagccattcaatggatgtgtgacttgggcagggaggtcagttgcccttctctgcaccttggctttatcatctttacacctcacagggttgtagtcaagatcaaatgagttygcacatataaagcattagaatagtacgtggcacatagtaacctcttagtcaatgttagctattactattctcctttttcatacacattagtgtaca

SEQ ID NO: 481295 - DNA, 493 bp, Homo sapiens
ccatatcccattctcagaacacatcatttaattatcttggtcataaacatttccaaggtgagaatttatatttccctcccgtagtttctgatgatcaaaaaccccttgtgttctttattgaaagggtttggtcttgcggctgttggtttgtcccatccaacgttcatcatcttcagctttgcttctaaagacatttcctctggttcattaaaagctgctgcttctgaacacagttctggaatgayagaacagtctctagacttccttggtcctaatgtgatggatatgactaaggcttcctttgttgtaggactgcctatggcaaatccaaacttaatggtctttataaacttcgctggaaagtctccacttcttcttcagttggttgcttctcagtgctatgaccacagtatttttctccattcacccttgtttttataaatttatttgcatcttcttcaagctttagtgaagttgaaacaacttaaccaac

SEQ ID NO: 481296 - DNA, 585 bp, Homo sapiens
gtaattcaatgtaagaaatatggatgactgtttattattgttactaaatgaaaaaagccttttttccttggatacaatagataaatgtttaaagayaaacaaaatgtccttcttatgttgtacaatctacatgagacagatgataggatatttctctaactgatggctgagtaaatcacttcattttcattgtttccacagtgttgaccaacatgctgccagtctgacttcccacttctgatttaaacacatgattcagaatgactttggagggttgtgatactcacgaatttatggggcacttgtatgtgggattctcatcactgtacagcaaccctgtcatttttgtgacagagactgtttgactggtttcggatttatgatggaaataactcagaacagagtaataattttcccttggcaattacactaccatttggtactttgtccctaaggggaaaatgaatgtgctgggatctgtacatgagtttattagctcaatgtagggaacaaatcaaggtcagaatatagatgcatggcacgtgatgctgaattctagttctggttcttcagtcttaaggctgc

SEQ ID NO: 481297 - DNA, 585 bp, Homo sapiens
gtaattcaatgtaagaaatatggatgactgtttattattgttactaaatgaaaaaagccttttttccttggatacaatagataaatgtttaaagacaaacaaaatgtcyttcttatgttgtacaatctacatgagacagatgataggatatttctctaactgatggctgagtaaatcacttcattttcattgtttccacagtgttgaccaacatgctgccagtctgacttcccacttctgatttaaacacatgattcagaatgactttggagggttgtgatactcacgaatttatggggcacttgtatgtgggattctcatcactgtacagcaaccctgtcatttttgtgacagagactgtttgactggtttcggatttatgatggaaataactcagaacagagtaataattttcccttggcaattacactaccatttggtactttgtccctaaggggaaaatgaatgtgctgggatctgtacatgagtttattagctcaatgtagggaacaaatcaaggtcagaatatagatgcatggcacgtgatgctgaattctagttctggttcttcagtcttaaggctgc

SEQ ID NO: 481298 - DNA, 585 bp, Homo sapiens
gtaattcaatgtaagaaatatggatgactgtttattattgttactaaatgaaaaaagccttttttccttggatacaatagataaatgtttaaagacaaacaaaatgtccttcttatgttgtacaatctacatgagacagatgataggatatttctctaactgatggctgagtaaatcacttcattttcattgtttccacagtgttgaccaacatgctgccagtctgacttcccacttctgatttaaacacatgattcagaatgactttggagggttgtgatactcacgaatttatggggcacttgtatgtgggattctcatcactgtacagcaaccctgtcrtttttgtgacagagactgtttgactggtttcggatttatgatggaaataactcagaacagagtaataattttcccttggcaattacactaccatttggtactttgtccctaaggggaaaatgaatgtgctgggatctgtacatgagtttattagctcaatgtagggaacaaatcaaggtcagaatatagatgcatggcacgtgatgctgaattctagttctggttcttcagtcttaaggctgc

SEQ ID NO: 481299 - DNA, 585 bp, Homo sapiens
gtaattcaatgtaagaaatatggatgactgtttattattgttactaaatgaaaaaagccttttttccttggatacaatagataaatgtttaaagacaaacaaaatgtccttcttatgttgtacaatctacatgagacagatgataggatatttctctaactgatggctgagtaaatcacttcattttcattgtttccacagtgttgaccaacatgctgccagtctgacttcccacttctgatttaaacacatgattcagaatgactttggagggttgtgatactcacgaatttatggggcacttgtatgtgggattctcatcactgtacagcaaccctgtcatttttgtgacagagactgtttgactggtttcrgatttatgatggaaataactcagaacagagtaataattttcccttggcaattacactaccatttggtactttgtccctaaggggaaaatgaatgtgctgggatctgtacatgagtttattagctcaatgtagggaacaaatcaaggtcagaatatagatgcatggcacgtgatgctgaattctagttctggttcttcagtcttaaggctgc

SEQ ID NO: 481300 - DNA, 611 bp, Homo sapiens
aaattccattttatacatttttgtagaaatagcatgaaatttaggctatggcaacaataattaaataagccactgtattttagctagtacaacatcccaataataagtgaaattttgatttcataggtttgttgctccctgaaaaagtaatacaattttttattaaaataatgttttagattatgtccttaaaagaaatatggatttcagtagttcagattttgtaatttgtctctctggaacttttaattctaaatattaattagtgtggtgattatatattcaccttctctttatacatgccacaaattgtataatgttgaagatttatttagaagacattattattttgttaaataagaaaagtaatgtatttttaaaaaaacttttagtaagtaagtggctaacttattacaaaacttcaaataactttggmaagttgcttgaatctcgtttcccataaatttggacatgatagctttatgtcaattataatttattgtgttttatttcatctctaaaattggatagacattatttaatgactcatactttgtagggaatttgcctgcaaataaaaacgatgacaaataatgttacggaaagaaact

SEQ ID NO: 481301 - DNA, 131 bp, Homo sapiens
ctaaaatataacaatactaaatatcacactgygatggaggtcccaaatatgtggtctatcaccactgaattcatgtaatagataagaaaaaaattagaggtggatgtcttgttttgtgtcatgaattacta

SEQ ID NO: 481302 - DNA, 626 bp, Homo sapiens
aaaactattgtgtgttggtatcccttgggatagacatttaggaatccctggcgatagaaagaaggtatgggcaggtccttatattttccctagtaacctcaggtttcaggtttcttcactgataaaattctagaacatcccatggtttcctgattctgtgctcttttcctctgtcactttaaacaaatggatacttcactacttagaaaaattatctaaaatgtggaaataggacaaaaagataaccatattttttcaatgtcatactgaaacattttctaataggtccaccaaaggatttctgagcagcagaaaatattatcttaaaagttatatttttattgccctgtagaatatttcatatatacatatatgtacatatagatgtacatatattacatatatacatatagatatatatacacacacacacacayggaatatatgtccagatatatatcctatacataacatggtatattccatatataatatataacatatacataatgtatatagtatatcccgtgtgtgtgtatgtgtgtgtgtgtatttatatgtgatatggtttgactgtatccccactcaaatctcatcttgaattgtagctcccataattcccatgt

SEQ ID NO: 481303 - DNA, 547 bp, Homo sapiens
ataattagaatgtttatagtgcaatgaaaagacaaatacttaaggtgttggctatcccaagtacactgaactttacaaattatgtgaatctattaacttatcatatgtaccttgaaaatatgtacatgtattatgcatcaataaaaaatcaatggcatagatacctttttagaaagcatgacaaataaaagtgcacaatttttttwaaaaagatagagggatagcactggccatgctgggctggaactttttgctgccacccatatattatcgccatactgaggtgcatggtatgcctccactaaataaagaatgaacaaaacaatgataagaactgcaaagtagaaaaaatatgatatattaaagacctaaaagagtcacttggagatttgtattcttggtgtactactcaacgtggaagtttatatagtgatttgtatcagttgtttatgatggtgtttgtgctattaccatattaaaagtttacatctcttcgcattgtccagaattgttgaatatttactgggaatgaggaatgtacaaggaa

SEQ ID NO: 481304 - DNA, 654 bp, Homo sapiens
caataaaatattttaaagaaaacttccagacacatatcatttcctttgaaaatattttataaggtaattttaaaacataggagattttaaaaataatcacaatacacaaacatcatgcctaaaaaccaagcagatcaaaaatcttttaataatataaaatatgcaggcaatcrttcaaatttccatgattatctcataaatgtgtgttttttaaaaaacaaatttgtccaaatcaggatataaatagtgccaggcatcatatttgatttataggtatcacaagactcactctatactagctctttcctcctgttttatttttaaccatttatttattgatgctattcctcagtcctgataatatgatccatctttgagaatactttacacaaatttgtttttgccaagggcaattcttttgctttaagactatcagttctaatttatatttccattttagcttttaacattcaactttttttcccaaaagggcctctttaaattcagtctatacaaatacttacatccccaataaaattttactccctctttccatcatctcctcccatataacatcaaaagtataaggctcccatcttcaactttatatatgagagctggaatgtctaagccttagtgttgtcgtgccatctc

SEQ ID NO: 481305 - DNA, 654 bp, Homo sapiens
caataaaatattttaaagaaaacttccagacacatatcatttcctttgaaaatattttataaggtaattttaaaacataggagattttaaaaataatcacaatacacaaacatcatgcctaaaaaccaagcagatcaaaaatcttttaataatataaaatatgcaggcaatcattcaaatttccatgattatctcataaatgtgtgttttttaaaaaacaaatttgtccaaatcaggatataaatagtgccaggcatcatatttgatttataggtatcacaagaytcactctatactagctctttcctcctgttttatttttaaccatttatttattgatgctattcctcagtcctgataatatgatccatctttgagaatactttacacaaatttgtttttgccaagggcaattcttttgctttaagactatcagttctaatttatatttccattttagcttttaacattcaactttttttcccaaaagggcctctttaaattcagtctatacaaatacttacatccccaataaaattttactccctctttccatcatctcctcccatataacatcaaaagtataaggctcccatcttcaactttatatatgagagctggaatgtctaagccttagtgttgtcgtgccatctc

SEQ ID NO: 481306 - DNA, 654 bp, Homo sapiens
caataaaatattttaaagaaaacttccagacacatatcatttcctttgaaaatattttataaggtaattttaaaacataggagattttaaaaataatcacaatacacaaacatcatgcctaaaaaccaagcagatcaaaaatcttttaataatataaaatatgcaggcaatcattcaaatttccatgattatctcataaatgtgtgttttttaaaaaacaaatttgtccaaatcaggatataaatagtgccaggcatcatatttgatttataggtatcacaagactcactctatactagctctttcctcctgttttatttttaaccatttatttattgatgctattcctcagtcctgataatatgatccatctttgagaatactttacacaaatttgtttttgccaagggcaattcttttgctttaagactatcasttctaatttatatttccattttagcttttaacattcaactttttttcccaaaagggcctctttaaattcagtctatacaaatacttacatccccaataaaattttactccctctttccatcatctcctcccatataacatcaaaagtataaggctcccatcttcaactttatatatgagagctggaatgtctaagccttagtgttgtcgtgccatctc

SEQ ID NO: 481307 - DNA, 541 bp, Homo sapiens
tcaattctgtctttttaaatatattgaaaataaggattggaatggttttccatgactaagactctacctgttttatatgcagaatgttgtgtactgatgaaccagtgggagcatgtgacatatacacatccattcgactctaaaggagataaaactcatattacagcaattgcccaacaaaattttgcctttcagaatcagagaaaaatgatgcacagaattagcaaacaagactggggctttgaaaataacaaggtagaattatctagataaatataccattwaggtcaatactttaatgtgagtgaaccacaagctgactaatggaatgggctgcttgacagcacacctgtaccagctctgaatctgtaggataatttgcttattttgaagtagaaggaacagtaatggtcatcatggagcaaagccaactaggaaaggttctatgtgcaagtgtgggggtgatgcatgcatgcgcacccaggtgcactgtcacagattaaatcagaaaaccaggagttcaggccctgttgttgttaat

SEQ ID NO: 481308 - DNA, 297 bp, Homo sapiens
ctaagaacatgccagattcaaggagctgaaagcagcttatatctggatggtcttttaaacattgacttttttatactattacaaaagcaatatatgctcattatagaaaatttaaaaaatacaaaagaaggcaatagtcaccaatgtactctgcaccaagaactgctttgtcatgcctttatcttcattctaaatctgtgaggttttgttttcttaagaagaaatgtcatgcacaatttactattttccaackttttttctgctaaacaatgtatatcatgaagaatttcccaacgt

SEQ ID NO: 481309 - DNA, 297 bp, Homo sapiens
ctaagaacatgccagattcaaggagctgaaagcagcttatatctggatggtcttttaaacattgacttttttatactattacaaaagcaatatatgctcattatagaaaatttaaaaaatacaaaagaaggcaatagtcaccaatgtactctgcaccaagaactgctttgtcatgcctttatcttcattctaaatctgtgaggttttgttttcttaagaagaaatgtcatgcacaatttactattttccaactttttttctgctaaacaatgtrtatcatgaagaatttcccaacgt

SEQ ID NO: 481310 - DNA, 545 bp, Homo sapiens
gctgtgcccaaggctgcaggatgccgaccagcaattctttactctcactgaagaataaacctgaattgagcagaaattcaaggaagaaaaaagaaaaatgactgccctccctttggggattttagctgtggtcacagacatcaaaagtaacaacatgggaaaatcaagctgaattatagtagaatctatgtggcttttcaccctgtgtttaatttagtcagatggctcagtaaatgatacaaaccttttaatgtagctatcttagtttcaactccatgcatggtacaggaactctggctaaattaattatagttgatcacgtaatttcttttcttaaaatgttttcctatacattgaagtctaatttccttagcatttaatctcagattcttcattactccaaatagtttattcacaataatgccttatttttttctagtttctctaacttcctcagcatttaattctagtttcttcattactccaaatagtytattcacactaatgttttacttttttttaatttctctatattgaatgtccgt

SEQ ID NO: 481311 - DNA, 563 bp, Homo sapiens
ttatggcaacataaaagctggactcaattactgtgtattgaggcatgacttgtggacttttttaagagaattcttcagtcgagttactgattgatttattgattattgtttgatgataaagtgccaatctatctgcccagagtggtgcttgagcaagagaaacttgcagctggtctatatggacattcaatctattcattgtttcagctagccttctgacttgaacttgcttgtctgggggtcttgccttcatcagggttctggaagtcaaagactttctcattgcagattttattttgtcactttgtcttcgattcatcaggctccacttctcacctgatttatatcatctaaacactttttattgctgcragttggtcttttaactctttactgaacttttatgatatcataggaaaggagatgaatgaatgtgctcagatcataaccctggagtagattgtcattagaaggtggatggtctttaccatattttcatctcttaaaaagtgtaattttattcaggcactttagtgaagaggaactagaaataaaattcagtt

SEQ ID NO: 481312 - DNA, 577 bp, Homo sapiens
taggcacccaggaggaccgtgggtttgtcttgatgacagggcactgcaccacactgctgctaaaccttccagccctaggaactcacctgctaccatccccttacactcccttttaggcccttgggctttttcccatccaacacctagagcctgaggcctgccaaactacctagcttcacatgactaattgcagtgactaacttcatggcttcctgcaagcaaggtccttctgtatctgtctctttctctgaccccaatatgaaaacatttctgtaaatgtctggcacctaataaacatgatggttgtggacaatgtcacaagtacacaggaagacccagtaacaagacatgcaaggtgagggcaaggggcgctgagctgctctagcatttcaaaaccaggactgtagctttccatacattyagcggggtaggagaagggatgtgcagagctgatgacttcactggctcctcagcagcatgtacattcaaattgaagatgtcttgagagccccactatacccaaatcgtgagtctggtcactcctctagcagagcttggtgcagtgacagctagaaaa

SEQ ID NO: 481313 - DNA, 546 bp, Homo sapiens
ttttagtctccaagtatttcagagaggatgtccctgaaagggttctataacaccataaatttaattcaagtccaataatacaaaccaaaggtatcacttcaggatatagtatagtttatgcatatatgtcaagacagtgactgtaggtttagcccccaagctgacaaatcttaacatcattgatgtggttttttaaacttcccacaaatcttgtcactcactttcatccatcagtgcttaaaaacaatgatttatatgcaccttcttaatctaaattttatttttgaaaaattcccaagtgcctgatattattacttccaatttaaatatttgaaaactgaaactctagaaacataaatgatttacacaagaaaacactgcttaatattgtagatctgaaaacgcatgtttcttaatttaaagttgggttttttttttkttgttttttttttttttgtacctaaccatggtgccttagatgatacctaaacttggcagagtgtctccactgacttattccaaatttcagccttaccactacttcag

SEQ ID NO: 481314 - DNA, 185 bp, Homo sapiens
ctaacctggctatagtatcattgaaaagagtgagagaccagaagaataagaaaagatgatatgagatcttttcccagattcaggcaaggttggttcctgtaatgaacsttttgaaaggtttccatattatgcacctttatacaagtagctggatttataaggcactattttaaaaaatgtgtggc

SEQ ID NO: 481315 - DNA, 619 bp, Homo sapiens
ctggatccccagtgaaatgaggctattgttgctcaaatacatttatttcctaagagaaaatttaacatgtatctttagtagtaacacagcacatataagcctttgtttaatgtttttgtatgaacgttacatgccaacttctctttgaaaatatcacactatgatctatatctagaactgtttatatatttcttccaaaatragaagttaaaattccaggaaataaaatagaattagaaagagaatgttacaattttaagatgagaaatgaaaccaccattgcgaattatggactctttcatttaagaaatgtgaagtgattcatcgtggccaccaagccttttgctggtctcactgctgagccaggcattctgtgagccaggagccagtgtagtcacctgtgcagcaccctccatgctcttgtgcagggaggcctgccagcagccctctgggcttcatctcagagctattagaaagcaatcagggaaatgattagacctcagtcgagagccaagttgggacttcagatagttgtcaaatactgattcctctggaatggaactgttccctgaatcatcttattaggccacctccagacttcaggcataacccttaaaga

SEQ ID NO: 481316 - DNA, 619 bp, Homo sapiens
ctggatccccagtgaaatgaggctattgttgctcaaatacatttatttcctaagagaaaatttaacatgtatctttagtagtaacacagcacatataagcctttgtttaatgtttttgtatgaacgttacatgccaacttctctttgaaaatatcacactatgatctatatctagaactgtttatatatttcttccaaaatgagaagttaaaattccaggaaataaaatagaattagaaagagaatgttacaattttaagatgagaaatgaaaccaccattgsgaattatggactctttcatttaagaaatgtgaagtgattcatcgtggccaccaagccttttgctggtctcactgctgagccaggcattctgtgagccaggagccagtgtagtcacctgtgcagcaccctccatgctcttgtgcagggaggcctgccagcagccctctgggcttcatctcagagctattagaaagcaatcagggaaatgattagacctcagtcgagagccaagttgggacttcagatagttgtcaaatactgattcctctggaatggaactgttccctgaatcatcttattaggccacctccagacttcaggcataacccttaaaga

SEQ ID NO: 481317 - DNA, 619 bp, Homo sapiens
ctggatccccagtgaaatgaggctattgttgctcaaatacatttatttcctaagagaaaatttaacatgtatctttagtagtaacacagcacatataagcctttgtttaatgtttttgtatgaacgttacatgccaacttctctttgaaaatatcacactatgatctatatctagaactgtttatatatttcttccaaaatgagaagttaaaattccaggaaataaaatagaattagaaagagaatgttacaattttaagatgagaaatgaaaccaccattgcgaattatggactctttcatttaagaaatgtgaagtgattcatcgtggccaccaagccttttgctggtctcactgctgagccaggcattctgtgagccaggagccagtgtagtcacctgtgcagcaccctccatgctcttgtgcagggaggcctgccagcagccctctgggcttcatctcagagctattagaaagcaatcagggaaatgattagacctcagtcgagagccaagttgggacttcagatagttgtcaaatactgattcctctggaatggaactgttccctgmatcatcttattaggccacctccagacttcaggcataacccttaaaga

SEQ ID NO: 481318 - DNA, 473 bp, Homo sapiens
tctcctttcaccctccagagtcttccacgcttgccrtgttaggcgcagggaatgttagctgtgaggtggaggacctgggaggaacggggctgctccacctggatggaacgtgagctcagtaaatagtttctgaacacctactatgcaccaggtatatgtgagtttcttgtcctcatgaagtgaacaaaatcttaacagaagattacataaaaatcattataataacctctgatgagtattctcacagggcatgtttaaaactacctactcgcctcaaaaatctccctgtctgcttcctattgtctaaaccagttttgttaacagagctgaaaggcattatcttttaaagataaaaggcttaaataattattcatttattaagcaagtatttggcaagtgcatagtatgtgctgggtcctgttatcaacattggggaagcatcagaaaacaccacagatacaaagctatacact

SEQ ID NO: 481319 - DNA, 473 bp, Homo sapiens
tctcctttcaccctccagagtcttccacgcttgccatgttaggcgcagggaatgttagctgtgaggtggaggacctgggaggaacggggctgctccacctggatggaacgtgagctcagtaaatagtttctgaacacctactatgcaccaggtataygtgagtttcttgtcctcatgaagtgaacaaaatcttaacagaagattacataaaaatcattataataacctctgatgagtattctcacagggcatgtttaaaactacctactcgcctcaaaaatctccctgtctgcttcctattgtctaaaccagttttgttaacagagctgaaaggcattatcttttaaagataaaaggcttaaataattattcatttattaagcaagtatttggcaagtgcatagtatgtgctgggtcctgttatcaacattggggaagcatcagaaaacaccacagatacaaagctatacact

SEQ ID NO: 481320 - DNA, 473 bp, Homo sapiens
tctcctttcaccctccagagtcttccacgcttgccatgttaggcgcagggaatgttagctgtgaggtggaggacctgggaggaacggggctgctccacctggatggaacgtgagctcagtaaatagtttctgaacacctactatgcaccaggtatatgtgagtttcttgtcctcatgaagtgaacaaaatcttaacagaagattacataaaaatcattataataacctctgatgagtattctcacagggcatgtttaaaactacctactcgcctcaaaaatctccctgtctgcttcctattgtctaaaccagttttgttaacagagctgaaaggcattatcttttaaagataaaaggcttaaataattattcatttattaagcaagtatttggcaagtgcatagtatgtgctgggtcctgttatcaacattgsggaagcatcagaaaacaccacagatacaaagctatacact

SEQ ID NO: 481321 - DNA, 699 bp, Homo sapiens
agatttcctgcaggaatctaagcagaattatgccaatggccagaacaaaggtggtggcaggaagaaagagtgaaccccctgactaattggaataggaagtgtgagccaaccgagaaattgtgggaagatggtagaaggtgttctgagtttccctgcccttcataaatggaaccaactgaggaaacatcttcatcactaagtcaatctacatctgttaataaagagagaaaagcaacacaaggaacgctggatactccaagcatgaatcaactttatcacttttgtctccagactttggagggcaaggggagcataaacaaagactgcagatggcagcaggatccacgtgagagaaagcaccaatgctcaatgaatggcacgacatgtcctgcagtcaccacgaaatactacttctagttgcctcttgctgtggcactccctccccatgcaaaaaagagaaggacaaggaaacaaacataaaaatatttattaactagtcaggcacaagacaaagctccattcattcaaccaaacaaatacttcttgaacatcaatatgtgtggtgtgctatggtgtgttgtatacaagagatgcaaaggtgaacaaaaatcaatccctaccctcaaagaattgcaaaatgtgatwtaaggcagcagaggctagagcaggactaaaagaactattcattattttaactga

SEQ ID NO: 481322 - DNA, 618 bp, Homo sapiens
tgggaagctgaggtgggagtatgaactgagcccgggaggtcgaggctgcaatgaactatgactgtgccactgtactccagcgtgggcaacaaagcaagaccccgtctcaaaataaaaaaaaaaaaattgttgaacctgaggtcaagatatgattggcccctattctggccatctatttgtttttttcccaactttaggctcttttggattacagatctgagttctcagtgggggagatttcctatagaagaaaaagggacccagagaatttgactctaattcatcctactcastttgtgaacttcatgccagtgggctggtgaaaaagaaaggcgttactacactgatggaggtaaatgactctaatcactctaagacactagggctggtgccacacagcagaggtgaggaggagagaagtcaatggggtatctcttagtactcgcaagaccagttgtaattagagaatccatggccctacaaaggcaaggcaactaaaaggtgagatgagggcctgggccacccagcaccaagcaaattcgactagctgaagagcaggctgagagttatgcatacctaaaatgggcaggagaacataaataccaattatagccttga

SEQ ID NO: 481323 - DNA, 657 bp, Homo sapiens
gctctaccttcaggaatggattaatgctgatactgtgggagggagttagttatcaagggagaggggtcctaataaaaagggtaagttgggcccccatcctctgtctcatgcactcccttgaccttctgacttccatgacaggatgatatagcacaaagggcctccccagatgaactgccatgttgttgaactgtccagcctctagaaccaagagtcaaatatacttccatcatttttgaatcacccagtctgttacagcagcagmaaacggagtgagacacctactgtggggccttcccacttggtctttcctctacctaggatgctctgtgcatgctcatctttgctcatccttcaggttaactaaagctcctcctgcacaatatgctctaacaagtcattatgtttattccatttacaatagttatcagatactgaaattaaagtgtttgtaggttactctacagtacattagtcttgatcacttctgaattcctagcacctagaacaatgccaggaactaaggggatagctaataaatatctgttgaatgaataaatataataacactaatatcagcaatagctagtatttattatttactttgtgctggaaaccattctaaatgccttatatatatattaacctatttctcac

SEQ ID NO: 481324 - DNA, 581 bp, Homo sapiens
caaggtagttaatgttttgagcaatcatgggctaaacgcacattcctcttgaagatggtacgatgaaactcacatctaggtcacaccatggtcaaggttgcgtggttttcagcatggtttctgctgttctaactcagcccaaatgaactcattatcctttttttgaaaaattgttaataaacagtattaatactcgatattgtcttgttccctcctgtgccactgagttgcactttgtsattaaaccttctacatgtgtgtatggaggccataagaaaaacccttgaggacagtgtgtatagaactgaagaagccactgtgataagtggtctccctctcctctctctctctctctcacacacacacacacacacacacacacatccaagaggaattttgcttccctgagggactcatttgttttctgttcacaaacatcgaaatccaacagaggattcctgtttctgttcttgctttggctaccagggagatcagagcccagtttgcatcttagctttggtatgggtgagactgtctggtcccatatagcttttctgtcttcttgttctccacagttctgt

SEQ ID NO: 481325 - DNA, 581 bp, Homo sapiens
caaggtagttaatgttttgagcaatcatgggctaaacgcacattcctcttgaagatggtacgatgaaactcacatctaggtcacaccatggtcaaggttgcgtggttttcagcatggtttctgctgttctaactcagcccaaatgaactcattatcctttttttgaaaaattgttaataaacagtattaatactcgatattgtcttgttccctcctgtgccactgagttgcactttgtcattaaaccttctrcatgtgtgtatggaggccataagaaaaacccttgaggacagtgtgtatagaactgaagaagccactgtgataagtggtctccctctcctctctctctctctctcacacacacacacacacacacacacacatccaagaggaattttgcttccctgagggactcatttgttttctgttcacaaacatcgaaatccaacagaggattcctgtttctgttcttgctttggctaccagggagatcagagcccagtttgcatcttagctttggtatgggtgagactgtctggtcccatatagcttttctgtcttcttgttctccacagttctgt

SEQ ID NO: 481326 - DNA, 581 bp, Homo sapiens
caaggtagttaatgttttgagcaatcatgggctaaacgcacattcctcttgaagatggtacgatgaaactcacatctaggtcacaccatggtcaaggttgcgtggttttcagcatggtttctgctgttctaactcagcccaaatgaactcattatcctttttttgaaaaattgttaataaacagtattaatactcgatattgtcttgttccctcctgtgccactgagttgcactttgtcattaaaccttctacatgtgtgtatggaggccataagaaaracccttgaggacagtgtgtatagaactgaagaagccactgtgataagtggtctccctctcctctctctctctctctcacacacacacacacacacacacacacatccaagaggaattttgcttccctgagggactcatttgttttctgttcacaaacatcgaaatccaacagaggattcctgtttctgttcttgctttggctaccagggagatcagagcccagtttgcatcttagctttggtatgggtgagactgtctggtcccatatagcttttctgtcttcttgttctccacagttctgt

SEQ ID NO: 481327 - DNA, 467 bp, Homo sapiens
ggaaccttggaaaatgcctacgaaggattccaaatgaacatcattccaaaggttcamataaattccataacgtgtctatgaaatgtctttgaaatgggttagtgcctatgaaatagacaaaaataatacctcttaaagtacaaaaggatcataaagtgtttgcaattcttttgtaaaatgtcagggattattcccacatttgctcactttcttctctatagttatcttctcaatcactgggagcaaaggcatgaaacatctttgtctgaagatctctaattttactcactgtagttagaagtataatgattttgtttgttggttttgtgttgcagtgttctttgaggaagagtaatataaccgtttttctttaacttttgtcaagagcccttaggatgttagaaaccctcagaacttaaaaaaaaaaaaaaaaaaaaatccctgcctgagagtctgtaagttgctac

SEQ ID NO: 481328 - DNA, 587 bp, Homo sapiens
agggctattttcagtttcaaacagtggaacctggaagcctgtgcttttggctcagggtcttggcctgacctgatgaaattgtggagaacagcccgatagagtgcagactctggtctcctaggtcccctctgtgaggcctgtgtcctagatgcctctgcatccctgtcctgaagggtagagtggctgaaagggagtgtggtgagaggcaggccaggagctgctgttggcttttgctgctggaccctcagggagggggtcctacagaggaagcagagcccaggcccatccagtgttggctgctggcactaaggcaggtggcacatgccatcacaggtcacagttctgctactagatgctcctggggaaggctgctgtgtgagttctaataattcacgtggagacacatttcatttatgacctgtctctacgtagtctctggcccccgtcatagggctggagggcagtgtcaagatgggtttaccccaaagacagagttgtcccrtggagttttgtatccaccccaagggaagatgtgggtctgtcagtagagatgacatccaccactaccacggataggacctgcctgt

SEQ ID NO: 481329 - DNA, 564 bp, Homo sapiens
actgtcccaagccaactaggacagggggtcaccctccacattaggaagaagctactcttgtcctgtgtggagcatgtacggaggacagagattcgggtagagaggtgagcaagactgctaaaattgtcctgaagagaattgatgagggccagaaygaagccagtgcagatggaaagaaggcaaattatttaagaatttttgagaaaagctcagcagcacatccagcccattgacctattctattctcctccaggtatcctatgcctgggcctcagtagactttgaggttcaccaaaagtactgtgctttccagccttccagccatgcttgaaacaccatccaccctcttcacccatggtataagcttgctttgaccatctcttctgagatggcctttctgaagcttaacactcatgggcactcccacttcctggctaatgaacgttttccaaaacaatcagtaagtgtgcatgagtagcagactccacctggtaggatggactgtcagcctctccgcagtggctgtgcctggacacggccacgggttcccactgacagggagta

SEQ ID NO: 481330 - DNA, 642 bp, Homo sapiens
gcatccaggagggcagatcctgcttattcctggacccccacaagagcacagggaggctcacatccacagccacagtttggacggctgtagcaacactggggaactcctgccccaactcagaaggagcggggccccactggctccttggagggtgcagccccagccacgcctccctgctgcagccagtgtgatggcagcagccactgccatcaataacagaggaccgcaggctgggggcttaaacaacacatttatttgctctcagttctgaaggctggaagtcctagatcacagtgttggcagggttgggtttctttggagacctctcttcttgacttgtaaatgccaccttctccctgtgtcctcacatggtctttcctctgtgcgtgtctgagtcctaatctcttcttaaaaggacaccaggcatattggattagggcccaccttaatgacttcattttaccttaattacctctagagagataagagctactcatattctgagctactgagggttaggayttcaacatgtgaatttggtgggatgcaattcaggccatcacagagccacaccacccttgtgggccatctgcaaggcagtacttacccaggtcagtggttaagcatcctgcactgtgttct

SEQ ID NO: 481331 - DNA, 568 bp, Homo sapiens
tctggaaagatgtctgttactcatttccaccttggtgtcacgaaagctagtctgaagggatacgtttaaatatttaaaattttaagatgcatgtggaacagcctgggttgcttcycctcctgagcagattaggttagaaagacctgggggcccctggataacccggcgtagctgtccaggagtgcagagattgggaaccagatcctgggctcttggcagcttcagctttatctggaaaattggagccatcatttcgaccatgctcacatatgaagataaatgacaatagcttgcgtgaaagtgtttttgaaaacaacaataacaacaaaacacagaaaaagaaggcatgatcttggctgcttttgatgtgactgtttcccttagcagggtgccagggatatggggaatttaggccaaattagccggagcttctcttattagcgaagattcgcttatcaggttccctgctgtcagcttggaagacccagagtctgaccccgaataatgaaatagaggacaaatgaagattctgtctctgagcaggactcgggatggggagcagtgggcc

SEQ ID NO: 481332 - DNA, 568 bp, Homo sapiens
tctggaaagatgtctgttactcatttccaccttggtgtcacgaaagctagtctgaagggatacgtttaaatatttaaaattttaagatgcatgtggaacagcctgggttgcttctcctcctgagcagattaggttagaaagacctgggggcccctggataacccggcgtagctgtccaggagtgcagagattgggaaccagatcctgggctcttggcagcttcagctttatctggaaaattggagccatcatttcgaccatgctcacatatgaagataaatgacaatagcttgcgtgaaagtgtttttgaaaacaacaataacaacaaaacacagaaaaagaaggcatgatcttggctgcttttgatgtgactgtttcccttagcagggtgccagggatatggggaatttaggccaaattagccggagcttctcttattagcgaagattcgcttatcaggttccctgstgtcagcttggaagacccagagtctgaccccgaataatgaaatagaggacaaatgaagattctgtctctgagcaggactcgggatggggagcagtgggcc

SEQ ID NO: 481333 - DNA, 422 bp, Homo sapiens
taggttgttgcatttacaaatcttaaattaaaaaggaaggtatatgcatggaagtcaatagcattttaggtatgtttaaagccatgaaactgaacaagatcacctaggaaatgattgaaagtagagaaaatatttagaagcaagttcttgtacatttcaatgcataggaataaatataagaaagaaatagcagagagagagacaataygtttccataaggaagggatggaatcaacagatagtggcatctggaaatcgaatgaaaaaagcagtgcttcaagaaggagattgtaatcaacggtgctaaaatgctgctggataattaatataaaggcaaacagaggtaatcagtgaaaacagtggccagtttataaatactcttgtgggataactgacatgacgtatgcaaactactaagccta

SEQ ID NO: 481334 - DNA, 422 bp, Homo sapiens
taggttgttgcatttacaaatcttaaattaaaaaggaaggtatatgcatggaagtcaatagcattttaggtatgtttaaagccatgaaactgaacaagatcacctaggaaatgattgaaagtagagaaaatatttagaagcaagttcttgtacatttcaatgcataggaataaatataagaaagaaatagcagagagagagacaatatgtttccataaggaagggatggaatcaacagatagtggcatctggaaatcgaatgaaaaaarcagtgcttcaagaaggagattgtaatcaacggtgctaaaatgctgctggataattaatataaaggcaaacagaggtaatcagtgaaaacagtggccagtttataaatactcttgtgggataactgacatgacgtatgcaaactactaagccta

SEQ ID NO: 481335 - DNA, 422 bp, Homo sapiens
taggttgttgcatttacaaatcttaaattaaaaaggaaggtatatgcatggaagtcaatagcattttaggtatgtttaaagccatgaaactgaacaagatcacctaggaaatgattgaaagtagagaaaatatttagaagcaagttcttgtacatttcaatgcataggaataaatataagaaagaaatagcagagagagagacaatatgtttccataaggaagggatggaatcaacagatagtggcatctggaaatcgaatgaaaaaagcagtgcttcaagaaggagattgtaatcaacggtgctaaaatgctgctggataattaatataaaggcaaacagaggtaatcagtgaaaacartggccagtttataaatactcttgtgggataactgacatgacgtatgcaaactactaagccta

SEQ ID NO: 481336 - DNA, 614 bp, Homo sapiens
gaatgctgccacgtagaggattgtactcagggacacggtaacagtaaactggaattgtggaaggcagctaacttatggcaaataagtagtaaccctagatttcccaggattcctgtggcttggctaatttgaatcattttgtggctctgagacataataggtgtcccttttgtttgggatctggtcccagggccactagggcaggtgcatagtggcctggaatgcaagagcctcataacagaagtgtttggggtgtgtatttaatcaactgctcaagataggaaactgataagcttgtagccaggccttacaactgggttaagatggcacttcaaaaaacaaaatgaaacaaaatatattataattaactccttgatggcttgacatcagttttgagcttgattatttggggtatttgagtggcccaagtagtagaggaaatttttacggtgtaggacttaagttaccctaaataacrtagaaagaattttgttatgagagtagaaaggaacgaaaagtctaaggactccctgtaggctggccccatatctaaggtcccatatatatggcattagtcaagaaaacaaatttaaaatgcttagagtctctaacaa

SEQ ID NO: 481337 - DNA, 470 bp, Homo sapiens
atcgttattttaaggccagtcagcttcggcagtcaagaacttcctagaggtctgaactggcaacatcccagaggctccccaccaaatacagaaacagcttacagaacagttgaactttgcctctaggaagaacacaggccagctctgcctgccatttgacttggttctttccttatctgtgcaccaatctaaaaactctggcacatgttagcttcaacctttgggtttcatctgcttttgaaaatctctttgcccagacctaggcctaacgattatgagctaatgttggaaggtggccagagatggttgtacatgctaatgcctcagaaacaaggcaggggccatctcaaaaagcagggacaaaacaaaggacaaaaaacaggaggtctccacaaasaactcaatctgactaaagagaggctcaaaaggtaatatgcaggagaggaactcttcatgttcctttaaatgac

SEQ ID NO: 481338 - DNA, 619 bp, Homo sapiens
tatctagtttccatatctatcatttttccactaaactttttttgaaaaattaatgtcttgatcttatcctgttttgtttacctttttctttttttaaaaaaactttaaagtattttatttgtcaaacactctactgtgttttcagttatgtctcttttaagttttgtggcttatggcttggctgtctctacagggtagcctcattttcctcctccatttgctgactgagttatgtgtacccatgtttcacctccttgtattatcatattatttacctcttgaaacctttttctttrttttaattgtattattttttctacagaattgatgatttcattaagttcttgagttcataggatgagctcacagatttgtacattcctctggcatgggttctttgtcatgtgtttttccctatcttttccacctttgttcttgtggtatttttttatatggattccatgttggtttctttttgaaaattgttcattcttgtatgagagaacttctttccaaatcagaaggttgaagagagggaccaggagaatgtgtacagcagaaaagaagtgaatctgggtatgagttcagttgtatgtctctgtgtgcaagaactgactta

SEQ ID NO: 481339 - DNA, 619 bp, Homo sapiens
tatctagtttccatatctatcatttttccactaaactttttttgaaaaattaatgtcttgatcttatcctgttttgtttacctttttctttttttaaaaaaactttaaagtattttatttgtcaaacactctactgtgttttcagttatgtctcttttaagttttgtggcttatggcttggctgtctctacagggtagcctcattttcctcctccatttgctgactgagttatgtgtacccatgtttcacctccttgtattatcatattatttacctcttgaaacctttttctttgttttaattgtattattttttctacagaattgatgatttcattaagttcttgagttcataggatgagctcacagatttgtacattcctctggcatgggttctttgtcatgtgtttttccctatcttttccacctttgttcttgtggtatttttttatatggattccatgttggtttctttttgaaaattgttcattcttgtatgagagaacttctttccaaatcagaaggttgaagagarggaccaggagaatgtgtacagcagaaaagaagtgaatctgggtatgagttcagttgtatgtctctgtgtgcaagaactgactta

SEQ ID NO: 481340 - DNA, 619 bp, Homo sapiens
tatctagtttccatatctatcatttttccactaaactttttttgaaaaattaatgtcttgatcttatcctgttttgtttacctttttctttttttaaaaaaactttaaagtattttatttgtcaaacactctactgtgttttcagttatgtctcttttaagttttgtggcttatggcttggctgtctctacagggtagcctcattttcctcctccatttgctgactgagttatgtgtacccatgtttcacctccttgtattatcatattatttacctcttgaaacctttttctttgttttaattgtattattttttctacagaattgatgatttcattaagttcttgagttcataggatgagctcacagatttgtacattcctctggcatgggttctttgtcatgtgtttttccctatcttttccacctttgttcttgtggtatttttttatatggattccatgttggtttctttttgaaaattgttcattcttgtatgagagaacttctttccaaatcagaaggttgaagagagggaccaggagaatgtgtacagcagaaaagaagtgartctgggtatgagttcagttgtatgtctctgtgtgcaagaactgactta

SEQ ID NO: 481341 - DNA, 613 bp, Homo sapiens
tgacagaaatagtagctgcaggtctgtttctcaaagatttttctctgctctacagcccagttacaacaatggcctttgagakcttcatctgcctatgcatgcatctctgctactccagtgtgtgaaatgggggaagcctccaaagccagccaacttaacttgacctttttattctcctcaagaagtttttaatttttcctttttgaataagcatgattacctagagaactctgtactatgctatccctgcctgaaagccacaatctcaggcaccttcttcatttagactttattttttaggcttacagaaaaatcgagtgtatagtacagagaattcccattcatctcatctccacccccaccttcacagttcccatattactgacatctggtattattgtggtacagttatttcagttgatgagccaatgttaatacataattattaattaacatccatagtttctatgaggactcacactttctgttgtacattctatgggttttgataaatgtataatgacatatgtctaccattacagtatcatacagggtagttccactgccctaaaaaaaatccctatacttcatctattcaaccttccttccttcc

SEQ ID NO: 481342 - DNA, 602 bp, Homo sapiens
gtagctgcaggtctgtttctcaaagatttttctctgctctacagcccagttacaacaatggcctttgagagcttcatctgcctatgcatgcatctctgctactccagtgtgtgaaatgggggaagcctccaaagccagccaacttaacttgacctttttattctcctcaagaagtttttaatttttcctttttgaataagcatgattacctagagaactctgtactatgctatccctgcctgaaagccacaatctcaggcascttcttcatttagactttattttttaggcttacagaaaaatcgagtgtatagtacagagaattcccattcatctcatctccacccccaccttcacagttcccatattactgacatctggtattattgtggtacagttatttcagttgatgagccaatgttaatacataattattaattaacatccatagtttctatgaggactcacactttctgttgtacattctatgggttttgataaatgtataatgacatatgtctaccattacagtatcatacagggtagttccactgccctaaaaaaaatccctatacttcatctattcaaccttccttccttcc

SEQ ID NO: 481343 - DNA, 652 bp, Homo sapiens
gggtaggagcatatttcatccaaataccatttaactaagtattttaaagttatatatcaggtgactaaactgctatatgttctatccttctaccttttaataagtttcataaaagacagacaagttgggtgaactgaaagttctcagctccttgtgtgacagcgctgggccagcaacctgcagctccactctgcaccacaggtggaaacctcagcccccaagtacagtctccatcaacctacctagctttgaaaggagctgcttcttgrccactccttggtttgaaagggtacaaacaccaatagcgtcctgggtcccttgagaggaaagacctaataagaaagcccagtaagatgtaggagacaggcttggggacctttgggtagagaatgctggggtcttctgcccaaaataaggtaaaggaacatactgggaagagcagggaattccagggtcctacagtatctggagggggaagagggccatgagcttcaggttcttcttggtcttgcggggcaaaccatggggagaggaacaccaaagagagcccttgtcaggccccctgaagtggggaatcatgccctgggaagcagcttcactggcctggggctaaaggtggtactgaactcatatgttgcgaatatcttccagg

SEQ ID NO: 481344 - DNA, 652 bp, Homo sapiens
gggtaggagcatatttcatccaaataccatttaactaagtattttaaagttatatatcaggtgactaaactgctatatgttctatccttctaccttttaataagtttcataaaagacagacaagttgggtgaactgaaagttctcagctccttgtgtgacagcgctgggccagcaacctgcagctccactctgcaccacaggtggaaacctcagcccccaagtacagtctccatcaacctacctagctttgaaaggagctgcttcttggccactccttggtttgaaagggtacaaacaccaatagcgtcctgggtcccttgagaggaaagacctaataagaaagcccagtaagatgtaggagacaggcttggggacctttgggtagagaatgctggggtcttctgcccaaaataaggtaaaggaacatactgggaagagcagggaattccagggtcctacagtatctggagggggaagagggccatgagcttcaggttcttcttggtcttgcggggcamaccatggggagaggaacaccaaagagagcccttgtcaggccccctgaagtggggaatcatgccctgggaagcagcttcactggcctggggctaaaggtggtactgaactcatatgttgcgaatatcttccagg

SEQ ID NO: 481345 - DNA, 652 bp, Homo sapiens
gggtaggagcatatttcatccaaataccatttaactaagtattttaaagttatatatcaggtgactaaactgctatatgttctatccttctaccttttaataagtttcataaaagacagacaagttgggtgaactgaaagttctcagctccttgtgtgacagcgctgggccagcaacctgcagctccactctgcaccacaggtggaaacctcagcccccaagtacagtctccatcaacctacctagctttgaaaggagctgcttcttggccactccttggtttgaaagggtacaaacaccaatagcgtcctgggtcccttgagaggaaagacctaataagaaagcccagtaagatgtaggagacaggcttggggacctttgggtagagaatgctggggtcttctgcccaaaataaggtaaaggaacatactgggaagagcagggaattccagggtcctacagtatctggagggggaagagggccatgagcttcaggttcttcttggtcttgcggggcaaaccatggggagaggaacaccaaagagagcccttgtcaggccccctgaagtggggaatcrtgccctgggaagcagcttcactggcctggggctaaaggtggtactgaactcatatgttgcgaatatcttccagg

SEQ ID NO: 481346 - DNA, 588 bp, Homo sapiens
ccacgtgctcagaactgggactgagcatctactatcctgcttttctagtcggttttgtaaagtttttcaggttttccttgttcaccccatatcctgatggtgttttttggtttctttggttgttactgttagctcaaccaccattgtggggttacacattgctgatgcactaagacgatcaaatacaaaaggctccatgagtgatgggtcctattccccagactactcccttgcagcagtggacctgaagagtttcaagaacaacctggtggacatcattcagcagaacaaagagaggtggaaagagttagctgcacaaggtagtgttgtttatgaggccttactgccatctctctctgtcttcacttctcctctaagagtttggattacttcttctagatttcttcttctatagaatatgtaagcccttgatggtattgggaatttggctactctttgatcattcatgagaaagttggctcatttattagataaaaagaggttctggtttgtttgtgccacatgggctgcagatctgtgtgtcagtgggtgstggcaaactggatactgaaagatgagataatgaaa

SEQ ID NO: 481347 - DNA, 525 bp, Homo sapiens
cacctttatattcctcctttgcttctctgtgaaaaacctaggtctgcgtccatggacgtcatcaggaaataaggctgaatggcttcaggctccattcccaagctctgattctgtggacacttagagaggctttttcagtgaatattttcaaatcrcctttaggactgctagataacaagctgctcagggagaatgaatagcagtgttagccttggcaccccaccccaactagttacagagcagtgactctcaaagacctacattcccctgtggtatttatctgtagttttatctcacgggtctctgtaagctttctgagcacatgtttttatttgccagcaatgcctattagtactcaccagtgggcctcactcttccatatctgttgcttagagaaagtaaaaattgattttttgaaagtaacgaaaacatgtcaatgttactttgtattgaattactttaaaaagttgtatttataaggtatgtgttcttaaaatatttgctattcctttccactatcttttt

SEQ ID NO: 481348 - DNA, 525 bp, Homo sapiens
cacctttatattcctcctttgcttctctgtgaaaaacctaggtctgcgtccatggacgtcatcaggaaataaggctgaatggcttcaggctccattcccaagctctgattctgtggacacttagagaggctttttcagtgaatattttcaaatcgcctttaggactgctagataacaagctgctcagggagaatgaatagcagtgttagccttggcaccccaccccaactagttacagagcagtgactctcaaagacctacattcccctgtggtatttatctgtagttttatctcacgggtctctgtaagctttctgagcacatgtttttatttgccagcaatgcctattagtactcaccagtgggcctcactcttccatatctgttgcttagagaaagtaaaaattgattttttgaaagtaacgaaaacatgycaatgttactttgtattgaattactttaaaaagttgtatttataaggtatgtgttcttaaaatatttgctattcctttccactatcttttt

SEQ ID NO: 481349 - DNA, 588 bp, Homo sapiens
aaaatgaaaattattcacagtcacttgtactgcataaaacattgctaaagtgaatagtaacacaatatttccacccggagtaatatttcagagactatgttttaaaggtggcaaagcgttagttcagatttgtttttgccgcaaaaaaatagaagaatattttcatgaaatccctgaagacaatgatattgrctttataagctgtttttcagtcatgctcctttggtcatgccttgtttatctggtccccatgtaacttaaaatctagtcagtgtaaactcctgaaacacaaactctgtgtcctcattctccactcccctttgtcttttaagatctgttacaaagaacctcgtgtcccctcttcacgttttaagattcaacattatgacttcctaaaaataagcatctgctggataccatggtggtggctgcttaaattaaacgtgttatgcagtatgaataaggaaccatggctgagaagccctttccttttagacatcatatgaaaatagaaaatgactgttttcaaggatagcctcatttatacactctgaaatgaagctaggagcagagcgcaaaaaacaaatt

SEQ ID NO: 481350 - DNA, 609 bp, Homo sapiens
tagcatcaaaatatttttaaataatagcatatttttaattatgggaagaatttcgctcctgtttttaaaaagtaaacctccaatgtaagaaagcaatttactttcttggttaaataaacaaaaattccttgaataaacttcctgcatttgggtacagtcaatgttggatgaaacttttcccagtattctgctataagttcaagttgcttagttgtctaagacaaaatgtgacaaacagatcaactagatgtcaagagatgcattctaggtttggatctgcttttatttaataccagcttctgggtctagaagtccccaagtcttccagtytcctggggccactctttcctttagtatgtgaaataagatggcacccgtctatctgatatgcacagcaggaagttcaagccttccccaagattttagggcatttccagagggacgttaccagttcatgtacacctcccattctggatttatgctccttctggattctcaatcactgtacttattggtcaatacctgggctgctgtcctctctctgaacttccttacgccatgcccaaccccacctctcttccctcgttttctcaaaggaccgctaaccac

SEQ ID NO: 481351 - DNA, 625 bp, Homo sapiens
tgcctatcaccattgtgttatattaagacttggattttccatgcaattttctagcaagttctcagatggaaagtgcaattacaggacaaacaggttgaaaagagatatccctgcaactgtgttcttcagaccttgtcctgagttccgtgyctagagagcacagcactgccccaaatccactgtgttataaatgtttctctacctcccgatgacctccctctccagtttgcgtctgtaaaatctggcccttcttagcttttgagaatagattccccaccaatggagagaagaatgagatctcaggatatcagataaactaaagatagatagagaacacctcactgcttctaaaaaagtcaatgtgaaccatcattctcatgtgaactctgattgataatcaccacaaatagacactgacatcagagatcactttgataaatgccagcaggcaaaagagaatgctgcttagatttttaacaccatattgcactgagaatatccacaggcgggatatataaaaatacaaattcagattatagcaaatccacgtaatgcagaagctatggtcaaacggtaaaagagagaaaattgaatcttttataggttgtagtttacatttatacat

SEQ ID NO: 481352 - DNA, 625 bp, Homo sapiens
tgcctatcaccattgtgttatattaagacttggattttccatgcaattttctagcaagttctcagatggaaagtgcaattacaggacaaacaggttgaaaagagatatccctgcaactgtgttcttcagaccttgtcctgagttccgtgcctagagagcacagcactgccccaaatccactgtgttataaatgtttctctacctcccgatgacctccctctccagtttgcgtctgtaaaatctggcccttcttagcttttgagaatagattccccaccaatggagagaagaatgagatctcaggatatcagataaactaaagatagatagagaacacctcactgcttctaaaaaagtcaatgtgaaccatcattctcatgtgaactctgattgataatcaccacaaatagacactgacatcagagatcactttgataaatgccagcaggcaaaagagaatgctgcttagatttttaacaycatattgcactgagaatatccacaggcgggatatataaaaatacaaattcagattatagcaaatccacgtaatgcagaagctatggtcaaacggtaaaagagagaaaattgaatcttttataggttgtagtttacatttatacat

SEQ ID NO: 481353 - DNA, 614 bp, Homo sapiens
ctggccaactcactggggcatcagcaccaaatgccttaaaagggaagggaatagtcatttcacaggcctaacttgaaaggaagtgagaggaggagagggtatttgcttcacgtttgtacccttcyaggttcactcttaaaaaagaatatatgtgttttctatagtgaagagttgacagacgaaacctgcaaacacatgtgtcaaattgcagaccaggggtcagtagtcagacctccacggtggtagagatatcaaaactgtgattatgaaaacccaacgttttaaagaataattaataaatatactttatgacatatcaaattcaactatctgtatgaaagctgcatggataattacctgagttttaaatatattatgtagctagacctacatccattcgatatctatatatctacatcaatatctctatatatctttctataatatatttacacatgtacaagtatatatgaatataaagtaaaacaaactggacccacagaaagactattcagacttggtgttcgtctacacagagtaggtcctctgatcccacttggcccctctcaccgccttggctattagaagaaccttcctctcagttcacccctggg

SEQ ID NO: 481354 - DNA, 614 bp, Homo sapiens
ctggccaactcactggggcatcagcaccaaatgccttaaaagggaagggaatagtcatttcacaggcctaacttgaaaggaagtgagaggaggagagggtatttgcttcacgtttgtacccttctaggttcactcttaaaaaagaatatatgtgttttctatagtgaagagttgacagacgaaacctgcaaacacatgtgtcaaattgcagaccaggggtcagtagtcagacctccacggtggtagagatatcaaaactgtgattatgaaaacccaaygttttaaagaataattaataaatatactttatgacatatcaaattcaactatctgtatgaaagctgcatggataattacctgagttttaaatatattatgtagctagacctacatccattcgatatctatatatctacatcaatatctctatatatctttctataatatatttacacatgtacaagtatatatgaatataaagtaaaacaaactggacccacagaaagactattcagacttggtgttcgtctacacagagtaggtcctctgatcccacttggcccctctcaccgccttggctattagaagaaccttcctctcagttcacccctggg

SEQ ID NO: 481355 - DNA, 614 bp, Homo sapiens
ctggccaactcactggggcatcagcaccaaatgccttaaaagggaagggaatagtcatttcacaggcctaacttgaaaggaagtgagaggaggagagggtatttgcttcacgtttgtacccttctaggttcactcttaaaaaagaatatatgtgttttctatagtgaagagttgacagacgaaacctgcaaacacatgtgtcaaattgcagaccaggggtcagtagtcagacctccacggtggtagagatatcaaaactgtgattatgaaaacccaacgttttaaagaataattaataaatatactttatgacatatcaaattcaactatctgtatgaaagctgcatggataattacctgagttttaaatatattatgtagctagacctacatccattcgatatctatatatctacatcaatatctctatatatctttctataatatatttacacatgtacaagtatatatgaatataaagtaaaacaaactggacccacagaaagactattcagacttggtgttygtctacacagagtaggtcctctgatcccacttggcccctctcaccgccttggctattagaagaaccttcctctcagttcacccctggg

SEQ ID NO: 481356 - DNA, 612 bp, Homo sapiens
ggccaactcactggggcatcagcaccaaatgccttaaaagggaagggaatagtcatttcacaggcctaacttgaaaggaagtgagaggaggagagggtatttgcttcacgtttgtacccttctaggttcactcttaaaaaagaatatatgtgttttctatagtgaagagttgacagacgaaacctgcaaacacatgtgtcaaattgcagaccaggggtcagtagtcagacctccacggtggtagagatatcaaaactgtgattatgaaaacccaacgttttaaagaataattaataaatatactttatgacatatcaaattcaactatctgtatgaaagctgcatggataattacctgagttttaaatatattatgtagctagacctacatccattcgatatctatatatctacatcaatatctctatatatctttctataatatatttacacatgtacaagtatatatgaatataaagtaaaacaaactggacccacagaaagactattcagacttggtgttcgtctacacagagtaggtcctctgaycccacttggcccctctcaccgccttggctattagaagaaccttcctctcagttcacccctggg

SEQ ID NO: 481357 - DNA, 439 bp, Homo sapiens
gctgtcactgtgcacctacaacgtgccagacaccatactcctcaacactctgtaggcacagaaggaacagataaaaatccctaccttcatagatattattctaggggtaacacaggtaaataaaacattaaaatagttttcacatagtagcaaattccatatagcaaaataaaacagaagaaggaatagcaaatgagggagatgccctcttaaacatggtgctgagggaaggcctccctgagaaagatatcatttaccccaaawataaaaaagcaagtaatagaaaaaacaggtaaaaggtgttctagacacttaaacctgccacattgagaactcagggttctgatgcaaaacctcgctgcatagaatgcattaacttatttttatacatttaaacaaacaaactctacttaagaactgtgttctaaaggaaggagca

SEQ ID NO: 481358 - DNA, 135 bp, Homo sapiens
tttttaccctcagtctgtaagtgtgaccaaatatattttttaaaggtttaccctctcaatctgttaagttcaaaggttwactataatctcttcataagaaaactattggaaagatggaataaaatacacagaaat

SEQ ID NO: 481359 - DNA, 556 bp, Homo sapiens
tctcaccatttcctaaatagcatagtcacaaagagctctaccctaccaagtactctgcaagtcccactctcaaaggaagactcacaggtgactgagaagataaatttgctattgtttccattatccttcagttcatctgacacctttgaagaaaygcatttggataagactcacaagtctcagggccccttctttatgaaagaaatagctaagcctccatactcagaagcatcagacttttcagaatgcttaagtcatgtaaaaacgtatcaaaattattatcattacagctaccaggaaatagctacctactccatgttagatactgcagttaagtatctcacacagtttcactgattcctaacaacactgcaaagcatgttactaacccttaaggagtaggaagctgaagctctgagaggctatgcaactactcaatggaaatgtggggatctgaactctacctagctccaaagggcgtacttttttctaaaatttctaatttttttccaatttcacaatggaggcagagttttcactacaattttaataattt

SEQ ID NO: 481360 - DNA, 556 bp, Homo sapiens
tctcaccatttcctaaatagcatagtcacaaagagctctaccctaccaagtactctgcaagtcccactctcaaaggaagactcacaggtgactgagaagataaatttgctattgtttccattatccttcagttcatctgacacctttgaagaaacgcatttggataagactcacaagtctcagggccccttctttatgaaagaaatagctaagcctccatactcagaagcatcagacttttcagaatgcttaagtcatgtaaaaacgtatcaaaattattatcattacagctaccaggaaatagctacctactccatgttagatactgcagttaagtatctcacacagtttcactgattyctaacaacactgcaaagcatgttactaacccttaaggagtaggaagctgaagctctgagaggctatgcaactactcaatggaaatgtggggatctgaactctacctagctccaaagggcgtacttttttctaaaatttctaatttttttccaatttcacaatggaggcagagttttcactacaattttaataattt

SEQ ID NO: 481361 - DNA, 556 bp, Homo sapiens
tctcaccatttcctaaatagcatagtcacaaagagctctaccctaccaagtactctgcaagtcccactctcaaaggaagactcacaggtgactgagaagataaatttgctattgtttccattatccttcagttcatctgacacctttgaagaaacgcatttggataagactcacaagtctcagggccccttctttatgaaagaaatagctaagcctccatactcagaagcatcagacttttcagaatgcttaagtcatgtaaaaacgtatcaaaattattatcattacagctaccaggaaatagctacctactccatgttagatactgcagttaagtatctcacacagtttcactgattcctaacaacactgcaaagcatgttactaacccttaaggagtaggaagctgaagctctgagaggctatgcaactactcaatggaaatgtggggatstgaactctacctagctccaaagggcgtacttttttctaaaatttctaatttttttccaatttcacaatggaggcagagttttcactacaattttaataattt

SEQ ID NO: 481362 - DNA, 599 bp, Homo sapiens
gaggctccagaccgaaaagtaaatgcactgtgaaacaggcattcttccatggaagctaaggctkcagggtttttcgttcttattttttttttggctattggtcttgcctggagaaaatggtatgtgtccacctgccttcctttctttctcaaggactcctttgtgagcagaggatttgcagtaattggttagggtgagcatttccggactttcttggaacatagtcctacacctgccctgagctctggagctcagcatggaaatttcccataaaacctttccatggtgcaatctataaatcaccctgtatggcaatattaaattttagaaatcagcttcctacctacgagtgcttgctggacaaactttgtccatatcttgtcaatgttttctctttagctgtgtatgaaggttacttccctcttaaaaatactaaattatagttaactgataatggcttgtcagcttcttctactcttagcccctgagttgtccatttcactgttaccttcagacaagcttaagacttactgtaaatatgttcctacagcatcctgcaccccttcatagctgctgggattgtcacactcagcaactaa

SEQ ID NO: 481363 - DNA, 599 bp, Homo sapiens
gaggctccagaccgaaaagtaaatgcactgtgaaacaggcattcttccatggaagctaaggctgcagggtttttcgttcttattttttttttggctattggtcttgcctggagaaaatggtatgtgtccacctgccttcctttctttctcaaggactcctttgtgagcagaggatttgcagtaattggttagggtgagcatttccggactttcttggaacatagtcctacacctgccctgagctctggagctcwgcatggaaatttcccataaaacctttccatggtgcaatctataaatcaccctgtatggcaatattaaattttagaaatcagcttcctacctacgagtgcttgctggacaaactttgtccatatcttgtcaatgttttctctttagctgtgtatgaaggttacttccctcttaaaaatactaaattatagttaactgataatggcttgtcagcttcttctactcttagcccctgagttgtccatttcactgttaccttcagacaagcttaagacttactgtaaatatgttcctacagcatcctgcaccccttcatagctgctgggattgtcacactcagcaactaa

SEQ ID NO: 481364 - DNA, 599 bp, Homo sapiens
gaggctccagaccgaaaagtaaatgcactgtgaaacaggcattcttccatggaagctaaggctgcagggtttttcgttcttattttttttttggctattggtcttgcctggagaaaatggtatgtgtccacctgccttcctttctttctcaaggactcctttgtgagcagaggatttgcagtaattggttagggtgagcatttccggactttcttggaacatagtcctacacctgccctgagctctggagctcagcatggaaatttcccataaaacctttccatggtgcaatctataaatcaccctrtatggcaatattaaattttagaaatcagcttcctacctacgagtgcttgctggacaaactttgtccatatcttgtcaatgttttctctttagctgtgtatgaaggttacttccctcttaaaaatactaaattatagttaactgataatggcttgtcagcttcttctactcttagcccctgagttgtccatttcactgttaccttcagacaagcttaagacttactgtaaatatgttcctacagcatcctgcaccccttcatagctgctgggattgtcacactcagcaactaa

SEQ ID NO: 481365 - DNA, 599 bp, Homo sapiens
gaggctccagaccgaaaagtaaatgcactgtgaaacaggcattcttccatggaagctaaggctgcagggtttttcgttcttattttttttttggctattggtcttgcctggagaaaatggtatgtgtccacctgccttcctttctttctcaaggactcctttgtgagcagaggatttgcagtaattggttagggtgagcatttccggactttcttggaacatagtcctacacctgccctgagctctggagctcagcatggaaatttcccataaaacctttccatggtgcaatctataaatcaccctgtatggcaatattamattttagaaatcagcttcctacctacgagtgcttgctggacaaactttgtccatatcttgtcaatgttttctctttagctgtgtatgaaggttacttccctcttaaaaatactaaattatagttaactgataatggcttgtcagcttcttctactcttagcccctgagttgtccatttcactgttaccttcagacaagcttaagacttactgtaaatatgttcctacagcatcctgcaccccttcatagctgctgggattgtcacactcagcaactaa

SEQ ID NO: 481366 - DNA, 525 bp, Homo sapiens
catacacataatatgcattccagaaggagagaatagagagaattgtggaggagaattcgtcaaacagaaaatggttacatcttttccaaaaatgatgcaatatatcaaaagctccattggatgctgagtagataaataaaaataatccagacctagacacatgatagggaaatgtaaagaggaaatgctggaagtaggtgtgggtggagggcaatgaggcatctctaatactgatgtaattgttgcaagaaaaaaattaaaatgtagttgtagtatcggagcctattctaatgtgcactcatgcgcaaagtaatgcaaggttgcttagtgaatactgactacatgccatgtgctgtcctaagaactggcaracagaaagataaataagacatggtggaagaactccagggaagaggagaaaggcatgtatacaaccatggtggatcgtattaatagcaccaatacttcaaacctccctgtgtccagtgattttttttgtgactttacagttctttccagagttta

SEQ ID NO: 481367 - DNA, 525 bp, Homo sapiens
catacacataatatgcattccagaaggagagaatagagagaattgtggaggagaattcgtcaaacagaaaatggttacatcttttccaaaaatgatgcaatatatcaaaagctccattggatgctgagtagataaataaaaataatccagacctagacacatgatagggaaatgtaaagaggaaatgctggaagtaggtgtgggtggagggcaatgaggcatctctaatactgatgtaattgttgcaagaaaaaaattaaaatgtagttgtagtatcggagcctattctaatgtgcactcatgcgcaaagtaatgcaaggttgcttagtgaatactgactacatgccatgtgctgtcctaagaactggcagacagaaagataaataagacatggtggaagaactccagggaagaggagaaaggcatgtatacaaccatggtggatcrtattaatagcaccaatacttcaaacctccctgtgtccagtgattttttttgtgactttacagttctttccagagttta

SEQ ID NO: 481368 - DNA, 463 bp, Homo sapiens
ttttgttgtgcatgtttcctcataaggctataagttcctgaggacaaaactaggccttggttaatgttgtatagtcagcatytagcacaacacatggtacacaggaggccctcaaatatgtctgttgagtgaatgaatgaacaactgcagcttctgtaacttgttttctgtgtgatgctgctgttttctcatggacattttatgtcattggagaatcagctattttgtttgagaaacagttctagaagactacaagtaccacaatgcctcagtaatagaatttctagaggtttgtacataaaaggcccttatccaacacggaatatttttaaaaatcatttaaacatggatgttgataggccagatgcagtggctcatacctgtaatcccagcactttgggaggccaaggcaggagtattgcttgaggtcaggagttggaggccagcctgggcaacacagtga

SEQ ID NO: 481369 - DNA, 497 bp, Homo sapiens
agcttttctgaagaggtgattgattatccagacctggaggctagagggacaggagagagcctgtgtgaaagcccagggtagaacaaagagatttgtccccttctgatccatctggggaagatgagttaagaaggaaaatcccaggagttaaggctgaatagatatgtttccttttttctttctttctttctttttttttttttttttgagatgcggtctcactatgctgcccaggatggtttaaactcctgggttcaagcagtcctctcgccttggccttccaaagtgctggaattacaggcacaatccactgcacccrgcctggagagagatgttttcaagtagcaactggtcaaccacttgttggaactattatattggaaatgtgtatgtagaggatagaactaaactttatagacttccccagtttggggatgcttaatttgccatgtaacaggggcttacctcatggtaagccacattctggcccaggtagc

SEQ ID NO: 481370 - DNA, 559 bp, Homo sapiens
ccagccctcgtcctggagtccgctttctacaagacggcctctcccttcgtcggagcccggatcctgcgccacttcctgcgccttctacgaccccaggcggcccgacaggcaccatggccacaacctcatggccttggacttaggcttcgaccacaacgcgccgccgccttgtagggtggcaacgcgcctcttggccccgggggtgcaagcggtggccgcgcgcttcgacctgctgctgatcgcccagcacctggacgagtccctggggctcctgcgcgcactgcgctggggcctggatgacctggtggccgtccccgcccactggcgcgcggccttcgggcccggagccgctggagccgcgcgtggagtgcagggcgagcgcctagaacgcgctggacytggcgctctgtgcgcacttgaaccgcacgctgtgggcgtggctgggcgcgctgggggccgctgggctgccgctggaggtggctgcgctgcgggagcggtgggcgcgcacctgcctcctgcatggcgaggcctgggggcggggcgcggagcttgacccgca

SEQ ID NO: 481371 - DNA, 545 bp, Homo sapiens
actgaacctgcactgtgtgtccgcctgggaggcccctcatggcccctgcacctgttctttgacccagcctaggtgaagctccctcctgcctgcacctgtagatgtcttcccttgagtgagtgcccyctgctccctgcacctggctgtgtccccagctaggccaggccccctgcacgtgggctgtgtccctgcctatgggaaggtcctctcattcttggctccctgcacctccactgtgtccccacctcagcagggacccccaagcttgttgacctgcctggggtctggtctgggtgagaccctcctccacctgctctgtgtcccctctggtcaagagttggcagcagcccttgccccagccccacattccctgccctgtactgccctcacctgccctcaggagaactcaggaccacgcctcacatcaacgtccctcccaccttcccgccccgaaagcgctttccagagatgaaaaccgaaagtgccatcgccattcacttgaatttcctgcagaggggccagctacccacagctgcgtggagaag

SEQ ID NO: 481372 - DNA, 625 bp, Homo sapiens
gtgggtagctggcccctctgcaggaaattcaagtgaatggcgatggcactttcggttttcatctctggaaagcgctttcggggcgggaaggtgggagggacgttgatgtgaggcgtggtcctgagttctcctgagggcaggtgagggcagtacagggcagggaatgtggggctggggcaagggctgctgccaactcttgaccagaggggacacagagcaggtggaggagggtctcacccagaccrgaccccaggcaggtcaacaagcttgggggtccctgctgaggtggggacacagtggaggtgcagggagccaagaatgagaggaccttcccataggcagggacgcagccacgtgcagggggcctggcctagctggggacacagccaggagcagggagcagggggcactcactcaagggaagacatctacaggtgcaggcaggagggagcttcacctaggctgggtcaaagaacaggtgcaggggccatgaggggcctcccaggcggacacacagtgcaggttcagtgggggtctcaccccagtggggacacagtgcaggtgcaataagcctggggccctcactgagatggggacacagcatccatgcagggaggcggaaatg

SEQ ID NO: 481373 - DNA, 625 bp, Homo sapiens
gtgggtagctggcccctctgcaggaaattcaagtgaatggcgatggcactttcggttttcatctctggaaagcgctttcggggcgggaaggtgggagggacgttgatgtgaggcgtggtcctgagttctcctgagggcaggtgagggcagtacagggcagggaatgtggggctggggcaagggctgctgccaactcttgaccagaggggacacagagcaggtggaggagggtctcacccagaccagaccccaggcaggtcaacaagcttgggggtccctgctgaggtggggacacagtggaggtgcagggagccaagaatgagaggaccttcccataggcagggacgcagccacgtgcagggggcctggcctagctggggacacagccaggagcagggagcagggggcactcactcaagggaagacatctacaggtgcaggcaggagggagcttcacctaggctgggtcaaagaacaggtgcaggggccatgaggggcctcccaggcggacacacagtgcaggttcagtgggggtctcaccccagtggggacacagtgcaggtgcaataagcctggggccctcactgagatgggracacagcatccatgcagggaggcggaaatg

SEQ ID NO: 481374 - DNA, 529 bp, Homo sapiens
tggtgttcccagaggcccaggtgccctctcccacacgcctgggccctctgggttgtgggaaccggccagctcctgctctgtcccctcaggtgtcctgcaggcacagcatctcggggggcccaggccgatggcaggtcttaacgtgtccctctccttcttctttgccaccttcrccctctgtgaggcagccaggcgggcctccaaggccctgctcccagtgggcgcctatgaagtcttcgcccgggaggcggtgggcgcggtgcagctcggggcctgcttcctggagatgaggacgctggtcgagctcgggccctgggctggggactttgggcctgacctgctgctcaccctgctcttcctgctcttcctggcgcacggggtcaccttggacggggcctcggccaaccccaccgtgtccctgcaggagttcctcatggccgaggagtctctgcctggcacgctgctgaagctggcggcacaggggctgggcatgcaggccgcctgcaccctgacgcgcctctgctgggcc

SEQ ID NO: 481375 - DNA, 529 bp, Homo sapiens
tggtgttcccagaggcccaggtgccctctcccacacgcctgggccctctgggttgtgggaaccggccagctcctgctctgtcccctcaggtgtcctgcaggcacagcatctcggggggcccaggccgatggcaggtcttaacgtgtccctctccttcttctttgccaccttcaccctctgtgaggcagccaggcrggcctccaaggccctgctcccagtgggcgcctatgaagtcttcgcccgggaggcggtgggcgcggtgcagctcggggcctgcttcctggagatgaggacgctggtcgagctcgggccctgggctggggactttgggcctgacctgctgctcaccctgctcttcctgctcttcctggcgcacggggtcaccttggacggggcctcggccaaccccaccgtgtccctgcaggagttcctcatggccgaggagtctctgcctggcacgctgctgaagctggcggcacaggggctgggcatgcaggccgcctgcaccctgacgcgcctctgctgggcc

SEQ ID NO: 481376 - DNA, 271 bp, Homo sapiens
tcctgtgtgccccaaactaaagggcctaaacctatgttcatccagtttggagaaatagaaaacattagaaggcaaaggtgaccatgagcaagttggcctccagtcacctagagtgatgctcctgcaatccaatcaagataagggcttgattgatgagagggtcaggcatccyttggcctgacccctggctggggacccaatgctatacacccatgagtgggtaaaatgctcaggggatggagaagaaatgtttctgggactcctcaacacg

SEQ ID NO: 481377 - DNA, 584 bp, Homo sapiens
tgacatcaccaaagacacagcagggcaaaatctacctctggatggaatggcacaagcccacctgaggggtggtttacaaaaacctggcactgaagctgatcacgtgtccagatccggctgtaagaaacacgggggagacaggctatgccgacagacactgcgggatgcctgcatcgaaacccagacgtgggagacttcactcacaaacgacctctgctcttcaacagataaattacaagatgagaaggtgagggaaataggttaaaagaaatttaagagacctcatgtggatcctcaatttttaaaaagttaacaacattaggtgagtgcctttggtgcgtaaagagcttggcagtcacgaagctcatccttacagcaagaaaagctgacaaacctgaaaatcagtgttttctttcaccsatcaaagctttgagcttgcagggcatactgcaaccccaaactctgaagagacagcacagagtctcagcggagaccggcgccctggagcaaaagccactggagccgctgctggcaggaggccctagatggcagttctagtgaattgctggaggctgtgtgtggac

SEQ ID NO: 481378 - DNA, 397 bp, Homo sapiens
aaattcagcaacaagaaaacaaagagctcaattaaaaaggaggtaaaaaatccaaacaaacctcatcaaagaaaacacacagagagcaaggaggtaaaaaatccaaacaaacctcatcaaagaaaacacacagagagcagaaagcacaggaaagatgctctgcaccgcgtgttgtgagggagctgcggactgaagccgcggtgagaagcctctgcacacccacgggaatgtggggcacccacctgactgacgacatggaggcccrggagcagcggcagcccgcgcctgcgtccggcgggagcgccacatggcagagccgcctgggggcagctcggtgtttctcacagaagtcgccacggccccacacagaccccagtgtcacagtccttggcagacc

SEQ ID NO: 481379 - DNA, 593 bp, Homo sapiens
ccttccaagcagagggtagcctgagaggcttagtggggttgaggtgagctcctcgtgggtggggtggcagcaggcctggtcctggctaggcagtgtgccccgtgatggtgaatgcaggaacagaagggggagggtggggagaggctggtgccgtgaccacaggccacaccgcagggctggacacagccaggcccgggagccaggtgtacggttttcaagaccccctcattccatgcggatggttgtggggaggtggggagagggagccgctggaatgggccaggmctggatgcgtgtgcagtggcaggggcagacccccaggacctgggtaccagaaaacgatgggggctctgatacagttgtggtgtttcctgactttggtctttgaggatcaccaaagccctggaaagatctggctcagccaaaggccataggtgctgtggggaggggaaagaacagagatggaggagcccagggctgctggtcccccgacccccccaccaaatgcaccctggctccctgagctggttctgggtccaacttgtccctgaagcctccaatgccccagagttagggacaggagggtttccagc

SEQ ID NO: 481380 - DNA, 602 bp, Homo sapiens
cagctcagatcaatagaattgggagtggctgccctggctggtgtgccaggcccctcggaagatggcggggrctgtgcggggcccctcagaggatgtcgtggggaagtgacctggccagcctgccctgcctgtccggtgaagctgctgactgttcctggagtctcaaaacatgaggagaggccccactctctaaagcgtgccttgtagctccgctgtgacgcagaaattggaagcatttgaaagtaaatttaactgttatcccgtaatcatcacctgcataaataatcctcttcatttgaacacaccagacctagcagttttgtgagccagctgagctgtccattaggtgcacttcggtccgacctggcagagctagtgtaggttggcctgggggcagaagttgagtgtgagtgcttccgtcctcctcctctctcctcacattctctgccctgaggaccggaggacgtgagggccctgagcctgcccagccattctgcagatgctggaggctggctggggacgcggaccctcagccatgtgcggcccctgaagtgagttcctggagtgaggggcctggctgtgctcatgacttactcgctgtg

SEQ ID NO: 481381 - DNA, 602 bp, Homo sapiens
cagctcagatcaatagaattgggagtggctgccctggctggtgtgccaggcccctcggaagatggcggggactgtgcggggcccctcagaggatgtcgtggggaagtgacctggccagcctgccctgcctgtccggtgaagctgctgactgttcctggagtctcaaaacatgaggagaggccccactctctaaagcgtgccttgtagctccgctgtgacgcagaaattggaagcatttgaaagtaaatttaactgttatcccrtaatcatcacctgcataaataatcctcttcatttgaacacaccagacctagcagttttgtgagccagctgagctgtccattaggtgcacttcggtccgacctggcagagctagtgtaggttggcctgggggcagaagttgagtgtgagtgcttccgtcctcctcctctctcctcacattctctgccctgaggaccggaggacgtgagggccctgagcctgcccagccattctgcagatgctggaggctggctggggacgcggaccctcagccatgtgcggcccctgaagtgagttcctggagtgaggggcctggctgtgctcatgacttactcgctgtg

SEQ ID NO: 481382 - DNA, 602 bp, Homo sapiens
cagctcagatcaatagaattgggagtggctgccctggctggtgtgccaggcccctcggaagatggcggggactgtgcggggcccctcagaggatgtcgtggggaagtgacctggccagcctgccctgcctgtccggtgaagctgctgactgttcctggagtctcaaaacatgaggagaggccccactctctaaagcgtgccttgtagctccgctgtgacgcagaaattggaagcatttgaaagtaaatttaactgttatcccgtaatcatcacctgcataaataatcctcttcatttgaacacaccagacctagcagttttgtgagccmgctgagctgtccattaggtgcacttcggtccgacctggcagagctagtgtaggttggcctgggggcagaagttgagtgtgagtgcttccgtcctcctcctctctcctcacattctctgccctgaggaccggaggacgtgagggccctgagcctgcccagccattctgcagatgctggaggctggctggggacgcggaccctcagccatgtgcggcccctgaagtgagttcctggagtgaggggcctggctgtgctcatgacttactcgctgtg

SEQ ID NO: 481383 - DNA, 499 bp, Homo sapiens
ctctgtgccagggcatgggcaggtgcctcagagctcagggcctggccatgcctgccgtggctggggtggccctggcatgtgtgtgtcctagagcccaggatggccgtggtgagggaggccacattgacacccctgcctcgaacatacacacaggggctgcagactgggagccctctgctcagcaggcagcscccaccctctcactcaggggtcctgatggcagcccccaccccctcactcaggggtcctgatggtggcccctaccctctcactcaggggcccagcaggcagcccccaccccctcactcaggggtcctgatgctggctcccatcccctcaggggtcctggtggtggcccccaccccctcactcaggggtcctgatggcggcccccatctcctcactcaggggtccttatgttgacccctaccccctcactcaggggtccccccagtggcagccccactccctcgcctcaggggcccctgatggcctggct

SEQ ID NO: 481384 - DNA, 499 bp, Homo sapiens
ctctgtgccagggcatgggcaggtgcctcagagctcagggcctggccatgcctgccgtggctggggtggccctggcatgtgtgtgtcctagagcccaggatggccgtggtgagggaggccacattgacacccctgcctcgaacatacacacaggggctgcagactgggagccctctgctcagcaggcagccccyaccctctcactcaggggtcctgatggcagcccccaccccctcactcaggggtcctgatggtggcccctaccctctcactcaggggcccagcaggcagcccccaccccctcactcaggggtcctgatgctggctcccatcccctcaggggtcctggtggtggcccccaccccctcactcaggggtcctgatggcggcccccatctcctcactcaggggtccttatgttgacccctaccccctcactcaggggtccccccagtggcagccccactccctcgcctcaggggcccctgatggcctggct

SEQ ID NO: 481385 - DNA, 499 bp, Homo sapiens
ctctgtgccagggcatgggcaggtgcctcagagctcagggcctggccatgcctgccgtggctggggtggccctggcatgtgtgtgtcctagagcccaggatggccgtggtgagggaggccacattgacacccctgcctcgaacatacacacaggggctgcagactgggagccctctgctcagcaggcagcccccaccctctcactcaggggtcctgatggcagcccccaccccctcactcaggggtcctgatggyggcccctaccctctcactcaggggcccagcaggcagcccccaccccctcactcaggggtcctgatgctggctcccatcccctcaggggtcctggtggtggcccccaccccctcactcaggggtcctgatggcggcccccatctcctcactcaggggtccttatgttgacccctaccccctcactcaggggtccccccagtggcagccccactccctcgcctcaggggcccctgatggcctggct

SEQ ID NO: 481386 - DNA, 373 bp, Homo sapiens
ctctgtgccagggcatgggcaggtgcctcagagctcagggcctggccatgcctgccgtggctggggtggccctggcatgtgtgtgtcctagagcccaggatggccgtggtgagggaggccacattgacacccctgcctcgaacatacacacaggggctgcagactgggagccctctgctcagcaggcagcccccaccctctcactcaggggtcctgatggcagcccccaccccctcactcaggggtcctgatggtggcccctaccctctcactcaggggcccagcaggcagcccccaccccctcactcaggggycctgatgctggctcccatcccctcaggggtcctggtggtggcccccaccccctcactca

SEQ ID NO: 481387 - DNA, 542 bp, Homo sapiens
ttaggcagccccatggagtggccgaccagcctgaccttccagagggcggggcatggtgggcagggtcatggccttcctgcgatgaccacgtgtgacctctccccacagtccagtggacagagcgggagtgtgagctggcgctctgggccttccggaagtggaagtggtaccagttcacgtctctgcgggacctgctgtggggcaacgccatcttcctcaaggaggccaatgccatcagcgtggagctgaaaaagaaggtgggctgcccactggctgtaccgtttcctgttggagagagtgtgtcacctcactcatgacggggacagctacttgggactcagcacttgrctctctgccggccccgggggtggcatagcagccctgcctgacctggccccccagaagggtgggcagtgagggagcccagacctggccaggtgggacttggctgctcacgggagacggcggccgggtgggcaggcaggaagtaggtggtcccccctggcggctgtctgaaaggttccagtgaaccattgtggggc

SEQ ID NO: 481388 - DNA, 580 bp, Homo sapiens
tacacgctcggtcggggcccagtggcaccccgaagctcctacacgctcggtcggggcccagtggcaccccgaagctcctacacgctcggtcggggcccagtggcaccccgaagctcctacacgctcggtcggggcccagtggcaccccgaagctcctacacgctcggtcggggcccagtggcaccccgaagctcctacacgctcggtcggggcccagtggcaccccgaagctcctacacgctcggtcggggcccagtggcaccccgaagctcctacacgctcggtcggggcccagtggcaccccgaagctcctacacgctcggtcggggcccagtggcaccccgaagctcctacacactaggtgtccctagtgtccccgctgtccccaccatctgcaggcctgtggaatttttcctaggaatacatctccagtcttctgtgtgggagagcgtatcatcagggctcagtgcagggaaaagaatcttcctcaagcasaatgagagtaagacctgagacgcttgggaggcctgggaaaggaatatgggggctctgaggggggttgtggcctccaggtcagccc

SEQ ID NO: 481389 - DNA, 616 bp, Homo sapiens
aaaataatagttggctcaggggccccaccacattcctcaccattcacagtgataatttataatgtaaatagtgcygttcagaatcgtaaaacatggcagcagtgctgggcactgttctcatcacttattatgtgtcaactcttttaattctcaaatgattctatgaagaagagaatactgtgtacccattttacgaactttaataggtcaaagtcctactttacacaataagcaggggagccatatttcaaagcaaggctttctgaccctagaacttacttgtaaacatcactctctgctgcctctaagaaaaaaaataagggaaacagggtctaactagtaacaaccacacttaacagtatagtccaagatggactaaaaaataatacacgagatataggcaaaagtttcctcatttctcaggtcaaaacggttccacttagattgtgggtttgtttatattttatgttctaataatatgaacctattaatatgaatctcattcctaagaaaagtaataattagataagtatattttaatatgactagagtttaagctatgcccatcttattgaaaaatgctgttttttgtctctctcagacacaagcatttcca

SEQ ID NO: 481390 - DNA, 638 bp, Homo sapiens
aacaaccacaggaactgctctgatacagtgtttctcatccttatgatcaggcacaggttcttgccttaacatcacaggcagaagtgtcagccacttcctaaaataaaagcaatcagcaatgccagaaaccaattttacaacaaactttcattgaagtggagaatgttgatagtcagatattgatagagtgataatttttgggacattatagaagaagaaacctggcaaagggagtatccatcttcaaattcacaaattcattctttcaacagatcattatcaactggcctactacatgcaagtcataactggggatacagcagtgatatcctcatggtccttagatgatttcagccgatattttcaagtgccttctctgtgtcagataccatgctagagtctcaggacacacagttaaaastcacagttgctgcctttaaggaactcacagtctagttggaaaggcatgcaattcaggaagtaaagcataaacagtgctacaataaagaattgcacagagtgctagggagccctgtctggggaaacgcatgttaagaaaatctttcaggtcacatgaagactgaactgagtcttcaatgatgaggaagactgacccaagctgaaacaaaaagaaatta

SEQ ID NO: 481391 - DNA, 589 bp, Homo sapiens
tgcactccagaaactcaaattttttgccagtctgtgcgtgtctgtgaatgactcgtaagtgccattagtattgattacggtattacaataaatttcataagtagatgagtttacaaatacagaatctgcaagtaagaattgactatattatgagtaaagtgattgcatatctctgtgctccaataacattattttgtttccttttactcttcatagaatttcatctactatccctcctcaggactcttccatattcagcctgtctggatctcaagccatgtgcyctcagcctctgtgcctagatgaatatagcaatcttcagtttcttgtcatttttgaagttagtccttcttccaaactgattccagagttatcttgctaaaagcaaatctgagcatactgcttcaatgcttagctattcctgtgaactcctcattgaccatagaataaaaccctgaagttcaaactttcggttcactgtgtagcacctgcacaacttagtctaaacataactcatcttctgcctccactctccttatattttacatattaaccacacttacattcttctttatccatccttgttttt

SEQ ID NO: 481392 - DNA, 626 bp, Homo sapiens
ctggaaatatgcactccagaaactcaaattttttgccagtctgtgcgtgtctgtgaatgactcgtaagtgccattagtattgattacggtattacaataaatttcataagtagatgagtttacaaatacagaatctgcaagtaagaattgactatattatgagtaaagtgattgcatatctctgtgctccaataacattattttgtttccttttactcttcatagaatttcatctactatccctcctcaggactcttccatattcagcctgtctggatctcaagccatgtgctctcagcctctgtgcctagatgaatatagcaatcttcagtttcttgtcatttttgaagttagtccttcttccaaactgattccagagttatcttgctaaaagcaaatctgagcatactgcttcaatgcttagctattcctgtgaactcctcattgaccawagaataaaaccctgaagttcaaactttcggttcactgtgtagcacctgcacaacttagtctaaacataactcatcttctgcctccactctccttatattttacatattaaccacacttacattcttctttatccatccttgttttttcataggcctttatttgcttatagctca

SEQ ID NO: 481393 - DNA, 642 bp, Homo sapiens
gcctctcacacaggacagctggagcatcacctcacggcggccttgggggccctgggagcagttctccatcccgcctagaccatgctgtggagtccccaccgtgyagagccccggcctcgtgcagagccccggcctcatgcccatgtccttctctcagccgggctgggagctctctgagggccagtacagtgtctcgggcaatggcgtgtcctcagtggtcctgacacagtgtgctgctggtttctttatggaatttagttggacagaaatgatgattaggggaaactagcccagaaaaaaaaaattaaaagccttctatggatggaattctctaattgttttagtaaatgcttgtggtgttataaagaatcgcacaggagcaaaggctgagaagcctcctctgtattgtctggcatgcacctgtgccgcccatgtcagagctgactctccttgcctccgagagcgatctggccctgggaggcacctgcagccggcgcgaagggcaccttgccagtcccactccacagtcccacttcatttaggcctgtcctgtgaaaacagggagtcagaagaatttcccatccataaaaaggagctgataatctaccttgaaggtgaaaatgtaggtcttataaaacacat

SEQ ID NO: 481394 - DNA, 635 bp, Homo sapiens
actggatttaggctttctgtcctccccgggaagttgtctcggagactggtcctcatatgacctcatattgtccctcctcccagcttccatggccatcttctccctcatggcctttgctctttccgtttccaaagcgatggctttctccagcagggtcaggttccccttggtcatgtcgaacacctcttcagacctgtccgagttcacagaggtggtatcgtcgtcccgctcatgacacccatcctccttcgcacagctggcaaacactctcgaccgggggctcaactgctcctccagccgcatgaggttcagcatgtccgagtagtttctgtccggcgtccttcckgggaagtcctcttctggccggacatgctgacggatgttcatgttctgctgcggattcctctcctgcgggttggtctcactgagcttcctggccaggtcgaagcactgattcctcaaacactccagactgctcagacacacctcctcatcgctctcctccaccatcttttccatgagtccgttgttcatgggcttccccaacatgacgtaattcatatttctactgtcttgctgcgacatgctgtctgcataatttctgtcattcatgttttctgagagcacaacaccgt

SEQ ID NO: 481395 - DNA, 666 bp, Homo sapiens
ctccgtggatgcagggagaggttagttttaagatgataccaaatcatcatattctttctcccaactgtgtccacagtcttcctctggttgaagcctcgcataccaaacatatgatctttgtttctatgttggtctcagaactcattgccttttctgctgactgcagtgaaaactggttggctaattctgcttttcacagtctgtctgcgtttcaacttgctttcctcatcagggatatttccctgagaaagacaggagaggataattggctaatcaatatggagaatggtgtcctgcagggaagctggggagttcagaggccacacagcagacccctcaccccctccatgctgtcctcctgtgaaaactcaagcctatgaaaatttgtcttccacaaataccaggatgctctagcaacttggggctagcacctcatcctgtttgaaagaaaacacaccctgggaactttaccatgaraaaagaaatgtttctgtgagaaggaatttttatagcatgagttctgccttgaattccctttaaaaaagaaggtggggagtggaaacaccccgttagaaaattgtcccatgcacaggactgatttacagtgaggacagagcctgatactagaatggaacaggcacagattactggccatggtgatcccac

SEQ ID NO: 481396 - DNA, 447 bp, Homo sapiens
gacactcacttaatacagtgtccagaaataatttgccaggttgatctactttccaaatattttactacacaaatctattattttaattcttagcatctcatgaatgacactggtgccttgtgtccctggtagatttaatagcgatgatggtaagtctgttgataggtgttctgataggccttctctacccagcattctaccatagcgagacaaaaaatcttgggagactaattttaatttatgtaatgcatgtgtgtgtgcatatgcatctatgtgtatatacatatcwatctatgtgtgtgtacatatgcatctatgtgtatatatacatatctatctatgttctgtatatctatctgtgcctgtgtatatatgtacatgtaagtaagtgatggattgtttgcataggaatcttaagccactgtaacaatctaggattatttcata

SEQ ID NO: 481397 - DNA, 680 bp, Homo sapiens
ctccagggagccccgtcaaccttctcaggtttttcactaaaatggaacatcacttaaagagcaccctggtaacctgaatatattcatacagcagcttagttggccaatctcactgccatgaggtaggtggttagaatacttctgtggtaacattatcaacattctagtcttgcaagtggcaagggtggtgagttctgttttggcagaaaagaggcagtatgatttcgtgaaaagcagatgctgatagaaacacaccgaagcactggcagaccagtcaatccactcagtccgtggaaacaraggtactgaacacccacccctttgcttcgcacaatgggacttggaataattaattagatggcaaagcctctaaaaccaaaaagaaaacagctaaattgagacaataagataagcacacatggaaaatcaagagcaacgcgaggtggttgacacttagatggtaaatgtctagcgacacagagttgctaacaacacatgaccctgaattccaggatgagcaggaatgacatgatggagaagggggaacttgagatgggtcttaaaggatcagtaggagagaaaattccagcaagaagaatcataaatgagcatagagctgtgggatgagaatgatggaaaatgggcaacagttgtgaagggtgactgtggacacgcagtgg

SEQ ID NO: 481398 - DNA, 600 bp, Homo sapiens
ctgtactgcacgcaaatttctkctgtgtattctgttgatgttcccaagttcccaaattgtatattttttaattattagttcaagaaatcagaacaagattataattgtgaaatctggccttgaccaatacaggtcatatacattacagactgttcatcagtatacttattgttttcagtgccctatctgaaaataactatgttccttctccttgaattggaattatttaaaaaatatatctccttttaccaaatgtcaaaaataagctgtaagcccagcattctgagagactgaggtgggaggatcacttgaacccaggagttctaggctgcagtgagctatgatcaggccactgcactccagcctgggggaacggggtgagactctgtccctttaaaaaaattaaaataaataaaatcatgctctaagatgcattacatgctttgcatgtattaaatccaccgaattaatcatgttgcattcacaatacaacaacacaggccatgcccagaggtgtgtctcctggggctgacgcactacagacaggcaccaggcaaactactttctttaggatgatggccaggtgttcattttgtacac

SEQ ID NO: 481399 - DNA, 559 bp, Homo sapiens
gtgaatctacagttacctcaaaacagtttaaaaccaaaatctgtgtgatataatcccagataatgacaaatgccgtaaagaaaaacccactcattctcatttgggagattagaggaagggtggatgaggagaaaggccagcaaaactttggctgagaacagagtgtgactgagagccccaaggasgttccgcctggctgctgttatttttgttttcagctaagctgcctgctaaacatgccgtttaagagttcatcctgggaattccattaccagtgatcacaagcagcatctgtgacagggaactgtgagcagccagaaccgtgggtgcatattccttcctaccgcacctgaagaactgggaaaaggaggtcactgactcactcactccttacctaattgttctgtgaatctttacctagtgaggacctattgttaaaagcacactgtagttggatggatggatggatggacggatggatgtgcacacacatttagtaagcagcagcatcatataccctgcaagggcatttagcctatagttcatttgtcagtggctt

SEQ ID NO: 481400 - DNA, 559 bp, Homo sapiens
gtgaatctacagttacctcaaaacagtttaaaaccaaaatctgtgtgatataatcccagataatgacaaatgccgtaaagaaaaacccactcattctcatttgggagattagaggaagggtggatgaggagaaaggccagcaaaactttggctgagaacagagtgtgactgagagccccaaggacsttccgcctggctgctgttatttttgttttcagctaagctgcctgctaaacatgccgtttaagagttcatcctgggaattccattaccagtgatcacaagcagcatctgtgacagggaactgtgagcagccagaaccgtgggtgcatattccttcctaccgcacctgaagaactgggaaaaggaggtcactgactcactcactccttacctaattgttctgtgaatctttacctagtgaggacctattgttaaaagcacactgtagttggatggatggatggatggacggatggatgtgcacacacatttagtaagcagcagcatcatataccctgcaagggcatttagcctatagttcatttgtcagtggctt

SEQ ID NO: 481401 - DNA, 592 bp, Homo sapiens
acaagctcaggtcaagttgcagttaggaatgcacctcaggctggaagtgccaaggcaggtgagagactcagtgggagagagcttctcacccacctctaatccaggcatgtcaggtgcagagttccaatgctttggggggttgaccttccaccagtttgggtggcaggctcatgggaagggtagattgacttctctgaccccaattgagggcaggttgcttcagtccagcaactggtgggaaggggaatttggcagtgggggatgggggcagacattatcttctgctctgaatcagggacactcatatggctctgtgtttgccctgcaagtgtttccctgctccaatgagtacaacattaaatagcaaataaaagccatcagatcagtagacagtttgcataaataagaaaaaagctatgttgcataatcttttaatggcccctttttcctgctacttaaacaagtgtcttcctcttttttttagagacaggtcttgctatgttgctcaggccrgtctccaactcctagcctcaaggaatcttccagtttgagcctctggagtagctaggattataggtgcaaggcactactc

SEQ ID NO: 481402 - DNA, 657 bp, Homo sapiens
ctctgttccaggtaccatatatggtcctggggatccaaagctgaaaattacagaattcctgctaataaattaagatctaaaatctgttgtgataagtgttgtaagatactgtagtagggtatgtataaatcacaggggagaacagaggcataatttaayttgcatatggggaagagtgaaaggccatagacaggaggtaaatttttagctggagcttaaatggaatggtaaggttttgcctatcagaaaaaggagagagaatattctttgcagagaaaactgcatgttcaaaggtgtggaggcatttgctcttgggtagcagtttttgaggtaggtgttatgcttaccattgacaagttctttacaggagaaataaatagagttactgtgagaaatactattatgttattcacagtgactaatacttgaaataagaagcaggtaattttgaaaaaagataaacagtactcgaaagcgtaagtggacattaaatgttttataattactctccacactacctttttaaagaaagcttttgtgaaagaaagaaaaagggaaagaatatgttttcatcacttgttaaagaggtttccatggaaaagctgaatctcagtttagggcttactgatggtgaaattactagagtgtgcttcagaa

SEQ ID NO: 481403 - DNA, 563 bp, Homo sapiens
tatgaggcaaatctaccattaaatgtactactactattaaatgtataaaggttacatgcagaattacattaacagtctctggcaataaaggaagacaataaatamtatttagaactacataagtgtggacattacaaacaatagaaaatgcaccaaaactataaccattcttttatttgtataatgggattatgcatgatactatttcttttctctattttctgtatgtacttatcataggttggtaaatccataataaaaatatctgatacttgatatatctatgttaggataaaagtatcaagtcagcactgcttgaatataaggaaactcttcagagaaatctagttgtcctgcagctaatgatcatattacccaaagtactctgatatttacctttttagatttaagaaaactattatgatagtatatgaaactgatcaacactttgccttaaatcaaatatgcttattgctcatctatttcattatgaaagatacaaatataaataagtcatttttctagtcctgcagtagcttacagttgaaaagtgaggacagctg

SEQ ID NO: 481404 - DNA, 621 bp, Homo sapiens
acggagcagaaaacaaatatttaaaaaaggaaatgcagtagaatatattgttttcagattaggaaactgcttcctcttatagagtaatcacctcaaaatagtatgatcaacaatattaagaagattttcaagaataagctgtcatgattggtgattggtgtaataatcatttagaaaagaataagtagaaaggaagcattaagataaataatgcagcatacttttgagcttgtctcatgctgctactatacacatgaaattttttcatcaaagttcatgatatatttttatataaacacatcagagtcaaagattgttcatattgtttttatgatagcatattgttacagtagatcattatttaattatatatgctaaatatccacataagatgttatagaggaatataaatttgaagtattttcaatgcatatcgcaaaacattgccccaaaagtgaatacaaatttcaagcttatttatatgcctgtattgaatacatgtcaaatagaattttgatcaattattcaatttattttctaaaattataattttgggraaaaagaaaatgatatgacttttcttacaggccacgtttaagggatggatggatattatgtatg

SEQ ID NO: 481405 - DNA, 627 bp, Homo sapiens
aattatttttaatagacagcctccaggaaacagtctggatttgggagcagacaagcccaaatgaaggaacaacttgttcatgggtaatcctcagtctctaggatacaaaacaagtgcttatccaaatacttgctgaactaatcattgaataaatccagaaacaagcctctattgttacattcattcagcccatcttatttcttgttcccaaatcctcaaaaaagttcaaacagttgtaaagacacttggcaaaaatgacaatttttttttccctaggatagtttaacctgagtggaaatgttggctgttcacatttttggagagggaaaaagcttcaggagtactttgacctgctgctttgtcaaaaccattgagtgagttaagaaattgctagaataaaaaggagttgagtcagactcacatgtgcggcacatttcagtgggcacacgcttgagtcacagtgcataggttcaaatcctgctctgccactcaattctgtgcagttaagcaagttacccaatctsatgtgcctcagtttctccaattgaaatgtagaaattattatacttatttttttatgggagtggtaaatgaggcaaattacttggaagagtgtctgacagtgaa

SEQ ID NO: 481406 - DNA, 399 bp, Homo sapiens
gcggggcctctaaacatgaaaagtgtcattgttgttttgtattccttgtactttctggagcccttaaacacagatacaaacaacatccatccaaacagaccagtcctcctaggaacatttggcaaagctcagtaggtctttcttggatactgacttcatagatggtaacactgaytcaccatggcctatgtgcttgtgtgcttccacctgagactaggagctttcaaaaaaacaaataaacaaacagaaacaaagaaaaacaaaacaaaaacagagtcttgacttcaagagaagggaagagacttattttcctactttccttgttggcttactttggggcttcaatcactttatgttaacttttggtgactcatacactggccgctcctaacatttcag

SEQ ID NO: 481407 - DNA, 616 bp, Homo sapiens
gatttaatgagagaacttacttaatgtccttagtgcctgaatgcagtaagcacttagattttagctattattatcataactgttatagtctcaccaacctagatgatctattaatgctttcatatattctcttttttaattatgcatttatgttttaaaataggcagtatcatattaggcatatgcaattttgtgtcctacttcttttcaattaatactatatcctgtgtgtggagcytctaatggaacacaggtaagagcattggcttaggaataagcagacctcagttagaatttaactttacaacttacatacccaggtgtgtggctttgggaaaggctacttaacccttcggagactcagtttctcaactgagttggtgtgataattgctacttacaaggctgtgaggagaattaataagaaggaaggttaaagatctaggtcgagacctggcaagttgtaagtactgaacacttgttggttcccttatcaaaggaaaagtatagtaatgtttctgagcttccagagttagagtctgttgtatgtctctgctgactgaaaaatcttaacatttccatcgatagatcaatgccatgctggaatgtccatttta

SEQ ID NO: 481408 - DNA, 616 bp, Homo sapiens
gatttaatgagagaacttacttaatgtccttagtgcctgaatgcagtaagcacttagattttagctattattatcataactgttatagtctcaccaacctagatgatctattaatgctttcatatattctcttttttaattatgcatttatgttttaaaataggcagtatcatattaggcatatgcaattttgtgtcctacttcttttcaattaatactatatcctgtgtgtggagcttctaatggaacacaggtaagagcattggcttaggaataagcagacctcagttagaatttaactttacaacttacatacccaggtgtgtggctttgggaaaggctacttaacccttcggagactcagtttctcaactgagttggtgtgataattgctacttacaaggctgtgaggagaattaataagaaggaaggttaaagatctaggtcgagwcctggcaagttgtaagtactgaacacttgttggttcccttatcaaaggaaaagtatagtaatgtttctgagcttccagagttagagtctgttgtatgtctctgctgactgaaaaatcttaacatttccatcgatagatcaatgccatgctggaatgtccatttta

SEQ ID NO: 481409 - DNA, 585 bp, Homo sapiens
aatgcaaatggaaaatctgcaggatcatctgcccaggagcagcaggtgaaagcaaagatagaaactcgatgctttcaattaatagactggctagytgtaggcgggtaattccattgttagaaactgcctgttgtcacaatcctgatacagtaatgacttcttttattccctataaagctgaagatgtcagaaactaaaaatttccatagcataaatcatgcctttttcagcttgtgacagccactgtctcaaactcaattagtcattgtgcacaaggaaagccgagatcatcacagattcacacatgcttaatggataaagcatgactggggagagatttcctctgtttaatttctgctgttcgtgttcattggtagatcacatggctattaaaataaatagggcagtggaagtttcttttgggcagggttaagcagatgttctttatttaaaaagattgaatgcattttatcctagagagaaaatttgggaggcagaggaaatgaaagaggcatcagagggtataaagagtgtttatttagaaagcttgtctcattgcttgaatgcagacccttcccattggga

SEQ ID NO: 481410 - DNA, 585 bp, Homo sapiens
aatgcaaatggaaaatctgcaggatcatctgcccaggagcagcaggtgaaagcaaagatagaaactcgatgctttcaattaatagactggctagctgtaggcgggtaattccattgttagaaactgcctgttgtcacaatcctgatacagtaatgacttcttttattccctataaagctgaagatgtcagaaactaaaaatttccatagcataaatcatgcctttttcagcttgtgacagccactgtctcaaactcaattagtcattgtgcacaaggaaagccgagatcatcacagattcacacatgcttaatggataaagcatgactggggagagatttcctctgtttaatttctgctgttcgtgttcattggtagatcacatggctattaaaataaatagggcagtggaagtttcttttgggcagggttaagcagatgttcttyatttaaaaagattgaatgcattttatcctagagagaaaatttgggaggcagaggaaatgaaagaggcatcagagggtataaagagtgtttatttagaaagcttgtctcattgcttgaatgcagacccttcccattggga

SEQ ID NO: 481411 - DNA, 636 bp, Homo sapiens
attacttgttaaattcaatacacactgacttttgctttggactstgtgtgtgtgtcgggatgggggttggtgattatttttccatttttgtttttggtttactgagaatatttccatggagtacagaaggggaaagactttaagcaaccatgatgaccttggaaactggttatgtgccttatttaacatataattataattaaagttaactaaagtctattccatcttcctttactatggttgcaagtacccccaaaaaagatggtaagctagatttgacaataccacatgcttcaaaatttaggcttgggaattgaatcttttgttatcatatgtggatatataaaaacacatttttaactcttaaatgtattactactgtaataattagataaatttggtctcatcctattacatccaaattgccacttaaatgctggttttaaagtaagaagagcaaggatcttcctggcaactataatagtcaaagaaaaccagcagtgactgaagaaaaaaatgaactgctgagatgaaactatcactgtaactcccagcaaatgtcaatgctatccttatcttatacctgtgattctggaagctttcagagtttctctttgagacttgctccagtaacca

SEQ ID NO: 481412 - DNA, 644 bp, Homo sapiens
ctgatttttcagctagatttcgccaacaggaatgtctgcaagaaactggaaggatggaggaaggtgaagcagagtctttttctcccaatccatctcagtcagcatctcaggcaccagctccccgttgtctaaagcactatctccatccccactggacaggcctgccaggattccagattccttcaggcaactctggcccctggcctgactcctttgtccagacagcccagggactggctgttgggctaatcttgaagtgtcttaatgtcatttgttatcttagctcttacrtcaacagtgaaactgaattcctttattcaattcctcctgtttcaaatactcatgagaaatatacttcctgattttatacaaagaagagatggctgtctgttaccttcatatgcaaatgacaacctagcatgatgtaaaattcatgagctgtatgtgtttgttttactaaagtttggagcagtgcctctcatacgttagccatgcatctgaatcacctggagggcatattaagacactgatttctgagttccacctccagagaattcaaattagtatgtccgggatagtggtccaggatttggcattctaacaagatcccaagtgatgctgaagctgccagcctgcagaccaca

SEQ ID NO: 481413 - DNA, 565 bp, Homo sapiens
acatcttatacatgtctattggtagaaaaaaccacttatttatcttgggttaatacctgagagtggaatgaatgattcattarggtaggccctctttagcttttagagatggtaccaaacagttttccaaagttgcatcaaatttatagtcctgtccacagttgtgagaatttagaaagcctatattttcatgttctaagtttgatttcgctgagttgtatttttttcactcctgcatccccatgggactcatatttgtttagtgataattgattttatctttatatatttcacacataatcgtagggacgtttctctcatgaactgtccacattttgtgtttgaatcaggtgggggagtggtcaccattttaaactcagactacgacttgcttgtgcagaggagatgtacacatggtgtctgtgtagatgattgggggaaggattgtgatacagctaatctcgtggtgtcagaggttctttggtgtgctatattctgcctcctgtcctctgggagcagtgtcctatgctcacatgagtggtattccctgcatgtatatgtggtt

SEQ ID NO: 481414 - DNA, 553 bp, Homo sapiens
gttgtatttttttcactcctgcatccccatgggactcatatttgtttagtgataattgattttatctttatatatttcacacataatcgtagggacgtttctctcatgaactgtccacattttgtgtttgaatcaggtgggggagtggtcaccattttaaactcagactacgacttgcttgtgcagaggagatgtacacatggtgtctgtgtagatgattgggggaaggattgtgatacagctaatctcgtggtgtcagaggttctttggtgtgctatattctgcctcctgtcctctgggagcagtgtcctatgctcacatgagtggtattccctgcatgtatatgtggttcattaactcacgatctccatctttggctctagcrgaggccagtggcatggcatgcacccactggctcaggctcaccttcattgctctgccatctggctgcactgacattgggctctgatccccagcccttgctacagaaccacgtggccactgctacagtagctaacctgctgtgtcttcactacatgagtattaagggcag

SEQ ID NO: 481415 - DNA, 637 bp, Homo sapiens
cagtctgggctcagaaagtcgtcaaccatatgccccaggggaggccgggggcctctctgccagggctggagagtgggccacacccccartgtatgcagccaattcaatcagacctcagccacccaccgagccctgcctgcccagatcccctctgagaggagcatccaggagcaaacctcctcccttcagcttagcctccgtcccctgctgtccaagggtaggtcagggaacccccactcccagcccctcaagcctccgattgctgtctaggggcttcttgtttttcctcctctggtacaacccaaggagggaaacacaaggcagaaaagccagtggctgttgctacaggaaacacatctctgttagccacacctcttcagtacaggcctagaattttccacaacaccaataggttcatttttgaaggaagcagcttctttgacattcactccgctaacttcacatccctctgagtctctggtttcacccacctccttctgacaccatgcaggtcatcactgagggcaggagggaaatgatgggccctccctcagccccattttctcatctgtaaaatgaacagggaggagcatcaaaagagatcaagtggggcccactcaggtgatttaaaagaaaa

SEQ ID NO: 481416 - DNA, 637 bp, Homo sapiens
cagtctgggctcagaaagtcgtcaaccatatgccccaggggaggccgggggcctctctgccagggctggagagtgggccacacccccaatgtatgcagccaattcaatcagacctcagccacccaccgagccctgcctgcccagatcccctctgagaggagcatccaggagcaaacctcctcccttcagcttagcctccgtcccctgctgtccaagggtaggtcagggaacccccactcccagcccctcaagcctccgattgctgtctaggggcttcttgtttttcctcctctggtacaacccaaggagggaaacacaaggcagaaaagccagtggctgttgctacaggaaacacatctctgttagcmacacctcttcagtacaggcctagaattttccacaacaccaataggttcatttttgaaggaagcagcttctttgacattcactccgctaacttcacatccctctgagtctctggtttcacccacctccttctgacaccatgcaggtcatcactgagggcaggagggaaatgatgggccctccctcagccccattttctcatctgtaaaatgaacagggaggagcatcaaaagagatcaagtggggcccactcaggtgatttaaaagaaaa

SEQ ID NO: 481417 - DNA, 537 bp, Homo sapiens
tttcccccggcctgccttattaaaatcgcagccaggaaaccgagcagttcggggaggtgtgatgctgaaaaccagcttccgcgcgacgccgggtcggagcccgcgaggggtgccgggggggacagcccagggtgcggcttctgtcccgacccagtcgccgctcccgggggctcccgcccggagagcaccctccggccccagcccgacccctgagctccccctgcccgcttagaaaggaactctgaccgccaccggagagggcgtttgcccgagccaggagtccgagaggggtggaaagttctcacctatggtgaagctgtagccatcgatgctgaaagtggcgctccggcattttttgaagccctccttcctgttgccgrcgtccgtcatggctcggccggccgggcaggggcctcgcagcgagaccagcggcgtctgcggtcccccccacggcggagtgagcagcccggggctcggcggcgaatcctcccccggccgcgccgcgctgtcactctcagccccgccgcgcgctggcag

SEQ ID NO: 481418 - DNA, 564 bp, Homo sapiens
tgtgtcataatccccgtttacagaggagtaaagtgagactcaaaataaaatgtgcatcacagacctaggtcacccactacagagtcctgattcaggccaccaattttggaayggggagagaacgaaggtgaatctcacaatccaatcctgatccctgtgatacagcagtcccccatctcttgctctgatctactctcatcagctgaagaacaatcgctcagtgacaaaagaacaaaaatctcaaagagaattacaccaacctcaataactatgcaggtccttaaaaaagacaaattaagacccctcatttcttttgtgatacagcctctctttaagcacaatcacagagcagagcctgcattgttagcccggctttgatttacaaaaacacagcgcagatgagtttcaaaaggaagaacaatttatgaaaggcaaaatgacaataaatgtaggaggagaagaatcaaggggttggaatctctaaaccattgtaaaattacttttgggtggctgtgggaatattactctactatgttaatttctccagcatgcataaaatagatg

SEQ ID NO: 481419 - DNA, 647 bp, Homo sapiens
tattataactaagccaaacaaagaacaattccttaatatcatcaaatattgtgttctaatatctaatcatctcccaaatgtcatamatggttgctaggttctttttctagtttgttagaatctggtccaactaaggtctatgcatggcatttgactaatatatttttaagtctttttagtctacaggtattgcctgtagtttttttttttttttttttctagtttgttagattctggatccaactatggtgcacagatggcatttgaccaacatatttttaaatctttttagtctacaggtattgcctccattcttttttattttccttgcaatttatttgagtgtattgtctttgagattgttttaaatttcttgcatgagaggaactggagcttggaggagtttatgaaatgatatagaagaaggtatttttctctttttcatatttgtcttattttagaaatatccatttgggagctgaaatgaaaacatccacttcctcactcccagtgtacccaactgaatatcatgacatcaatacaatctcctcaggtccatggttagataactattgtcttcttgaaaatcaacccaggatcccaaaggaccaaaatcactgagagaaggccccagtccagggagcaat

SEQ ID NO: 481420 - DNA, 597 bp, Homo sapiens
ctttgacaatgtacctgctttctggtgtaacaggatatctgaaccttaccttgcaatttctgtgctccaaacctagaatcagctattttgtgaagaagcacaactacattctaagcagctagctgagtccatcatccaacaatacagcaacttccttattttgccctcaatgagctctgttagggctggaaccaaacatgtttgtatgtgtatctttggggtttaacatgggcttactacctagaaaggcattcaataaaggtttgttgaatgaaaacmcaacagacatcagccaggctcttaaccctgactgcatgttagaaaaatctgaagatttttaaaaaatattgatgcccaggccccataaccaaatattctgatttgatttgtctggtatggagagacagtttagcctactgctaaaaatatagactttggggccagactatctaactttgaatcccaaattcaacatttaccctctgtttgacttctttagatggcttcagtttctgcacctttaaaataagggaaataatagttgcaggctgttgagagaatcaaataaattaacacatgcaaagtgcttagaatttt

SEQ ID NO: 481421 - DNA, 608 bp, Homo sapiens
tttagacacccctttattttaacacattttaaatgtcaaacacttagcattttacaaactagtacatgcatggaaaaattccaaaaagctgataattacacaagtagcccctgcccctgcctctgtccaggccccttcctcagaggcagccaagtgacatttttagctaggttttgwtgttgttgttgttgttgttgttgtttggtggttaacccatgtttctaaacaataggtttatgttgctatttcttggtttgttgatcttgggtgttataggttggttggctgacgatttctttcttacaccgcattcctcctccaccctccccaaagagttaatttttttgagttatatggtgcctagatattatggctatgtaaatattcatttcagacctaagtggtgcactatgattgtttccatttgtttaaaccccccccttttttttttttgagacaggctctcactctgtcacccaggctggattgcagtggtgcaatcacagctcactgcagccttgacttcccgggctcaagcgattctcccaccttagcctcccaagtggctggcactgtgggtgcgcaccaccatgcccagctaatttttt

SEQ ID NO: 481422 - DNA, 497 bp, Homo sapiens
ttccctcctcgctggggtttccaaccttggcgtgtatgtgaactcctataaacgccgcacatgcacatctgtgatgaccgtactttatggggatttgggggttgtggtaggcaaaataatggttcccctaaaaggtccgcagaacccagaacctcccaagtgggtggcatcacacaagaagggggctggggctgctggtcagagagagcatcctgggttttccagacgggcccagtgtaactccagggtcctgaaaagtggaagaggggtcagagaagaaggtgkgatgaaaaagcaaagctgggtggcttagctgccggcctggaaggtggaggacaggccacaagccacaaaatggtggcagattccagtggttgaaaaaggcaatgaagtggattccttttagagcttccagcaggaatgcagccctgcagacaccttgattttgactcactgagatccattttgggcttctgaagtacggaaatgcaagtacg

SEQ ID NO: 481423 - DNA, 607 bp, Homo sapiens
tcaataaatcaacaatcagacccttatgtaaatggtattcacgtcctattacgagaagtccttgttgtaccagtatgcgccttaactcatttgctccaagcacaaagactctaggttaaaatggcttgtctatgaatccttctgcctgggacacatttccccctgacaaatagcaatagtaatattaacgtatgatcatgtactgctttaagagctttatatatgtaaactcatttaatcactcagctccttgagctagctttctaatattatttgcagttttcacatgagaaagtagaggcagatgaggctaagtaacttggcagggtaacataactaggaaccagagacgagatctgtacccaggaagtcttattctcaaccatgacattgacactatctccttcactctagttaggcatctgctcaaaagccaactcctctgagaagtcttcctatccacactaaatagtgattctccattactctccacccttacctgctggagttttcttgatagcattaataccgctttacattacaacagtatatayatgcatctgtttattatttctctcccccgctaaaagtgaagctctatgaggac

SEQ ID NO: 481424 - DNA, 414 bp, Homo sapiens
gcaacagagcaagactctttctcaaaaaacatcaacaaaaataaaaaaaawaaaatttgttacattctacaaacttggtctaaacttggtctaattcctttgcatttagggagccgtgggtatgaacacatgttttgggaatgctggggtgaagaggtgcgaaagctctgtctactttgatctccagaaactaagtcataaatgttagaagagggggtgaaaaggctttgtaatgacaaggccttaaaaaatgtgaaagctatctttattttcataactaatgatggtaaccattaaccatcatgtgcctatcatccttttaatcaaatcccagaggcaactataaagagaattcttgtcctagactagctagatttccaaaggcagggtctgtataagcccctccctataggc

SEQ ID NO: 481425 - DNA, 524 bp, Homo sapiens
gctttagtttgaatggttttggccatacctcatggatttaacacactgtagcatattcccaataacacagattctgccaggaaaactgttggcacagagaatacaggtaggggcatatggtctgaaaaagaacttgcccaggattcatcatctttgctccttccaagcaaacttggtttttgtcctatgcatgtggygtgtgctaattttcatcctatgacctttgggtgtgctcttctccctaactggatgacttcccttcattctctcagccttccctgtcctcctacttctctgattaactgcactccaccctcatttctctcttgctgtctctgccctcattttgtatctctctattagtaagatatctttgtgtgtccataatgcctaatatcataccatgttgaccactctgaattattgataaatgttaactgtaacatgtcactgtatgatatttaatactctaataaattgtaacatcccaaagtcttttcttctttctcattacaagtaaaata

SEQ ID NO: 481426 - DNA, 512 bp, Homo sapiens
gccgcttactccatatgtttctcattctaacatgttgtctcaaatatttttagctactaagcacacactctggtctgctatgttttgccttataattttttttttgtgcacattttagatgcctgcttttgggttttgcattattctgtggtttcctgcccacttgctccgccctttaattgctccaccagcactcagtctccgctgcctgccaaggctggctcccccttttcctaatatccccggctctccccaagggccgtccttaatccaaagtgctctccaatgctttgcaaaattgaamcccctctgtttatcctgccccctcccctcaatgtccgtggcagttatctcacttgggctcccatttcctgctcttattcttggctccctgccagtcatcacacattcacatgaaatcctgcctctcctcaccgaagggaaaggctgtttccattcatggaaagctcatttgccacaaagatgctacacccttgccacaggcagggtgt

SEQ ID NO: 481427 - DNA, 512 bp, Homo sapiens
gccgcttactccatatgtttctcattctaacatgttgtctcaaatatttttagctactaagcacacactctggtctgctatgttttgccttataattttttttttgtgcacattttagatgcctgcttttgggttttgcattattctgtggtttcctgcccacttgctccgccctttaattgctccaccagcactcagtctccgctgcctgccaaggctggctcccccttttcctaatatccccggctctccccaagggccgtccttaatccaaagtgctctccaatgctttgcaaaattgaaccccctctrtttatcctgccccctcccctcaatgtccgtggcagttatctcacttgggctcccatttcctgctcttattcttggctccctgccagtcatcacacattcacatgaaatcctgcctctcctcaccgaagggaaaggctgtttccattcatggaaagctcatttgccacaaagatgctacacccttgccacaggcagggtgt

SEQ ID NO: 481428 - DNA, 458 bp, Homo sapiens
tggccgggaaacaaatgtgccctaagatgtgtcaggctctgtgatccaggtttatgtcagcttcaacggaggcccatgggacgggtaggtggccaggccgtgaagaycatggagggctccctaaaggaagtgacgcttgagctgaatctttaaatatgagtagtgctagtcagatgaagacaacaaggaaggcattcaggagaggaagcaaccacaccccacactgatgccaagtgctctttctgtcttaacatgtctgatcacatcattctactttatgtccaatctcggcttcccaagaagataaaggcgaggctttccagcagacattcaaagccttgtcccaacccaaccctaacctctggccttgtccccacctgacccatctccagccactccttgtcatgagcactgtgttctaagctcaccacatggactcccaccaccatacctttgct

SEQ ID NO: 481429 - DNA, 458 bp, Homo sapiens
tggccgggaaacaaatgtgccctaagatgtgtcaggctctgtgatccaggtttatgtcagcttcaacggaggcccatgggacgggtaggtggccaggccgtgaagatcatggagggctccctaaaggaagtgacgcttgagctgaatytttaaatatgagtagtgctagtcagatgaagacaacaaggaaggcattcaggagaggaagcaaccacaccccacactgatgccaagtgctctttctgtcttaacatgtctgatcacatcattctactttatgtccaatctcggcttcccaagaagataaaggcgaggctttccagcagacattcaaagccttgtcccaacccaaccctaacctctggccttgtccccacctgacccatctccagccactccttgtcatgagcactgtgttctaagctcaccacatggactcccaccaccatacctttgct

SEQ ID NO: 481430 - DNA, 486 bp, Homo sapiens
aggagggcacggtccaggtgaggcattgggtctgggagccccctgcctgtgtagtgacaatgcaggcctcgccaagcaacgaggatccgggtttgaccatttgagcctccccctaggagggcaaaggtgggtggaggacagttggaggaatagtagcaggagccagagtctgctcagtgaggaaggaaagcaaaacgcagagccaagtgaggcctccacagacagcgagcagtggaccatgcagccagtggcttggctgaggggtggctgtttgagaccacagggcctttttagaaactggggtttctgtgacctcccaaaaactgtctggtaaaaccatcccttctaaatggccacatctccagcaccagggagtaaatgtttaagcaaagagctaaggatggtggaaagacagtcaggctgggagccgcagacgtggggttgagcccagctctgccrttgactagcccccgacttggcacgggt

SEQ ID NO: 481431 - DNA, 634 bp, Homo sapiens
ttaaaaaaaattatcttttggccccacattttaaaatcccttataaacctatttcaataaggttttgccccaccatagcacagaagccactcctgctacagtcatcactaaatttatagtgctaaatataaggccaattctcaggccttgctatagttgatgtctcagcagtatatgacatagttaatagttttcttccttcatatacttcttcacttgcattacaggaaactacattgttttcctcttacttaccagtggctacatctccatctattttcctccctctgacttctgaatgttggagcatctgctctctgaagaacagatgataagtctgtcttggcatgacaactcccagtttcttctcttcttctctttctttcttcaccccagggctcagccctccacatgttctctacytacactctctccatgattccaatcaatctcatcctattcatatactaataatttatgaatctttacctctagttcagaccctacaaccaaatgcatatatccagccacaatcgaacatctccacttgtatatctaaaagactttgcacatttaaaatatcaaaagcttacgtatttgatatccccccttaaaaaatttgatccatcatctc

SEQ ID NO: 481432 - DNA, 623 bp, Homo sapiens
atttaccattcaagttaagggaaaatacgctaaggttcttagaggaaggatgctagacagatgcaggttgaatattataaataagtcacaagaacagatttcactttctcctgtttcccaagccttaacatgattaacttgaagagtctacaactcttccactgttaataatagtcaaggaggaagtcatagacagttttatagacccactcataggtgatttggtaggctccaggtcacacaggacactggctacttgagttccaatcacagctactctaccattgttgtaaacatattttaagcaagaggaacatacagccatcaaaaggacaactgtgctcatgttttccagtctaggtaagatctcagaaaggctataaaccttctcactgccaggcatggtggctcacatctttaatcccagcattttaggagactgaggtgagaggattgcttgacgcygggaattcatgactaccctggctaacaaagtgagaccccgtcatttcaataaaaaaaaaaatttttaaatcttctcactccaaatagttatgtaaataaaatatgtgaaacactttcatcaaaaatgacaaaaccatagtgcctgaaatctaaaacaa

SEQ ID NO: 481433 - DNA, 542 bp, Homo sapiens
cgtggcagctgtgtgtgtgtgattgtacagaaaagcttcagcagctttgaaattactgtgtgcttgtacagaaatgctttctaattacagcccggcttcccctccccacctagaacattctgcaactcccaacaattctcactactcagaggttcaagcagttgagggactttaagctctattaactttatagaaaatctatgtctgtttgtatgtctttcttttgctgargctgtttcattgaagtccccccacactttcaaaatttaaaaggaagcaatgctaacaggaagtaatgctttgtaagtaggtcatcatatttctgatcagggcacacttaaaaaaatttattttgtagaggcaggttcttgctgtgttgcccaggctgatctcaaactccttgcctcaagcgatcctcctgccttggcctccaaaaatgctgggcatgagccactgcctggcatcagggtccacttttgatgcactcaaattattacctctccaatccccaccccctcaccgcctcacatccccacatatac

SEQ ID NO: 481434 - DNA, 542 bp, Homo sapiens
cgtggcagctgtgtgtgtgtgattgtacagaaaagcttcagcagctttgaaattactgtgtgcttgtacagaaatgctttctaattacagcccggcttcccctccccacctagaacattctgcaactcccaacaattctcactactcagaggttcaagcagttgagggactttaagctctattaactttatagaaaatctatgtctgtttgtatgtctttcttttgctgaggctgtttcattgaagtccccccacactttcaaaatttaaaaggaagcaatgctaacaggaagtaatgctttgtaagtaggtcatcatatttctgatcagggcacacttaaraaaatttattttgtagaggcaggttcttgctgtgttgcccaggctgatctcaaactccttgcctcaagcgatcctcctgccttggcctccaaaaatgctgggcatgagccactgcctggcatcagggtccacttttgatgcactcaaattattacctctccaatccccaccccctcaccgcctcacatccccacatatac

SEQ ID NO: 481435 - DNA, 506 bp, Homo sapiens
catgctgtttgcaagtggttgtggttttcctgtccagcccaccaccacttgacagtatgtaagcctccaataaaaccccatgttttgtatgtaagcctccagtaaaaccccatgttttgtatgtaagcctccagtaaaaccccatgttttgtatgtaagcctccaataaaaccccatgttttgtatgtaagmctccagtaaaaccccatgttttgtatgtaagcctccagtaaaaccccatgtcttgtttgctggctcccagtctcttcttcagcctcttgaatctggtgccatccctactgaggttgataggggtttggcacgacacctccctactcccctatctcccaagaattaccattattctgaagctgatctatgcatggcaatgttatgtgcccataacaatagatagtaagattttatgagattttgggatctgtccaagtgctgtcatgcggtatacatcctgttcaaattacctgtttttcactcaacatttcttt

SEQ ID NO: 481436 - DNA, 538 bp, Homo sapiens
tacttttgattaggatatgtttacagcaagatgagagactaagtaatcccacaaaggaagatatatattattcacatttgtctgaaaaattaaatatactttcagaattattcacaacctgatatttcagcwaagctaattgttcccagaatggtgttcagcaattacaaaataaagacaggaaaggaaatatccacattataggttatttcaatgacttgggaattttctcatatgtaacatttatagacatttccatttagccctagtttaagtcacttattaacagatataagaagaaaattaaaaagaaggaaggaacagaagactttttcttttcaaggtagctatagagattgtgtcaccctaaagagtcaagcttagggaggaaattaatttattcaaaacacatttgttgaactgctagggataaaaattggtgcaacctactttggaaaactggtgatttctatgaaagttggaaatatgtgaaacctattatttatcaatttttgccttagaaatgcaaatatatgtg

SEQ ID NO: 481437 - DNA, 641 bp, Homo sapiens
ctgaagttggtgattagtagcttcccaataagatctcaggagttgggccagtgggctcaagcactaaggggcattcttcccttaccaggaaagtattcctagaggaaggtcgtataccagttaaactctgctattttgcctcttagttgtctgatattccttatgggggagggggctttcctgccctgctcatgtctacctaactttctgtaacaggactatgggtgtatactaccatacccggttaatttttttaatttttatttttagtagagacaagatcccactgtgttgcccaggctggcctttstttttgtaagctctcatcttcactacaaatgaagacccagtgaaagaaagatgctgtccaaatgccagtgttattggtattgcaaaagtaattaatatgaaataggatcagaagacaacagtcccttggaagctaatccttttaagttaatggaatttaaatattataattcatgaaatagcacttaagtagtactgcttggacagttactgcttgttagctgtatttgctgaatttaaaaaattacacccttcacagaattgcttgagggcacaagtacaaagaattaatatgttaattatcataagtgaatcattaaacagcaacagta

SEQ ID NO: 481438 - DNA, 328 bp, Homo sapiens
aattgcttgagggcacaagtacaaagaattaatatrttaattatcataagtgaatcattaaacagcaacagtaattaacagcttaagttaatatctgtaaaaaacccacacaaaccagtagtcttagtgctctcccactgggaaaagagctggaagaagagctgaatggtggaatatcggatgtgaatgtgtaatcatgcgagttcatctggtccctcctactgccttcatattgaaccactgtggacaaataagccctcactgtaatggtcttaataagacatttaataatctttgcctggtgccatggttaatactgagtgtcaac

SEQ ID NO: 481439 - DNA, 537 bp, Homo sapiens
tgtgaaggtgctttgtactaaagttgcaaaatgcatacaaataaaagtaagatagyatatgaacaattcaaactaaaaaatacaatgatgctataaaaaagacatagtaagtgtcggtgaggatgtagagaagctgaaatacttacacactgctgatgggagtgtaaatattatagccacttcagaagacagtctggcagtttctgaaaatgttaaatatagatttaccatttgatccagcaattccactcctaggtatatgcccaagagaaataaacacatatgtccacacaaaagcttgtacatgcatgaataacacaacagcattattcacaataataaaaggtgaaaacagcccaaatgtccatcaactgatgcatgaatacacagaagcagtacatctgtacaatggaatattgcttagaaataaaaaggaataaagtactgatacctgctacaacacgaacaaaccttgaaaacgttatgctaagtgaaagaagccagtcacaaaagatcacatattgtatgattccattt

SEQ ID NO: 481440 - DNA, 355 bp, Homo sapiens
tcggatcttaggcaggcaccagttaatcatcacataataacaggaagtgggtcctacggctgcctcatgtcgggctgtctcgttttcactcaactgggtgtggttacgacatggaagtgatgaccagaagctcccaccagagtgaggggtccaccctcttgatcccctgacacaaatacttcacccactttctctgtatgttggagtccaaggcttgacataccctttttattaaatatttcagttattttactgagtgttctctaccatcattttaggtggtttatagaggtgaacttgctacaacttcctayttcataatcatcacaatccatattaaaaaatatttccgcag

SEQ ID NO: 481441 - DNA, 652 bp, Homo sapiens
ctgcaggatctgcaatgcccaatccctaaaccttcctagccatgtcctcacactccaggactgacaatattaacacatcccctgcagctctatgcttgcctgggctctacctgcagagatgctgggtgggacaacgtatgtcaatgcttaggggattcctacatgattttgatgctgcctctcacctctgcactttgaaccaggcctgccagaccaactccagttccactcacagtgctccacatgcatcgctgcagccctgggcactctcctgccaatcccratgcaactctggcaagtccaaatcactgtaaggatcactgcaaggacgctcaagacaagggaacaagtggggcctggaaccgtgcccaaattcccctcactagcagtgagccctgcctggcataaagttttgctcagcaaaaggaaaggcaaacacggaagggtggggttagaaaaagccataatccagatgagtcacttttaatactttgcataaaggcagccctgccagaagcatctttttttggtttttcttttttaaaaaattctaaatagttaagtgtccaatatatgctggtcagtcaatacattttatataaaagtgcaggatttgagcatttaggtaaagtgcagagcttactctgtttac

SEQ ID NO: 481442 - DNA, 482 bp, Homo sapiens
tggccttaccccacttccaggtcctgaacaagcctcttcttctagtccatcctcttaaggatagaccacaccaccagcatacatccctaaatccaagaatggccaagaggygactgtttgcaggtggaggctggagggttatggacagcatttgactgtagggtggctattcacacacatgcctatttggccccttgtggaattgagagagaagaggggtgagtcagagaccttatttgtatttttattgcagtcctacaaatgttataccaatgtctgatggcctaaaacgtttttaatacagcattccctaggcaatggggagccagggatgggtttttgaacacggaagtaccatggtgagaaaaagagttaggaaggtttcttttgtagctctatagaggatggattgattggattgggaagggagacaggaagctcagctcagaggctcttgcaataatgtaaataaataaattatg

SEQ ID NO: 481443 - DNA, 584 bp, Homo sapiens
aaacctacctcataaggttgctttgacaattaaatgagcttatatgtaaaaatcatttacaattttgccaggcatgctgtaagaggaatataattgttagatattcatgttcttttattttgcttattcttgcccctaattgtctatagtgattgtacattgattttacaagaaaaacgtataaaacatagaaaaaagttctttttaacatgtgaactattaatagctggtagacattttaattaaccttyattttaaatgggaataaaataattaaaactgtccaagcaatacatcaaatagagaataatggtcataagctttctactgctccactcaggagcattaagtttcttagccttgaggttgatgtgtttgcatgagtttttgctgctattatttttatctctccttttgcacagcagtgggaatccgaagtcctgccttgcattctgttttttcacagccaactctgtgtaaatgcaacatcagtatttcaacttttagcagtgggggtcatcttgtatagttgtctaaactgtgcagcgtttttttttttattttaagagtataaaacagtaaca

SEQ ID NO: 481444 - DNA, 663 bp, Homo sapiens
taaggaggaggatcacctgctcacgtttgctaagggcatttgcttgaaatgcgtgtgtgggagggagtctgtcttcaaacctagacacaaaagagattttatttgctttcatgatttcttttctctcccttctcatatttttactccaaagtgtgtgcaaattattcaagcatctgggacctaatgcaccatcactcactgcagcttttattaaactttgtgccattcacaactgaatagcagtgaagttaattaatggccaaattagttggaagttatttggaatctatattgcatcaatttctatgtttttggcaagaagaatagaaaaaagaaaaaaaaattgcaccaatgataagcaactgagtggctgacacataacagatgttccatattatgaatggatgggtgaatgaatgaacaattgaaataatctgggtgacagttgatcagagcctgaactaagctgtggcaaggaccatggggagaagcagaaatgctgtagacttagttagaaggcaatagaacaacccctgatgatggacaggaagaggagagtgagaaaagaggaattaatcttagcccctgccatttcttctctaaattattacarttgcttcataattgctctccttgcattccacctagctgctgtccaccaga

SEQ ID NO: 481445 - DNA, 633 bp, Homo sapiens
cagctgtgtagaagatgaagtctgtgcatcccaaatgttcctatcatgggactccttaaaatggtgaaaaaaattctatgcatacacataaacacatacagatacacgcacctataaacatatacacaaacatagtcacacattctacatatatgtatgtaaaacaaccagaccctgcccaagtggatcagcaaagcaagcaaaaggattatgaataaagtcgcttttcctgcctgaccttaagcatctgrgtttctatccttttttttctttttttttttgagacagggtctcactctgtcacccaggccgcaatgcaatgaagcaatcaaggctcactgtagccttgaactcctgggctcaagcaattctctcacctaagcctccttagtacctaggactacatgtacctgccaccatgcccggctaattttttggtagagacagagtcttgctatgttgcccaggctaccatgtgagttctacctcctgtcttaacccatgtctggtgagccctatgcccagtgaatgaaatcacggactacaagtttttttacattcctctcaagctctataatgtcagaacgccacaaagcctcaccctaggatagcgttgagatgagactagaaatg

SEQ ID NO: 481446 - DNA, 266 bp, Homo sapiens
aggtcttgttggttctgagtgaccagcttagtgcataaaggggaattaattggctcataatgttgaaaagtcagattgtggaactagctccagggaaatctggagcaggaggttccgatcatgccattaagtcttggtggcagtcttctggctgtgctgtgctccctgttggattcattcacggaggcgattccctgkttgtggcaggataacctttcatgagtctgtttttgtagcaactccagcagaaaagatcttttcttaag

SEQ ID NO: 481447 - DNA, 494 bp, Homo sapiens
aatacagcatttctttggctacaggaaaaacaaaaacagaacacaacacaacatcagtgaccctgaagtgtgtgctgttaaccttcttagtaattaagaaggggcacgggaaaaggaagtaaaaaaaaaaaaaaatcctaactgcaatccttcattggcaaaagcaatgcttctcatatgcatttcggcagatgaatggatttgcaaaggagagacataccaacccaaatgaaaagttaacacatttactgaccacactgtcagcccttatttcacaatagaatggtaatcttgctgaattctttaaaactgtattataaatcacctaacatttactagagcatttaaagttgccaggcttctgtggaggaatgcattttgaggggtataaaattctgcrtgttggcctgaaccacacgtacacaaagtaaaccccattttccctctactgctctcaaactgcagcagcagggagcagaacctgccccaatcag

SEQ ID NO: 481448 - DNA, 639 bp, Homo sapiens
ctgccatgagccagaaatcccctaacccaaatatctaatgtttatattttcagcaagctctagctgaaatgcttcatgacggtaacaaaatatcttatttctttcgacactttattcctaaggacagaakttgaatatgaacttttgctttttcaaagttgcctacataaacatcagaatagggcaggaggtactggaatcaaatgctggtctcgtgcacacaatggggcatagtgcatctctcagaacaccaaagtctaaaactgggttaataacttcatcaccttgaagtcttccaccattagttagtaaatatatccctttttcttgattaactcaatattgtattgctacaattggaataattaaggattttatagctaagacatctaaaattgtatttctttctctttctcattataagtaaggatttcagatgttttaatgagccatcataacaagttttagcatcagtgaaaccacttcacacctgaatgacttaatattgtctgtaatctgtctctttgaattcacattggtttttttccataaaaatgtatcaacttcttgctgtgcgtatgaacgaatgcataacaattcttaaaagcgatatatgcatgtgtgatgattacacattat

SEQ ID NO: 481449 - DNA, 639 bp, Homo sapiens
ctgccatgagccagaaatcccctaacccaaatatctaatgtttatattttcagcaagctctagctgaaatgcttcatgacggtaacaaaatatcttatttctttcgacactttattcctaaggacagaatttgaatatgaacttttgctttttcaaagttgcctacataaacatcagaatagggcaggaggtactggaatcaaatgctggtctcgtgcacacaatggggcatagtgcatctctcagaacaccaaagtctaaaactgggttaataacttcatcaccttgaagtcttccaccattagttagtaaatatatccctttttcttgattaactcaatattgtattgctacaattggaataattaaggattttatagctaagacatctaaaattgtatttctttctctttctcattataagtaaggatttcagatgttttaatgagccatcataacaagttttagcatcagtgaaaccacttcayacctgaatgacttaatattgtctgtaatctgtctctttgaattcacattggtttttttccataaaaatgtatcaacttcttgctgtgcgtatgaacgaatgcataacaattcttaaaagcgatatatgcatgtgtgatgattacacattat

SEQ ID NO: 481450 - DNA, 639 bp, Homo sapiens
ctgccatgagccagaaatcccctaacccaaatatctaatgtttatattttcagcaagctctagctgaaatgcttcatgacggtaacaaaatatcttatttctttcgacactttattcctaaggacagaatttgaatatgaacttttgctttttcaaagttgcctacataaacatcagaatagggcaggaggtactggaatcaaatgctggtctcgtgcacacaatggggcatagtgcatctctcagaacaccaaagtctaaaactgggttaataacttcatcaccttgaagtcttccaccattagttagtaaatatatccctttttcttgattaactcaatattgtattgctacaattggaataattaaggattttatagctaagacatctaaaattgtatttctttctctttctcattataagtaaggatttcagatgttttaatgagccatcataacaagttttagcatcagtgaaaccacttcacacctgaatgacttaatattgtctgtaatctgtctctttgaattcacattgktttttttccataaaaatgtatcaacttcttgctgtgcgtatgaacgaatgcataacaattcttaaaagcgatatatgcatgtgtgatgattacacattat

SEQ ID NO: 481451 - DNA, 456 bp, Homo sapiens
ggactggaaatttatcctgagtgtgatagaggccattggaaggttttcagaaggacaatgacaacatccgtctctcaaggtgcccacattttagagcagggattctaaagttcagcactactgacatttggggctgaataattcttagttgtgggggctgtcctgtgcattgtaggatattcagccacatscctggtctctccccactagatgccagtactagctccccaccctacttccagtggtgacaaccaaaaatatttccagacattgcctcttggagaaccactgacttaacatatcaaaggtttatttgttgctctcctacacatggtgactacgtttcttagtctgtttgtgctgccataacaaaataccacagtctggataatttataatgaacagaaatttattttagcacagttctggaggctgggaagtccaagatcaaggtgc

SEQ ID NO: 481452 - DNA, 667 bp, Homo sapiens
gaatcacctaaaattttctaacagtggtttcacgcctaaccagtgaaatgactatatttgggggaagaataaacaaatgatttggtgaggtttgtataagaatgaacaagattttccactagccataagggtgctacattttaattcttaagtggtcagatatcaaacgattctataaaagatggtgtgattctgcaagagactgatatattattgaagaagcatctgatgtctgtggcttagataagggggaatagatggttcttaatttccttcttgctggcccaaggcttatcctcttgacctggtgcagcactgatacctgcctttgcccttggagtaatatcacttttcgtgcttgcttgctgttccttgttcyggtccccctcttgagagggttggggaggagaggcactgcagaggggaactgtaaagatttcctctaattgctctgccggtgcattgcaaaatcttcttccaagatctaggtgttttgtaacaatgcggcactttacagtatgtgacccaccgtactactagaacaagaaatccatgttacatttttggctaataaaattaaaagtaaacagttgaaagaagaatctctctctctcccactccagagtccctcgcaaacatgtccgccattggggtgaactcgccttac

SEQ ID NO: 481453 - DNA, 522 bp, Homo sapiens
attccacctcacctgctgacagttctggggccaggctgactttcagcatcagttccaggagttgggcttactccctgaggggacggcagctatttctggaaggtgtccaatgttacaagaagagaactgttaatagcagttcctagtcagagcaagagaccgtcacctttggggagcccaaggcacctggggcaggccagacatggaggctcaatccagcagatgctccaggtggcctgctagcaggtcgctggacctcaggccctaggcttgagttcagggttcagtctctggtccctgttggcaggagaagtgggggaagtgaccaggaaccactcagggtggcagataccagagatggttcccaagcactggccagaaacccccaggcttcaccagcagcaaggagggctccaktctgaggccctcagggtttcagttagagcctgagaaatgcccccacccaaagccaggtttcatcctcaaatccaaggtgaagttaagcctgcatacttcgaggct

SEQ ID NO: 481454 - DNA, 642 bp, Homo sapiens
ctctaaggttttcatctgcttgtttctcaactctttgtctcgggcaaaggcaaaatacccaacaccaagttgccgggcctctgaaagaagtaygaattacccaaaagatcagactgtcctgatcattcaactacactcaagccacatttcctaccaaagcaaaaagaaacacagtgatatttggcacaagttttaaaaagaaaaagaaaacagctaagcgaagaaacaaaaaaccaaagaaacacaaaagttagaccaagttttcgtcctgtttgccaagggaagcataacaagggttcgtttgctttcagccatgggctgtctccacttctctcagggaacaatcccttggattaccagaccctctgtcaggaagatattcccaaatgtgagtattttaaggctatgaagtgaacaaaggagatattttctatttccaaagcaggatctttaatttccatgtaaaagctattgctttatgaatacttccctttatgtttgccatcagtttaaggttaaaaataagatttgcaaagctgcaagaaaatagtcataccattttcccgaatgtcttcataatgtacgggccccatgggctcttcagggcctctctttcttcttcctcccattgctggcgctgaa

SEQ ID NO: 481455 - DNA, 537 bp, Homo sapiens
aggaaaatgacaataataaaagtttacaaaatgcctgcttatactccacaggctgcactttcttgtgtagcctggaacactyacttcttgaaggggggcgggggggtgttaaagcaaagggccatgggaatgaggcattataatctctattttataatggaagatcctgagcctcaaagactaaggaacctgattaagatcatacagccagtaaaaggtgcagatggaaccatccaaggcccacgagtccacaccacagtgccaaacaatgtcacaggcggagtaaaacacactgtgccacctctgccggcttccttctcctagatgacagctctccaccatgtcagaacaagaacacgggtaaggcagcagcacaggtacaaaaggaaggcgctctgccctcactgtttcatgttagtgagccaggcaagccaagtctgccaggcactgggtttccttcggcctggcacagagctgggcacacagcagaagcccagtcagtatttgtaattatatgtaattattgtaattattgta

SEQ ID NO: 481456 - DNA, 652 bp, Homo sapiens
gccagctgtttatcaggctaaaaataaaaagaagagtgcatttaaagagacaaaggactcagtaagagctaataagaattcaaggtaatgtygacttttcaaatatttaggggaaggccgacacagcccagttaatgccaagtttcaatagcacattcaatccaggcacaggttaagcattttgggctctctgcttgcttcaggggaagtggtacaaggctttagacattcaggtttcatggagcctgaagccaatacaatgcaaaagactttagtaaaagtaatacaaaattatgaatacataattagtttcagggccttggatggggctcagaagtgaggaggactgaactgtaagtttcagaagcctcctggtaaatttgcctctgaaagcagaaatggtacccctgtcagtttcaagggcaggccttccagaaggagtaagagctgtagcaatcaggtaaggtgtggactaaagatagaacagtggcagcaaggactaaatgttagagtcacctgggagacttttaaataaaacatttctatgctccagatttctagagattaatacccaaattgtctgggatggtgccaggttattgacattatttagctcttgtccctcctgtaattctaaaatgcagccaacgtt

SEQ ID NO: 481457 - DNA, 554 bp, Homo sapiens
gatagaaaactgattaatgtactaaaggacaattaaccataaaatttagtgttatctatttactggacagaaataatttgcatctatacttaataaaaatgtataatttaacatgcatttttactaaatcttggattctttattagtagtgagtcaaactaagttcatttccctgaataattcttggttgtaacaataatgggccatatgagccagtaatgcccatgggtgatatagaaagatatactgcccaactttttaacttctttcttccaaatttgactaattttttaaatagaatgtgttccaatattttctattacagtctgttgtattcgggtctatttcatttttcaaaatactggtacagctcactaaattatcttcataagccgtagtaggttatgacccaacttaaatgatactacaatataaaaatatcatgactgcaaatactgcctaagagaggcaagtttttttctccatgttaagaataaaaaattaacaagaaaaaagagaagggtggggarggagaaagaggagaagcaaggaga

SEQ ID NO: 481458 - DNA, 654 bp, Homo sapiens
ctgatgacagtcaacatctggagtaactcagtgtctggtaggtattggagttgtcttcagttataggtctcgtagttggtgttgcctgctaagtcctcagctagaactgctaactggagcatcaatacaagcagcttcttgatgtggcttgggcctccttacaaaatggtggtctcagagttgtcagacctattacatgggggctcagrggtccaaaaacgaaggttgcagaggacaaggtaggagccacatggccttttattccctagccttgcaagtcccatagtgttcctcctgtcaaattctattggttaaagcagccacagatccatccaggtacaagaggaggggacataaaccctcctttcattgggatagtgccatagtcactttaaaagagcatctgggaaggagctattattgtggccatctttggaaaatccaagctgctgcagactgagtttagttttgaatcacaggctctttcttcagttagatgccagatgaagcaggtggcttgttcttgagagcctgttgtaggaaaaatatgcatctctgtgccctcggaagactagtggctcattctgaaaagcagatgggaactgagacagactgagggagctgtgggttcccaccacccatcttgccctactt

SEQ ID NO: 481459 - DNA, 569 bp, Homo sapiens
tcaatacaagcagcttcttgatgtggcttgggcctccttacaaaatggtggtctcagagttgtcagacctattacatgggggctcagaggtccaaaaacgaaggttgcagaggacaaggtaggagccacatggccttttattycctagccttgcaagtcccatagtgttcctcctgtcaaattctattggttaaagcagccacagatccatccaggtacaagaggaggggacataaaccctcctttcattgggatagtgccatagtcactttaaaagagcatctgggaaggagctattattgtggccatctttggaaaatccaagctgctgcagactgagtttagttttgaatcacaggctctttcttcagttagatgccagatgaagcaggtggcttgttcttgagagcctgttgtaggaaaaatatgcatctctgtgccctcggaagactagtggctcattctgaaaagcagatgggaactgagacagactgagggagctgtgggttcccaccacccatcttgccctacttcaggggacacactcactcagttaaatggcggatgga

SEQ ID NO: 481460 - DNA, 569 bp, Homo sapiens
tcaatacaagcagcttcttgatgtggcttgggcctccttacaaaatggtggtctcagagttgtcagacctattacatgggggctcagaggtccaaaaacgaaggttgcagaggacaaggtaggagccacatggccttttattccctagccttgcaagtsccatagtgttcctcctgtcaaattctattggttaaagcagccacagatccatccaggtacaagaggaggggacataaaccctcctttcattgggatagtgccatagtcactttaaaagagcatctgggaaggagctattattgtggccatctttggaaaatccaagctgctgcagactgagtttagttttgaatcacaggctctttcttcagttagatgccagatgaagcaggtggcttgttcttgagagcctgttgtaggaaaaatatgcatctctgtgccctcggaagactagtggctcattctgaaaagcagatgggaactgagacagactgagggagctgtgggttcccaccacccatcttgccctacttcaggggacacactcactcagttaaatggcggatgga

SEQ ID NO: 481461 - DNA, 654 bp, Homo sapiens
ctgatgacagtcaacatctggagtaactcagtgtctggtaggtattggagttgtcttcagttataggtctcgtagttggtgttgcctgctaagtcctcagctagaactgctaactggagcatcaatacaagcagcttcttgatgtggcttgggcctccttacaaaatggtggtctcagagttgtcagacctattacatgggggctcagaggtccaaaaacgaaggttgcagaggacaaggtaggagccacatggccttttattccctagccttgcaagtcccatagtgttcctcctgtcaaattctattggttaaagcagccacagatccatccaggyacaagaggaggggacataaaccctcctttcattgggatagtgccatagtcactttaaaagagcatctgggaaggagctattattgtggccatctttggaaaatccaagctgctgcagactgagtttagttttgaatcacaggctctttcttcagttagatgccagatgaagcaggtggcttgttcttgagagcctgttgtaggaaaaatatgcatctctgtgccctcggaagactagtggctcattctgaaaagcagatgggaactgagacagactgagggagctgtgggttcccaccacccatcttgccctactt

SEQ ID NO: 481462 - DNA, 584 bp, Homo sapiens
tgaataaactacaaattaggattgtctgaaagtgagggacaatgtttaccccayatactttatgtggttccctcaaaaaaggcttaacgaatgttttttgaaaatggtaagcaaatagctttcttcttattttcctatttgaataaagaatcagccctcactcacactttcggagctaaagggggaaaaaataaccataaaacttctgcagcaatttttacaaactttttctcttgttcacaggacctattagtaacattgcattatttttttaaatggaccatttttagcgatagtagaagggagaaatctctcattcccattcctatataaagtacaatttaaaaactgcctctttaaaaagttgtagcattacatcctatgggcaatgcctaaggctgaagcacaatgaattttctgtggggtttcactgctgtgacctcgatatactataggttgttcactgcagctaggaaggaatttgtttaaaaagcgcaagaaattcttgaagtatccaagaagcatttgaaatcagaactgctacctttccctccacacaatgtgtggctgataacaaacatgca

SEQ ID NO: 481463 - DNA, 578 bp, Homo sapiens
atttcaaagcacagcttttttgacctctatcctaaaggaaattggtttagttgaaaaatacaatgctctttcactaccatttttggtgtttctcagttgcaggcctcgccagctaggtctccctaaggaggaaatcgagtcacagacaaaggcccactgctgggtttacatgagaaggcagctcacagggcatttctggagctgttgcctgcagagctgcaaatatttgccatctagccacttgctgatcactgctctaagcccrtgctgctcaaagaaggacctgaggaccagaaggatcagcacgatgtaggagactgttggaatccagaatgtcaggtccccttccagacctgccaattcagaatgtgcattttatcaagatccccagatgactggtgtacatagtccatttgagaagcactgctctaagtaactcaatctttcccactgctgacactgaataaagtagtaattacacacaaacacataaacatacacctgcccctcatccccacctcccacacacaccctgcttccagttgcatgcttaattatcagtaaggttttctggcaag

SEQ ID NO: 481464 - DNA, 630 bp, Homo sapiens
ttatgagcaataaatttctgttgctcataaattacccagtctaacgtattttgttatagcagcccaaatggactaagactgggtgaacgacagcctgtgggatataaaaacaccaaaggtagctgtgtgaatattagaagacccrttcatttttttctcttcaaaaaataatagtacaggtttttaaatatgtagtggaaatctattcaaatagaataaccaaatgcatatcctatcatatttatcaagtttgggcttcacagtaataaaagctgtcatcaaaggaaacagttaaaaattactcttttgggatatttcatcacatgcctaataaactttcaacctgcttgcttccatcaacaaatatttattcagctcttattagatgcccagaaccctcctaagccctgtatgtctaaagtagtttgacttttcctggtactttacagtaaaacaataataactttgataatttttgttttaatttcaataggttttgggggaacaggcggtgtttggttacatgaataagttcttagtggtgatttccgagattttggtgcacccgtcacccaagcagtgcacactgttcgcaatgtgaaatctttcatccctcacacgccccaacct

SEQ ID NO: 481465 - DNA, 630 bp, Homo sapiens
ttatgagcaataaatttctgttgctcataaattacccagtctaacgtattttgttatagcagcccaaatggactaagactgggtgaacgacagcctgtgggatataaaaacaccaaaggtagctgtgtgaatattagaagacccgttcatttttttctcttcaaaaaataatagtacaggtttttaaatatgtagtggaaatctattcaaatagaataaccaaatgcatatcctatcatatttatcaagtttgggcttcacagtaataaaagctgtcatcaaaggaaacagttaaaaattactcttttgggatatttcatcacatgcctaataaactttcaacctgcttgcttccatcaacaaatatttattcagctcttattagatgcccagaaccctcctaagccctgtatgtctaaagtagtttgacttttcctggtactttacagtaaaacaataataactttgataatttttkttttaatttcaataggttttgggggaacaggcggtgtttggttacatgaataagttcttagtggtgatttccgagattttggtgcacccgtcacccaagcagtgcacactgttcgcaatgtgaaatctttcatccctcacacgccccaacct

SEQ ID NO: 481466 - DNA, 564 bp, Homo sapiens
ctgccttctcactgccttgtcctcacatgattgaacctctgtgcttgcacacccccagtgtctcttcttcttataaggatattggataatctggtcatattggattaggactccaccctaacaccccattttaattcaatcacttctttaaagaccttgttgctaaatacaattatattctgagacactggaggttgggacttcagcatataaattttaggaaacacaattaagcccataatgggratgaagggagaaagggcgtgtgccttaaagccagatcaggcacagtatcgagcaggatggcagaggccacagccactaccatcacaccaggagcttgtgctcacgtattttacattgcctcaacccagggtgaaaaaaattgagctcatcattcataccaaagcatcttgatggctgctaatcatccccaccagccctttgttttgatgcctctaagttatctttgcttccttctctctgcctttaatgtggaatgatttccaaattctgtaacattttctggagtaaatactgtctttcacaactgtcatttttcct

SEQ ID NO: 481467 - DNA, 499 bp, Homo sapiens
aatagctggcaccactccayacagtgaccacaagaaaattggagttatgatttatgcaaggtttccagtactaccagttctttctccattaaagaattgctaagggaagacttccctggctccaggaagcaggcaagtcaagcaacaacagtgtatatgccaccatggcacttaaaaaaataataacaacagggccaagtgcagtggctcatgcctgtaatcctagcactttgggaggctgaggcgggcagatcacgaggtaaggaattcaagaccagcctggccatcatagtgaaatgcagtctctactaaaaatacaaaaattagctgggcgtggtgacaggcatctgtagtcccagctacttggggggctgaggcaggagaaccgcttgaacccaggaggaggaggttgcagtgagccgagattgcgccactgcactccagcctgtgtgacacagcgagactctgtctcaaaataataataacaacagcaacaaca

SEQ ID NO: 481468 - DNA, 499 bp, Homo sapiens
aatagctggcaccactccacacagtgaccacaagaaaattggagttatgatttatgcaaggtttccagtactaccagttctttctccattaaagaattgctaagggaagacttccctggctccaggaagcaggcaagtcaagcaacaacagtgtatatgccaccatggcacttaaaaaaataataacaacagggccaagtgcagtggctcatgcctgtaatcctagcactttgggaggctgaggcgggcagatcacgaggtaaggaattcaagaccagcctggccatcatagtgaaatgcagtctctactaaaaatacaaaaattagctgggcgtggtgrcaggcatctgtagtcccagctacttggggggctgaggcaggagaaccgcttgaacccaggaggaggaggttgcagtgagccgagattgcgccactgcactccagcctgtgtgacacagcgagactctgtctcaaaataataataacaacagcaacaaca

SEQ ID NO: 481469 - DNA, 653 bp, Homo sapiens
cagcagtggtgacactgacattgatgtggtactctacggtttacaaagcagtctcatacatctctcacttgcagtccacagctcacacagaactgtgagggccatggtttttatcacaattttagccacaacagaaacagaaactcaaaggaaggaagtgacttgtctaactaagaccagcagagcagtggtagagccaagacacaaattcagatartcatactacaaaccccagtagcttctgattcatgtagaatctcaaacgacttgaccttgttgctcacttaaccaaaagtaaattttctttgtagctcacacctgtaatcctagcactttgggaggctgaggcagggggatcacctgaggtcaggagtttgagaccagcctggccagcatggtgaaaccccatctctactaaaaatacaaaaattagcaaggtgtggtggtgtgcgcctgtaatcccagctactcaggaggctgaggcaggagaatcgcttgaacccaggaggcagaggttgcagtgagctgaaatcgtacgactgaactccagctgggcaacagagcaagactccgtctcaaaaataaataaataaataaataaataaataaataaaaattttaaaattttcctttggacaaatgaagaaaatgcc

SEQ ID NO: 481470 - DNA, 475 bp, Homo sapiens
tgagcaattatctgatgaattagattaatgaagacaggcatcttttagtactgggaccaagcaaagcaaacaccctgttttctcaggagaaggaaagtttttgtccaaaatacacacttgattgttccgacacttcattttaccaagcgtaaaatacctccatgattaaaaaaaaaaaatctgctcctttcattttcaaaatgattttaggacacaaatattttattgatattggaaaatgcaactcctccatttttctttgcttgtttttttgggggaaggggattataacgtcagttggtctgacttctaaacaatattttggtttagcaacattgtttaaatcttaaaataaaactgaggaacttmactagtgtttgaaaatggacccatttaggagccagtcatgatatggcccttccaaagggaaagataaaagttgcttctagtaaactctgtggactcaagagattta

SEQ ID NO: 481471 - DNA, 467 bp, Homo sapiens
agcatgcactgtagatggaaaagtggaaagacagaaatcaagcccttaatagcaccattgaattactgaaccagccaaccctatgaaaccactgcctccaggtcgttttgttatatctgccaagaagaacccattacagcttttggaatgagtgtcttgttaatatttagagtcctcatgaatgagaatggactgggtcatcagacaggaaagcatcctgcatgtgccattccttctgggaagctctttttcctctggacaattccatctgcagatcatgggtcacwtttcatccagttcctttccctctctccaaattttagagccattgagttactcaaaatccatacatttgaagataggaagctaacattcaattggctcaggctctaaatccttccactgaagagaaaagcaggataacctgaaatagccagattattcctatgtgtgagattcacgggatg

SEQ ID NO: 481472 - DNA, 500 bp, Homo sapiens
agagattgagagtctaattggatatttttaaagttgaaacagaaggaagcaggcaaatatgagaatcagtaaccaattataccacagtatacgcaactgaaatgaaaccaagaataatagatactcatagaatgttagaagtgaaaagggatcttagagattgattttcactcacctctctcatttgacgtacaagtacactaggactcagaaagatgacacggttctcccagcagtcccaactggctgaagacataaccaagactacagtgaaatcggccacctctcctccccatgccttctctgmagtagcgagattagcaagattcacattccattctagccataggacatgtcagttcatctgtatgtgtcagaatcctttagatgagagtgacagaaaacccagctcaaactggcttaagctacacaactctacgcatgtcactgaacagtccagagtaatatgctggatccaaaggcacatgtttgtttttggg

SEQ ID NO: 481473 - DNA, 504 bp, Homo sapiens
tctattacttgaggattatggctttttcaaggtattttttggttctccagacatttcactactaaaaaccactcagatcatacaatgattaggcaagaaatattaggaaagaacattaagtcaatctcttgcatattttaaatmtattctttaagtattggcaatgtatttaaaagtttttaaaagactgtgtcggcaccactgagccaaaataaacatgtctgttagctcaattcagtttggaaattagcagtttgcaacctctgccttaaatgccaggaagaaataatggatgaaaataaaagaattatgttttttgaatttttctgcatttaaaaatttttgaaaaacactggccaaatatttttaaagctagcccagaagctagtccagaaatgtgctttccttttataatcttttaggcagatccataaactgttagaattaacagattgttccctcggttaagcatgcagagcctgtctgttatggtcactgaatcag

SEQ ID NO: 481474 - DNA, 504 bp, Homo sapiens
tctattacttgaggattatggctttttcaaggtattttttggttctccagacatttcactactaaaaaccactcagatcatacaatgattaggcaagaaatattaggaaagaacattaagtcaatctcttgcatattttaaatctattctttaagtattggcaatgtatttaaaagtttttaaaagactgtgtcggcaccactgagccaaaataaacatgtctgttagctcaattcagtttggaaattagcagtttgcaacctctgccttaaatgccaggaagaaataatggatgaaaataaaagaattatgttttttgaatttttctgcrtttaaaaatttttgaaaaacactggccaaatatttttaaagctagcccagaagctagtccagaaatgtgctttccttttataatcttttaggcagatccataaactgttagaattaacagattgttccctcggttaagcatgcagagcctgtctgttatggtcactgaatcag

SEQ ID NO: 481475 - DNA, 596 bp, Homo sapiens
cccaggaaccacattttgagagccactgccctacaggaatgtggaactagcactgccaggtttttcaatatttcaagagaattcctctattacttgaggattatggctttttcaaggtattttttggttctccagacatttcactactaaaaaccactcagatcatacaatgattaggcaagaaatattaggaaagaacattaagtcaatctcttgcatattttaaatctattctttaagtattggcaatgtatttaaaagtttttaaaagactgtgtcggcaccactgagccaaaataaacatgtctgttagctcaattcagtttggaaattagcagtttgcaacctctgccttaaatgccaggaagaaataatggatgaaaataaaagaattatgttttttgaatttttctgcatttaaaaawttttgaaaaacactggccaaatatttttaaagctagcccagaagctagtccagaaatgtgctttccttttataatcttttaggcagatccataaactgttagaattaacagattgttccctcggttaagcatgcagagcctgtctgttatggtcactgaatcagcctatca

SEQ ID NO: 481476 - DNA, 468 bp, Homo sapiens
caaggtgatagggagttgtgtaggtaggtgcacttttacacatctgtcagcaaaaaccagtttccaagtttaaaaatctactactcaggaatggcacgtgtatygtagagtctcccaggtggttttacagagcaaggagtgggttatgaggtaacgtcaagacaaggttgtatctggggccataaagactggtaattactcagggagacaaaaacttcttcttttgatgtatactacgttaacaaaagatagtattttgagacaaattggacttgtgtcctagtggactacatgcatcccacagacaataatggagcccctcctatgtgttatgcactaggcacttttctggggagttaataagggcttccaggtaggtaagagcatggtgggtaagggaatggtaagatatccaaagtagagtgagcaaaatgccattttatgtgactgattctacaccagttagta

SEQ ID NO: 481477 - DNA, 602 bp, Homo sapiens
atgttagctattcttaaataaatgttagctattcaggcttcataagagaatactcatggacattatacttagtgtctatttagattactcactttgcatgctgtaattactgtagtttggactctgaactttaaggtagaaacttatcagattgaagagtccgaaatcttagatttttttttttttttttttttttttgagacagagtcttgctctgtcacccaggctggagtgcagtggcatgatcttggctcactgcaaactctgcatcccgggttcatgccattgtcttgcctcagcctcccgagtagctgggactacaggcgcccaccaccacgcccagctaattttttgtattttttagtagagatggggtttcaccgtgttagccagggtggtctcgatctcctgacctcatgatccgcccgcctcggcctcccaaagtgctgggattacaggtgtgagccacagcgcctggccttttttttttttttttcagagacagtctcattctgttgcccaggctggagtgcagtggtgggctcagrtgatcctcccaacctcagcctcccaagcaactggtgctacaggtgaacaccacc

SEQ ID NO: 481478 - DNA, 564 bp, Homo sapiens
aaacaaaacaaaccagaaaaactaaaaaaggagcccaagtgtctcttgctgctttcagtttctggagagccagcacacaggtcacccactatccctgccgaaaccctgaggtctgaggaaggcctcttcacactgcctctgggcgctgcctttggcttccgggagccccccatgcacttccctggaaacaggtggagctctgtcctgtggctctgattcactctcctgtccctcggtacaccattgcaccgtgtcctcctgctggcccttctgttaccctgtacttgctgtacactaccacggtggccgggggcctcagcaccaggaaagcaacttcccccgtgtcctccccaactcctgagtccaatccttcaagtctatggtgccgaagcaggggaaatgaatgttggagagacatgcctgggtctgaactcacctctattgaaggaaaacaaagctcactaagattgcaccctacggtgtgtgcttctgttctctccacctaccgtcagcactctcagcrgttttcctcttggctctgcctcctgcaattactttctgctc

SEQ ID NO: 481479 - DNA, 644 bp, Homo sapiens
atcactccaggaggcccatctggaacggcttaggtgctgggaggggtcttctgggctggtcttgaacctgtgtttgcatagcaaacacactgctttcatttatattgtatgttataaatcaatacaaatagcaatcttccataaaatgcaggtattcatactttacacaagaatgtgagaacagagtgtccccatgraagatgattacgctgacactgtgttgggtgccttggggtggagatttgggcagtaattctaaaggtctccctcctgaatgagccatcagaagcagcccctgggagggaccctgtgtggcaccactctgagctttagtttctttatctggaaaactgcaatcaaagtccctgtttgcacacaactttttagaatcaaatcaaacaagcgaacaggtataaagcttttcatgaggtgtgaagttctcatacacgaggagagtgtctttgttgtttttattgcaatctggttacccaaagggaaccaacacggtaaagcaggtttgccacaaattcctcttggaagcttcttccagtttctcccattccccaccctctcctgcggagtctgaggatggtacctggcagcctgtgtgagttgactcagcagcacacgcccgctcagttcat

SEQ ID NO: 481480 - DNA, 564 bp, Homo sapiens
gatggtacctggcagcctgtgtgagttgactcagcagcacacgcccrctcagttcatgacctcagatgtccctcagaatctgctgcgctaaatccagtttgttccaactcctctttggacaagaatgtgagtttgcacttgtgccatgaattaggtgataaaagggggctgggcaggactgagtcttagtatagctctgggctatgattctggccacagagttcaagcttcattgttcccaggaacctaggggctcaggacttcagaaatcctcagcaatggctgcagtgtctgcagtgacagccagtgcacgtccctcgcctgcagcaacatgaaacacacacaggcctcggcctcctcagtcctgttcctgatgcccggcttacctacctgagacccggtccaggagtgtctaaggacacccagtgcttctgggctgggctggggcctagagcgactccagtcacccctttcattttataggtggaaaccagatgcccagaatgagaagggactcacctgggtcacggatgagtttgtggttgtgagaatattaactgccag

SEQ ID NO: 481481 - DNA, 564 bp, Homo sapiens
gatggtacctggcagcctgtgtgagttgactcagcagcacacgcccgctcagttcatgacctcagatgtccctcagaatctgctgcgctaaatccagtttgttccaactcctctttggacaagaatgtgagtttgcacttgtgccatgaattaggtgataaaagggggctgggcaggactgagtcttagtatagctctgggctatgattctggccacagagttcaagcttcattgttcccaggaacctaggggctcaggacttcagaaatcctcagcaatggctgcagtgtctgcagtgacagccagtgcacgtccctcgcctgcagcaacatgaaacacacacaggcctcggcctcctcagtcctgttcctgatgcccggcttacctacctgagacccggtccaggagtgtctaaggacacccagtgcttctgggctgggctggggcctagagcgactccagtcmcccctttcattttataggtggaaaccagatgcccagaatgagaagggactcacctgggtcacggatgagtttgtggttgtgagaatattaactgccag

SEQ ID NO: 481482 - DNA, 564 bp, Homo sapiens
gatggtacctggcagcctgtgtgagttgactcagcagcacacgcccgctcagttcatgacctcagatgtccctcagaatctgctgcgctaaatccagtttgttccaactcctctttggacaagaatgtgagtttgcacttgtgccatgaattaggtgataaaagggggctgggcaggactgagtcttagtatagctctgggctatgattctggccacagagttcaagcttcattgttcccaggaacctaggggctcaggacttcagaaatcctcagcaatggctgcagtgtctgcagtgacagccagtgcacgtccctcgcctgcagcaacatgaaacacacacaggcctcggcctcctcagtcctgttcctgatgcccggcttacctacctgagacccggtccaggagtgtctaaggacacccagtgcttctgggctgggctggggcctagagcgactccagtcacccctttcattttataggtggaaaccagatgcccrgaatgagaagggactcacctgggtcacggatgagtttgtggttgtgagaatattaactgccag

SEQ ID NO: 481483 - DNA, 400 bp, Homo sapiens
tggggtggtggcgcagccaggggtggcttgagttggccttacacccaatcacttccatcatccatcccaaataaaaatacactaagaaaaaagaacactcactagcaaacatcagctcaagacaatcaccagactcttacaccccccaccgccagctttctacctgagtctttctttcctctgtagaractggcccctggtctaggaagatctttccctccattctctgactatttacactatttatgtatttgcctctgctgaaaaaaaaaatcatctttcttttctaagtaatgattgccagcgctaagctgggagctagtgacagggaagatgacttcattgactttgtccttgaggagaacgtggcaaaggagaatgacaagtatacatgtacaat

SEQ ID NO: 481484 - DNA, 609 bp, Homo sapiens
cccttggctcttctatcttggctctgggggctcttggcctggatcctgtcacctgtagacactggaataagygtgttatccagcagacctcagtgagctttgggggaagacccagaaagccctagctgcgtgagacggcccagcctttccctttctctggcacttgctcggcctctcctggcaaaacatcccagcctggattcagccaccatccagatgctgagccccaccccagaccctctaaagaggagggctctatgcaagttggcctgtggtatttgctgaagggaagcagatcctgtctgctttgttatcagcaaccccagatgaccccagctctcatgtgtgtgattgagaaacgcttcctgctcgtacagaagccacacaggggttggtgggagtgtgcagcctccaggtgagtgtgtgtgtaagtggagtgtcaggtggagtctcttcagcctctctctctctttctttctctctctctcctctctctcaaagattgtttgacttggattttcacgacactatcacacacaatgtcccaaatgattctcagaacagcccagagagctgcacaagggaagaagcttgtgaatctcacaccag

SEQ ID NO: 481485 - DNA, 609 bp, Homo sapiens
cccttggctcttctatcttggctctgggggctcttggcctggatcctgtcacctgtagacactggaataagcgtgttatccagcagacctcagtgagctttgggggaagacccagaaagccctagctgcgtgagacggcccagcctttccctttctctggcacttgctcggcctctcctggcaaaacatcccagcctggattcagccaccatccagatgctgagccccaccccagaccctctaaagaggagggctctatgcaagttggcctgtggtatttgctgaagggaagcagatcctgtctgctttgttatcagcaaccccagatgaccccagctctcatgtgtgtgattgagaaacgcttcctgctcgtacagaagccacacaggggttggtgggagtgtgcagcctccaggtgagtgtgtgtgtaagtggagtgtcaggtggagtctcttcagcctctctctctctttctttctctctctctcctctctctcaaagattgtttgacttggattttcacgacactatcacacacaatgtcccaaatgattctcagmacagcccagagagctgcacaagggaagaagcttgtgaatctcacaccag

SEQ ID NO: 481486 - DNA, 668 bp, Homo sapiens
gctgcccaggctggaggactactgatgatgagaaatgacacacaatgtgagcagggaaagggatcatttaacaaaatgtgttagcgttgactgggaaagaaagccctaagtgggtaaacacacccgaactttgcaaggagcttaattcaaacaattaaaatatcaccttctctttaaatcagaaacatcaggtttcctattggaagaaatcccttgctaccactctaagcctttggttgaaaaggccaaattaaaattcgggttagaaatgtttccacagagggtccaaagacttagagcttgatttatatcctgatactgaattgtgattatagttttcatgttatgcaatccaactattattttccttttatcactaaaaaaaaatgttttaaaaaggaaaattaaagatttgtgtgctgtcagtgcaaaatcacattaagtatggtttttcttttccctgggacagaaaaaaacaatgcccagctcacagtacataggaatgtgtcacaacaaataatcagaagacagatttctccaagctagtgttcctccttgtacagtgtggtattcaaaagcagtattgtcaygattatgcatattctcattaactaggtacagcagagctacttaaagggaaacccatttcttgtgcctcaatgaaaggg

SEQ ID NO: 481487 - DNA, 614 bp, Homo sapiens
gcagtcagctgggattatgccactgcactccagcctgggcgacacagcgaggcgctgtctcaaaaaaaaaaaaaaaaaaaaaaaaaaaaaaaaagtacagttgatgaaaatgttttagaggctgaacaaattctcactgaagcataagtctcctattgtccatcttggattgcagacactcaaacttgtcactgaggggacaattgtgagaagctcccaagagttccctgtatgatgtgcatattatgttttwtatatatatatatatatatataattattatattattattttaatcctggctaccttaaaggaaagttaataggccttagtattgctgagatatagaccatatacaatattgactcattaattcaacaaatatttcttgaacagctatgatgtgttaggcactggggatacaaaaacaagacatgacatcattcctatttcatggagctgacaatttagtggattggtaaatattaaaactgaactactagactataagaaatgcaggaagtgtatcttagacatttttgagttgcacatacctggcatgtaagtatgaatgcaatgcatgtttgaatgaaggaatgtttgaatgttgtcat

SEQ ID NO: 481488 - DNA, 580 bp, Homo sapiens
ggcgagggatggttaagtatgcggagtgaagttgggtcacacgggcccatctctcatttctgacactcagtttgaagatccttcaagtgtctttctgatcctgacaggcagtttttaaaatgtttgtggcattccaagacgcttaataatttaaagctgtattttagattccagcaatgagcacaataccccgagagttagccctccccctgcgagcggctccagatgctgccatgctgtctctcccactcttctccgacacgggtgctccaagccgcggccagccaagcccctggtctctctgcagccctctgctgggccccctcctgctcacccggtagggatgctctgagggtgagccaaggccccctcctccccaaagcctgttctctgctctccagcagagaagagcttcctttcctgcaacagagagrgcacttgagttttcttttagcctcctctatggccttcgactcattccacgcatagtgtgtatggccattgtaagtgtggcactagattaagggttcccaggccttctcccacctttacatcacacacagctctgcacacagaggtt

SEQ ID NO: 481489 - DNA, 608 bp, Homo sapiens
catgttattagatgagttctttaactgtgtattcaaacgtcatgtccaacccagcaagccctgactcaccaagccttcaccaccaaaaccaactcttacatcaacaaagagaagccatgattgcatgctccgaagtgggaaagacctaccaagatgtggaaaattgtctgtactctgtgtgctctttagttttatcatacatgaaatgagaattttaaaccttataacttctagatccattccaactctcacttcctattacttctctttcgtgtgatgttttaatttatttactrttcagacacctttgaatctgtaatatattactctcaggccgggaataagtatataagtgtccagttacaaaggtagaccttgaagctttatttttatgatactagtatttcttctattaattgcagaggtccaagagagctagctgtcttttcttaatgtcataaacattgcctcctcctcccaatactacctgtgataatgctttgtggccatcaccatgcaagaaatctttactgataatgacatgaatgttttttggtcaaacaaatcatgaattggtgaatcattattaaatgttaggctcatctttt

SEQ ID NO: 481490 - DNA, 641 bp, Homo sapiens
tagacaaatcaacataaatatctctacttgccctagagaagaatgttaatgcataatagccaatcaccaaaaaaggtcaaaatacttccgcctttataaactgtcttgtgactgctgtaagcgggggcttcttacmattttcagtttgaagtctcccagctcaaggactgttcttttgtgtgcagagcaaatttttaaaaattaaaaaatttgatctgattatatttttgacattttaaaaattatattccaggctgggaatgcagtgaagaacaatacaactttccatcagaagcaaatgagaattcccctattacacgtattcagtgttgccaattgctttaatgtttgcaaatctgctgaatatgaaattttaccttgttttaattaacatatgcttgacaactagtaagactgaacatcttgcataggttattgactatttgagtttcctcttccgtggattggctattcatatcatctacccatttttctaatagggagtttcctctttttccctcagttggttttgtttatatttttgaaaacagacatggtggcctgttaggcacttttaaaatgcatatcctttatttagatcctggagatttattattatttagataatatatagcgagttt

SEQ ID NO: 481491 - DNA, 632 bp, Homo sapiens
tgggatagcatctcgtttctatgacaacagtgtctgctctgtttccaagctccatctggtattttcaggcctaacaaccaggtagcatgtaaatgcctaatagaagaaaaaggcaaccatactgattctttggatcaggcacaaatgaacacagcaacaccatgccttttctaggaaaaatagtgaattactttgacagcaacagggtattatgaagagagaccacaaagtacatagaacgtgctcaactcttattttacggactagcacaacatgcacacacaattaaagtagctgttggggctgacaargtttttttttgtttttttcctacaggcaatctaacactactctcatgggatgattcttgccttccacccttgctcgcttttccagtcctgtttcgtggagttttgtgtgttttaggtaatatggatgcagcagctcttacctgcctcactgaccttcccttcagattttatccttgctgattactgttccctggtagctctgcagaatttatgagaagctaaatttcagtttctactccatgggccctggcttacagaaaagcatgcttttaaaacagcacaatacaacacagcaggtctccaccttctcataccccgacc

SEQ ID NO: 481492 - DNA, 639 bp, Homo sapiens
gtagtgggtatggtctaactgtttttagaacactgagttataaatataaatataaacaagtagcaagatctggtccattgtttagaggtcaagatactttgtcaggatgcccaagagtgataagtctctagtgacttatttagttacccaaactgacaagaagctgctacataaggcagaaagaaaatgtgacaatgtataaggaaaagattcacttctgaagagacaagatactctggtgcctggtaattacggtctctcctaaggccagatcaggaatgttcctgttgcttggtgagtgtctcwtctgatcaaggacagctagttaaatgacatttatagtcactgttatcagtctaggaaaagataatgcatctctctccacagtaacaatatccttgaggcccttggtctgcatacatttttcctctagacagtgctggagacactctgacaaattcttactctttggactctctatttatgaaaatcatatagattattctgtttaatatagtctttcatcaaaggatgacagagcaccatatagaggcttaggtcaaggcagaggtcactcattcaaatgcctacagaagccagccaatcacataaatcagtgaggcagattagatgtcagtt

SEQ ID NO: 481493 - DNA, 639 bp, Homo sapiens
gtagtgggtatggtctaactgtttttagaacactgagttataaatataaatataaacaagtagcaagatctggtccattgtttagaggtcaagatactttgtcaggatgcccaagagtgataagtctctagtgacttatttagttacccaaactgacaagaagctgctacataaggcagaaagaaaatgtgacaatgtataaggaaaagattcacttctgaagagacaagatactctggtgcctggtaattacggtctctcctaaggccagatcaggaatgttcctgttgcttggtgagtgtctcatctgatcaaggacagctagttaaatgacatttatagtcactgttatcagtctaggaaaagataatgcatctctctccacagtaacaatatccttgaggcccttggtctgcatacatttttcctctagacagtgctggagacactctgacaaattcttactctttggactctctatttatraaaatcatatagattattctgtttaatatagtctttcatcaaaggatgacagagcaccatatagaggcttaggtcaaggcagaggtcactcattcaaatgcctacagaagccagccaatcacataaatcagtgaggcagattagatgtcagtt

SEQ ID NO: 481494 - DNA, 570 bp, Homo sapiens
aaaagtgcctcaaaataggaaaawgtctaagcatgttaaaaatgcaacaacagcttcaggtaggtgaaaaacaataggcaagctatactatttatacatcatctactatttactccactaatgcaaacacattttttactactggcaaacagagaagaagaaagttaactacatacaggtctaatgatgctagccatactgaatataggagaaaactgtgaagttatttgcttcactaaaagccaaactgggtttttacacattaggtaaagtcaaacttcatgattaaatccaaggagaggtaactttccttgatatcccctcaggcctagagtgaaccagcagaaaacccagaagtgcagaagggatgtcctttttacagcatctatccacctttgcctatagtgataccacttttgcaattttagaaactttctggatagttgcttcatactcagagtcaccctagaaatttcaatagtagtaaatattaaacttctaaaaattagtagcatgcaagctcccagttttaattaaactcatactgttaatgcagattaggcatatatg

SEQ ID NO: 481495 - DNA, 561 bp, Homo sapiens
gtagcattccattcacccagatttggccccgtgacatcagccttgttctcctgtgcatgaatcattaaaacaggcagacactgagacttgctgaggtgtgggagtggagaagggagtctgggagagagaaacctttcccagcatttccgctctggtgcccggctctgcttgagctatctttctccaagcctagctgactgggcagggaggatgmagtattatctctgcaaagcatagcaatgactcagcatttaatacctgcacctttgacacatcatggcttaacacgacttatgagccgtctattgtctctaaatccacagtggaactttggtatcatgaaagaagctttggcagtgcagtggcagactcttttagcaaagggctgcatctctaaataactcgagcaccgtctttggaatcaaggtgtgatgaaaagtgctttggagtcacaagcacctgcggttgggtcctagctgtgtgcttaggagcaaggtgacttgatgtaagttagtctgcctcctcctgctcccgactttctcctatgagtgagagctgaaa

SEQ ID NO: 481496 - DNA, 498 bp, Homo sapiens
tggttgccctctgaaaaatgaaatagacrtgttctttattgctagatgtcaaagattgctagagaatctttgagaaaagaagctgatgccactagaggatttaatgacaactgagggtaaaaattgttggataagaaaataatcacattaatatcagaatcacttgttattcccatgtcctgtgtttgagccaggagagttcagtctctagtgtgagtcctggtgtgggtggaacctggggagtccatagggcccttcagtggctaggcaaggctcagagaaggacttcaggcaccagaggcaagagaccttgtggcttaatgtaaatgatcaagtcctttaaaaatctccttttgtgccccctccccactgcccccctttcccggcctcctccccaccccactgtgttgtgctttatgcctgagaatccttacagacaggcggacactgttctcctgcacggggaccttgtgatggggcagggaggggtcttttcag

SEQ ID NO: 481497 - DNA, 498 bp, Homo sapiens
tggttgccctctgaaaaatgaaatagacgtgttctttattgctagatgtcaaagattgctagagaatctttgagaaaagaagctgatgccactagaggatttaatgacaactgagggtaaaaattgttggataagaaaataatcacattaatatcagaatcacttgttattcccatgtcctgtgtttgagccaggagagttcagtctctagtgtgagtcctggtgtgggtggaacctggggagtccatagggcccttcagtggctaggcaaggctcagagaaggacttcaggcaccagaggcaagagaccttgtggcttaatgtaaatgatcaagtcctktaaaaatctccttttgtgccccctccccactgcccccctttcccggcctcctccccaccccactgtgttgtgctttatgcctgagaatccttacagacaggcggacactgttctcctgcacggggaccttgtgatggggcagggaggggtcttttcag

SEQ ID NO: 481498 - DNA, 481 bp, Homo sapiens
gtcaagggtggaattgccgaggaatgttaacttaatctctcaaaagtttgtagcgggtttggctagttacgtgataccggagggctgcctctaacaaccttccccatccagttaggtatctcgtgtgcactttctttcccacccacgctcaacagtcaccayccctctgaatgacagtagtgtttgtgggccctttagaggagaatgtgcagtgaggatctctcgagagaggttggagagcacctaccatctgtgtcgttttgaaagattgtgttgtgtggcttatgtacgcctattagggatcgcaagagtgggaatgttgctgtttgaaggaaaaccttaacagggtgtgtttatggtctatgagttattaaagctcaattcttgcaatcttgaatatacaaaggatcatagagatcttgtcttgggacacgctgttcctaataatggcataactctttttttttgcgatgaaaacgtt

SEQ ID NO: 481499 - DNA, 322 bp, Homo sapiens
aggaatgttaacttaatctctcaaaagtttgtagcgggtttggctagttacgtgataccggagggctgcctctaacaaccttccccatccagttaggtatctcgtgtgcactttctttcccacccacgctcaacagtcaccatccctctgaatgacagtagtgtttgtgggccctttagaggagaatgtgcagtgaggatctctcgagagaggttggagagcacctaccatctgtgtcgttttgaaagattgtgttgtgtggcttatgtacgcctattagggatcscaagagtgggaatgttgctgtttgaaggaaaacctt

SEQ ID NO: 481500 - DNA, 652 bp, Homo sapiens
ctggatcacacctctcctgaagccactgaaccattcagttatggaagccactcagttgtatttattgtgaatggctatagtcttccttcccaacatttyccctaacctaatggcccaaaacttttagaaaggaggaacctctttccttggataattaccctggtctgttggttttgggttcccaggatgtacacagatgtcactgagaaatttctccttcctatagtatttctcttgggaaacaaaacccataaaggggatgttaaaatgaagttctgagactacaaataattctgtaacaaaatatttttctataattacaacttctctcaaaggaacatgaaaagcaaacaaaaaaaggaaaagaatgaatggatcctgttaaatgaagcaagaggtggagtgaagtgaaatggattctgttagatgaagcaggagctagagagaagtgaattactctgcttaatggagggagaaaatttttgaattctcagagcagttcaggaagacaatatgaagatgcaggtgatatgggaaagaaggtgtcagcagaaattctctgtgggtggtaagatgaggtcggtgggagaagagaaagggacatttgtaagcacctccctctgttccagtcagcactcttcatcttcttatc

SEQ ID NO: 481501 - DNA, 541 bp, Homo sapiens
ctcactctcaccccagtctgggccccattcataaaaaccttggaggaagacaggattcccatctcctctttacagatgggaaggctgaggcacagagagcctgagtaagtgaaccaagctcacacaggagacggatacccaagattcaaaatcagaccatcgggattcagagcccacagttgcaaatctttactctcatgccttgatatgcccagagcaccscgccccaaaacacccaaaacagagcttctggaccagaaaggcctcaaacccatttcttccccctctgtaacattctgctactggccctctgttgcagcccactccctctcccctaatggagagggagatacggagtggggaggatgggagggatcatcgggagacatggggcggcctttctgggagccttctcctgtcacctggccagtgctccacactgaggtcttcagttccagccctgggctccgggctccctctcctatgctccagctccgtggagcagacacagacctcaaattttacaggacttatttgccag

SEQ ID NO: 481502 - DNA, 444 bp, Homo sapiens
cagcctctcccatcctctgcactgcccgatcacccatgagacaatgtggccttgctcccygtaagcctatgctccccttcagccacctatggaatagagtggaaactccttgctgcaacacccaggtcccagcttgtctcctgggtctccctgcaggcttgggtcccagacactacactagagacaaggacactgagggcttccgcacctggtagacgtgctgtgggaggagcatgctccacatgccctgcctttatcctggggtcctcctccagaaatgcttttcctgcattctcatttcggggaccccttcatggggctccacctgtctcccatttctagctgaaccaacagctcctttgttttactccaaggctccttgcacagcccgctgttgtagcccttggctgtgctgtggtgcacacagaatgggggcctcccacc

SEQ ID NO: 481503 - DNA, 506 bp, Homo sapiens
actattaagtaagcacgatgttttatgtatgagaaaaaatgaattctacaattacgtaccatgataactcttgtgccrctcaaggttttcactttttcttgagtcagttttaatgatctatatttttctattatttgtctattatgcctgcttctaaatatattgatataaaagtattcacatggtcttttactgtttctaaaatctctgctgaatttgcatttatgtctattttcctacttttgatattttttaaaatttgagtattttgtcatatttggggtttttcaatattgctagaagtttcttaattttttagagtttaaaaaaaaacaacttcaggccagatatggtggttcacccctgtaatccagcactttgggcggccaaggcaggtttggatggctttagcccaggagttcgaggccagcctgggcaacatggcgaaaccccgtccctagagaaaataccaaaaaatgtagtcaggtgtgatggcgcatgcctgt

SEQ ID NO: 481504 - DNA, 577 bp, Homo sapiens
tgatgagaaagataagcatttgtcagctttgttaagacttgaatccaatctgagaatggccattctggaaaacataaacccaggggtactcacttatgaccttgctaccagtcacgaggtcacatgcatcaaggagaaggaagtacacttcccctcctcctttctgttgacaggcattctagtgtcttctacgacagatacagagagacctcctcagaccacccaacatgcatccagcacacacccccagcactctgtccctgctgatttccttctttctatagcactcatcaccaatggatagtttctcattcacctctttgtttgcctatctgtactgtcctgctacagtgtgagtcccttccaagcagaractttgtctgtcttgttctccactgagttgccagtgccagcaggggcctggcagaagagatcctgaatacatgcctgtagaatgaatttataaataaattataacaaggtgcagcctctgcaccctgagaacctctgtatggtgtagaacaactgacaagcacacaggcgatatggattcagtaagattaatgccatgagacca

SEQ ID NO: 481505 - DNA, 567 bp, Homo sapiens
aagtttttgatttgatcctcagcttggttgttgttrgtatatagaagtgctactaatttatgtacattgattttgtaacctaagactttactgattttgtttatcaaatctaagagtctttagggggactctttagggttttctaggcatacaatcatatcatcggcaaacagcaatagtttgacttcctcttttccaatttggatgccttttatttccttctcttgcctgactgtgctggataggacttccggtactatgttgaatagaagtggtgaaagtggggatctttgttttgttccagttcctagggagaatgctttcaacttttccccattcagtatgatgttggctgtgggtttgccacatatggcttttattattttgaggtatgtcccttctatgcctagtttgtttggtccatcttaaacaccacttgatagcagtatgagtttagcattatgcctgctgtgagctacttatcaggcattttgctcactgggttttcttactaatcttatgaggcatgcatcatcctgggttacagatgagaaaacactggttcag

SEQ ID NO: 481506 - DNA, 567 bp, Homo sapiens
aagtttttgatttgatcctcagcttggttgttgttggtatatagaagtgctactaatttatgtacattgattttgtaacctaagactttactgawtttgtttatcaaatctaagagtctttagggggactctttagggttttctaggcatacaatcatatcatcggcaaacagcaatagtttgacttcctcttttccaatttggatgccttttatttccttctcttgcctgactgtgctggataggacttccggtactatgttgaatagaagtggtgaaagtggggatctttgttttgttccagttcctagggagaatgctttcaacttttccccattcagtatgatgttggctgtgggtttgccacatatggcttttattattttgaggtatgtcccttctatgcctagtttgtttggtccatcttaaacaccacttgatagcagtatgagtttagcattatgcctgctgtgagctacttatcaggcattttgctcactgggttttcttactaatcttatgaggcatgcatcatcctgggttacagatgagaaaacactggttcag

SEQ ID NO: 481507 - DNA, 563 bp, Homo sapiens
gcggttttcttcagccgacttccgtttactcatctgtaatttgaggccagtacaggtggtatctaagctctgctcccctctgaatttatacagttgttaatttacaggctagagataatcatttatatttctaattagagttgatgacatttgccatataaacaatggttgaatattctgaaggttgtcagcctgcagaagagaatgctgtgaagtactatttggtgcatgataattgcttttcagtatgatctaggggggaaaaaaacagatttctcggttctgcatgaatacaagaaggcaagcagaactttacagaaaggcagattctagctcrggtataggaagactttccaaagagcgaaataaatgatctatcagaattgtgaacctcccgtttttggaagcattcaagagaagcccagatgaagctgaagctctgttcaggatgaagcacaaggcctgcactgagcaggaggctgggctaggctctttccaaatctgtgatcctatgtccttgaaaacagcagacctgaatgttcttaaagtgtattcaaactgtt

SEQ ID NO: 481508 - DNA, 536 bp, Homo sapiens
ccgacttccgtttactcatctgtaatttgaggccagtacaggtggtatctaagctctgctcccctctgaatttatacagttgttaatttacaggctagagataatcatttatatttctaattagagttgatgacatttgccatataaacaatggttgaatattctgaaggttgtcagcctgcagaagagaatgctgtgaagtactatttggtgcatgataattgcttttcagtatgatctaggggggaaaaaaacagatttctcggttctgcatgaatacaagaaggcaagcagaactttacagaaaggcagattctagctcaggtataggaagactttccaaagagygaaataaatgatctatcagaattgtgaacctcccgtttttggaagcattcaagagaagcccagatgaagctgaagctctgttcaggatgaagcacaaggcctgcactgagcaggaggctgggctaggctctttccaaatctgtgatcctatgtccttgaaaacagcagacctgaatgttcttaaagtg

SEQ ID NO: 481509 - DNA, 441 bp, Homo sapiens
ttggtgactatagagagaagttagggttcagcataaattggagtgaattgaggcacaattggaagtgggagaaatagaaatgaaatgcctaaaccagtcaaagaattgtggtcatctcacactttattagtcatcagaaaaatgcaaataatatcataatgtgacaccatcacacatctaccagaatgactagaaccaaaaaaaaaaaaaagacagtttcaagtattggcaaggatgtgaattagttagaattcttacacactgccagtggtattgtaagtctatgcaaccacattggaaaactgattggcagtatcagtttactrctcaagctgaatgtatgcataccctgtgatactagatgtataacaaacagaaatacatgcatgtaagcaccataagatgtacaaaaatgttcattgcaggtctacttgtaatagc

SEQ ID NO: 481510 - DNA, 624 bp, Homo sapiens
ttaacttgtaagtatataattcaactctccctgaaaacgatgttagattggtctttcaaatgttagttctacttcttccttcatgaaggcaggtagaatgaaataatattttctatmtttttgttggttaatatttgtttctttcaaaacattttaagctccaagaggataggaactgtgcctttcctgttcctcattgtacctctgcacttggcttggtactagctaaagttaatgctttttgaataaagaatagataataaaagcaataacttgtgaggaagatggagtattagttctgagattttgccaaatgacactttaacatggttaccataatttgcagtgctctcaccattcttgcatgtcatctatgacttcaataggctaattcaaaaggcttccaaactcaaatgtcaggcttgattctttttgtcccctctgcagtttccactgctgacccaccccctccccccaactttcctgtgggactttctcctcttggccttggtgataatgccctttcttaatcctttccttgcaaccccaaccacttctctgttttcctcctcaactcttcctcaggcttcccctatatataatattccctaggactcatctttt

SEQ ID NO: 481511 - DNA, 636 bp, Homo sapiens
atctctagtaatggagcccaatgatcggtatcagtttaaagcttctcatttaattctgatgyaatccaaataagggaaacttttctaaagaagactggaaagaaggaaacatatgacctctgctgaaatgtttcttattatgggagcttctccccaacagaaggcatttgtaattactaagagagaacaccctgtccatggagctgagctagctctttctgccctcttatgctacttagtcccagtgacctccctcattcccaggacagatgagggcgtttacacctgggtggctgccccctcaccatagagcttcacctcttttctgttacccagcttcatccaccttgccataagagtcaacaagattcaaagtcattcaatcataattccttaacttctggctagagtttttgacccaagctgattcaatcagagcactcctccacgacttttaaagattaaagctggaatatagaatcttttctttttgaagtaatagagctagacaaatgtaaatctacggccactagtggtcatatcttcatcgtagtgggtctcatgatgggcctctagatatgccaccagatcaggactgatgcattgacactgactaccgcaaatgccactagtacg

SEQ ID NO: 481512 - DNA, 636 bp, Homo sapiens
atctctagtaatggagcccaatgatcggtatcagtttaaagcttctcatttaattctgatgcaatccaaataagggaaacttttctaaagaagactggaaagaaggaaacatatgacctctgctgaaatgtttcttattatgggagcttctccccaacagaaggcatttgtaattactaagagagaacaccctgtccatggagctgagctagctctttctgccctcttatgctacttagtcccagtgacctccctcattcccaggacagatgagggcgtttacacctgggtggctgccccctcaccatagagcttcacctcttttctgttacccagcttcatccaccttgccataagagtcaacaagattcaaagtcattcaatcataattccttaacttctggctagagtttttgacccaagctgattcaatcagagcactcctccacgacttttaaagattaaagctggaatatagaatcttttctttttgaagtaatagagctagacaaatgtaaatctacggccactagtggtcatatcttcatcgtagtgggtcycatgatgggcctctagatatgccaccagatcaggactgatgcattgacactgactaccgcaaatgccactagtacg

SEQ ID NO: 481513 - DNA, 361 bp, Homo sapiens
tttctgcagccccacagagcagctgaggccagggcacagagagccagtgtcacagcccgtccttttcctcctcctgtgtggccagaagccagacagtggagactgtggctgcgcggggaggagggcaaggggatttgtacctataggagcaggtgcgatacatagaaatgtatctgctgtagcttgagaaagactgaaaggtgaaaaataaatgacccaggccagtggtggtgtgcctcctccrctgtcctgttagagcctactcttgacccatgtggcccaaaggacaccaaatggtcccatcacccataccctgacagcagaacgaagccctccctgctccagatactctcccagcact

SEQ ID NO: 481514 - DNA, 557 bp, Homo sapiens
tgacatttggcttgggcccagtagctcacaggatgacttggagatacctgagcagggggtggcaggggagaagggwgtcgcaggaagctgtctgggtagataggggacaatgctgtccttcctaaccccagcagggacaggcagagggacccaggcaggttatttaacctctctctgctgctctttgttcagcttcaggatgatcagtaaggactttaaaaaatggcgtttttttttctgaatatggaaataatacatgttcatggtataaaattgaagcaatgtaggtatgtattatgcagaaactggaacatctgcatgataaccccttcctccacagataaggactcttggtatatattctatctgactggttttccatgcatctccaaaatctctatataattacttcatgaaagtagaatactatttgtaacttgcttttcttcactcagcagtatctcaaagctctatcataattcatttttggttatatggtgtttcggaaaaacctctctcaaaccaggtttttcctctgctctcacaccacaccaatc

SEQ ID NO: 481515 - DNA, 514 bp, Homo sapiens
ctggcagtggggttccaggcacagcagcacctgcccaagtggaaccattttccccaggtcactgggaagttcaggtccagagtgagagaataagcacttcagccattttcagactgcagcaaggaccagaactacctgaggagctggttaaatgtacagattsctaagccccagcttgtgattctgagacagtatgttcagaatagggctggggaaatctctaataagcagcttcctcctccagaagtgttgtaatgcaggtggttagagagagacaccctaacacaatggtccacaacccctgggtcacggacccatactggtcggtggcctgttaggagccgagctgcacagcaggaaatgagccatgggtgagcaagcattaccacctgagctccgccttctgtcagatcactgggggcattagattctcactggagcacaaaccctgttgtgaactgtgcatgtaagggatctagtttgcatgctccttataaggagcatatatctaatg

SEQ ID NO: 481516 - DNA, 514 bp, Homo sapiens
ctggcagtggggttccaggcacagcagcacctgcccaagtggaaccattttccccaggtcactgggaagttcaggtccagagtgagagaataagcacttcagccattttcagactgcagcaaggaccagaactacctgaggagctggttaaatgtacagattgctaagccccagcttgtgattctgagacagtatgttcagaatagggctggggaaatctctaataagcagcttcctcctccagaagtgttgtaatgcaggtggttagagagagacrccctaacacaatggtccacaacccctgggtcacggacccatactggtcggtggcctgttaggagccgagctgcacagcaggaaatgagccatgggtgagcaagcattaccacctgagctccgccttctgtcagatcactgggggcattagattctcactggagcacaaaccctgttgtgaactgtgcatgtaagggatctagtttgcatgctccttataaggagcatatatctaatg

SEQ ID NO: 481517 - DNA, 546 bp, Homo sapiens
ctgggattctgctgtgtctattttgtgtttctggctgacaactttaaacaggtaggcacctggttaaaaaagaaaaaaaaaaaaaaacagagcgagaatggcaaaagatgattgaagtttttgtttaggattttttccawatcagcttttgtcaacaaaagagttaaagttttcatattttacatagatctacgtcttctatttgattcccatggaaagagctcgggcatagagaaaccgccacatgtcttgtcgaccctcctgtcctaggtacatatgatcaaacctagctcagacaattgggttgctgatgatagtcgtgaagatctctaaagatggctcactggccacagattctaaaaggccttgttcacacacctgagcctttcctcaggaacctcttccagcagaggatccaccggcctctgttgtttgagaggtgtttccgttttcttccttcccctcattctaggtgatagaagcggccaatgggaccaccaataactgccacaacaatgagacggtgattctgacgcctaccatgga

SEQ ID NO: 481518 - DNA, 547 bp, Homo sapiens
gctgggattctgctgtgtctattttgtgtttctggctgacaactttaaacaggtaggcacctggttaaaaaagaaaaaaaaaaaaaaacagagcgagaatggcaaaagatgattgaagtttttgtttaggattttttccatatcagcttttgtcaacaaaagagttaaagttttcatattttacatagatctacgtcttctatttgattcccatggaaagagctcgggcatagagaaaccgccacatgtcttgtcgaccctcctgtcctaggtacatatgatcaaacctagctcagacaattgggttgctgatgatagtcgtgaagwtctctaaagatggctcactggccacagattctaaaaggccttgttcacacacctgagcctttcctcaggaacctcttccagcagaggatccaccggcctctgttgtttgagaggtgtttccgttttcttccttcccctcattctaggtgatagaagcggccaatgggaccaccaataactgccacaacaatgagacggtgattctgacgcctaccatgga

SEQ ID NO: 481519 - DNA, 562 bp, Homo sapiens
tggtaaaaaaaaagttaaaaattaaattatcagaaggatattggggatgcctgcagagtaatcaaaataggatctatattgttatagagccaggcacattaatgccatcagctttagccctttatgttgtgattttactttattccaaatgtcagctttatcctgttggatgtgctgatcttttttctctacattcagccagttccattctcatgttctggaagcytgtgacagagggggaatatgcatttcaagatcagaagatccagagtgaaaatgattggaatggcctgagtcacagttccaatcctagaccaaggcatctggctagggatgtgagagatgatgagtgacagatacagtgacagcaagtggttgatgggatctgagttgtgagagagggtctgtgaaaaatgaaagacctgcataagaagaggagaagcagaaatatgaacattgttgtgagtcaggtctttacccaactctgtgctgcttattctacttttttgtgcaagattgattatgtgtgtttaatagaatgcagtaaagaacagtgttggag

SEQ ID NO: 481520 - DNA, 562 bp, Homo sapiens
tggtaaaaaaaaagttaaaaattaaattatcagaaggatattggggatgcctgcagagtaatcaaaataggatctatattgttatagagccaggcacattaatgccatcagctttagccctttatgttgtgattttactttattccaaatgtcagctttatcctgttggatgtgctgatcttttttctctacattcagccagttccattctcatgttctggaagcctgtgacagagggggaatatgcatttcaagatcagaagatccagagtgaaaatgattggaatggcctgagtcacagttccaatcctagamcaaggcatctggctagggatgtgagagatgatgagtgacagatacagtgacagcaagtggttgatgggatctgagttgtgagagagggtctgtgaaaaatgaaagacctgcataagaagaggagaagcagaaatatgaacattgttgtgagtcaggtctttacccaactctgtgctgcttattctacttttttgtgcaagattgattatgtgtgtttaatagaatgcagtaaagaacagtgttggag

SEQ ID NO: 481521 - DNA, 562 bp, Homo sapiens
tggtaaaaaaaaagttaaaaattaaattatcagaaggatattggggatgcctgcagagtaatcaaaataggatctatattgttatagagccaggcacattaatgccatcagctttagccctttatgttgtgattttactttattccaaatgtcagctttatcctgttggatgtgctgatcttttttctctacattcagccagttccattctcatgttctggaagcctgtgacagagggggaatatgcatttcaagatcagaagatccagagtgaaaatgattggaatggcctgagtcacagttccaatcctagaccaaggcatctkgctagggatgtgagagatgatgagtgacagatacagtgacagcaagtggttgatgggatctgagttgtgagagagggtctgtgaaaaatgaaagacctgcataagaagaggagaagcagaaatatgaacattgttgtgagtcaggtctttacccaactctgtgctgcttattctacttttttgtgcaagattgattatgtgtgtttaatagaatgcagtaaagaacagtgttggag

SEQ ID NO: 481522 - DNA, 562 bp, Homo sapiens
tggtaaaaaaaaagttaaaaattaaattatcagaaggatattggggatgcctgcagagtaatcaaaataggatctatattgttatagagccaggcacattaatgccatcagctttagccctttatgttgtgattttactttattccaaatgtcagctttatcctgttggatgtgctgatcttttttctctacattcagccagttccattctcatgttctggaagcctgtgacagagggggaatatgcatttcaagatcagaagatccagagtgaaaatgattggaatggcctgagtcacagttccaatcctagaccaaggcatctggctagggatgtgagagatgatragtgacagatacagtgacagcaagtggttgatgggatctgagttgtgagagagggtctgtgaaaaatgaaagacctgcataagaagaggagaagcagaaatatgaacattgttgtgagtcaggtctttacccaactctgtgctgcttattctacttttttgtgcaagattgattatgtgtgtttaatagaatgcagtaaagaacagtgttggag

SEQ ID NO: 481523 - DNA, 544 bp, Homo sapiens
gtaggttcgtaatctttcagagcctcacatgatacataaggtcaaaaatcttgttacccttatgactttatctcccaaccttgtcccctcaatcagtccctccacttcagttatcctggcctccttcctgttctgttttcagaacagaaacagaaatccagttaatctcagttgacttctgcctcaggatctttgcacttgctgtttctttgccaggaacacatctggacaatgcattctctcacttctttgaggaatctgctcagatgtcaccttatcccagagtgcttctttgaccaccatctaaaacagcaaccctgactcccaccsatctataccttatcctacaattcttcttcactatttgtatccctccctgaggtatgtgtgtttgtttggttggttggttgctgtctgcctcccccttcaggataaaaccactgtggaaaaggcagtctttcattagtgctgaaaccccagctcctaggacagtgccatttaagtgttcgattacattccataacaatatcctgaacctacaatc

SEQ ID NO: 481524 - DNA, 428 bp, Homo sapiens
tggtaaaatggactttagagactcagaagggtgaaggaarggggagggtagagatttttaaaaaaaactacacattaggtacaatgtacactactggggttataggtgcactagaatctcagaattcaccactatataattcttccatgtaacaaaaaaaaccactgcaccccaaaactattgaaataaaattttttaatgtaccctgagtgttccttacgtgactagaaccttgttacacatttcaggtttataaaaaatagtctctgtcctcaatctatttaaaatttaagaatagttatctttggactctggaattatgttgatttttatttttccttttggactacattttccagctatgttaacacaaattcatatgaggaatagatgaaattgatacaccggttttttaatgaaaattagtt

SEQ ID NO: 481525 - DNA, 519 bp, Homo sapiens
aggtggggtttggggaggagacatcctagcagcagttaatacaggaaggagaacctgaaatttttcatctgtgggtatgagaagacaaggtttccacattcctcggcagctcctgcacctgcctggagcaactttttgggtatagccatttatacataggctaggcaaccattaagaatcagtggatcagccaggtgtgatggctcatgcttgtaatcccagcactttgggaggccaaggcgggcaggttgcctgaggtcagtagttcaagaccagtctrgccaacatagttaaaccctgtctctactaaaaatataaaaaaattagctgggcatggtggcatgcacctgtaatcccagctacttgggaggctgaagcaggggaattgcttgaaccagggaggtggaggttgcagtgagccacgaagacgccactgtactccagcctgggtgacagagcaagattcagtctcaaaaaaaaaaaaaaaaaatcagtggatcaaatactaaaatatccatg

SEQ ID NO: 481526 - DNA, 585 bp, Homo sapiens
ccactagatatcccttgggaggcatggtcggccttccccttcagtccctcccacctatagttggttccttctgccaaaatcttcctttaccccctgcactccccagttcataacagtcatcacttatatatttaatggtcctccttaattagattttaagctctggggcaggacaaagcgtgtgtacccagaccttagaaccacataggcatataggactgactcagtaaatgtttattggatgaaacaatggatctggaagtacaccrtgaagtttcagagtctgacacacctggatttaagtgccccctttgtcatgtcctggaagtgtaacctcaggctcatgatctaaccttgctatgctttagttttctcatctaggatgataattgtacctatctctaggtcgttgtgagaattaaggaacataatatatgttaagtaactaatatcaactaacttaataatagtaatcttatttagccctccttccatttcttttcacccttaataaatattaagtgaataagagggttagctttgatgttccttcattcagctagatcccttgttagtttatcactg

SEQ ID NO: 481527 - DNA, 504 bp, Homo sapiens
ttttgacttctgtgctgcggcctcagttacagcactttgtgtccaactcaacacatcaggtcctacctcttttgatcacatatccctttaagactctgaaaaaaaaaaaaccagtgtttctcatatgtgtttatgcagtagatatgcaattccttctgcctagaacatgaactctttcattccttaagaaatacttattcttcccttaagtgttagctcaaacattagttctctrtgaagtcttttcagatctccaagcataaagctcccttgacactcgtgatattttcaaccctcactgggaattactaatttaaagaattaacttccatacttgcttacaatgcttaatccaactccaatttccctgtcctcatcataaatattgtaaaattcatctttctggaaatgttatctttggcattacacttcagaacattctgtatatactaacagggtccagcagttttattttgaaaaatggctgagtcttaaggatgtgaa

SEQ ID NO: 481528 - DNA, 498 bp, Homo sapiens
attagaaaaagcagggtagtacagtgctttccagtacagcctttacatttaaaagaaaatgaacgaaaaagtccctgggcttctggggtccaccgtattctagctcagtgactgtgaaccatttatttatttttttgtctgagtttctgttagcttagttataataatgagtattataaaagtatccaccttgcaagattgttatggaatgcactgatatgacaacagatcatttagtagcaactagcacataataatgagaataaatataagcattastactactattaatttaatggatgaagtcctggcctgttcatcataagaggtgagagctagttctagctgggttctattaccttgctcttgagttttgtttgtttctatatgtacagagaggggaatgagaatgaattatgtcttaagattctttttgtgttcatacatgatgattctgagtctctaaccatctaagagtccatttcccggttgaagggt

SEQ ID NO: 481529 - DNA, 586 bp, Homo sapiens
actctatttccaagtaaagttattttccccctaagactcagacccacatatgaattacagtaaaatctctctccaccttcttctatttccaagttcagaaaatggcatcctaatataatagcacaggtgccaatttaaatacaggaacattgaaaatactgccaaacttccaggcttagaagcttttctgttgttacatgttgggctgctaaacacacactgagtctgaacatctaacacaaacgatagcaacactatgagaaacatttttaaagtatcaggcagttccttttaactttcatttytaatctggacattgtccattccaatggtcttcactatagaatgttgcacgtatcatgaaaataataacaatttactaacaaatagactattctaaaatagtaccttaataacactttcccccaactctctttttcttttaaacagcaaagattggattccacaggcctttagctaaccaaatcaaggagagtttctaggattctgccaaagttgaaaggtagaggaatatgaggtttgactttatagatttgttgcacataatagttactggaaaagcaca

SEQ ID NO: 481530 - DNA, 671 bp, Homo sapiens
aagagggctgggtaatgaatacttgactagcagctctgccttagcagtgtcctaattggaatagacccaacaagaaagaaaaattcacaggctgctcctgtccacatgtcttaaatattactccaaatgaaccatttacacacaaagaaaagaattcaaggcagagggagtgtttattctttttgcttttgtgatacaaagggtaggtcccaagcctctccttttttttttgttccacaacatatgatttttccctgatcagatgtatgctgatgtgatcagtgattctgaatctgctggcatttgtacagttaaatactgttggtgtcataatgagaacaacaacaacaacaaaagtcactgaaagtaaccattgtacttccgtgacagctataaaatgagagccatttctgcaaagaataaagctgatctgaaggaagcatattattttgcatattttacawatatactttccaagaaatatgacctttatttcctatttggagtggagtgtaatcaggacttgagtagccagtataacaggatcattaaaagggatattttcactgacattagaggtctaaatggccacgaggccttatatacaaccttggctttttcctgtctacccagagttaataagtgataaggccgggagagagataaatcac

SEQ ID NO: 481531 - DNA, 557 bp, Homo sapiens
aaattgtatttccaagacaaggcctctctttgatctctagaacacctttattttatggaaacagtgatgatagttacatatttttcttttcttgaatttatttcctaaaatccaaacagaggaatgaaggtatgaatttgtcaatagggtagaggagcttgaaaccgaggaagaaggacaaacaatttttaacctgaacttctgcagataattccaagtgatttttttaacctttccaaatggactctacaaaaagtaccaagttccaatgtatcaaaattgaaactgaaaccagtgtcacttcatgactcaagcaagagcacttcctatccgaaaacttccctcatatacataagcttttatttctaattagtccttgaggaatacctgtaatccctgctttcactacattcataagacaaaacaaatattactgagccataagcctgagcaaacaagctactatatttaaaagtagcagcccagatgtcatactctattaggaaatgagcaatgcctaagwtctgagctgtttctgtaaccaaaggatgtgcaca

SEQ ID NO: 481532 - DNA, 417 bp, Homo sapiens
caagactccgtcccaaaaaccaaacaaaaaaaaaaaaaaagagagaatatcattcctagaacaattagaaacagtaattagaaaaacagacaatatcttattttcctctttaaatggtgaaactaattttcttaaggcaagcatgaaaattatagtagcccaatagggggatagcaggtcttgactgaatgagcgctgtccagtgatgatcctgaagtctgtaaagtacatctaagacagaaggaggaggccaggctcccattgtaatcccagcgaagacaagaattctgaaagccctrctcatcgcaggatcaccagtgactattcccatacagggtgcggtactcaactcagaataggagttttcaaaaacacaagagcaaatcctattactttctcagtctaatttagagtctc

SEQ ID NO: 481533 - DNA, 607 bp, Homo sapiens
tgcccctttaggccctggagacatggcctgtgcccctcagtaccccacagtcccacctgtgcaaactcaccatttatatgacctgctttatccttataagcatttggggttgcaacctttggtctagagaaaaacataaaatggcttgtctctaatggcgcaatttcaggcacagggcagggtagaagactggggtggacagtaggaggagaacttttctgatgtccttgaaatcaggccatggaggcgggtccccattccatcagcgaggatgcataaagaattgaaacttgaagtttacgggtagaaaagtgttatatgacagcatcaggagtgtggctagcacaaagggactaaccctggatggtaggagccctggcacagggtcaggaggcctctgcgggcatcccacattcgcccctgatctctgtttgatgttcagtatgactctttgaagcctyagattcctcttgtgggcatcccacattcgcccctgctctctgtttgatgttgaatacgactattttgaagcctcacattcctcttctcttcttgaggagaatcaggctggattatttcccgtctagctctaactcttgactttaat

SEQ ID NO: 481534 - DNA, 562 bp, Homo sapiens
ctcaaagccctcgaatgccaggataagaaatttcaacttcatcccatagggtatgggcaatagggagccatggaagatttcagcagagaagagtcactgtcagatctatgctgggggataggcaggraatagatgcttctatgagaaaagagtgaagcgtctggaaatttgccctcttattcaacacctgaggggctccacagttaatattcaccttcagcagagctgacctcctggacctcattttaccctagccctgtttctttgccactgggtgcagctcagcatgaagagtgcatgagtgagagccacgggcctccttaggggaaaaagaacaagtactgcccaagttgctacattgctcatatgcattgttaccctgaaagggtcacagtcccttgcctctacagggagtgggggatgaggctgccttggtgtggctcagaaaacatattgaggcttggcagcacctgagaacattttgaaaaacttcccaccaggttttatttgttttgttcacaggcccttaaagttagcaacagaaatcacctctgagggcttg

SEQ ID NO: 481535 - DNA, 445 bp, Homo sapiens
tttatcaggtgcctactgtatgccagtcacagcatgaaacagtatcacccattatttctcatccttacacaaaacctactaggtgggaattgttgcttccccttttataggtgtgggaaccagactgggagtcattaagagattacctgaggccatgacactagtaagcagtataaccaggctttgagcccagatctcccactctgtccttcttctcactctgccttgatgcctgtgttaaatttggtatgttcatttggcctttaaaataaatttccaaatttttcaatattttctgcaggccatttgaaatcacagccaatccatggattagasatcaagagcaaaatgtttctgtagtggagataacttaccccaaatactatttgtggtagctctttggactttttacagaggttttgtttctcttacctgccaggtgtat

SEQ ID NO: 481536 - DNA, 547 bp, Homo sapiens
caggaagggcacagcaagaataatttttttctgctagatattgtctaggaccaccagaaggctggggttgacttgatggctggaatcatctgtgcattaattatgcctttttattttatgtatttstgatgctttgacctctgggaccttgttgatgctaaagggactgctccttctatggttagcaaacatagtgcctcttccatatgcaaactaaccaatccagagtcatgctctagcttcttcctttttgtgggctcttatactccagaccactattctcctgccctaatcaccccaaggccaggatctaaatagagatagctcctacacccaagatccttctgaaatgatccaaaccagccaatcctaagcctgtttaccatgcctcacctattccttcccttggaaaccacaataaaggctcttgctcccattttcccttcagtccttctgcctcttgccccgccatggaacattcctgcatggcccccgtccccctgcattgtgtgttgtgtctcctgtttctgaggacctgtttgtatca

SEQ ID NO: 481537 - DNA, 587 bp, Homo sapiens
gctggaaataaaataaactatttcatatgatttcaggcatagtgaaccaatggttaaaaaaaaaatggaatagagatggcccccragtgaggaaaaagttgcctggaaaataacctgaggaaattttctggggataatgggaaacttctgttcttaaaggatgaagttcatatgaatgtatttatctgtcaaaactgtacagctaagatttgagctttcattgtatgtacatcagaccacaccaaaaaaaaaaaaaaaaaaaaagaacttacaaaaaaaaaaaaacctgtgtgtaggtggggaatggcatatgattaggtgttgttgaggctgggtgagaagtctattgtactgttttgtttattatgtttgtttttttaacatttgtcttaggttcagggttagttcaggttcaggtgcaggtttgttatgtagctaaagtcatgtcacaggggtttgctgtacagattattttgtcacccaggtactaagcatagtacccaatagttattttttctgatcttctccctcctcccatccttcaccctcacccaggccccagtgtctgctgttcccctcttcatttg

SEQ ID NO: 481538 - DNA, 650 bp, Homo sapiens
cattatttctcttctcttccaaaccacttagcccccataattctgtcgtgatcgcatgatcaaaatgcttgagttctggaaaatgagctgtaggatttcaagttacagkagtgacggggagcctggcctcaagcggaagttgaaaactacttattatgtgtgtgtcagtttcagcacgctggcagagaagctggagtttgtccttgagtggattataacattgtggattttccataaggaatttcttgtgtgaactcattgagatatgcagatataaaacaaatgcttatttacaatccttgcaaaaatcttagatctgtgaaacaaccaaggaagaaggtgcttctaaaatgttaggctttcagcttaacaaggtcaaatgagttcatctttgaaaggcctctcctttctcaggtgcatttaatttttttctaaatatgaatttatctggactatcttgaaaacaattgcttagggtaaggtaggggtatgtgtttaggcttctactgtttttgtcaaaggatttgctcagaggggaccatgaaattggaccaggctaggagaaagatacaggcctgagctctctttgcctcaaacagaagactggcctgggcttggcgctgggctagggaaaggactattggcgtcct

SEQ ID NO: 481539 - DNA, 550 bp, Homo sapiens
ctccagaactatggaagaataaatttgtgttgcttgaaaacaccaagtttgtggtaatttgttatggcagccctatgagactaatagagtaagtatcctcaggacgatgaaaataaatgccagcgcctacattatctacccaagctcaaggtatgagcagccatcatccgtcagagaagaatctccctgcatttgtaattttgatttcttctcctcagagttgattacatctattctgattttttaaaactcagtgttccattggtcacaaatgctcctaacttcaaaaataatctagttttgtacaagccagctgccaggtcaataaaatcacctcttgcaagctagtaatatctgtgatttaccagaaacagcaggaagggtctaaatcatgagcasgaatacttcagccagaggcacgcccaccccagatgaaccagagagaacttggaagctgtgacaggtgggagaggtgggaaaaaaaaaaaaaaaacaagaagagcaagaaagcaatttcagtgggatactgaaaaaagaaatctaaattttt

SEQ ID NO: 481540 - DNA, 550 bp, Homo sapiens
ctccagaactatggaagaataaatttgtgttgcttgaaaacaccaagtttgtggtaatttgttatggcagccctatgagactaatagagtaagtatcctcaggacgatgaaaataaatgccagcgcctacattatctacccaagctcaaggtatgagcagccatcatccgtcagagaagaatctccctgcatttgtaattttgatttcttctcctcagagttgattacatctattctgattttttaaaactcagtgttccattggtcacaaatgctcctaacttcaaaaataatctagttttgtacaagccagctgccaggtcaataaaatcacctcttgcaagctagtaatatctgtgatttaccagaaacagcaggaagggtctaaatcatgagcaggaatacttcagccagaggcacgcccaccccagatgaaccagagagaacttggaagctgtgacaggtgggagaggtggraaaaaaaaaaaaaaaacaagaagagcaagaaagcaatttcagtgggatactgaaaaaagaaatctaaattttt

SEQ ID NO: 481541 - DNA, 529 bp, Homo sapiens
tgtaaaagaccttctgacacgcagccaaagctctaaagccctgctgaggagtttgtcctccccaaagcctgtgattctaggagaacacgcacagtaagttgaaagttgttttctctttaacccaggaagaaactaggtatttaactgaagctgaattaagttagagaaaacaaatacattgtgcccaggatttacctttctctaccacccctttgtgaactttgtacatcgtaggtgttttaagaatatttattaaattacattttattccaccaacactgataattagaaattagttcatttaaytggctaatcaaagaagaggtgtatttttaatgtatatgtgtgttgtccatgccagtcagagtcccttccacaatcattgtcccccatgtgggaagctgcttcactcagaggctcctgctcagtaaagaagaacttacgtttctactggaataatgggtgggcatgggctgaaccaatggagtttacctgactcaagatcaacaacagacaggtaggctagata

SEQ ID NO: 481542 - DNA, 487 bp, Homo sapiens
ttcaagtatgaatagaactttaaatcatgatatgtgttttctcattaggactttttggataatcctgatttaataattaggtaataattccatgcgaactgtctgcaaatgggaatttccaaagcgtctaaaactttattctctttgtatttacaatagctctcctatagtcttctgcgtaccatttaattggctatcaaatcattttccaaagatcctgaaaaggtaagtttcaacctcattgccctccataaagcaaatcataaattctaactaattgtgatggggtggggggtggtctaaacaggaaattacatgcagcaaagagcatttttaatatcatcccattttatttttcttgasgtttctaatctaaagcatgcttctaaaatatcattcccagcacatgggaagaaacacattcttttaaggtggaagtgttaattaatgtgcatgacatggaaagaacaaggaaaaggttacagct

SEQ ID NO: 481543 - DNA, 587 bp, Homo sapiens
ctgctagtcccagaagcttgactgataaattcctgcccatcctgaacttgtctttattctttaacccccaagcattttgcttcagtcttctacaggaatatccttttgcaactacctctggtatctgaactgttttcctgtagggtggatatcatctggattatctgcccagtccacgacttacttaccctttctgaggctgcacatgcatgcacacacacacacgcgcccacgcacacacacacgcacgcgcgcgygcgcgcacacacacacacattcctctgcaaagtttgtaccaaataaacccattctccagttctgactggaccatggatgtacatatgacccaagatccatcaatcagattctctcatctggacatttgaattctctgaatggtgtgagctgatcacaccattttgaggagttccttttggcgtaaatagatagatagatacagaaagcagatggccagggagctccacatcctcattccagtcccttataagacctaactgcacgtactgcttttacattctatcctatacccctgtattttttcaacgttacctctttttgaattaaat

SEQ ID NO: 481544 - DNA, 587 bp, Homo sapiens
ctgctagtcccagaagcttgactgataaattcctgcccatcctgaacttgtctttattctttaacccccaagcattttgcttcagtcttctacaggaatatccttttgcaactacctctggtatctgaactgttttcctgtagggtggatatcatctggattatctgcccagtccacgacttacttaccctttctgaggctgcacatgcatgcacacacacacacgcgcccacgcacacacacacgcacgcgcgcgtgcgcrcacacacacacacattcctctgcaaagtttgtaccaaataaacccattctccagttctgactggaccatggatgtacatatgacccaagatccatcaatcagattctctcatctggacatttgaattctctgaatggtgtgagctgatcacaccattttgaggagttccttttggcgtaaatagatagatagatacagaaagcagatggccagggagctccacatcctcattccagtcccttataagacctaactgcacgtactgcttttacattctatcctatacccctgtattttttcaacgttacctctttttgaattaaat

SEQ ID NO: 481545 - DNA, 589 bp, Homo sapiens
aaaagcagcagtcatgcattcagccgcagcagcaggaagataaactcctaactttcctgctcagttgcccggatgcagtttcagcatcaatggcagcacctccagcagacagagggcaagggcagctaggcttcagtccaggttcaatcgcagcttccagtgtctttataacactcttcttttttgtgttctttctgtgtttctaagagcactgtaaccaattgtctgcattaaatccctctttgcttgaaatatttagaatgacctctgatttctgggcttggcactaactgacatagayatgaatctctcatttatataatgtgtaataaaactattttccaaggttgtttgctctttctagtcacaattttccacgctagactggaatattgtttgggaaattgggctgaccatctcacccagagaaacagtgattcacaatgaaaaagcagtcatgtgatcttaggcaagttaaaattacccttcagggtaagtgtccttaaaagtgaaataatgaatataagcttgtccaaagaattaaaataattatgtaaactgaagtatgcaaattatttgcttatgaaat

SEQ ID NO: 481546 - DNA, 679 bp, Homo sapiens
cagtcatgcattcagccgcagcagcaggaagataaactcctaactttcctgctcagttgcccggatgcagtttcagcatcaatggcagcacctccagcagacagagggcaagggcagctaggcttcagtccaggttcaatcgcagcttccagtgtctttataacactcttcttttttgtgttctttctgtgtttctaagagcactgtaaccaattgtctgcattaaatccctctttgcttgaaatatttagaatgacctctgatttctgggcttggcactaactgacatagatatgaatctctcatttatataatgtgtaataaaactattttccaaggttgtttgctctttctagtcacaattttccacsctagactggaatattgtttgggaaattgggctgaccatctcacccagagaaacagtgattcacaatgaaaaagcagtcatgtgatcttaggcaagttaaaattacccttcagggtaagtgtccttaaaagtgaaataatgaatataagcttgtccaaagaattaaaataattatgtaaactgaagtatgcaaattatttgcttatgaaattaaatggtttaagaaaaaaagaatcaatagaagtgaggctgtctgactgctataagggattggatgtttctatctattctcttcttttgtccctcttc

SEQ ID NO: 481547 - DNA, 679 bp, Homo sapiens
cagtcatgcattcagccgcagcagcaggaagataaactcctaactttcctgctcagttgcccggatgcagtttcagcatcaatggcagcacctccagcagacagagggcaagggcagctaggcttcagtccaggttcaatcgcagcttccagtgtctttataacactcttcttttttgtgttctttctgtgtttctaagagcactgtaaccaattgtctgcattaaatccctctttgcttgaaatatttagaatgacctctgatttctgggcttggcactaactgacatagatatgaatctctcatttatataatgtgtaataaaactattttccaaggttgtttgctctttctagtcacaattttccacgctagactggaatattgtttgggaaattgrgctgaccatctcacccagagaaacagtgattcacaatgaaaaagcagtcatgtgatcttaggcaagttaaaattacccttcagggtaagtgtccttaaaagtgaaataatgaatataagcttgtccaaagaattaaaataattatgtaaactgaagtatgcaaattatttgcttatgaaattaaatggtttaagaaaaaaagaatcaatagaagtgaggctgtctgactgctataagggattggatgtttctatctattctcttcttttgtccctcttc

SEQ ID NO: 481548 - DNA, 535 bp, Homo sapiens
ctgtctcaatccagttctctatgtcttcattgggcatgayttctgggagcacttgctccactccctgctagctgccttagaacgggcacttagtgaggagccagatagtgcctgaatcccagctcccaggcagatgagtcctttataacatgacccaatttcctactccattttcccaccactcaatcctcttcccaaacagctctaccataatccaacatccaacagaatttaagagaataaaccacaacttttaagtgagctctatgtgctaggtcatgttttagaatacaaccttaagtgcctggaagatggaggcaagaaacaaacaaggtctcattctttagaggaagacagttcaccaagactcaaacagaaaaaaagatagttatcttgtgacaaaacaagtcataaaattgggtcaggacctgcagcaatgactttatgctagaatccagagcactagcaggaaactgcttaaattttacttaatcaaagtcaagtttggacatacgtgtcaggtaaaacctagcag

SEQ ID NO: 481549 - DNA, 535 bp, Homo sapiens
ctgtctcaatccagttctctatgtcttcattgggcatgatttctgggagcacttgctccactccctgctagctgccttagaacgggcacttagygaggagccagatagtgcctgaatcccagctcccaggcagatgagtcctttataacatgacccaatttcctactccattttcccaccactcaatcctcttcccaaacagctctaccataatccaacatccaacagaatttaagagaataaaccacaacttttaagtgagctctatgtgctaggtcatgttttagaatacaaccttaagtgcctggaagatggaggcaagaaacaaacaaggtctcattctttagaggaagacagttcaccaagactcaaacagaaaaaaagatagttatcttgtgacaaaacaagtcataaaattgggtcaggacctgcagcaatgactttatgctagaatccagagcactagcaggaaactgcttaaattttacttaatcaaagtcaagtttggacatacgtgtcaggtaaaacctagcag

SEQ ID NO: 481550 - DNA, 600 bp, Homo sapiens
cttatgattcattctctgaaaatagaatgaggttaaaatggctcatgcttagtataacggagaagttgaaagaacataatctagcttatcaacttcttttttgtttctctaacagtagtggattgttttgaaattcatttctttcttaaatgagtagtcagccgggtgtggtggctcatgcctgtaatcccagcactctgggaggtcgaggcagacagagtacttgaggtcaggagtttgagaccagcctggccaaaatggtgaaacccagtctctactaaaaatacaaaaattagccgggtgtggtggcgggcgcctgtaattctggctactcgggaggctggggcaagagaattgcttgaacctagcaggtggaggtagcagtgagacgacatagcaccactgcactccagactgggcagcagagcgagactccgtctcaaaaaaaaaaaaaaaaaaaagtagtcactgcatatctgctatttgccaggcacatgataggaatggagatggttttgtctgagaatctcaatattagatgggtmgtctgtgcttcttttaggcacaaatgctgggccaaatgctctctgcactactgta

SEQ ID NO: 481551 - DNA, 583 bp, Homo sapiens
tgggcatggtggcatgcacctgtagccctagctacctgggaggctgaggcaggagaatcagttgaatccgggaggcagatgctgcagtgagccgagatcatgccactgcactccagcctgggctacagagtgagactccawctcaaaaaaaaaaaaaaagattgctttctagccaaggatctgatctgctgttttaataatttcaaacattctgagcaagactgctgctccttttaaaagactgctgtaacttcaggcacttgtgacaaaacctgggtgaattattagacaatttcacgctggtttgcagagtgattacaacaagtggccttgaatgatagcatatgttataaagagatggagcctttcagttataaaagatgtatcaatcaggggaaagcaaatacaaattaaagtttgatgagcaattggatattaattggtactaactctgctttttatgtcactttgatatggagtggatcataaacatggtaagcgatactaataatgtatattcacttcaatgcaacttaatggctccatttattaaagaaaccaatgctgggattgagttgtgagt

SEQ ID NO: 481552 - DNA, 562 bp, Homo sapiens
tgttgtgtaataacatcaataattactatttattgagtgcatattatgtgttaggaactatgccaagtgctttatatgtaccctcttaatattcctggcaaccctataaggtattgctttaatctctattttgcagatgaaggaactgaagtatatggaatttttataattttcactgcatagctagtaagtagaaaattaagcttgtctgcctccagagttcagcaaactatactgcctctatttaagcaaacaagcagcatttattaagtgtctttgtggccaccatgtgctattatgggatgaaatgaactctctgctctccagcaactcatactcttgctggaaaagacaggcaagatacccaagtggaagatgtgaggtgataagactgtatgtgatgaattatcaaactraacaatttaaagcaaatatgctctagatttaaaggaggaagagactgaggagctgcaagtcagaagagacctcagaagttaaggtgcacctggaattattagtatggtctgcatgctctgctgtgattttgtgggtgagggatgca

SEQ ID NO: 481553 - DNA, 643 bp, Homo sapiens
gctggttgacacagcaagcagttagaaacaacaacaacaaaaatgccatttgattcgtgggctgagccaatccatctgggaaatctctcaaagaaagtagctggaaatgacatttcagctctgattttcctagtcaagtctgcaccttaagccaaagactcaaaaatagcactccatctagatggtgtaaatacagtgacacttgagtctcttcactttggtcttttaagagtgattttaactctttcagagataacatgggagactgaaggggctggatgctggaaacgagactgtccacatcttgtttccagaaaacggattactctgctrgcggttgattcttggatttcctatcataagatctgaaccctgggcctgatgtacagtgaggcgtgcgattggcatttgcagaagccttgacatcccacactgcagttcatgattggtgtcagacaaagaagcatattaaatgactgccggcccggtgataaggccggttattaccgaggtgtagtttccccaggtctaaagactcatagtggtaccactgaagcatgctggggagaagataaaatttaattaataatttccttagaggccaacagtctattacaactatgttccttgctgttctctgcaa

SEQ ID NO: 481554 - DNA, 614 bp, Homo sapiens
tttatcttaggcttgtgtacatgttcttttctaattgcrtttcttatcctgtacaatcccatctacatgttcatggctttaagcccctatacccttcaatgaagatcacattacttcagcccagacctcttctgaatgccagagctgaaattacatatacctatttggcatgtttcatctgatatcacagaataactttggactcatcaggctaaaattgaactcatagtgtttctcccaaacctgtctcccaataagtggactattatccatcagaatacacaagccataaacctacaaaacacctattattctttcactcttaacactgacacacctctaatgttaggaaatcctattgatttggctaccttagaaaatcctgttgattttcagtatgtctctttcattcatacatctctgccaccactcttgtcacaatgaagacatggatattgcctcctgccacaagaccaaaaccctcagagtggccagtaatggcctgcacagactgaacctggactacatctgaaccttaactcactctgtttgcctcccacttttggccttactgagctattttcagttcccccagtatacaagctccctttggt

SEQ ID NO: 481555 - DNA, 288 bp, Homo sapiens
tcgacctagaaagaagccatcatcctattcatcagatctactaaagtcattagtttaataatactttaattttatctttatatttcacattatattccatattttgtcttttacatttcacattatttcattcagtgttaccacaaakattttgtgataaagggaatagatattatgtaaaatgtagtataaactaaagttcattatttagattatgtccttcagagaagattaattgttcaacaggttaaagcagtgacctagagtctagtttctctagacagcgct

SEQ ID NO: 481556 - DNA, 544 bp, Homo sapiens
tataccaataaacacttcttatctgtttagctattgaccgattttgccaattagataacacatgaaacgtgtgaaacaacacaaaatttaacaaataacttttctgtagacacaaactatgttaaataaaataaaccgcttataatgaaaaagaaaaaaagacccaagtactcattatatctcaggaaatgtttcagaacttattaattaataagcatacattttttaccaaaataatctttcatttcaaatttcaaaagtatatgggcaaaattatttttatcgttcccttaaaataccagcagactatctggtaacactggaaagyctatcactgataaattatattgcatatattattttgatattccttttagcatataagaccaaatacattttgatttgtttgtcaaagcatgtaatattttgggaataggccttaagttaacttcttttttgttggctttctctactaccatggaaaaaaaaaaaaaatccagttgctctgtaattgtttacatgttgtgttcaatggaataactgg

SEQ ID NO: 481557 - DNA, 540 bp, Homo sapiens
gacaactcaagaaaatttcagcagaaataattgaaaatatcccccmtgggttctctatttaccctaggcaaaaacaaaaaaatacacactagaaaccagatcaggcattgagatgacagcaaaacaagtctaatggggagatgtaaacacataggttatgatacgtagactaaaaaagaaaaaggaaatattttcttctttataaggacagtaaggaaataatgaaaatggatcccttttcatattatgtaaaagtaacgtgtaattgtgccttgcagcaagttggctgtagttaactatagcaaagttaactacagcaaataattatttctggggtactacctagtttgatgagagccagctggtactaaagatgaggagcagaatgtatgggttaccggaaaatagctccctggaccacatctaacccagtgccttaaatgctgtgatccagcagcctgggccgagagggttgggtcaactttgtctcttagaagttgtggcagccatcaggaaacagacaggaggagtaaaaaaaag

SEQ ID NO: 481558 - DNA, 540 bp, Homo sapiens
gacaactcaagaaaatttcagcagaaataattgaaaatatcccccctgggttctctatttaccctaggcaaaaacaaaaaaatacacactagaaaccagatcaggcattgagatgacagcaaaacaagtctaatggggagatgtaaacacataggttatgatacgtagactaaaaaagaaaaaggaaatattttcttctttataaggacagtaaggaaataatgaaaatggatcccttttcatattatgtaaaagtaacgtgtaattgtgccttgcagcaagttggctgtagttaactatagcaaagttaactacagcaaataattatttctggggtactacctagtttgatgagagccagctggtactaaagatgaggagcagaatgtatgggttaccggaaaatagctccctggaccacatctaacccagtgccttaaatgctgtgatccagcagsctgggccgagagggttgggtcaactttgtctcttagaagttgtggcagccatcaggaaacagacaggaggagtaaaaaaaag

SEQ ID NO: 481559 - DNA, 611 bp, Homo sapiens
gctgttcatgtcttctgtagctgatctgtgtgctattttccacaggcagaggacgctgtaaggccttgacgggttatgagccaggagaaaaggatgaactgaatttctaccagggagaaagcattgagatcatcggctttgtcatacctgggcttcagtggttcattggaaagtcgacaagttcaggacaagtgggctttgtccccaccaggaacatagatcctgattcttattccccaatgtgagtattgacagtgagcatgtcctggagctgggctccctttcccagggttccctcccctctttgagcagatttgcagttgagcttcgagggtgccctggtgacatggagccagaaaagcacatgctgacaccaaggttgatacagagagtgatagaaaggagagaatgcgtcagttcagtttattttaacaggtggtcactgaggacttcctctgtgcaaggagggaagcaaaactccaagacaaagggcatgctgttaggcactgagggtgtggttttggtacttggatcctgctacccacmctgtctaaccacagggccccttcagaggaagggcacacacggggagaaatagattagcagcatgc

SEQ ID NO: 481560 - DNA, 526 bp, Homo sapiens
gtggtggggaggatgtaagaggaggccccagacagcacttgactctcactcaaagatcaggagtgcagctctgcggcgtgcagtccgcaccttatggttgtgcaggctgccccagcaccaagacaagcagcaggagaacatcttgttggtaaattgcagcttccccaaggcgtataccatagggaaggatggccctttgtaattcttcctcctagagaggggacaccrttttgtaacttgcgcatcactcatactcttggccagaagagaagaggtggcccaagaggggcgtgtacccctccacatcagagaggccagggcatttgaacagctctccttagccaagctctatagctcttcatctttagctgcggggctttctaccctctgggggttacagatctggaggttctgcaatgacaatctctggagatgccatcctggagaacagcaggaaaaggtttgacttggtgaggggcttgctggtcctcaaagttcactagagaactcagggtggtggcacaga

SEQ ID NO: 481561 - DNA, 613 bp, Homo sapiens
aaaatgaaggcccagaaaagtgacgtaacttatccagcattccacggctaagagagactggtttctgatttcgcctcaggtctatcagattgaaaagtccacccccttcttccgcaaaccctctactccctccatccttgctgctgagctgggcatagaacattcatgcacccagagcaaagggggcagcagctactgctaggagcagtggggctctgagcaaaactgaagggtggcagggccaggcactggaggccctgagaatatgctaaattcaaattagtggatgctaaccttccgacctgtgccctctgcttcagaaccctccatggcaatgacatttccagcgttcctgaaggctccttcaacgacctcacatctctttcccatctgtaagtagcagtgtttctycccaatgaacattcaaaacatgaaagcatgaaagtgtcagcgacaatgtcatcactgtcagcattttggcagatgtcctttccttatgcatacagtatattatacaactatgtatccacactatgcatattgtcttgtttcccacctcagaagccttcaaaggaatcctcaattatgtaaacactgtaaatatttaataaga

SEQ ID NO: 481562 - DNA, 588 bp, Homo sapiens
gcaaaaatgaaggcccagaaaagtgacgtaacttatccagcattccacggctaagagagactggtttctgatttcgcctcaggtctatcagattgaaaagtccacccccttcttccgcaaaccctctactccctccatccttgctgctgagctgggcatagaacattcatgcacccagagcaaagggggcagcagctactgctaggagcagtggggctctgagcaaaactgaagggtggcagggccaggcactggaggccctgagaatatgctaaattcaaattagtggatgctaaccttccgacctgtgccctctgcttcagaaccctccatggcaatgacatttccagcgttcctgaaggctccttcaacgacctcacatctctttcccatctgtaagtagcagtgtttctccccaatgaacattcaaaacatgaaagcatraaagtgtcagcgacaatgtcatcactgtcagcattttggcagatgtcctttccttatgcatacagtatattatacaactatgtatccacactatgcatattgtcttgtttcccacctcagaagccttcaaaggaatcctcaatt

SEQ ID NO: 481563 - DNA, 584 bp, Homo sapiens
ataaggttttggggagctgcttgatcaacgaaactttggggttcagggtttttagaccagtttgctgccttatgtgcggtgtacccctcttctcaggatcttcaagagactgttagtaaagacctaatttgcttttcaataatttgtattttcgctccccttctacaccattccctgcccaccttctatagttgagagcctgggactggcctggaagcagggcacccagttccgttctgggtgcacctggagcaggtggggcacagggcacggtcctcctccagggataagtggtgtcccttctggggctgccctcggcacagagctttccctggcctccctacatctgaaccacccattaacaacaccctcttctgggcccgtgctagtctctgcaggtggactctgggtaaagtcttgggaatcttaggattgaacgagcagttttggtagctttttttacacttaascccttgagaactatcagtgcaggggctgcatttcaggcccagagtctgcctaactgatggctacttttttgtgttttgttgttgttttaaagacaaggtctcactctgtcaccc

SEQ ID NO: 481564 - DNA, 541 bp, Homo sapiens
gctgggggaatgatgacaccggccttgttggtggacattagccccagagcgaggcagccagcatgggccaggggagatagaacattgcctggagatggggttggatgaaatgaccttttaggttcctaagggtcttcctgctcaggaccccaaggcctcatgtgtccaaagtgctttctcagacctccatctggaggaaaaactaattgtatttcccacccgtgtcttcctctctgccatcccaacccacctctctccctgacccctgactcccctgctctccacccctcacatcccaaagctgctcctgccctctgggctttgaggggcagcggtgtgagatcaacccagatgactgtgaggacaacgactgcgaaaacaatgccacctgcgtggacgggatcaacaactacgtgtgtatctgyccgcctaactacacaggtaaggatctcatgactgtatgtatggtggggtggaggggtgtcgctagaataccattttcttaacttcctccagggactctcttcctctctccctgagg

SEQ ID NO: 481565 - DNA, 517 bp, Homo sapiens
gtgaaaacttcaatagtttccatatcttagctattgtgaataatgctgtaatgaacatgagagtcagatatttttagtaagtggtgattttatttcctttgggtatacacccaaaagagggccatctttttttttttttttttgagatggagtctcactctgtcacccaggctggagtgcagtggcgcgatctcggctcactgcaagctccacctcctgggttcgtgccattctcctgcctcagcctcccgactagctgggactacaggcgcctgycaccacgcctggctaatttttttgtatttttagaacagacgggtttcaccaggttggccaggatggtctcgatctcctgaccttgtgatccacccacctcagcctcccaaagtgctgggctgggccatctttaaattacaagataagtcatcttttgggaataaagaaaccagtatcactgtcagtatctgcatgcggttgccagtaaagtgtgatgaataagtaagttggatgccaaaca

SEQ ID NO: 481566 - DNA, 517 bp, Homo sapiens
gtgaaaacttcaatagtttccatatcttagctattgtgaataatgctgtaatgaacatgagagtcagatatttttagtaagtggtgattttatttcctttgggtatacacccaaaagagggccatctttttttttttttttttgagatggagtctcactctgtcacccaggctggagtgcagtggcgcgatctcggctcactgcaagctccacctcctgggttcgtgccattctcctgcctcagcctcccgactagctgggactacaggcgcctgtcaccacgcctggctaatttttttgtatttttagaacagacgggtttcaccaggttggccaggatggtctcgatctcctgaccttgtgatccacccacctcagcctcccaaagtgctgggctgggccatctttaaattacaagataagtcatcttttgggaataargaaaccagtatcactgtcagtatctgcatgcggttgccagtaaagtgtgatgaataagtaagttggatgccaaaca

SEQ ID NO: 481567 - DNA, 517 bp, Homo sapiens
gtgaaaacttcaatagtttccatatcttagctattgtgaataatgctgtaatgaacatgagagtcagatatttttagtaagtggtgattttatttcctttgggtatacacccaaaagagggccatctttttttttttttttttgagatggagtctcactctgtcacccaggctggagtgcagtggcgcgatctcggctcactgcaagctccacctcctgggttcgtgccattctcctgcctcagcctcccgactagctgggactacaggcgcctgtcaccacgcctggctaatttttttgtatttttagaacagacgggtttcaccaggttggccaggatggtctcgatctcctgaccttgtgatccacccacctcagcctcccaaagtgctgggctgggccatctttaaattacaagataagtcatcttttgggaataaagaaaccagtatcackgtcagtatctgcatgcggttgccagtaaagtgtgatgaataagtaagttggatgccaaaca

SEQ ID NO: 481568 - DNA, 521 bp, Homo sapiens
gttcagctccttccatgcttcaggcacaatcaagaagtaaagagagacctaatcctatcaaccagaacaattcttccctcagggtagtcattaagtcaggtgcaaagtgaggtgttttaacttctaacctcaagggctacagttagagcactgaagcagtcacttggaaatctcagctttcaccagctgtatttattatgcttatgttatttgttcttccagtttcccttcccccagagaacgactcccaaaacacaaatatttccccatcccgcttatagagaaattcctttcactaggggacaaaacatttcattctatatacaatgcttagaagccaaacrctcctggaggaagtaaggtttccagtttaaattttcaaaggaggcttctccacaagccatcccagggccttcaaagatcttcctttactctgaaagcccatcctactgtgtaaattgagaataatcctttccttgtgcaggaagggaatgcaaatgaggaaggaaagattcaagggt

SEQ ID NO: 481569 - DNA, 500 bp, Homo sapiens
gactggaagtggacaagagggggcttctgagtgttagtcatactctgttttctggtctgagagactgtgaaaatttcccgagcagtatgcttaagttttgtgcatatttatctgtcatgttctacttcaataagaagaaaaaaagaaaagaatcatttcttagtactctttattgaaaggatctagaaataataaccaaattttcgggctgctattatagaataccagcgactggatggctgaaagaacagaaatttatttctcacagttctggaggctgaggagtccaagrtcaaggcaccagaagacctgctgtctggtgaggacactcctcctggtttgcagaaggccatcttttcgtggtgtactcacatggctgagagaaaaaaataatctctctcatgtttcttcttctaagaacactaatcccattcatgagggctgcaccctaatgacatgattgcctcctatacctcacttcctaatacaattatattagg

SEQ ID NO: 481570 - DNA, 467 bp, Homo sapiens
gcatcagtgactcactgtaataaaaagaaagtttttctcactagggctttgcaatcagggcaggcagagaaatttctacaaatgaggaccctccacgggaagtttcatctcctcttttcctgaaggctgaatttctaaactgtagctggaacgcttcaagtcargctaattgtgattatggcacatggggaaaggtgctggttgagttatttagggacttagaggccagtgtcttagaattgctctaggaacagaaaaggaagcttgagcatgctgagtccttgtatccccatagctcaacccatttaacagtcaaagagtgacattctatattcccagaggatctcaaaggtacaacactcacactcaaattgtacccaaatactgacagactcagggaaaattgatggcaatgaaatcacatacaatgttacacaccatacttctcagtccgttttaaacttcag

SEQ ID NO: 481571 - DNA, 467 bp, Homo sapiens
gcatcagtgactcactgtaataaaaagaaagtttttctcactagggctttgcaatcagggcaggcagagaaatttctacaaatgaggaccctccacgggaagtttcatctcctcttttcctgaaggctgaatttctaaactgtagctggaacgcttcaagtcaggctaattgtgattatggcacatggggaaaggtgctggttgagttatttagggacttagaggccagtgtcttagaattgctctaggaacagaaaaggaagcttgagcatgctgagtccttgtatccccatagctcaacccatttaacagtcaaagagtgacattctatattcccagaggatctcaaaggtacaacactcacactcaaattgtacccaaatactgamagactcagggaaaattgatggcaatgaaatcacatacaatgttacacaccatacttctcagtccgttttaaacttcag

SEQ ID NO: 481572 - DNA, 629 bp, Homo sapiens
tgggactgatgaatttgccctgacggggaggaaggataacaattacagaaatagttactgtttcaaagctaccaggagagaagaamaggaaagtagtttttttcctcttgttatcattacatagctatgcactgtgttttgatgaagcaatgtactatacagggcaattgggaggaactggacaaatatatgaaaatgatttctgttttaaaaccagagaacttatggtagaagaaagtgagtatacgcagttaatagagcttttttcttttatttttaaattatcccatagttagtattgagaactaacacaagtggggaaaactgagtatacgagtaaatattactctcaaaaatgggtccaaatagccaaaaggatacaaaatgtcccaaaactgtaatctaagtcacttacatgatttaatccaaattttcataaaaggctgttaggctattacattgatttatccatatgtaaatactggtattatgtggattttcttaataactaataagaattcatttctgcaccctctccccacttccacaaacactttttgttacaggtgttcaagtttattttgccttttctctatttttctatgttccctcatcactcatgtctcccc

SEQ ID NO: 481573 - DNA, 616 bp, Homo sapiens
tgtggcttagaatgggggttgggggtgggagtcaggattatacaggacaaaggtagtttgagtgaattggggaaggagtgtggtacaaggtgggcaccaggaggggattattgggctgggcacactgtcaaaatgtgtcaactctartactcagcctgtctggattctaatactttgagaagtttaaacatctggcccctaaagttctcccctgttttcacactgtatgaatcttgagctctgtttaacaaagacatcagcctggcagtggaaaaacatttcttaactcagccttgggaagagcagacagtctcttcaccaacatagtaagcccttcattcacaaaaaaagagacggaaattaactgtaggatacgtctgaaaaaaattagacagatagacctaggagaccaatcatgttagccattctcttatccactgtgccctctggtcccccagtgcctaagcatcaagatagctaggatctgatagctgtgctttaattaacctgttaaggcccagaggggagcattgacagcattatcactgcacagaatggatcagaagttccaaatatcttactaagtttattggatcccctggggcctaggaagagt

SEQ ID NO: 481574 - DNA, 590 bp, Homo sapiens
ttctttttctttttctttttttcctttcttttcttttttttttttttgagatggagtttcacccttttcgccaggctggagtgcagtggcgcaatctcggctcactgcaacctccgcctctcgggttcaagcagttctcctgcttcagcctcccaagtagctgggattacaagcatgtgccaccacacctggctaattttgtatttttggtagatgtgcggttttgccatgttggtcaggctgttctcgaagtcctgaccgcaggtgaaccacccgtctttgcctcccaaagtgctgggattacaggtgtgacccaccrcgcctggcccacatttagtttttctattctccagttcatagacatttggatcatttttactttttggctattatgtatgttgctactatgaaatttttgtacaagtttttgtgtggatgtatcatttctcttgggtaggtaactaggagtggaattgctaggtcatgtggtaagtttgtattttacttttagcaggtttttgaggagggagagcgaaaaatgagtttatatgaaggcccaaaagtgtgactgaggtttggaatagctaatg

SEQ ID NO: 481575 - DNA, 518 bp, Homo sapiens
tgtaaaagaccttctgacacgcagccaaagctctaaagccctgctgaggagtttgtcctccccaaagcctgtgattctaggagaacacgcacagtaagttgaaagttgttttctctttaacccaggaagaaactaggtatttaactgaagctgaattaagttagagaaaacaaatacattgtgcccaggattwacctttctctaccacccctttgtgaactttgtacatcgtaggtgttttaagaatatttattaaattacattttattccaccaacactgataattagaaattagttcatttaattggctaatcaaagaagaggtgtatttttaatgtatatgtgtgttgtccatgccagtcagagtcccttccacaatcattgtcccccatgtgggaagctgcttcactcagaggctcctgctcagtaaagaagaacttacgtttctactggaataatgggtgggcatgggctgaaccaatggagtttacctgactcaagatcaacaacagacagg

SEQ ID NO: 481576 - DNA, 484 bp, Homo sapiens
aagtatgaatagaactttaaatcatgatatgtgttttctcattaggactttttggataatcctgatttaataattaggtaataattccatgcgaactgtctgcaaatgggaatttccaaagcgtctaaaactttattctctttgtatttacaatarctctcctatagtcttctgcgtaccatttaattggctatcaaatcattttccaaagatcctgaaaaggtaagtttcaacctcattgccctccataaagcaaatcataaattctaactaattgtgatggggtggggggtggtctaaacaggaaattacatgcagcaaagagcatttttaatatcatcccattttatttttcttgaggtttctaatctaaagcatgcttctaaaatatcattcccagcacatgggaagaaacacattcttttaaggtggaagtgttaattaatgtgcatgacatggaaagaacaaggaaaaggttacagct

SEQ ID NO: 481577 - DNA, 631 bp, Homo sapiens
gctgcctccttttaaagaaagtccctgtacccacagggcacaaatttgtaacccctgcttaggctgcaagtcctggacctccacaaaatacaattccacgaaaacaaatgtattgttcaataaagacaattgtctaagcacacagctatctattataataacacaaatgaggtgtggtttctacctttggatgatttatgaacaagcacagaacaatgaggtaacaaaataccagaatggcccctccggggttgacggctcagatggtcgtacttcagtcacccgtaaagaaccgatgagttgggctctatagagttttctgcctaagattttctgaagaaggtgggcttcgattttctgaagacatttctgaagactttkttttaaagaaaggtgctatgttttccagacctctcaccctaaaatccagaccaaagcttgcaaaattctcaccttggcagccccgatctgttcctttcgaaacttctccaagggagtgatgagcacctcgctggcattctcaatctggtgaagaacaacagagtaagggaaagaagacacaaaagcagtatcagtaaagaattacagcagctccagcatgagatgcctccccatgtcttaaaataaaatt

SEQ ID NO: 481578 - DNA, 399 bp, Homo sapiens
agggtgccccctcccaccccacacatctgctaagacccagcacagcacttcacaactcccagagcccacctgaccctcacagtgaagccctacattcagcaggatcagctcccttatacaaagtgggaaaaccacaagcccagagggaaagggagcgacccaaggctgctgtccctactggaagcaaagccacggccagaatgtccaattctgccttctttcccmggctggcttcagaaacagttacttgctgaatgcagggagtggtctaagcagttttccaaggctgcctggttggaatatgcaattcacctggggaggtatttacagtctagttgccccaaccccagaggttctgatgcagccctcctgatacatggcccaggatgaaactcccca

SEQ ID NO: 481579 - DNA, 399 bp, Homo sapiens
agggtgccccctcccaccccacacatctgctaagacccagcacagcacttcacaactcccagagcccacctgaccctcacagtgaagccctacattcagcaggatcagctcccttatacaaagtgggaaaaccacaagcccagagggaaagggagcgacccaaggctgctgtccctactggaagcaaagccacggccagaatgtccaattctgccttctttccccggctggcttcagaracagttacttgctgaatgcagggagtggtctaagcagttttccaaggctgcctggttggaatatgcaattcacctggggaggtatttacagtctagttgccccaaccccagaggttctgatgcagccctcctgatacatggcccaggatgaaactcccca

SEQ ID NO: 481580 - DNA, 580 bp, Homo sapiens
gggtgccccctcccaccccacacatctgctaagacccagcacagcacttcacaactcccagagcccacctgaccctcacagtgaagccctacattcagcaggatcagctcccttatacaaagtgggaaaaccacaagcccagagggaaagggagcgacccaaggctgctgtccctactggaagcaaagccacggccagaatgtccaattctgccttctttccccggctggcttcagaaacagttacttgctgaatgcagggagtggtctaagcagttttccaaggctgcctggttggaatatgcaattcacctggggaggtatttacagtctagttgccccaaccccagaggttctgatgcagccctcctgatacatggcccaggatgaaactccccagctataccaattcagtttcttcaacaaaaaaatgcacaagagaaacaagggttgggtgagtgggtgagaaccaacagattaagacttagaggattaataactcaatgccgtacgtggcctttaactgaactcyatgagacaatcagggaaatagggacactgactgggtagatcaacttatt

SEQ ID NO: 481581 - DNA, 672 bp, Homo sapiens
ctgaataagagttacccagaggttagctgggcacagtggtgcaygcctgtagttccagctactcgggaggctgaggtgggaggattgcttgagccccggagtctgaggatgcaatgagctatgatcatgccactgcactccagcctgggtgacagagcaagaccttgtctctatcttaaaaaaagagagaaagtaagagagaggaggaagagttaaccagagggaagagggtggaagagtgttcctgagagtgggaacaacccagacaaaagctctgaggtatgtatttcagtggagcatgtcagccctgggggatctggggtcccactcttctctggcctgttcagcctgaccccaatttccagatgctgggtcctagcaggactattaaaaacctgtagattgtctggaagagggggccaggcagggtggtgaaggtctggaagctgaatcaagtgagagaacaccaaggaattggggggctttagcagacagaagagatcccttggggactatgtctcccccttccccaacatcttatgtctgcagagatgtcctggggcctgaggggccctagaggcagagctgccgactctgtagagtaagggaggtagctttcagctccacagaaggaagacattccaatggtcagaactgctcctgcatcccaca

SEQ ID NO: 481582 - DNA, 598 bp, Homo sapiens
gttaataaaataagggaaaacttctaatttcttaataaatgccactgggttggttagcatatttgaaaacatgaattctacattagggtaagatgggagagatcaatwataaaacaagtctttgtgttgagaaacctgggaattattttcgtaagaaatgcctcctaaaattaaccctttgctgaccacttactgctgcaggaaaggatttgaggaaccatgatgcctaactgccttggctggttattttagacataatggtttgctattgtgtttgcccagagattctgtcctgagaagattgaggagcaaaggctttcattcagatgtcacctttgtgataaccacagaggctaaggaaaaagtacttaccctctgccagacattgctctcagatgacaatgctgtgctatactattttactagtgagggatagaggcactgggaagctgagtaaagtgacacagttaggaagtggtagatctgagatgtggatataggctatctaattccagatcctgccaaaattatccataacctttgtgcagcactgcatcctcacagttcgtggaggtgggagccaccagtttgagaggtt

SEQ ID NO: 481583 - DNA, 619 bp, Homo sapiens
tgggggttgaggacaggagcagtcccatctataaacttgaccagagtctgcagtgtgaacagtgtattgggaattcttttacagtcttgagcgtagaaagcaggctcttccccatcctgttttaaacattaatacagtcataatattaataatggtaatagyagttaaaacctattatgtaccaagctctatggtaagactacactcacaatctcatttatttctcctaacaactttatgagtgaggcactcttatcagcatttacatattaagcaactgaaggtcagagaagctaaatcatttgcctaagttcaaatagttggtcatgatgacaatcaaaattatagggagactcctttgttgctgccctctgcagacatataggatcatgacattgctcatttgagtacattttattttgctacaaaagagatgagctaatcccaccccctcactttctagatggggtaactgagcccagggaggggaagaaactcatccaagctcatatatctagtaagaggtagaggaggcattccaaacccaaatagtcagagtgcaaaccctcacagtaaacacaagactctaagctcccagtgtgcctccagccatctcccc

SEQ ID NO: 481584 - DNA, 632 bp, Homo sapiens
ctgctccttcttaacaaatgctggttggtgatggactcagaatttcctgtgagtgctgcttcagaacaattacagttaagggttatccaggttttattagtttcaggctctgcgctaaggacatccaggcagtatcttaattaatcttaataaccttacctgtctggtactagcatttctttttgtttgagacagcatctcccatttgagacagatgggaaaggcaggagtgcagtggcccgatcacagcccatggcagccttgacccctggggctcaaacaatcctcctacttcagcctcctgagtagctgcgaccacaggggtgtgccaccatgcccagctaaacttgtatttttttcagaaacagagtttcaccatgttgcccaggctggtcttgaactcctgagcccaagccatctgcccaccttggccccccaaagtastgggattacagaagtgagccactgcacctggcctattatttcttttctactaatgaggaagcagaggctctgaatgaatgtccaagttacaaaagagtcataacttgaaggaggatacgtgcagagtctgtttactttgagagagggcacattctgaatgtagacacacacttttatgtgcatatttg

SEQ ID NO: 481585 - DNA, 555 bp, Homo sapiens
aaagcctccctccaggccctctgttgcagtgggatcaaattgctttgcctgagctccagatgttcccctttgacttttcccctccctgccataatgagtgactcagttggatcccagccatggcaaaagcctgggagagaagtggccgggagattcccagagcccaggagaccccagccctcaggatcactggcagggttggcagactccaggcacacaggctggacaaagagcgaggggtgaacatcctagagaggaagttccctgagtatgtgagtagggcagcccttcctttcccctctgtgtgatgctctgcttccacaacccaaggacgaagaaaaaaccactctgggaaggtgcaggtgtagcttgctccatctgaggctgagcaggggctctcacttcatcaccacaagagaagttcagaaggtagtgacaggttatgaacagagtatragtccatgagggcaaggaccatgccagctctgactgctgttcaatcccctgcctagaatagtgcagggcacaaaatgcacactccataagcatttgcta

SEQ ID NO: 481586 - DNA, 650 bp, Homo sapiens
aactctccttcctaccacacacatggatggcctggaaaccgatcttgcccagatcccaggggactgagtgccacagtttcccacttgttaagtyaaagccgtgtttccttcatagcccactgaggaccccaccctgcatttctgctggaaggagcctcatgtaggctgtcctcgtgccccaggcccaggcagccaagggcagcttggatgtgccaagttacagggaagggacatactttccgccaccacctcctcttcggtttcctctgcaccatcatcaaattctcctacttccacctggacaggattagctcccacagatacctggaattgagggagaagaatgggtgaaatggccccactcccatcccagacccataagggtagctgaagggttccaggtcacagaaagcacaaacgcagggttgggaatccagatttaatctataggcctgctgtgttttgcagtatgcctgggattctgttgagctgccttagaggtcaccaggggtgttagggaaagagagtgtgaaaggaaaatataccttggaccccaaaatcactaagctaaggggaaaagtcaagctgagaactgcataggacaaacctgcctcctattctatgcagtcatccctctgaggctcacctga

SEQ ID NO: 481587 - DNA, 650 bp, Homo sapiens
aactctccttcctaccacacacatggatggcctggaaaccgatcttgcccagatcccaggggactgagtgccacagtttcccacttgttaagtcaaagccgtgtttcctycatagcccactgaggaccccaccctgcatttctgctggaaggagcctcatgtaggctgtcctcgtgccccaggcccaggcagccaagggcagcttggatgtgccaagttacagggaagggacatactttccgccaccacctcctcttcggtttcctctgcaccatcatcaaattctcctacttccacctggacaggattagctcccacagatacctggaattgagggagaagaatgggtgaaatggccccactcccatcccagacccataagggtagctgaagggttccaggtcacagaaagcacaaacgcagggttgggaatccagatttaatctataggcctgctgtgttttgcagtatgcctgggattctgttgagctgccttagaggtcaccaggggtgttagggaaagagagtgtgaaaggaaaatataccttggaccccaaaatcactaagctaaggggaaaagtcaagctgagaactgcataggacaaacctgcctcctattctatgcagtcatccctctgaggctcacctga

SEQ ID NO: 481588 - DNA, 598 bp, Homo sapiens
cagctgagcaaattccatctcaattttctttttgcaatgaaagtaatacacatktgataaaaatctaccaaacaaaaacttcaaactgtgcataagggtgtaaaatgaagtaaattaactatgaatatttcttgcatatctttctggaaatatacatattaaactataaaaataaaataatacataagcatatacacatttttttgttggatcagtgggataacacaatatatttgatgtgcttttatttatttgtttgttttttttttttttgagacatggtttcactctgtcacccaggctggagtgcagtagtgcaaacacgggctcactgaatcctcgacctcctgggctcaagtgatcctcctggctcagcctcctgagtagctgagactacaggttgtgtgccaccacacccaactaattttttttttgtagagatgggatctcactatgttgcccactctggtcttgaactcctaggggcaaggaatccacccgccttggccccacaaaatgctgtgattacaggagtgagctacctttcccagccatgctttgtttttaattttaaatatcactcataggctgggcacgg

SEQ ID NO: 481589 - DNA, 490 bp, Homo sapiens
aaattccatctcaattttctttttgcaatgaaagtaatacacatgtgataaaaatctaccaaacaaaaacttcaaactgtgcataagggtgtaaaatgaagtaaattaactatgaatatttcttgcatatctttctggaaatatacatattaaactataaaaataaaataatacataagcatatacacatttttttgttggatcagtgggataacacaatatatttgatgtgcttttatttatttgtttgttttttttttttttgagacatggtttcactctgtcacccaggctggagtgcagtagtgcaaacaygggctcactgaatcctcgacctcctgggctcaagtgatcctcctggctcagcctcctgagtagctgagactacaggttgtgtgccaccacacccaactaattttttttttgtagagatgggatctcactatgttgcccactctggtcttgaactcctaggggcaaggaatccacc

SEQ ID NO: 481590 - DNA, 660 bp, Homo sapiens
ccaatatgtcagcagtgtaagattgaaaaactctggccaagattgattaaatcattaacccgattaaatcattaacccatttatgctgaaggttgcaaattttttttgtgaaaaatcagaccttggcaatgaccttgagcagtaggatataaatcccacaagcttagcgttccaataatggaacactaggcataactgygttaagggttgaaagtagtggtaatgtatttcttttattcccttttcattaactgggatgcttatagagagatacttccccttatcaccattggtcacttagaggtacaaattgtataggaagggaagggcttagcagttttcagaatagtgagttggtttgagtattattcataggtttaaatatattttctatgtttttaatctattgcagtttttatccttattgatgtttaaaattgtctcatctttggtcaggagaagcctcttgcgctaactttttaggtttttttttgttaaaatcctctgtagcttccctgctttctgctgtgacaagatgttctaggcttatcttgtatatatttcctgtctcagacctagactgagccatttctgcagggggctcttggcacttttgtgggaagtggatagtttgcaactgaattagtcattatttttaga

SEQ ID NO: 481591 - DNA, 560 bp, Homo sapiens
ctgcttgtcttaaatttaatctagaaaagggataatccctaatagtagggaaaacatcttttgttttctttttaaatgatttgaatttcttaaacaccacataatgggcatttaattatctaacactacatcaacaatgtatacaaggttttccaaattaaaaaaaaaacctgaaatttttggtttctttcttgacaaggtatatctgaaggtgtccttttcagagtggtcacaaagaaaaagacaaccagtgcaatagtgataattaagatgtgtgcaaatctaagaaatagctgtatcacaactgtattcttacacagaaasgagtataagaaagtagcaataagtggatggaatgtgaacttgagagacaagaggcctaagttctattcatctttgctacaaactagccctgtgaacctgacctctctaaggtaccaatactttcaactataacacaaggagaatgaaccatggatcaaggattaaatgtgtttgacaaaaactaatgcattcaaatttggaatgcccaacactatcatttttaaaccctatggtaa

SEQ ID NO: 481592 - DNA, 604 bp, Homo sapiens
aaaagcaatttgtcatcacctagtaaagtcaagtaagcatgtgtcatataccaagcaattctacccctaatgttaaactaaaaaaaaattctttgtacatgtgaagcaagagacacaataagaaactccattgcacaatagcccataattgttcctaacagcaaaaaacattgacacaattgaaatttctattgacattaaaatggattacaaaactgtcatctatccatatcatggaattttatacagcagtgaaaatgaatacactgcaactacacataataaatggatgaatttcacaacacagagtgaaagccaagtagtaagtcacagaaagtcacatatgatgtgacttaatagatgtagtttaaaaaacagacaaaatcaaataatagtttgtttagagctacctacatgtgtggtagggtctaaggaaaacataggcttaacacaaaatttaggataatagctacttctgggtggaggtgagcatgygacgataaactatgataaatatttgaaggaaaggctggagcttatttgaagttcataattaagggcctgactcaagactgtggattacaaaagccttcctgaggaagtg

SEQ ID NO: 481593 - DNA, 605 bp, Homo sapiens
ccatcaggacatgatgcctcagggatggggatggtgtgaggggagagagggaaggccaagcagttctgtcttggttccttagagaacccttatgtcatcatgggcccgtggtacccaaggggcatccaaaccctgattccctcctctcagttcttcagggcttcaggagcaaggctttctctgagatgcaaggttattcctcattgatactactctggccctagcytcggagaacttgaagagagccagagcaggccaaggtagattttctacttggaggtcaacagtcttacccctgagagcccaatatccattcagcacagcctaatgtctctctattccctctgctgatttacatgccaggtttatttaattagccagaggtgagtcaaagtgcagcttgtcctcagagttaattaatattaactgagccaccacacagtgagtgacgccaagactgaactgtgtcctctgtatcagcttggggaacaaacttcaaccccttgctcccggctggggttgggaaccgaagccagccaaggagtcaggctgatgggcctctgagctattgtgaggagtgaatgaggtcatgcatctgacatgcg

SEQ ID NO: 481594 - DNA, 552 bp, Homo sapiens
agaggtctttctgctgaaggacagggacaaaagacttgcttcagctaagcgctgacctgttttcctcccaggtgtgcttttacctgccgacagactgacactgctaccatatggggtcagactcccaaaccccacctatgatcacatgctggctagcacccccaattcagtctgccaagacgaacccgaacccctacaccactcaagcactttacagcagatatacacgaggggaaaaaattcttcttcaaacaacagtgtttagcygctcggtccccctgaggtttaggtgagttctacctactgctgccctccctaacacatcagcttcatgtgagtcccagagaaagcccagcctaccagataacctgggaatgaccagatagaaagctcagagtgaagcacagagccaggagcggcaactgtcctaatgcaatatggtgctgatcaagcctcagccaaagaatcactaccatctgcaggcaccaggtgtaaaagggatgatgacaagccagcaaatcacgtcaagtgatggggtcaagcgatgggcag

SEQ ID NO: 481595 - DNA, 641 bp, Homo sapiens
gaacctaaaacccatgtgacaaggtaggaagtgatggctcttacctggctcttcttggttggaatagtggtattcctattaataagtttggtaaagacacctcctagagtttcaatacccagagacaggggagtgacatcaaggagcagcacatccgtgacatcgccggccaacacacctccctgaatggcagctccaatggccacagcctcatcaggattgacagctttacttggggctctgccaaaaagatcctgtacagtctgctgaacctgaacatcaaggaaaaagaacctgtcggcccacacttgggaactacctgagcagaacaaaagggagcacgtgtcctacgctcccagccagatctcaagacaggctaactcaaatctgagaatgtttattcaaataaccatttcgtacttgggttcctgctaatgatcttctaacactcatacactttatacctatagaagtatctccttcatgacccttgtaaatctgggaaggattctcctaagttttattatctgctttcctacacaacacattaaatcatttgaaacagaggatgcaaggcaaggggacttagaagtccacattctcttgtatattatcaactmaagaccaaattatcataggca

SEQ ID NO: 481596 - DNA, 618 bp, Homo sapiens
tacagggtccagtgaggtgatggggggccatcccattccacgctgccattgcccacacatcgcaaggtcaccgttgctcctggcttcacgaccagctcrgggacactgggctctatcactgggattccctgacctggtgggagagagggacagcagacagaagtgaggtctaggatgcgccccttgggccgtcctgactctgagatgggtggtagcttggcagggatggtgctgtgccatcaagggaccacccttgaacgagccccttgccccctggtcatttgctcagctcctaaccctcaacctgctcagggacagactgatgtctctgatgtccaggaggtccctcctctgagaaagggggcttgcagcttgctcagcctctcacccaggcctctgtccccctggggtcctcagcctcctgcctcagtcttccctgctgtgatgccatctttctactccccaggaatggactcttttaaccctgtgtacaaagtggacgtatttctaccaccgaatgaagaaacaaatgaatggaatgttcacggccaagtcctcagcttaattcatatgggaaagaaaaaaaaagagatgtaggatcttagcccagcagagtta

SEQ ID NO: 481597 - DNA, 618 bp, Homo sapiens
tacagggtccagtgaggtgatggggggccatcccattccacgctgccattgcccacacatcgcaaggtcaccgttgctcctggcttcacgaccagctcagggacactgggctctatcactgggattccctgacctggtgggagagagggacagcagacagaagtgaggtctaggatgcgccccttgggccgtcctgactctgagatgggtggtagcttggcagggatggtgctgtgccatcaagggaccacccttgaacgagccccttgccccctggtcatttgctcagctcctaaccctcaacctgctcagggacagactgatgtctctgatgtccaggaggtccctcctctgagaaagggggcttgcagcttgctcagcctctcacccaggcctctgtccccctggggtcctcagcctcctgcctcagtcttccctgctgtgatgccatctttctactccccaggaatggactcttttaaccctgtgtacaaagtggaygtatttctaccaccgaatgaagaaacaaatgaatggaatgttcacggccaagtcctcagcttaattcatatgggaaagaaaaaaaaagagatgtaggatcttagcccagcagagtta

SEQ ID NO: 481598 - DNA, 631 bp, Homo sapiens
atgtctgggaattaggcatgctcatgtacatggcttacaaacacgtggtgggtttacatacatggacaggcatagtgcacaggtgtatgcttatacacatacactctagctttacaggagtgactggagattgggcattcttcagtagacgatttacatatctacacacagaggatttgcacctatgttcaaggaacaggcatgctcatgtacatggcttacgacatacatatagtatatgtacaccacactgaaggatattcatatccatggcttayagacttgtgtttgtacacgtgtgtacccatattgtgtttgccagaatgtgttcctatgcatgtacacaacagggtttcacaatgctcctgtttgcccctgggcatgctaactcctttggcctgctgtgggtacatgggcacattaccaattaggcaggattaaggtagggattgggatcgtcaggggccactgaggctggggactcacagtgtggcaccacgatgacctcctgcgtgtcctggcccacagcgttgcgcagcgtgcagcgcaccgacagtggccgatccacgtgctgcagacgcagtgtgctcaccacctcaaactcctgctcctcctcccagtacgtcacgtt

SEQ ID NO: 481599 - DNA, 588 bp, Homo sapiens
acgtggtgggtttacatacatggacaggcatagtgcacaggtgtatgcttatacacatacactctagctttacaggagtgactggagattgggcattcttcagtagacgatttacatatctacacacagaggatttgcacctatgttcaaggaacaggcatgctcatgtacatggcttacgacatacatatagtatatgtacaccacactgaaggatattcatatccatggcttacagacttgtgtttgtacacgtgtgtacccatattgtgtttgccagaatgtgttcctatgcatgtacacaacagggtttcacaatgctcctgtttgcccctgggcatgctaactcctttggcctgctgtgggtacatgggcacattaccaattaggcaggrttaaggtagggattgggatcgtcaggggccactgaggctggggactcacagtgtggcaccacgatgacctcctgcgtgtcctggcccacagcgttgcgcagcgtgcagcgcaccgacagtggccgatccacgtgctgcagacgcagtgtgctcaccacctcaaactcctgctcctcctcccagtacgtcacgt

SEQ ID NO: 481600 - DNA, 547 bp, Homo sapiens
atagccaaagccaaagcacatggtggaggcagtgagacgcctcagcaccagagccttggagcagccctgcagccccacaccctcctgcccgactcaaggccaggctctgtggagccagaaaagcctgctcgcttcccaccttgggaaaccaagcccaaggtctaggccccccagcttccagcgaggggtgggagagcgaaaatccccactttacagatgaatgaaatgagactcagagctgaagggacctgtctgggggtctgcgtctgggtgagcctcatgtgccccactccacactccctatgggcaggaacccaaacccgagagagaccacaaagtctgtgagtgagaagcaccaggtttaatattaaaatctttcccttaaaaaaaagtacacagatagaaaaactyaacagcatacaaaatagcatttctgctgtataaatgtgagttaacgtgagtcctaaaaatatttgtaaacctaggtgattatatctttggtaccgtattgagaacccactctccctccttggaccaactctgggga

SEQ ID NO: 481601 - DNA, 601 bp, Homo sapiens
ccgaatctcaaacttctcttcccagcacttctgcatgatctcatagctggggatagggagaagggtcagggcctctggcccagggttcaggggacaaggcagggctgggggagcaggaggctgctgcctctcagaacaaggtgagccatggaaaggagctggagggaagtggtggctgggtgtatccagaggtcctgtctctggatattcccttgggaggccctcgcagagcccccattccacatggttccacaggttgactacgcctgggtgagcacaggagccaaccttcgccaacagttttcagccctgcagcttccacggttggttcttgatggcatgtgaccccacctgagcccttgaaggtcagctctgggacttttgctggcwctatggagcaagcagtaggacatgagactggcactgctggtagccatttgggcaatgctggcctgaaaatgaggccacacagagcaaagcagagctcagggctagaacaagaggttcctgatgccatcctttgaatggctggatccagttacaccaaggctttctagatctctgagctaacaaatctctcatctttggtttaagccagtag

SEQ ID NO: 481602 - DNA, 580 bp, Homo sapiens
ctctccagcccaatgaactgtggttgtctgtggtatattcagcrgaagggagaaaaaaaaaaagacgttttgccattatttctaaaaatatcagtgacatgtcagggtcatcatctctatgttaagaactatggagagttagagagagatgaacttacgtctttcacactcagcatcttcagtgcaaataaaattttaaaagaacccttcacagtttttaagctgaatccccatctcaattcaaaatattaaagccagtctacctaaaacaaatggtatagctggaaaaatagtgggagatggcttatattggaattctatgtggggtatgaaaatggttttaaaccaatagtattttattaatatctataatgtaatacataatgctatacatttaagatatcataaacataatgtattacaaacattggatgatgcgctttagagattggatgggctgctgcattgggaaaaatttcaggctagatgtggctctaactaaattttcaacttgggaccaattacttaacctatctggacctcagtattctaaactcagatgtgagagggtgtatctcta

SEQ ID NO: 481603 - DNA, 587 bp, Homo sapiens
aattagaggttggattaagttcaatttgattcatcagtgcttattagayaccaactacatgtaaattcctgctatagaataaaacataaagatcattaactacctatggaataagattaagtaatgtaaaatattaagttctcctcttcctccccagaatgctcaaagtggtttggggttcctattgactggagtgtaaataagtaactggacacagtgggtcatctcttccaaggacgtgtcctgttccatactgccagttttgagattttttagagtcattaaccaagagtgaacacctctatccctttctacctagacttcatggtagaatctattagagacgttgtctctaaaatttagagcatgatagtccctcttaaggatagtcaaagtgaaaaaattagtaagacctctcaaaattcattcaaaattcatgcttttgttgctcttttgaacctcataaggacaataaattggtgccctctcatcatcttgctaccagagacactctagattattatatggacaatctatgaaattgatttgtaataaatgtctgttggaggtcaaggtgcagctaagag

SEQ ID NO: 481604 - DNA, 587 bp, Homo sapiens
aattagaggttggattaagttcaatttgattcatcagtgcttattagataccaactacatgtaaattcctgctatagaataaaacataaagatcattaactacctatggaataagattaagtaatgtaaaatattaagttctcctcttcctccccagaatgctcaaagtggtttggggttcctattgactggagtgtaaataagtaactggacacagtgggtcatctcttccaaggaygtgtcctgttccatactgccagttttgagattttttagagtcattaaccaagagtgaacacctctatccctttctacctagacttcatggtagaatctattagagacgttgtctctaaaatttagagcatgatagtccctcttaaggatagtcaaagtgaaaaaattagtaagacctctcaaaattcattcaaaattcatgcttttgttgctcttttgaacctcataaggacaataaattggtgccctctcatcatcttgctaccagagacactctagattattatatggacaatctatgaaattgatttgtaataaatgtctgttggaggtcaaggtgcagctaagag

SEQ ID NO: 481605 - DNA, 587 bp, Homo sapiens
aattagaggttggattaagttcaatttgattcatcagtgcttattagataccaactacatgtaaattcctgctatagaataaaacataaagatcattaactacctatggaataagattaagtaatgtaaaatattaagttctcctcttcctccccagaatgctcaaagtggtttggggttcctattgactggagtgtaaataagtaactggacacagtgggtcatctcttccaaggacgtgtcctgttccatactgccagttttgagattttttagagtcattaaccaagagtgaacacctctatccctttctacctagacttcatggtagaatctattagagacgttgtctctaaaatttagagcatgatagtccctcttaaggatagtcaaagtgaaaaaattagtaagacctctcaaaattcattcaaaattcatgmttttgttgctcttttgaacctcataaggacaataaattggtgccctctcatcatcttgctaccagagacactctagattattatatggacaatctatgaaattgatttgtaataaatgtctgttggaggtcaaggtgcagctaagag

SEQ ID NO: 481606 - DNA, 518 bp, Homo sapiens
tcctcctattaaattattaagtgttaagaaaagaaatgtttaaacaaagccactattagtttttagtcaaattctgtgtgtacttctgttatattcaaacaagctaatgagtacattctttttcttctgctcaacttgaaaaggttacaaacaaataaactgtctcaaaatctttattctctctggaatttatttttcagaaatattaactcaccttattttttaagccaaaaatttaagaagtttattataatttgttattctaattctgctgctgagttggctgttttatttaacgataaattgaatacaaaagctccccaaggcaggaagacagagtaccaagctctgaaagtttggcagtttgacatttcatggtagcctcagacagaagttaatttcgatgctaattatgtatacatacttaagttgttgtatgggytagtgggagtgtacatacatgtacatatatgtatgtcttggaggttacactacaactaaatttagagtcattttgt

SEQ ID NO: 481607 - DNA, 458 bp, Homo sapiens
gctgctgctcttgcctatggtctagacaaatcagaagacaaagtgtaagtttgtgcagtaaatttctcacctggatgtgtgaaactaaagtgtcacttaatttyttagtaattgagccttttacagtgcttttactgattttaagtctgtattgtctttgttttttcatttcaaaaccattcttttcttttcttttgggccatggtaatttaactagtacatatctcagggaaatagcttagattatctgtatttggttattgaaatttatatcctggtgataggttttgttcttaaggatttcttttcttttttttttcacaaatcatttacagcattgctgtatatgatttaggtggtggaacttttgatatttctatcctggaaattcagaaaggagtatttgaggtgaaatccacaaatggggataccttcttaggtggggaagactttgacca

SEQ ID NO: 481608 - DNA, 599 bp, Homo sapiens
agccaggaggccacctagctgattcccctcccccmacccaccagccgctcgctctgtcacaacaaggagctttggcagaaagggaggggagcgtgggtgctgcggagagaaaaacaccccaaagtttcagaaaaaaatggcaggagagatgccagcacccaggagcaggagccttctgcttctcacagcctgcactgctgggctggggggagaccacggtttcctttccttcctttctcccttccttccctccccgccccttgctgcgtgatattcaggaaaaggaaacattacagtgaggggagaaagggaacaaagagatgcttttcagaggggtcatgggatctttccgtagccaccagaagacacagttctgggctctgcttgctctgggctaagtgggtgtgtatgtgtatgtgtgtgtagaagagaacaaaaaagagagagaatgtgtgtgttagtgtgttagtttatgcatgcctgtgagtaaatgtgtgtctgagtgtggatgtgaattgggcgtgcatgtgtgtgttgggaaacagtaaagataaaagcagacagaacaaaaagaatcatatacaagattggttagacag

SEQ ID NO: 481609 - DNA, 588 bp, Homo sapiens
acctttgctcttctaagtctgggactctttttattctattgtgttccctctgagctcagactcaagctgggatttgaaggataggtagggtttgcataggttgaaaaagtaagtaaaaacattttgcttcagagaaaaagtacaagaaaggacacagaggcatgtgaatggcatgactgacagtctggaaagtgtcactctgctaatgacggtaatcgctccatgagtcttcccatccttcaaggmagagcatgtgatgtgtagtgtcttaagacccactcttagaagggtcctgtgcttggtttaatgctctgttgttgctgtcttaaaattccaaatactttaagaacaaaagatgccccctttttttgatttgggccccacaaattatgtagccagtcttgcttcaaggcctaggttaggtattctgatcatctattttatctgtcaaagctattctcattccactagatgcctctacatttttacattgtggttagttcacacttggttggtctcttattcgcacataaattactaacagttatctttgcaatcaagtcataatctccttacaagcaactagaa

SEQ ID NO: 481610 - DNA, 462 bp, Homo sapiens
taatctgaaattgaattaattgctcatagaaaaaggaagtggaaaggttctatcaggtgggcacaaaagtaattgcaccaacctaatgttttttagtttttctacagatgacataaatgctgatgtggttctgaacacacccctargcaacagaagcatcatttttcaagggccccaaagactcctccttctctgaaccatcacaagtattatgaattatccagagatctgtcttattgatggactaccttaaagaatttcaggccggtttgtcataattttcatgttttccctcaaccatattaaatgtgactataacaatgagctgaaaggaaaattaggtcccaagtgttttggtattttttcagtatcgaaggtcaaccacatagcagttagccagaatgcattgtgaacagacatatggcatttgttggggagaagaaagggtgggaggaggagtgt

SEQ ID NO: 481611 - DNA, 462 bp, Homo sapiens
taatctgaaattgaattaattgctcatagaaaaaggaagtggaaaggttctatcaggtgggcacaaaagtaattgcaccaacctaatgttttttagtttttctacagatgacataaatgctgatgtggttctgaacacacccctaagcaacagaagcatcatttttcaagggccccaaagactcctccttctctgaaccatcacaagtattatgaattatccagagatctgtcttattgatggactaccttaaagaatttcaggccggtttgtcataattttcatgttttccctcaaccatattaaatgtgactataacaatgagctgaaaggaaaattaggtcccaagtgttttggtattttttcagtatcgaaggtcaaccacatagcagttagmcagaatgcattgtgaacagacatatggcatttgttggggagaagaaagggtgggaggaggagtgt

SEQ ID NO: 481612 - DNA, 640 bp, Homo sapiens
ccatacaactaacatactatacagatgctcttcaacttaccacaggtttgtatcctgataaacccatcattaagttgaaaatatcttaagtcaaaaaatgcatttaatacacgtaatcttctgaaaatcataactaagcctagcctactttaaatgggctcagaacaacttacattaaactacaactcatctactacaaaatcatytcatgcaaagcctatttttaaagttcgaatagctcatgtaacttattgaatactgtactgaaagtgaaaaaacaatgatcgtgtggatactcgaagtacattttctactgaatgtgtatcacttttgcatcatcgtaaagttgaaaaatcctaaatcaaatcaccctaagtcataactgtctgtacttgtggattatttttccttctaaattttaaactcttccaggatactatttatcactattattggtgctgctagttgttggcgtagcacctaaaaccaagtgttcaatacatatttgttgaatgaagaaatgaatggatggacaggagctgttttctgaggtattaggaacttcagaggaacataatcttccaatgattttgatgcagaaggcaagttccatggctgcaaattgtcaaaaagtcaactt

SEQ ID NO: 481613 - DNA, 558 bp, Homo sapiens
ttcccacagaatcattaccagcttcttctcactcctgtcatcatgattgaagtaatcaagttgagtggctgttccattaaccaaaaaacttatytgaacttatatctatctgcacatagtaaagcaattaagacattctctttattctccaggagctcacagaaggcaatcttaaacttataatgtaaatacacatacacacacacacacacacacatatatatatacatacacacacaaatatgaacttaacccacccaaaggaagaggatgcctgaactaattcataaagggtaagtaggaggcagccaggggaaaaagagaaagacattccaagaagaatacatagcataagcaaagccaaagaggtaaaaaatgaaacatcctatgcaagtatctgcaattaatttagcattaaaatacttaagtgtgagatgagaaaggcttaattagagagacagggagggaccagaggtctctctatcaaacttgtgacttaatcccgtagaacaacaggtcttaaactctgtgctacagcccatcagtagttggcccaat

SEQ ID NO: 481614 - DNA, 621 bp, Homo sapiens
gggattcatgctacaggagtagatttcagctgctcttgccaccaaaaaaaaaaaaaaaaaaaaaaaaaaaatcaaggaaaaatggatacttatgagatgatggctatgttaatttgcttcactgtggtatcttttttactatgtgtttgtatcccatatcatgttgttccttcaatatacacaataaaattcattttacaaaatgagtagaataagcttttgtttcccaagcatagtattcatgagtgttatatgaggtcctgttagatagtttagattatatgttaacagtcctccaactattttcatgtgaattaggacaaaaaaaaaaataactagcagatcgactccatgacttcacatgtagtattctttacactgaaaaaaaaaaaaacgaaactaaaacatggaggggaatctatataagttcaacttaagtaaaacatcaagttactatttacacatatatggtaaaaaaaaaaaatgactggcacataagtgagtaaggcttagaagacatggtatgaactaaatatgaytatttttataattctgagcaaatgtgattgttctaaagattaaagtgatttttattcatcaattgtaaagtttctagcataa

SEQ ID NO: 481615 - DNA, 602 bp, Homo sapiens
acatccagttccacgcagtttttttttaataaatatcggaattatctgctctccattaaatatttggagagttcacataaaagtggatttccagcttctcttgaaaaatctggccacatctggccggcgtgtgtccagcaacaatgagcctgagttgggtagcggccgccccctcttggcggcatggatgtactacaggtggttggaggcattctaaccgtttcttccatccctgcagtcaacggtgtgtgaggcgccgggattacagtgartattctgagtataggcagattctgtttgcatcccagagcccgggacactggtattgctctgcctggcaaatgtttgctgaaatagccggctaatggaatgctttggaaactgtaaaggatgcatgatgatggtgcctcctgcctgaaatttggtgccagagtactgctagtccctgtactggaatccaggtcccaagccctaagggacaaggtcctcataccctcaccccaaacccaacccgatccctccttgggaggcattagacaattaagactcttttaggtactgcctggaccttccaagacatcggtgggattacccttcgttgg

SEQ ID NO: 481616 - DNA, 628 bp, Homo sapiens
ctgtgaatccatcttgtccttgactttgttttttttgttttttttttttttttggttggcaatttttttttattaccatttcaatctcgctgcttgttattggtctgttcagagattctatatcttcctggtttaatctaggagggttgtctatttccaggaatttatccatcttctctaggttttctagtttatgcgtgtaaaggtgttcatggtagccttgaatgatcttttgtatttctgtggtatcagttgtaatatctctcgtttcatttctcattgagcttatctggatcttctctctttttgttaatctcactaatcatgtatcaattttatttatcttttcaaagaaccagctttatgttttatcttttgtatttttttgtttcagtttcatttagttctgctctgatcttcattatttctcttcttctgctmggtttaggtttggattgttcttgtttctctagttccatgaggtgtgaccttagattgtctatttgtgctctttcatactttttgatgtaggcatttaatgctatgaacttgcctcttagcactgcttttgttctatcccagaggttttgataggttctgtcactattattaatttagcatttcagtt

SEQ ID NO: 481617 - DNA, 488 bp, Homo sapiens
tgcactccaacctgggcaacagagagagactctgtctcaagaaagaaaagcagccactatttttggagcactaatctgtamttactccccacataaccctataaaattaagtgtctccattttaagatgaaggaattgaagctcagaaaaaaggaagcagtttttctagttttatgtaactcttagttgatagaaccaagaattaaatccagatataataaatgtgtgtctccctctaccaggctaagcacagtcaaaggaatactgtgtgtctctgtccatgctttatgcatgtgaaatgttgattttccttaatgtctaccactcacccaagtcttatgtttcattttgattttagttaaaccatcctcaggtagccaaatgagcctttctgcccctagtggccatttcctttagaccttgtagcacaaactgacaatgccactcataggaaacctcatctaatcttgtgatgtctctggttttgt

SEQ ID NO: 481618 - DNA, 471 bp, Homo sapiens
aagggacatggaagtgactatagcatgtctgtagcttcctgttgcacctaaawtaatctaagaaggctgtgtccttaacttgacatacaattccttccatgttgtgaccccttatgttagtcagcgtcccagcaggaaacactggcattctcaggagtgtagccaaagaccccgtagtgaggagacagtttactgcagtgccagcagggtgaggaagccaacagcatttgggcaagcatccaggggttcacatcacggtgaagacgttgccacccaaagcctgaagagacaagggaaggaaactcagaaggggagctgcctgacaccagcagtggccacagagggcccaatgccagaagcatgtgacaaagcaggtgtgcaggggaagaagtaccatgacttctctttcttccatctttgcatcccctcacaaaattggcagaaccctctggaagccagaagccatgagaa

SEQ ID NO: 481619 - DNA, 649 bp, Homo sapiens
gacatggaagtgactatagcatgtctgtagcttcctgttgcacctaaaataatctaagaaggctgtgtccttaacttgacatacaattccttccatgttgtgaccccttatgttagtcagcgtcccagcaggaaacactggcattctcaggagtgtagccaaagaccccgtagtgaggagacagtttactgcagtgccagcagggtgaggaagccaacagcatttgggcaagcatccaggggttcacatcacggtgaagacrttgccacccaaagcctgaagagacaagggaaggaaactcagaaggggagctgcctgacaccagcagtggccacagagggcccaatgccagaagcatgtgacaaagcaggtgtgcaggggaagaagtaccatgacttctctttcttccatctttgcatcccctcacaaaattggcagaaccctctggaagccagaagccatgagaatgcaggtcatggagctcttagaggtcagaagggcagagggcaggacagaggatagagaatggattgcacagacaaataactagcaggtccacgctcacctcccaggctcatctctgcccatctccccaaccccacctcaggggccttctttcaggtaccagaacacaccgagctacatcctc

SEQ ID NO: 481620 - DNA, 510 bp, Homo sapiens
atattacagattgtaatagctaatgtgtgcaggtaacatttaatgaaaaccattttgggccacggattatgctacatgttttatgtggatcatctccctaaattttcgccctatgatgcaggtactcttattatccccatttaatagataagatgacaaacctagagaaaagacttgtccaaagccccacagataagttatggtgaagccaggatttagaactatgtttgtttgagggcaaaatccatgcttttgacaactgcactatagtcactcctgtaattatgagcccttacagatcagtaagaaaaaggscaaaagttctctagaaaaatgaacaaaagaaataagcagacctttccccagtaagagatacaaatatcttctttcccacagagcctttaattcgagggtgaagatgataggaattactaaaccccttttggttttctgacttggaatcttagatttgaatttcttttaccctcataccatggttaatattccatg

SEQ ID NO: 481621 - DNA, 616 bp, Homo sapiens
atgttgcaccctgcagtggaagacttgagtggtacatttcagtgactgtcacaggccatccgttgagctggtgctttggtacaatagttataaatcatttggattgaatcattaaagtagtccctcactccaacctttgggtagcctggctcgggatatcctgtctccgaatctcaatttcttcacttatgaagtgggtaaaataatgagcagtagatacttgtttcagtcctggaaamaaaaaaaaagtgctttgggaatgtgaagtaacgcaaaactactgtcttcagagatctaataattcaaaaatttctttccactcatctggcctttcaattagcctgacattagaagactttattgtattgtaattaatttcacaacatgtgtctgggaaaacaaatgttcaggctatcttgtctttgaaattactaagaatttgaagtttgccaccagaatgttttatttgataactattgtagtttgcatggtgatgaatcagttttcgttattcaaatgcagttcatggtacttgaagaatttaacccactaaatccagaaatttgatttaaagatactgcagatgagaactcaggaatgcttctaagtgctgcct

SEQ ID NO: 481622 - DNA, 512 bp, Homo sapiens
tggcaccacaccagtcccacatcttcccttcccagcttccaaattctccctcatttcttggcaaatggttgagatgtcctttctattttcatatatttccttcagcttgaccttttgtgacttattttctccctctaaatgtccttggtgttaaataatataaataaagctagagaaaaacacatggcatgtatttccccgattctaatctttccttgtttatttcacatggaagaattataaatgagaaaaaacaaacaaaaagaactcacattcatttctgatagcaagaatgctaatggcctagtaattaataaaaataaacacaactgtaatgacrtcaccagatagatctgcttggaatattttgcaattttttttgtttaatttctaagctaaaccgtatccattttattttagtttaaaaattatatagaggaaaaccccaaagattaccattttaaattgcaattgtacagttaagaaagactaggcagccacaatttcctggg

SEQ ID NO: 481623 - DNA, 588 bp, Homo sapiens
ctctactaaaaatacaaaaaattagccaggtatgggtggcgcgcacctgtagtcccagctactcaggaggctgaggcaggagactcacttgaacccaggcggaggttgcagtgagccaaggccgaggttgcagtgagccgagattgcgcaactgcactccagcatgggcaacagagcragactccatctcaaaaaaaaaatagtggcgtctattttgacaattcttacagaagcatattcttgcagaaccatatagtgatcttggttatctgtcctggttgattgaaagtagtataaacaacaaggtaaagaaattgattttatttccagtagtacctaggtacataaggattcaccgtttttaatgggacacataacaaagtagcttacaactccatatcccaccccacttattagtatattacacaaatatgtacaatttctaagcctcacatttgagagaggatgatcatttttaaattgattacatgcattttgtattttaaaactttggcatagccaagtcttttgtaaatttagttctttatgcacctatgtaaatattttccatgtctgcataccaaccca

SEQ ID NO: 481624 - DNA, 588 bp, Homo sapiens
ctctactaaaaatacaaaaaattagccaggtatgggtggcgcgcacctgtagtcccagctactcaggaggctgaggcaggagactcacttgaacccaggcggaggttgcagtgagccaaggccgaggttgcagtgagccgagattgcgcaactgcactccagcatgggcaacagagcgagactccatctcaaaaaaaaaatagtggcgtctattttgacaattcttacagaagcatattcttgcagaaccatatagtgatcttggttatctgtcctggttgattgaaagtagtataaacaacaaggtaaagaaattgattttatttccagtagtacctaggtacataaggattcaccgtttttaatgggacacataacaaagtagcttacaactccatatcccaccccacttattagtatattacmcaaatatgtacaatttctaagcctcacatttgagagaggatgatcatttttaaattgattacatgcattttgtattttaaaactttggcatagccaagtcttttgtaaatttagttctttatgcacctatgtaaatattttccatgtctgcataccaaccca

SEQ ID NO: 481625 - DNA, 447 bp, Homo sapiens
atgaaatcaatgagcaaacacttcatagtctacctggtatttttgtatgtgagctgtttctaaattttcaggattgccattcrtgccatggcgaatgtatggcatttagaacatcttggatttcccatcacccctcacctttctgcatctatgttggccttattcatataacaaaccttggcaatcttgttcatgtgaaaagtggtggagcaaataactcggaacatgttacctattccattgactctgcaacttccaagcagggcagttcgacttggatatacaaacccagtaagtaatcctaaacttgtcatccttattggaaatttcctttaaggttattccatgctgagtagtactccaggggttcctggaagggaacactttaatttcttccattgatcacagacatgagaagatccaatttatttacctgctcacatcacc

SEQ ID NO: 481626 - DNA, 447 bp, Homo sapiens
atgaaatcaatgagcaaacacttcatagtctacctggtatttttgtatgtgagctgtttctaaattttcaggattgccattcgtgccatggcgaatgtatggyatttagaacatcttggatttcccatcacccctcacctttctgcatctatgttggccttattcatataacaaaccttggcaatcttgttcatgtgaaaagtggtggagcaaataactcggaacatgttacctattccattgactctgcaacttccaagcagggcagttcgacttggatatacaaacccagtaagtaatcctaaacttgtcatccttattggaaatttcctttaaggttattccatgctgagtagtactccaggggttcctggaagggaacactttaatttcttccattgatcacagacatgagaagatccaatttatttacctgctcacatcacc

SEQ ID NO: 481627 - DNA, 630 bp, Homo sapiens
tttctttaacttgtaccaagagaaagtgaagtcagtatttgggggtgtttgcatggaaacctgcatcgggcctccggagggtgggacttygagaactacctggctggaacaggggcttcatctagaatgagctaggcatacacattccagcatgactaaagccctggtaggcagaacttggtggcaggagtcctgggctcctgaacggtgttatctctggccagcgacttcctctctgtgtgcctaagtagtctcagttttgttcactacttcatgtccagcactctgctcaaggtctggcctagagtggcagacactagatgtctgttgaatgaatgaattaggtttttgttttgtaaaatgaaagcaccccttccagccgaatcccctctggattcaagggactgtagggaggaacagagccatcagggataggcaagtctccctgggaatggggatcggggcaaggcggtggtctgcatcacaggctttcattcaaggtagccagtgtccttcttgtttaaatagaagagactgtgcttcaccctttggtggttatgggtacacaggggatgctctgtgacatggcccttggaacctagaggaagagccagggaggggggaccaggg

SEQ ID NO: 481628 - DNA, 630 bp, Homo sapiens
tttctttaacttgtaccaagagaaagtgaagtcagtatttgggggtgtttgcatggaaacctgcatcgggcctccggagggtgggactttgagaactacctggctggaacaggggcttcatctagaatgagctaggcatacacattccagcatgactaaagccctggtaggcagaacttggtggcaggagtcctgggctcctgaacggtgttatctctggccagcgacttcctctctgtgtgcctaagtagtctcagttttgttcactacttcatgtccagcactctgctcaaggtctggcctagagtggcagacactagatgtctgttgaatgaatgaattaggtttttgttttgtaaaatgaaagcaccccttccagccgaatccyctctggattcaagggactgtagggaggaacagagccatcagggataggcaagtctccctgggaatggggatcggggcaaggcggtggtctgcatcacaggctttcattcaaggtagccagtgtccttcttgtttaaatagaagagactgtgcttcaccctttggtggttatgggtacacaggggatgctctgtgacatggcccttggaacctagaggaagagccagggaggggggaccaggg

SEQ ID NO: 481629 - DNA, 630 bp, Homo sapiens
tttctttaacttgtaccaagagaaagtgaagtcagtatttgggggtgtttgcatggaaacctgcatcgggcctccggagggtgggactttgagaactacctggctggaacaggggcttcatctagaatgagctaggcatacacattccagcatgactaaagccctggtaggcagaacttggtggcaggagtcctgggctcctgaacggtgttatctctggccagcgacttcctctctgtgtgcctaagtagtctcagttttgttcactacttcatgtccagcactctgctcaaggtctggcctagagtggcagacactagatgtctgttgaatgaatgaattaggtttttgttttgtaaaatgaaagcaccccttccagccgaatcccctctggattcaagggactgtagggaggaacagagccatcagggataggcaagtctccctgggaatggrgatcggggcaaggcggtggtctgcatcacaggctttcattcaaggtagccagtgtccttcttgtttaaatagaagagactgtgcttcaccctttggtggttatgggtacacaggggatgctctgtgacatggcccttggaacctagaggaagagccagggaggggggaccaggg

SEQ ID NO: 481630 - DNA, 535 bp, Homo sapiens
ttaactctttgttcagggctcagtcctttggatgttaatctgactgggccagtgcacctaaataattaataaatatcatcctgaaccccatcggtctctctgattccttaaaaatcccgcaacagttcaagttacaaaataacatgttttaagacaaataattaagtttaagccacagggcgaaatgtatctatgctcacatctttagtgatttcatcaagtcttataacttaggcctcaaaccatagagtcatccctgagcccaccttttttctcttttttaaaaatttagttgaatttttatacttaaaacattttaaaaaaatagagatggagggtctcagtatgttgcccaggctagtctcaaactcctgrcctcaagtgatcctcctgccttggcctcccaaagtgctgggattataggcatgagccaccttgcccagccatccctttctcatgttccaccctttatatgtaaaaatcctgtgagctctgtcttcaaaaaatgcgcataatttgaccatttccccccact

SEQ ID NO: 481631 - DNA, 620 bp, Homo sapiens
atcttggtgtaacagctggtgattgctgtgtaacaaaccactccaaacttaatagcttaaacaattacttatttgattcagaattcagtgggtaggtattctaggctgggctcagctggacagttctggttttggctgggcttcctcatgagtccagggtcagcagagagtcagctagggggcactgcttctgagagttgactggttgttggctgagacaatggtggcaattgggccacatgtcagtcctcatccagcaagccagcccagacttgttcaaaagtttccaggaaaatatggaagagcacagatcctccaaaggcttaagctcagaactggcacaattccacttccaccgtattatattagtcaaaacatacatcagcccagcccagatttgagaggtggggaaatagactccacctcttgatggaaggaacttcgaagtcatgttgcaaaagggatgtggaggcgggaagaggaataattgcagccatatttggaaatgayctactacacttgcaaaaagtaaattccaaaagattacatacagaatacccatttataaaattagactttaggagtacagatacataaagtaagattttatcaacaggaag

SEQ ID NO: 481632 - DNA, 441 bp, Homo sapiens
gctgttaaaatgaataaggtagatgtatgtgaaaccgtctcaaagatatagtattaggttagaaaagcacagaaaaatgcatatgctctgctaatatttctgtaaaacacatacccacaaatctatacctttatatacataagcttctaaatggtggctccagacaggtaaactggggaactgggagtcagagctgaaggtgaaattcctttggaggatctagcctttgtgctatttgaatgccttgctgtgcacatyggatctgtgtctgaaatagaggaggaagagaaagtagcagaaagaggaggaagtaaagggatgaggggatccaggaggagggagaaggaaagaggaggagggagaggaggtagagaggaaggaaaatgggagaagtagggaaaaggagataaaagaggaagggaaaaaggaaggaatggaggt

SEQ ID NO: 481633 - DNA, 393 bp, Homo sapiens
ctttgggaattcccagtgtatttctttgagatgtcttccacattaacagtagagcctacaaagaaccaacatgcagaggctacttgtcaaagggcactttctgtaggtagtctaaaagaacacaattatacacatacacaaacgtgtacaggtataygcaaaagggaaaaggagatgcaagagtactgtactactgctttaacaaatgctctcacccaatccaccttatccatcttacaggatagaaacactatttagggtttaaaatacgcaaaaaaacattttttttaaatatataaaccatctatggaagcatattttgccttctgttatgaccctcatcattcctcaactcatattctaaaagcctgagaggtgaaaatcttctgaaca

SEQ ID NO: 481634 - DNA, 642 bp, Homo sapiens
gctgccatcaacagcaacccagagcccgaagatgaatttaaaaaaacaaaaaccccaaacatcttgtacactatcaggtatcctgttgtgtctcttgattgaacagctcaatagagtataacaaaaataattcccattygtaatgcctgctcccaggtgggaactcacgcattctttacaattaccctacccacaaatgtaggtcattgtggatgtaattatcctcattttgcaaattattaaaaagaaaaaaaactaacagcagcaaagacacaataaaacaaaggcgtgaacattttaattcactaccctattgtcaatctactagtaagtggcagagctaggacttaaactcactgctatctgatactaaaaccattaataaaaatgcgtctaacagggttccagtctgaaaaatgagaacccggttactgttcatatacttatttatctattccttaatttatgcatttatcgacagatattttgtaactgcaaagtgtcaggaaatatactgtgcacaagagatataacaggagattggataggcactatccctgccaccgtggaacctacattttagtcagggggagcgaaaaaattcagcagggaattatgcttcagcatcgtaattgctacaat

SEQ ID NO: 481635 - DNA, 612 bp, Homo sapiens
atgaatttaaaaaaacaaaaaccccaaacatcttgtacactatcaggtatcctgttgtgtctcttgattgaacagctcaatagagtataacaaaaataattcccattcgtaatgcctgctcccaggtgggaactcacgcattctttacaattaccctacccacaaatgtaggtcattgtggatgtaattatcctcattttgcaaattattaaaaagaaaaaaaactaacagcarcaaagacacaataaaacaaaggcgtgaacattttaattcactaccctattgtcaatctactagtaagtggcagagctaggacttaaactcactgctatctgatactaaaaccattaataaaaatgcgtctaacagggttccagtctgaaaaatgagaacccggttactgttcatatacttatttatctattccttaatttatgcatttatcgacagatattttgtaactgcaaagtgtcaggaaatatactgtgcacaagagatataacaggagattggataggcactatccctgccaccgtggaacctacattttagtcagggggagcgaaaaaattcagcagggaattatgcttcagcatcgtaattgctacaata

SEQ ID NO: 481636 - DNA, 612 bp, Homo sapiens
atgaatttaaaaaaacaaaaaccccaaacatcttgtacactatcaggtatcctgttgtgtctcttgattgaacagctcaatagagtataacaaaaataattcccattcgtaatgcctgctcccaggtgggaactcacgcattctttacaattaccctacccacaaatgtaggtcattgtggatgtaattatcctcattttgcaaattattaaaaagaaaaaaaactaacagcagcaaagacacaataaaacaaaggcgtgaacattttaattcactaccctattgtcaatctactagtaagtggcagagctaggacttaaactcactgctatctgatactaaaaccattaataaaaatgcrtctaacagggttccagtctgaaaaatgagaacccggttactgttcatatacttatttatctattccttaatttatgcatttatcgacagatattttgtaactgcaaagtgtcaggaaatatactgtgcacaagagatataacaggagattggataggcactatccctgccaccgtggaacctacattttagtcagggggagcgaaaaaattcagcagggaattatgcttcagcatcgtaattgctacaata

SEQ ID NO: 481637 - DNA, 642 bp, Homo sapiens
gctgccatcaacagcaacccagagcccgaagatgaatttaaaaaaacaaaaaccccaaacatcttgtacactatcaggtatcctgttgtgtctcttgattgaacagctcaatagagtataacaaaaataattcccattcgtaatgcctgctcccaggtgggaactcacgcattctttacaattaccctacccacaaatgtaggtcattgtggatgtaattatcctcattttgcaaattattaaaaagaaaaaaaactaacagcagcaaagacacaataaaacaaaggcgtgaacattttaattcactaccctattgtcaatctactagtaagtggcagagctaggacttaaactcactgctatctgatactaaaaccattaataaaaatgcgtctaacagggttccagtctgaaaaatgagaacccggttactgttcatatacttatttatctattccttaatttatgcatttatcgacagatrttttgtaactgcaaagtgtcaggaaatatactgtgcacaagagatataacaggagattggataggcactatccctgccaccgtggaacctacattttagtcagggggagcgaaaaaattcagcagggaattatgcttcagcatcgtaattgctacaat

SEQ ID NO: 481638 - DNA, 648 bp, Homo sapiens
tgctaatatgattcagtgattcccccagaaatgtaattgagtgaaatatgaaatatgagaaatatttaaggactgatcattactgagattctacataataacagaatttgttgtttcaaatcacaacaaaagtgcttcctctgtattggggttgctttattctaacctccacccacaaccgttttaacttactctccatttcagagtcagagaaaaggctcatttgaggaaaatatttgcaggctggtttatacagatacaaatgtgagctacaaaattgtgccaccttcagtttaatgcgatattactgctacttatttggtgaataacagggaatggagagggtattgtgatagattacgattataaaaagatgcaaactactcaggtttatgaccttctatgaatgtaatgaaatatacattcatacatagcagtacttccagtctgccatgagtccccttagctaatagaagacataaatagaaaacgatttctrtgaaaatgtgcttctggtggggttaaatgagacttctgcctcttgcaacacactttagaacaagtaaaagagtataatacttcatatgaatgaacaatgaatagatgaaattttttacttccagagatagataagaggctgataacaat

SEQ ID NO: 481639 - DNA, 370 bp, Homo sapiens
tcaggaggggaaaggatttgctcaaggctatgccagacctcaggttctagctcacagtttcatatggcaagaccagtgctctttccagagttcagtccatgctgtttcctgtgtgactgagtgaataagctayattggctaaagtgtgattcaaatgaagatgacactgctgttgacaggggctgaccttatctgaattaggtcaagagagtagagtttttccagtcccttttgcaggaaaaaaaaagaacttacacatatatatatatctttctctctccatgtggtcttagtccatttatctctgcttgtctcccccttcctggcttcctcatcctcagaactctaagctctctgcactgactgctgt

SEQ ID NO: 481640 - DNA, 628 bp, Homo sapiens
cctcaacagctgatgcccaggatgtggtagggtgcttaaaaaatactgacagaagacccagcctccctccctagcycagggggtagcacctgacccgtgggcagctatgccggaggttgcccagtgacctaagtctagccccccaaaactgagctggatcagtccctgtatgggaagttcaacattagcaaattcactccaagctccccctagttattttcttacctgatgggggcacaccttgtagattttaccacctgtgaagtgacgtgggggccgtatagctctagctccattctgtacagattcgtagagggccaacaaggagaagcagagctggtcctggagtagaaggacaagattaaaaacataagggcgaatgctaagggaccacggctggtgctcagcatcacacactcacccaacacccaaagcaaaagaataaactgcctgggtcagagcgggccttggagcctcatcagcccaacctcctctaggtacaggtaagcaatcggaggccctgaaaggattaggtcacagacaaagccagccagactgctgatcaagctgccagactctgaggcctgagtcctttcactttttacagggcaaagaaaccatcaaaggg

SEQ ID NO: 481641 - DNA, 632 bp, Homo sapiens
ataccctcaacagctgatgcccaggatgtggtagggtgcttaaaaaatactgacagaagacccagcctccctccctagcccasggggtagcacctgacccgtgggcagctatgccggaggttgcccagtgacctaagtctagccccccaaaactgagctggatcagtccctgtatgggaagttcaacattagcaaattcactccaagctccccctagttattttcttacctgatgggggcacaccttgtagattttaccacctgtgaagtgacgtgggggccgtatagctctagctccattctgtacagattcgtagagggccaacaaggagaagcagagctggtcctggagtagaaggacaagattaaaaacataagggcgaatgctaagggaccacggctggtgctcagcatcacacactcacccaacacccaaagcaaaagaataaactgcctgggtcagagcgggccttggagcctcatcagcccaacctcctctaggtacaggtaagcaatcggaggccctgaaaggattaggtcacagacaaagccagccagactgctgatcaagctgccagactctgaggcctgagtcctttcactttttacagggcaaagaaaccatcaaaggg

SEQ ID NO: 481642 - DNA, 628 bp, Homo sapiens
cctcaacagctgatgcccaggatgtggtagggtgcttaaaaaatactgacagaagacccagcctccctccctagcccagggggtagcacctgacccgtgggcagctatgccggaggttgcccagtgacctaagtctagccccccaaaactgagctggatcagtccctgtatgggaagttcaacattagcaaattcactccaagctccccctagttattttcttacctgatgggggcacaccttgtagattttaccacctgtgaagtgacgtgggggccgtatagctctagctccattctgtacagattcgtagagggccaacaaggagaagcagagctggtcctggagtagaaggacaagattaaaaacataagggcraatgctaagggaccacggctggtgctcagcatcacacactcacccaacacccaaagcaaaagaataaactgcctgggtcagagcgggccttggagcctcatcagcccaacctcctctaggtacaggtaagcaatcggaggccctgaaaggattaggtcacagacaaagccagccagactgctgatcaagctgccagactctgaggcctgagtcctttcactttttacagggcaaagaaaccatcaaaggg

SEQ ID NO: 481643 - DNA, 622 bp, Homo sapiens
tttatagaaaaccaagtacaaaactaaaatgaaagaatgcacktattgcacacatattaaactgctgaaatgttagaaattaatctgtacaagtacctaatgaagaaggttatgaaatattaggtggttcgagtttctcaaatctggcaacagaccatgactttgaaagtgttaatgttgaagtgttgatggaaaaatgtctattaacaaaactgcttacagtgtttgagaaacacgacaaaataattgtttttctttcacagacatttttctaaatcaattctctacagactctctcccattcagaatcagttgtgtggaccgatgaggcaaaagatgaattccttttaaaaaacaaaactggagcctatttacaaaacatgcaaaaggagaattttaagcaggtgttacctccagagtttctggaagaaatatattttcaggttgtggactataaaatggcgtacaatgaagagacagaaacaaagaagtttgcaaatcttttatatttccagctgttgagataatatttttgagagctgatgttacctctagcggcaaaaccagagccagctattaagcagccagaaagctacagtaattgaatacacgaccatttctc

SEQ ID NO: 481644 - DNA, 622 bp, Homo sapiens
tttatagaaaaccaagtacaaaactaaaatgaaagaatgcacttattgcacacatattaaactgctgaaatgttagaaattaatctgtacaagtacctaatgaagaaggttatgaaatattaggtggttcgagtttctcaaatctggcaacagaccatgactttgaaagtgttaatgttgaagtgttgatgsaaaaatgtctattaacaaaactgcttacagtgtttgagaaacacgacaaaataattgtttttctttcacagacatttttctaaatcaattctctacagactctctcccattcagaatcagttgtgtggaccgatgaggcaaaagatgaattccttttaaaaaacaaaactggagcctatttacaaaacatgcaaaaggagaattttaagcaggtgttacctccagagtttctggaagaaatatattttcaggttgtggactataaaatggcgtacaatgaagagacagaaacaaagaagtttgcaaatcttttatatttccagctgttgagataatatttttgagagctgatgttacctctagcggcaaaaccagagccagctattaagcagccagaaagctacagtaattgaatacacgaccatttctc

SEQ ID NO: 481645 - DNA, 493 bp, Homo sapiens
acgggggtttttctgcccactgtccccaaccccaggctgcacwgcagtcaggtaagttgacagaccccattgcggggatgacctgtgacaggcctagccacttacagtgcccatggccctgcatgccatctcgtctcttatcttctcttttccctcagcccatccgttagcacttatccttccctaaaattatttcatgcatctatttacatgcttgttaattgtctgttacctcagaaataaaatataagccccacaagggcaaaagctgtgctttgttcactgcggtacccacagcacacagagcagcagtggatgcccaacaaatactgactccccttcagatgagcacatgcctttcattcatccctagtttggccatttcatagcagtgagaccttggaaaagtcacttctccctgcctctcagtgttcttattcatacagtgtggctaaccaccccttacgtgcaagagtgtcaccactgcaggacg

SEQ ID NO: 481646 - DNA, 561 bp, Homo sapiens
ctgttcctccttcaccttccctacgtgcctagacagtgctggggagaccctaaataacacgaggcaacagcccggagctggccatgtgtctctgctagaggagacytgggtgggtgtggggaatggcccctggaggtggtcactgtctctgcctggagggggcctcccaggatgggcagaggccccaaatggaccagaaggggaagggacaacgaggcccatggaaacctcctgatgatgccaagttctcttctggttttgagctatgcctaggaagtaaaagccaaaccaaacccctaaaccataaaagaagtcaagttactaataaaaggcagggctgaatgctttgatgttggcccatttcatttgggatggacttggctaccagtaaaaaatgacccggggctggagaaaccattctgcttctgaaagactccaggatagtcctaagtcctgtcagtagtgacaaagaaccacagctccagcaaactcagtcctgttctggaacggatcctggcgctttggacagatgtggctgatgcaggcacgagagaggagagc

SEQ ID NO: 481647 - DNA, 561 bp, Homo sapiens
ctgttcctccttcaccttccctacgtgcctagacagtgctggggagaccctaaataacacgaggcaacagcccggagctggccatgtgtctctgctagaggagacttgggtgggtgtggggmatggcccctggaggtggtcactgtctctgcctggagggggcctcccaggatgggcagaggccccaaatggaccagaaggggaagggacaacgaggcccatggaaacctcctgatgatgccaagttctcttctggttttgagctatgcctaggaagtaaaagccaaaccaaacccctaaaccataaaagaagtcaagttactaataaaaggcagggctgaatgctttgatgttggcccatttcatttgggatggacttggctaccagtaaaaaatgacccggggctggagaaaccattctgcttctgaaagactccaggatagtcctaagtcctgtcagtagtgacaaagaaccacagctccagcaaactcagtcctgttctggaacggatcctggcgctttggacagatgtggctgatgcaggcacgagagaggagagc

SEQ ID NO: 481648 - DNA, 526 bp, Homo sapiens
tcattctgggctgtgattgttttcttaatatccaactcctttgccagactccaagctcccaaggagccggaatggccttatttgtctcaagtttcccacctttggcacagaattagcaaagagaggccccaaagagatgctgtgggctgaatgaactcatctctatctcatgaactctaacctaagtcctcagggacattaattgaamctccagggccaggcttgctgttgcccctgcccattccccagacctcttcacgccatttccctgtttcacactgttctgggagcactgacacttcccctgattgaggtgtggagtgtagaaggtggaaaaggaggtaaatattccaccttagctgacttcattcctctaaatttctgttctagaagtgcattttgcaggctcgagagctgtagaccatagaaaatcaatgctggagccaacggaccgcagaattccacatggcaggtttatttgtgatcaggaccacatgttcaaggggcattgagtccatcgacctga

SEQ ID NO: 481649 - DNA, 505 bp, Homo sapiens
tgaggcagaagaatcacttgagcccaggagttcaaggttccagtgaactatgatgatgtcactgtacttcagcctgggcaacaacaccatctcaaaataaataaataaaagcacaaaatgattacaaccatgtcacaattctttgcattaaaaaaaggctgaaaagcccaggcacagtggctcacgcctgtaattctatcactttgggagccaaagcaggtggatgactttaggtcaagagtttgggaccagcctggccaacacrgtaaaaccccatctctactaaaaatacaaaaatcagccaggtaagatggcacaggcctgtaatcccagctacttgggaggctgtggcatgagaattattggaacccaggaggcagaggttgcagtgagctgagatcgtgccactgcactccagcctatgcaacacagtaagactctctctcaaaactaacaaaaaaaggctaaaaaaaaaattaaaaggttaagatttcactgaaagctt

SEQ ID NO: 481650 - DNA, 554 bp, Homo sapiens
accaggaagggggtcctcaccagacaccgaatctgccagcaccttgaccttggaattcccagcctctagaactatgagaattgatttctggtgtttataagccacccagtctgtgataytctgttatagcagtcccagttgactaaggcactctctctctttcttccaatgtttggcaaactccgactcatctttacacaatctactcaaatagcacctctttcaggaagccctcttggattcctcaggcagtgagtagctgccaggtggagctattatgagggccgtaggaggtcaggagatagttcagatgcactcactgaaaacatgtagataatttgtcagtctacagggcagtacagaggggaggaggaattggaaggggaggtagtaaaacaaagtggtgacaagcttgagctctggagttcaaatgctggctcagacacatgctggctgtgtggttttaggcaatttacttaaaatctctgtgccttagtttcctcctctgcaaaacgggagctactacaggacctatttcataggattgttgtgag

SEQ ID NO: 481651 - DNA, 629 bp, Homo sapiens
tcctggcattctctctactccttctatgctccacagaccttcttatgttgggaacactcttctccatcctcccaaccacgttttacctaaattattcctgcccatcttgaaaatctccttctagacatcacttcttcagggaagcctacttctctagctctgaagaatagatcaggttgcctatttatgtgctgtcatgggcctttttgtaactataacagctttattagtatataattcatgtactatttaattcaaccatttaaagtgtgcaagtcaatrttttttggtacattcacagaaatttgcaatcatcactatgttaaactttaaaacagtttcatcaccccaaaaagaaaccccatattagcagtcactccccattcccaccaaccactctagtccctgctaaccactaatctgtcttctgtctctatgggcttgcctgttctggacagtttatattaatggactcatacaacatgcggtcttttgtgtctggcttcctttgcttaccacgttttcaaggctcatccatgttgcagcatgtatcagtactttgctcttctttatagctgaataatatgttattgtacagacataccatattttatttatccactccttac

SEQ ID NO: 481652 - DNA, 541 bp, Homo sapiens
ctgagaaatgtattcttaatgagattttgaataataacttgaastggaagaaataacccctttatcacagccagctcctcctcttctttcaggaagaactatgatctgtggttattaactgagcattttatgggcagaaaatggaaatcaaagacaagagaaccatgatataaatcctgatctggcctctcaattaaaatgatattaaaaagcagtataattttccaccacagcccacgtggaaaacggttgcagaatgagtggacttcctttccagaaagcaagataaaaaatgcttttagcccagcacagcttgtagcacatacagaaagtcaaaagaaattcagaaaatgggcaaggaaggtggtttgaaaatttgcttcgcctgagctggctgaatttattcctggtcccagaagagtaaaaattagtgttttcaagtctaatctaccagaaccactaagtcagcccagctttgatagccttagctgcacgtggctgttcaatagacaaggggagcttaggaactgctcctaacacc

SEQ ID NO: 481653 - DNA, 613 bp, Homo sapiens
acccctttatcacagccagctcctcctcttctttcaggaagaactatgatctgtggttattaactgagcattttatgggcagaaaatggaaatcaaagacaagagaaccatgatataaatcctgatctggcctctcaattaaaatgatattaaaaagcagtataattttccaccacagcccacgtggaaaacggttgcagaatgagtggacttcctttccagaaagcaagataaaaaatgcttttagcccagcacagcttgtagcacatacagaaagtcaaaagaaattcagaaaatgggcaaggaaggtggtttgaaaatttgcttcgcctgagctggctgaatttattcctggtcccagaagagtaaaaattagtgttttcaagtctaatctaccagaaccactaagtcagcccagctttgatagscttagctgcacgtggctgttcaatagacaaggggagcttaggaactgctcctaacacctgcctcctaggccctggagctctgggagaacagggttgtgactgggccctacaggtccttgaaacaagtgtcaagaagagattctagagcagaaaggtcacactctatgaggagagagtatgagtag

SEQ ID NO: 481654 - DNA, 613 bp, Homo sapiens
acccctttatcacagccagctcctcctcttctttcaggaagaactatgatctgtggttattaactgagcattttatgggcagaaaatggaaatcaaagacaagagaaccatgatataaatcctgatctggcctctcaattaaaatgatattaaaaagcagtataattttccaccacagcccacgtggaaaacggttgcagaatgagtggacttcctttccagaaagcaagataaaaaatgcttttagcccagcacagcttgtagcacatacagaaagtcaaaagaaattcagaaaatgggcaaggaaggtggtttgaaaatttgcttcgcctgagctggctgaatttattcctggtcccagaagagtaaaaattagtgttttcaagtctaatctaccagaaccactaagtcagcccagctttgatagccttagctgcacgtggctgttcaatagacaagkggagcttaggaactgctcctaacacctgcctcctaggccctggagctctgggagaacagggttgtgactgggccctacaggtccttgaaacaagtgtcaagaagagattctagagcagaaaggtcacactctatgaggagagagtatgagtag

SEQ ID NO: 481655 - DNA, 426 bp, Homo sapiens
tcacacagaagtggaaccactgggctaggaactctagcgggcatttcctgcctggctaccagtggcagggatgaatggggtcacccaccctgcagtccaggtgcttcccaggacaacaggaggctgcagccacctgatgagttcagacaaagtgagatcactggtctggaagctggtactgggccttgtctggcaaaggagggtagagcaatctaactgctcccaggaaccacgactgcagcctctattagggctatggtgctggtgctggtctgctccagatcccaaggcttatagaggtcctgctggactggagagatgaccctataaaatgcccaggtagcwctctgcctcagtatagaagtgcagtgatagggtgcagcgggcccaaggaaattctctcattcacagtcttgcatgggtctc

SEQ ID NO: 481656 - DNA, 527 bp, Homo sapiens
tggaaccactgggctaggaactctagcgggcatttcctgcctggctaccagtggcagggatgaatggggtcacccaccctgcagtccaggtgcttcccaggacaacaggaggctgcagccacctgatgagttcagacaaagtgagatcactggtctggaagctggtactgggccttgtctggcaaaggagggtagagcaatctaactgctcccaggaaccacgactgcagcctctattagggctatggtgctggtgctggtctgctccagatcccaaggcttatagaggtcctgctggactggagagatgaccctataaaatgcccaggtagctctctgcctcagtatagaagtgcagtgatagggtgcagygggcccaaggaaattctctcattcacagtcttgcatgggtctctgtggagggtgtgaatcccctggggggctctcactcacaccctttcccacattgaagaggttctactgactccacactgagcccagacaggctagtggccagctttgctcct

SEQ ID NO: 481657 - DNA, 527 bp, Homo sapiens
tggaaccactgggctaggaactctagcgggcatttcctgcctggctaccagtggcagggatgaatggggtcacccaccctgcagtccaggtgcttcccaggacaacaggaggctgcagccacctgatgagttcagacaaagtgagatcactggtctggaagctggtactgggccttgtctggcaaaggagggtagagcaatctaactgctcccaggaaccacgactgcagcctctattagggctatggtgctggtgctggtctgctccagatcccaaggcttatagaggtcctgctggactggagagatgaccctataaaatgcccaggtagctctctgcctcagtatagaagtgcagtgatagggtgcagcgggcccaaggaaattctctcattcacagtcttgcatgggtctctgtggagggtgtgaatcccctggggggctctcactcacaccctttcccacrttgaagaggttctactgactccacactgagcccagacaggctagtggccagctttgctcct

SEQ ID NO: 481658 - DNA, 635 bp, Homo sapiens
acacataggcaccaccatgcccagctaattttttccacttgcaagctaaagtcatttcaacattgctctttcctactcacctattagctgccagagaacaagaacccctatctgttttgccaatataaaacctacactttgaacaatgcctaacacacagcaggaatttgaattattgaacaaasaaatgacataaccctgagcctataaacacagcactaaaaattatattcctttccagagcaccaaatgcaaaaggtttcaacgatagttcagttaacaatcaccctgacgagactcagaaggacaaactgaaaacttctgaaatcaggtatgccaactagaaaagaagttttacttcagcagttcatttctacttccactataaagttatcttcaataaaatttcatagaaaaagtatattctgccatgttatttttcttgaaaagatgttatgcacttgtagtaacaagtatgtaataatttatagtgtaaaagattaaatattaaatagaaaaggaatcactgatagggtgctacagtggcacctaaaatttctggtctaacaggcattcaagttacctcggggaagggagtggtttcttttgatgaaataaactaatacacatcttac

SEQ ID NO: 481659 - DNA, 585 bp, Homo sapiens
aagaatattgtggaaggcaggaycaaggtaggcagattcaggtaagagtgggaggtaagctgtggcctggtgtgaggtgaggttggagaggcaggcagagcccgtgggaaaggtaggatgttgtacatcaccataagcagtctggcgaattctacgtgaaatgtcaggaaccagtgaagggtgttaagcatagaatgacaatctaattttttttaacagccttattgagatagaatttacatatcacaaatttacccatttgaagtgtgcagttcaatggtttttagtgtatttagagagctgtacaaccatcactgtaagctaattttagaacctgatttatttttaaaaggatcattccggttcttgtgtgagaatgggttatcgaagggcaaaagtagaaaggacaagactcattaggagatgagagatgttcaatgtgaccaggagaaggtatgcatttcttcactcccttgtagcatcatcttccagctacctattgagcccctgtgctataccaggccacgtgtgaggtgccacatcttccatggtaaagaagacagatatgacccctgccctatggga

SEQ ID NO: 481660 - DNA, 337 bp, Homo sapiens
tgctgatgctcaggctgcccttggaacagggaccttggccayagtttccttatctgtaataatgggatgagaattcctcctgcacagggttgttagggacctcgtgaggcagcttctatggctgcctttggtgcttagttttctcactttcttcttgaacatgggagtggggagacggactcctaagggtatgacacttgaagatttcaggagggggcctgcaggtttatgtcctcacttgttttacacctcacagaggtcagcgaagcagggtatcaccaaagccccacctgatgtctctggaaatcgagtactccgtgtcttcaccaggcccatg

SEQ ID NO: 481661 - DNA, 613 bp, Homo sapiens
gtgcagcagtacccccacatcaccttcagcaccgtcctgcaggactgcaagaggaccttggagagagcctatcagatgggctggacccccaacatgtctgccgcctcctcctagcgctcctgcctcgcctagtccactgggatcattcagcagagcagaggagaattgtacatttggggagctgatctctcggaagggttttaactgtcacctgtctgtgtgtgttcaagtatgtgtatttgtgtcttgtttgcatactgcataccaaaagtgcagttgtcatttgttcccaagtgagctggctttttttcttagaaattaaagattatgaaagccacaaactttttagtttttaacttcaaaggcttctttctctttaaaaaaaaattatttttaatatagagtcaaaaaattggatgtattattttgagcttctaattgctgccacttggagatgtccaagtaagaaggccttctttttacatgggatgaattgtgcacttctactgatgatgactacagcagaagtgatgttatacgtacaggcacttacactctytcacatattcacacgtgtgcacatctacaccagggctctgatctactctagatc

SEQ ID NO: 481662 - DNA, 591 bp, Homo sapiens
gaaaaggagaaacagctatgaaacaataaatatacagtcatactctgtcccccaactccaggcttctgagactgggtcagatcttggcaggaggggataagccctaaactggacatatatttggaatgttgagcaaattgggatggaccgaactggagttacagagttattagtttttaaatgtctaaaargactactcttatttcccacaatagaaaagctatggggtctctttcaaattttggacaaaggtagaaacagaactggtttgaaaacaatggataaactaataatgttgattaatcagcttattgaatcaaccaatcgcaaatgtcttaataatggtagactcttggcaggtccacagaagtgcagccagtatgataacacactggaaacctcagcagagaagcacccatgccaagaaataaggagctccagcctgcagaaaatctaggagacataatgacacactgaaagtactaaagggttttattgtcaacaaaggattagcctgcatggctgcagaggctgcaattagcttaagttagtggaaattaagggaggggtctgcttggagtcaacataaga

SEQ ID NO: 481663 - DNA, 580 bp, Homo sapiens
atagttatgtattatttttactcaatatcattasatcattagcaggtccctataccattcaaaattattgtaaaaactatgtttgatggctgtacaatattctactgtataactattgtgcaatttatttaattagtccctcactgatgtgtttaagattgattccaatacctagatagaaagggaacttgaagattaacctgctaagatctgttttcagaaagtcacaaaacatattagcatatcaaaagtcatgagaattctgtggtaaagaataaaggccttgttttaacagaacattttccaaatacattttctcatgaaattctacctcttctttttattttggctaaagacctattatattctgtctgcagcattctaatacttcaaggaacccagctggaaaaaggctgctattgggttttcccattgcaatttgaatcttagaagcaaagcagtgtcaggagaatatagctttgttagaagtacaagtaacttggtggctataatgggtaatccttcagtaatacaatcaatgactgtaaatataatatttataatatttataaaaacctag

SEQ ID NO: 481664 - DNA, 638 bp, Homo sapiens
aaatatggggtatctatgtttaattaccagcactatccaggaccagtactcagccttattttcacatgccagtgcaaatgaagagactatcctgacagacaaacaaaagcttcctcctaaccttttcaaatccagacttactcctccagaacctkctacagactgctgctccagttaccttcctaataggctatcataatcacagaactacactactgaacaacataggataaactgcattaaattcaaatgatttcttctatatttactctatgcctatcaactggcaataaaaccactatgtttgtttatttttcattttctcacattaaaaaaaaagcactttaaattgcagtaaacagggcaaccacaccattatacatattaacataatctgatcaaatataggagagttcaaggtagtgcccccacagccctaattatattttaatgtatatcttaaataaagataatgatttgaattatattttatctcattcttttcacatattatgtcataagcatttttctatttcatataataaatattgagatcattttttataattttgtctgaaattttacaatacaaatgcacagtagtttattaaccatttccatctattgtctaggttgcc

SEQ ID NO: 481665 - DNA, 638 bp, Homo sapiens
aaatatggggtatctatgtttaattaccagcactatccaggaccagtactcagccttattttcacatgccagtgcaaatgaagagactatcctgacagacaaacaaaagcttcctcctaaccttttcaaatccagacttactcctccagaacctgctacagactgctgctccagttaccttcctaataggctatcataatcacagaactacactactgaacaacataggataaactgcattaaattcaaatgatttcttctatatttactctatgcctatcaactggcaataaaaccactatgtttgtttatttttcattttctcacattaaaaaaaaagcactttaaattgcagtaaacagggcaaccacaccattatacatattaacataatctgatcaaatataggagagttcaaggtagtgcccccacagccctaattatattktaatgtatatcttaaataaagataatgatttgaattatattttatctcattcttttcacatattatgtcataagcatttttctatttcatataataaatattgagatcattttttataattttgtctgaaattttacaatacaaatgcacagtagtttattaaccatttccatctattgtctaggttgcc

SEQ ID NO: 481666 - DNA, 425 bp, Homo sapiens
gacggccagaatggggcagtgcctggacaacatgtcacttgccaagtggttaagagaacaaagccagcaggcttaaagggccatttaatcttctgctccattggacaaaaaccagggccaatggttaataattaaggagaacaggattttagcccaacataaggaagatatttccagaacagcatggacagcctgcaaatgcagcgagcctcctatccctgactgtctctttgctaaaggagagttactgacacgctctttgtgatgggagggagattggtagagagatgagttctgtggtcctttataactaaggatatccagcatgttcttgatttttattacatagggatctgtgttttatatgatttgcattgtaactccagagggasagctatggtgtttgtcaggattggggtcatgag

SEQ ID NO: 481667 - DNA, 601 bp, Homo sapiens
taaaggaagtcttgtaatcccatggaccctctaagacacctcatgaaattctggataaggataggtcaactaccytatcctgcatgtcagtttggtttgcatcctatgcatgaggttagtgcccctgttgtctccatagtctatgctgtcatagaagtaatggggtctacaggcaaaagggacagaaacataaaataagttgtatggaatgactttgacacacatacttaaggatacagggcttggaacatttcagtgtattccttgtgcagagtgtgagccatttcattcaatacacctgctgtgaagatagcacacatgcctcaagctggcagataaatctagccagctattcagtgcatttttgtcttcacctattctctataggcaatagctcatgtgcagtcttaaaaactttacttcttttcttaaaagcaacaagagcgaaattccatctcaagaaaaaaataaagaaataaatggccctgaggccagatgcagtggctcatgcctgtaatcccagcacactggggggccgaagcaggtggatcacctgaggttgggagtttgagaccagcctggctaacatggtgaaacccca

SEQ ID NO: 481668 - DNA, 601 bp, Homo sapiens
taaaggaagtcttgtaatcccatggaccctctaagacacctcatgaaattctggataaggataggtcaactaccttatcctgcatgtcagtttggtttgcatcctatgcatgaggttagtgcccctgttgtctccatagtctatgctgtcatagaagtaatggggtctacaggcaaaagggacagaaacataaaataagttgtatggaaygactttgacacacatacttaaggatacagggcttggaacatttcagtgtattccttgtgcagagtgtgagccatttcattcaatacacctgctgtgaagatagcacacatgcctcaagctggcagataaatctagccagctattcagtgcatttttgtcttcacctattctctataggcaatagctcatgtgcagtcttaaaaactttacttcttttcttaaaagcaacaagagcgaaattccatctcaagaaaaaaataaagaaataaatggccctgaggccagatgcagtggctcatgcctgtaatcccagcacactggggggccgaagcaggtggatcacctgaggttgggagtttgagaccagcctggctaacatggtgaaacccca

SEQ ID NO: 481669 - DNA, 601 bp, Homo sapiens
taaaggaagtcttgtaatcccatggaccctctaagacacctcatgaaattctggataaggataggtcaactaccttatcctgcatgtcagtttggtttgcatcctatgcatgaggttagtgcccctgttgtctccatagtctatgctgtcatagaagtaatggggtctacaggcaaaagggacagaaacataaaataagttgtatggaatgactttgacacacatactkaaggatacagggcttggaacatttcagtgtattccttgtgcagagtgtgagccatttcattcaatacacctgctgtgaagatagcacacatgcctcaagctggcagataaatctagccagctattcagtgcatttttgtcttcacctattctctataggcaatagctcatgtgcagtcttaaaaactttacttcttttcttaaaagcaacaagagcgaaattccatctcaagaaaaaaataaagaaataaatggccctgaggccagatgcagtggctcatgcctgtaatcccagcacactggggggccgaagcaggtggatcacctgaggttgggagtttgagaccagcctggctaacatggtgaaacccca

SEQ ID NO: 481670 - DNA, 665 bp, Homo sapiens
ctgatttactaaagcttacatttccatagaaatttatcttggaaatttatttatagaataaatcattctcctaggcatgattgctaggagatttggaaagcatataatgggcattgtgaaaatgcaagatacatgagaaattcacaaacttccacatggttcccagcagggagctagtgggagctgggaaaataaaccagggggtgtccatttgagaggtcaaggcaggtgggcacaaacaattctttgaatacctaatcagcataggaaatggaagaattttgaaaatcaatcaggccatgggcctaaaggcaagcaaggaaggtaaataataataacatcagggttgaggtttcacacttaatctataaaactacttttaayaggcccctaggtgattataaattcgtggtggctttctctttattgggattatatgggtctattccatatttccaaaggaagcccttcctattatgcaggtgtgtctccttatttatttatttatttgcatttaagatattgaaacttttttaaaaaaaactcatttctgtgagcattaagtatataccatgcaaggaagcaattgtctctatcttatgaaatattaaatcaaaatgcttcctgttccctcatgtcccagagataaatacagcagtactttg

SEQ ID NO: 481671 - DNA, 366 bp, Homo sapiens
ttccaattttcctgtgtccacatataccttatgtggtctgtgtttggcacactgggaagttcaagggatcagccataagcaggtggcatatacattagtcaggaggatttagatgcaagtaaactccttctccatttagcttaaacagaaagaaaaaaatgtgaacatcttattatattgtgtgtatgtatatgtataaatacatttgtgtatgtgtgtgtgtgtgtgtgtgtgtgtgtgtttatgtgtataaaatctcacatagggagaaatcctgaggtgggatggctccaggctgcttgccccagraactccaggacagctcttcctgtcattcacttgagccaatatcactaagttagttat

SEQ ID NO: 481672 - DNA, 561 bp, Homo sapiens
aattaatccaaacatctccatctcacaaacctacagcagcatttcagaatcctcactgccgggaatttcattttctatttggaattcacgtgccgctgactaactaggatatcttaatttgtcattagtagacgagaaaaggaaaagcttggtgccccaaacctaaggcaacaattctggtatttgattagcatcattgactctcctgaagcctttgtcccacaccagatttcttccttgtgttcagagaatctttcaggtgctcacaccacccttgtcttctgccttgaaacctatttctctagccactataccaccctcctcagaccayttcacctcccacatcccccacaaatacttcttatttatctacatgttctgagatgtgttctgcattatgccaggccagtataatgaattttaagagacacagagggcaccaaggccacacaagctttcaaagctgtgtagcacattccacttttcatctacttggagactctcaattgatgttagcatggcaaaggctcctcagagtctcacaagaaaggactgtgttac

SEQ ID NO: 481673 - DNA, 522 bp, Homo sapiens
ttaaatgggaatgatgttactccttatgactttctgctaattggagaatggcaaaggcatataaaaatctttcacagagcagatacgtatttcttaagatcacatgtaattacaaagaagcagatttttttggtatatatgcatgtacatatatgtatatatatttatgtgtttgtgtgcacttatcctctctctttctctctttcatgaacacacatcttarataatatttgggagcttagtgggtagatgagttggggtacccagaagatatgattccatgttctcatctttaatatcagagagctggcctgtttgccagaaacgaagttatatcagtaagactggagggtgtgaccgtctggaatgtgggttcacatgatttactgtctttcctgtactttcattaagggccaaacccttgaacctggtgttatggagaggcctgagttctctatcagtccaagctaacctaatgccatgtgattttagttacataaacaatttattgctccataaccc

SEQ ID NO: 481674 - DNA, 587 bp, Homo sapiens
tggtgactttaagttgaagtcaaagctcatttaacattctgaaaatcccataggcattaagaattatgtgaaatctactctgcctgtgctctagcaatggaaaaataaaccttcaatttgtaaaaaaaaaaaaaaaaaaaaaaaaaaaacaaaaccataatatctgcaaagtgcaatacagcaaagttgaataacatgaggtatgcctatgttcttcttcttttttttttagacagggtctggccctgttgctgggctggagtgcagtagtgtgatctcggctcactggcagcctcaacctcctgggttcaagtrattctcgtgcctcagcctcctgagtacctgggactgcaggcgtgcaccatctgcctggctaatttttatattttttgtagagatggggttttaccatgttgcctaggccggtctcaaactcctgagctcaggtgatctgcccacctcagccctccaaaatgctgagattacaggcatgagccaccatacttggccatgcctgtgttccttattagactttaggcacactgaatttctagctgtggacactggagggtgagctgagatgcaag

SEQ ID NO: 481675 - DNA, 577 bp, Homo sapiens
ctggtgactttaagttgaagtcaaagctcatttaacattctgaaaatcccataggcattaagaattatgtgaaatctactctgcctgtgctctagcaatggaaaaataaaccttcaatttgtaaaaaaaaaaaaaaaaaaaaaaaaaaaacaaaaccataatatctgcaaagtgcaatacagcaaagttgaataacatgaggtatgcctatgttcttcttcttttttttttagacagggtctggccctgttgctgggctggagtgcagtagtgtgatctcggctcactggcagcctcaacctcctgggttcaagtaattctcrtgcctcagcctcctgagtacctgggactgcaggcgtgcaccatctgcctggctaatttttatattttttgtagagatggggttttaccatgttgcctaggccggtctcaaactcctgagctcaggtgatctgcccacctcagccctccaaaatgctgagattacaggcatgagccaccatacttggccatgcctgtgttccttattagactttaggcacactgaatttctagctgtggacactggagggtgagc

SEQ ID NO: 481676 - DNA, 657 bp, Homo sapiens
ctggatgcagttcttgacatgatgaatgtgaggtgtctgtgaggtgttcaggagaattgtaaaaatgttttcagagacaaatgcttaacacttaaggaaccactagatttaaagagaagggagggaaaaggtaagggaagaaaagtcattgagtaaaagccaaaatggtcagaaaggtaggagaaactaaaggaagggaaagtatatttacctagtatttattttaaatcaaatgctacaaagaacttaacccgggttatgccatttaatccccacagtaagcttaaaaatgattttattccactttatacatgtgattggaagatttcaaaatattaactgacattttcctgcaatttctttgtacccacaggccttttcccatgtggcatccattggctcatagaacagatgttacaagagaaagtaggagaaacsgacttttgatttaaaaagcctagacttttaatgttcaaaaataaatagctctaggaaatttgaaaggagggagatttgtgtctctggttctcagtgctctgggaaacagaaaggcctgggaccatggtgtgtcccaggctgattgatgcgtcacaggcagcctcacaggattcctcatgtcccagcaaggtaaaagaggagaaggattcaaggcaagag

SEQ ID NO: 481677 - DNA, 541 bp, Homo sapiens
cagcgctggcgggagatggggcccagtctggggagtcattgccaggaatggtgctctggacaaggaggtactgcaggcatgcatgtattcattcttcttttttttttttgagatggagtctcgctctgttgcccaggctggagtgcagtggtgcaatctcagctcactgcaacctccacctcccgggttcaagcgattctcctgcctcagcctcccgagaagctggttttacaggcacccgccaccatgcctggctaatttttgtattagtagagatgggggtttcaccatgttggccaggttggtcttgaactcctgacctcaggtgatctatccgccttggcctcctaaagtgctgggattacagatgtgagccaccgcgcccagccttggctctgccttctgagcattgttttcacaggccggctttccccttgtgggagcagagctggtcccggcagctctgggaagtgtctcccacctatgggctcctctytttccctgggtgttttgggtaaagtccccaggttggctctgattg

SEQ ID NO: 481678 - DNA, 502 bp, Homo sapiens
gcggggagcccagagtccccaatccagcccaagaaggggcctgggaggatttggcagaggcgttgaactcatggtcaccaccctcacagacttagctttacgggtgtaaacagccaatgaacaagttaaccaatcaaggaaagaattgcagatcgaagtaaaacgggggtggggcaggcagcaacacaggctactttagctggggtcagcagggaaggcctctgaggaggggacaccgagtctgagacctgaggttgagaaggcgccagcctgggatgagctggggagagggyacacagggggcagacagccagcgcccaggccccgcagtgagaaagagctggctgtgttccaggaacggcaaggagtcctgcgtgccttgggccaagtgaggggcgggtgggagggaatgaaatctgtggaggcagaaaccgcgccccatgacgggggaatagatagatctcaggtcatctggcagggctgggagcccgcaggccctggg

SEQ ID NO: 481679 - DNA, 502 bp, Homo sapiens
gcggggagcccagagtccccaatccagcccaagaaggggcctgggaggatttggcagaggcgttgaactcatggtcaccaccctcacagacttagctttacgggtgtaaacagccaatgaacaagttaaccaatcaaggaaagaattgcagatcgaagtaaaacgggggtggggcaggcagcaacacaggctactttagctggggtcagcagggaaggcctctgaggaggggacaccgagtctgagacctgaggttgagaaggcgccagcctgggatgagctggggagagggcacacagggggcagacagccagcgcccaggccccgcagtgagaaagagctggctgtgttccaggaacggcaaggagtcctgcgtgccttgggccaagtgaggggmgggtgggagggaatgaaatctgtggaggcagaaaccgcgccccatgacgggggaatagatagatctcaggtcatctggcagggctgggagcccgcaggccctggg

SEQ ID NO: 481680 - DNA, 631 bp, Homo sapiens
cccccaccagcacgcctggctaatttttatatttttagtagagacagggtttcgacatggtggccaggctggtctcaaactcttggcctcaagtgatctgcctgcctcagcctcccaaagttctgggattacaggtgtgagtcactgtgcccggcctcttggtgtcttttgctgtacctggaccaatccaccccgccttctcttggcctatggcagccccgggacatcacaggccacagacttatcrcaggcaattatgccaactctcctctaacagaaagaaacagcagcacctccaacccaaagctggtggcccagagagtgcagtaggctgctgcctgctgaggctgtgatcctgtggccagcgaggcttggcatctgcttttgtggggttggggctgactcacgtgctctcaaagccggtgtcctggctgtctataaacggcgtggcggtggatccacgaggaccagagtcccttattctctgacactttttcatccttcacagggaatgtccttagggaatgtggatgcgtagaggagggacagaagcgggaggaagccacagggaagcctggtctctggggacacagcccctgctcctggaggggcctcccctgcagagtatccc

SEQ ID NO: 481681 - DNA, 631 bp, Homo sapiens
cccccaccagcacgcctggctaatttttatatttttagtagagacagggtttcgacatggtggccaggctggtctcaaactcttggcctcaagtgatctgcctgcctcagcctcccaaagttctgggattacaggtgtgagtcactgtgcccggcctcttggtgtcttttgctgtacctggaccaatccaccccgccttctcttggcctatggcagccccgggacatcacaggccacagacttatcacaggcaattatgccaactctcctctaacagaaagaaacagcagcacctccaacccaaagctggtggcccagagagtgcagkaggctgctgcctgctgaggctgtgatcctgtggccagcgaggcttggcatctgcttttgtggggttggggctgactcacgtgctctcaaagccggtgtcctggctgtctataaacggcgtggcggtggatccacgaggaccagagtcccttattctctgacactttttcatccttcacagggaatgtccttagggaatgtggatgcgtagaggagggacagaagcgggaggaagccacagggaagcctggtctctggggacacagcccctgctcctggaggggcctcccctgcagagtatccc

SEQ ID NO: 481682 - DNA, 580 bp, Homo sapiens
tggcaggaaggggaacaacagaagatgtcatttgatgtcacatctttgggtcaattcagaacagattgcgtgtttctgtgctcatcttattcgggaaatttaatctccttgctgtgacccttattgctgcaatcttggccacaaatcagtcgaatttgaaatgtagaaccttggccgacttgtggaaaagagagtgattacccaccgttctcacaagcatttcytttttttttttttttttttttttttttttgagacagagtctcactctgtcgcccaggctggagtgcaatggtgttatctcagctcactgcaacgtctgcctcccgggttcaagcgattctcctgcctcagcctcccgaatagctgggattacaggtgcccgccaccacacctggctaatttttttgtatttttagtagagacagggtttcgccatgttggccaggctggtctcgaactcctgacctcaggcgatccacctgccttggcctcccaaagtaccgggattacaggtgtgagccacctcacccagccatcatgagcatttcctgaagggctcttgggtgagaggaggcag

SEQ ID NO: 481683 - DNA, 521 bp, Homo sapiens
gacccctggacggtggcacactgatgcaggccatgcacgctgccttggcggggcctggggcgggcaggcaccatggccgacggggggtggtgcatgctggctgagagagcgagcgtcctgccgccaagcggctggcccgggccacccctccagatccctgtcctggaatctcccttggtgcccaaggacagatgctctgttccctccattcatccacaagaagttcagggatgacctttaaagattctccccacccaaaaagtattaccccatcatcctattctcccatccaccttgatcttccctgygtccctatccatcaatgctatttgtacctgccccgtgttgccacctcattcctttccttcctctgtgcacccctcctcacctaacctatatgtctcccctccttctcaatcaaagccggggacaaggttgtcccaccagcatctcagacaatgagcctctcctggcacctgtcgctctgtgcccctccctgccgcccccccccccccccccgg

SEQ ID NO: 481684 - DNA, 521 bp, Homo sapiens
gacccctggacggtggcacactgatgcaggccatgcacgctgccttggcggggcctggggcgggcaggcaccatggccgacggggggtggtgcatgctggctgagagagcgagcgtcctgccgccaagcggctggcccgggccacccctccagatccctgtcctggaatctcccttggtgcccaaggacagatgctctgttccctccattcatccacaagaagttcagggatgacctttaaagattctccccacccaaaaagtattaccccatcatcctattctcccatccaccttgatcttccctgcgtccctatccatcaatgctatttgtacctgccccgtgttgccacctcattcctttccttcctctgtgcacccctcctcacctaacctatatgtctcccctccttctcartcaaagccggggacaaggttgtcccaccagcatctcagacaatgagcctctcctggcacctgtcgctctgtgcccctccctgccgcccccccccccccccccgg

SEQ ID NO: 481685 - DNA, 605 bp, Homo sapiens
tgtgcctgtaatcccagcactttgggaggctgaagcgggtggatcacttgaggtcaggagttcaagaccagcctggtcaacatggcaaaaccctgtctctactaaaaatacaaaaattagccaggtgtggtggcgggtacctgtaatcccagttactagggaggctgaggcagaagaatcacttgaacccgggaggcagagattgcagtgagccgagatcacatcactgcactttagcctgggcgacagagcaagactccatctcaaaaataaaaataaaaataaaaaataccgagaaattcccccaaagacctagctcagggctcactctccatcattagggggaaagaagaagaggaggccagggaggcgggcagagaccagggcagtgtgggctcctggaggcagcttctatgtttaaaagggcggcttcaggaggaaggggaccaaccrtgtcaggcactgcccagagaccaaggatgacaaggatcacaagtgactggtcatcatggtcactttgaccagtgcagctttggcggaggggtcaggggtcccctgtctggagtgcatttcggaggcccgaaaggggatgtgatgtgatttgg

SEQ ID NO: 481686 - DNA, 605 bp, Homo sapiens
tgtgcctgtaatcccagcactttgggaggctgaagcgggtggatcacttgaggtcaggagttcaagaccagcctggtcaacatggcaaaaccctgtctctactaaaaatacaaaaattagccaggtgtggtggcgggtacctgtaatcccagttactagggaggctgaggcagaagaatcacttgaacccgggaggcagagattgcagtgagccgagatcacatcactgcactttagcctgggcgacagagcaagactccatctcaaaaataaaaataaaaataaaaaataccgagaaattcccccaaagacctagctcagggctcactctccatcattagggggaaagaagaagaggaggccagggaggcgggcagagaccagggcagtgtgggctcctggaggcagcttctatgtttaaaagggcggcttcaggaggaaggggaccaaccgtgtcaggcactgcccagagaccaaggatgacaaggatcacaagtgactggtcatcatggtcactttgaccagtgcagctttggyggaggggtcaggggtcccctgtctggagtgcatttcggaggcccgaaaggggatgtgatgtgatttgg

SEQ ID NO: 481687 - DNA, 635 bp, Homo sapiens
agatcgtgccactgcactccagcctgggtaacagagcaagaccctgtctcaaacaaactaacaaggcaaacgtataacacaaaattaagaaagatgactactgattctaratactggaacaaggaatagtgactccacccagagccgtgcaaacctgggctcactcctgagtgagtcccaccaacgtggcagttcattctcacgtgacactggccggcccacggcaggatgggcatggtcaccccctagagcaagctgagggctcaggcctgtttgagagggaggggcaggagggcctcttctgacctcagccatatggctgggagaaaacctctgcccctcacctggaggccctggaaggaggctctctggccggaagagtcaacacgaagggagatcaggcttgctaggggcgctcactggaaagcccccttccagtgttggccatgatttctgtctgtgacattaacagtggcctactttgggccgtggggcttggaaagtgcacgtgtgcttcttcccctaggctgtgggctggagggcctcactccagcctactcagaaggaaagcgcaacctcttgcagaacctgggccagggctgtttgggagcccgaggagcctgtgcttgacagca

SEQ ID NO: 481688 - DNA, 611 bp, Homo sapiens
acccccggggtaggcagacactatgtttggaacagagagcrcacagacagggatccttctttttatacttaacattgcaaggataatgtaagtacaccaaatgttggccaggcatggtggctcatgcctgaaatcccagcactttggaggccaaggcggacgaatcacctgaggtcaggagttcgagaccagcctggccaacatggtgaaaccccgtggctactggaaatacaaaaattagccaggcttggtggcacatgcctgcaatcccgctactggggaggctgaggcaggagaatcatttgaaccagggaggcggaggttgcagtgagttgaggtcgcaccactgcactccacactccagcctgggtgacagagtgagactccgtctccgaaaaaaaaaaaaaaaaaaagtacaaaaattagccaggcttggtagcacgtgcctgtagtcccagctactggtgaggctgaggcaagagaatcacttgaatctgggaggcagaggttgcagtgagctgagatcgcaccgctgcactccagcctgggtgacagagtgagaaaaaaatgtttgaagtagcaaaggtcatccacaatcctcttccatccct

SEQ ID NO: 481689 - DNA, 611 bp, Homo sapiens
acccccggggtaggcagacactatgtttggaacagagagcacacagacagggatccttctttttatacttaacattgcaaggataatgtaagtacaccaaatgttggccaggcatggtggctcatgcctgaaatcccagcactttggaggccaaggcggacgaatcacctgaggtcaggagttcragaccagcctggccaacatggtgaaaccccgtggctactggaaatacaaaaattagccaggcttggtggcacatgcctgcaatcccgctactggggaggctgaggcaggagaatcatttgaaccagggaggcggaggttgcagtgagttgaggtcgcaccactgcactccacactccagcctgggtgacagagtgagactccgtctccgaaaaaaaaaaaaaaaaaaagtacaaaaattagccaggcttggtagcacgtgcctgtagtcccagctactggtgaggctgaggcaagagaatcacttgaatctgggaggcagaggttgcagtgagctgagatcgcaccgctgcactccagcctgggtgacagagtgagaaaaaaatgtttgaagtagcaaaggtcatccacaatcctcttccatccct

SEQ ID NO: 481690 - DNA, 520 bp, Homo sapiens
gcattctaggtcgaagacctaagaggtgcttagcattcagtcatatagaaaaaggaaaaatgacagacttagggaaattgaataagaacagttttgtcggctgggcacagtggctcatacctgtagtcccagtactttgggaggccgaggcaggtggatcacgaggtcaggtgttcaagaccagcctggccaagatggtgaaacccccatctctactaaaaatacaaaattagccaggcatggtggcacatgcctgtaatcccagctacttgggaggctgaggcaggagaatcacttgaacccaggaggtggaggttgcagtgagccgagatcgcgccattgcactccagcctgggcaagaagagtaagactcygtctcaaaaaaaaaaaaaaaaaggaaagaaaagaaaaagaaaagttgaaaaaatagtacagagagttctcgtatctccttctccgggcttcctgtctcgtcaacaccttcagagccatagtacaaatatggaaaccaggaaattac

SEQ ID NO: 481691 - DNA, 311 bp, Homo sapiens
ccctccttcaaaaagcaactcagaagcccatgaggcctgaactcccaggagccatgggagaacaccgtgtgccttcccgccytctaccccagcaagagcccagccagcggtgcctccctctcctgtgtccacagtgtcactcacatcttcacagccccaagttctgtaagagtaaggacctgagcatcggttcatctggcactcctcccggcatctcatgcagtgacctgctcagtgagagtgtgtggagttggactctgcaactgttcttagaactgaaaactctgctttcctttcgaagttaatgcact

SEQ ID NO: 481692 - DNA, 599 bp, Homo sapiens
acatcttgcccaccactccctggatgggccaacgcatactcctattggcctaccctccctagatgcatcatccaacctggtcagaaaaatagttgttccttgaagcaaactgtctcaacgacagagaggaaaacaaatctcacccacttactcatcttccacacatctgtaatccaggtaccctaggaagcaggtgatcttacaccccagtttgcctgtacacattcatgttgtaaaaagttggacatcgagttgcttttttttttttttgagacggagtctcactctgtccctcaggtggagtacaatggtgcaatcttggctcactgcaccctccgcctcccaggttcaaatgattctcctgcctcagcctcccaagtagctgggattacaggcatgygccacgacacccagctaatttttgtatttttagtagagacagggttcccccacgttggccaggctggtcttgaactcctgacctcagataatccacctgcctcggcctcccaaggtgcagggattacaggcgtgagccactgtgcctggccctgagttgcttttaactttctactattaatttgcagagcagaaataac

SEQ ID NO: 481693 - DNA, 595 bp, Homo sapiens
gctgaaagtctgcagcatttaattaagcgaagtaggccgggcgcggtggctcacacctgcaatcccagcactttgggaggctgaggcaggcgcatcatgaggtcaggagttcatgaccagtctggcccacatggtgaaaccctgtctctactaaaaatacaaaaaattagccgggcgtggtggcagacacctgtcatcccagctactcaggagactggggcaggagaattgcttgaacccaggagacggaggttgcagtgagctgagaccgtgccattgcactgcagcctgggcaaagsgagactgagagcgagacttggactcaaaaaaaaaaaaaaaaaaaattaagcacagatttacgggccagtgactccattcccaagcataggaaagttctcacacaaaccctagaaacggatggttcatcgtgatcatgtttggatcacgtttgtgattacaagaagctgtctcattatttagggaatcaaatataaaatgtggatcttaaatgcatgctatggaggacggtgcagcagtcaaggacaacaaaccaagtctacctgagtaaccgacggccacactaaatcaccgtaac

SEQ ID NO: 481694 - DNA, 671 bp, Homo sapiens
cagctgtaagtcaacaaggtacagccacatcaagaccaaatgtggctcacagcctrtaactgtataggttgaatggaatgtgagaactatttttatattttaaaaggtctgtaatagaaaaaataatatgcaacagaaactatatatagcatgtaaagcttaaaatctctacaatctggtcttttataaaaaactttgccaacctctgacctaaaatagtaaagacaactctgaaaagaaaaagctggaagactaaactctatcggacttcaaaagttatgaagttgtcaagagagggtagtcttggaataaaagataagtagctatatggaacagaacagttgagaagcagacacacgtataaagacaaccaatatttcaagaaagaagcaaaggcaattaagtggagaaaggatagtcttttcaataaatgatgctagaacaatgagatacaaagaaaaaaaaaaccccaaattttgatccaatctttgtgccatataaagattttaactcaaagtgcaccatgtacttgtaccacaagtacaacatattaaatatattgtaatacagatactcctcaacttatgacagggctatgtcctgacaaacctattgtaagttgaaactatcataagttgacaatttgtaaccccatcataaattgagaaaca

SEQ ID NO: 481695 - DNA, 671 bp, Homo sapiens
cagctgtaagtcaacaaggtacagccacatcaagaccaaatgtggctcacagcctataactgtataggttgaatggaatgtgagaactatttttatattttaaaaggtctgtaatagaaaaaataatatgcaacagaaactatatatagcatgtaaagcttaaaatctctacaatctggtcttttataaaaaactttgccaacctctgacctaaaatagtaaagacaactctgaaaagaaaaagctggaagactaaactctatcggacttcaaaagttatgaagttgtcaagagagggtagtcttggaataaaagataagtagctatatggaacagaacagttgagaagcagacacacgtataaagacaaccaatatttcaagaaagaagcaaaggcaattaagtggagaaaggatagtcttttcaataaatgatgctagaacaatkagatacaaagaaaaaaaaaaccccaaattttgatccaatctttgtgccatataaagattttaactcaaagtgcaccatgtacttgtaccacaagtacaacatattaaatatattgtaatacagatactcctcaacttatgacagggctatgtcctgacaaacctattgtaagttgaaactatcataagttgacaatttgtaaccccatcataaattgagaaaca

SEQ ID NO: 481696 - DNA, 525 bp, Homo sapiens
tggagggtctgtggggagggaggacaggactcagcaggggccccttcctgggacccaggtgtcccctttccccsactcacagtgcacggagaggctgagagagacgtgctgggagcccagagggtgctgagcgtggcaggtgaactctccttcgtgctccatttgaatgggtggcagctccaggaccccggggtctgagggctgggaggggcccacggtctgtccccaccgggtccagctcagcctggctggggggctgctgtgggtgacacagaccaggcgcaggctttggccctccaggaccgggagggatgtgccgttcccgaggttttccaggactagggaaggaagaggcagaatcgacgtgcagctcagggctcagggaccctcctgtgtggggaccctccagactcctgggcccccagtttggcactgagaggccctggctcctctgtctcctttcctacctgtcctgtttgcttgggaaaccatcactctcaggttctctggaggatctgaaatgga

SEQ ID NO: 481697 - DNA, 640 bp, Homo sapiens
catcaacgggcaatcctcctgagttttgttcccaaagagaaaaggcaatgcctactacacataccttatctttaaccaagagaattgggctggatttctagagaatagcaatggattttgagccaagtggtcgcttgagttccagtacaggagcgcacagtcctcatgggggcatccgaaatggaatctaagatgttgaagaatatacactgttgtaggcacaaacatcctgcagggtagacaacaggctaccctgtaaacgctcctcaataaaatctgagcagaaacagacgagtataggtggggcacaacagctcacaccactaatcctagcactttaggaggccaaggtggaagatcacctgagctaaggagttcgagaccaacctgggcaacatggggaaaccacatctgtacaaaaaaaccaaaagttagccaggtgtggtggtgtatgcctgcagacagctattcaggaggctgagctgggagttggaggttgcagtgagccgagatcgcaccactgcactccagcctgggcracagagtgagactctgtctctaaaatgaataagttaaaaaataaatacataacaataatacaaaaattagctgggcgtggtggcatatgcctgtaatccca

SEQ ID NO: 481698 - DNA, 560 bp, Homo sapiens
gagaattaggcaggatttctagagaacagcaatggatttttgagccaagcgttcacctgagttccaacatagggacacacagtcccgatgggagcatccaaaatggaatctaaattagccaggcgcccacctgtaatcctagctactcagcaggctgagacaggaggatcgctggaacccaggaggcrgaggtttcagtgaaccgagatcatgccattgcactccagcctgggtgacagagtgagactccgtctccaaaaaataaaaataaaaaaaaagaatatacattgtcatacacacaaacattctccaggatagactactgtctaggccgtaaaagctcctcaataaaatttgaacagaaatacacaagtacaggtggggtgcagtggctcacacctgtaatcccagcactttaggagtcggaggcaggaggattacttgagctcaggagttcaagactagcctgggcaacatggtgaaacctcatgtgtccaaaaatacaaaggttaccaggtgttgtggttcatgcctgcagatgctaactcaggaggctcagc

SEQ ID NO: 481699 - DNA, 560 bp, Homo sapiens
gagaattaggcaggatttctagagaacagcaatggatttttgagccaagcgttcacctgagttccaacatagggacacacagtcccgatgggagcatccaaaatggaatctaaattagccaggcgcccacctgtaatcctagctactcagcaggctgagacaggaggatcgctggaacccaggaggcggaggtttcagtgaaccgagatcatgccattgcactccagcctgggtgacagagtgagactccgtctccaaaaaataaaaataaaaaaaaagaatatacattgtcatacacacaaacattctccaggatagacyactgtctaggccgtaaaagctcctcaataaaatttgaacagaaatacacaagtacaggtggggtgcagtggctcacacctgtaatcccagcactttaggagtcggaggcaggaggattacttgagctcaggagttcaagactagcctgggcaacatggtgaaacctcatgtgtccaaaaatacaaaggttaccaggtgttgtggttcatgcctgcagatgctaactcaggaggctcagc

SEQ ID NO: 481700 - DNA, 560 bp, Homo sapiens
gagaattaggcaggatttctagagaacagcaatggatttttgagccaagcgttcacctgagttccaacatagggacacacagtcccgatgggagcatccaaaatggaatctaaattagccaggcgcccacctgtaatcctagctactcagcaggctgagacaggaggatcgctggaacccaggaggcggaggtttcagtgaaccgagatcatgccattgcactccagcctgggtgacagagtgagactccgtctccaaaaaataaaaataaaaaaaaagaatatacattgtcatacacacaaacattctccaggatagactactgtctaggccgtaaaagctcctcaataaaatttgaacagaaatacacaagtacaggtggggtgcagtggctcacacctgtaatcccagcactttaggagtcggaggcaggaggattacttgagctcaggagttcaagactagcctgggcaacatggtgaaacctcaygtgtccaaaaatacaaaggttaccaggtgttgtggttcatgcctgcagatgctaactcaggaggctcagc

SEQ ID NO: 481701 - DNA, 427 bp, Homo sapiens
aatttctccatgttggccaggttggtctcaaactcccgacctcagtgatctgcctgcctcggcctcccaaagtgctgggattacaggcgtgagccaccacgccaggcatgactgcttttcttgcaccattcctagcctggtcacttcccctctgtctccaatggctgcctccaagagacaggcaaactttcccactctccaatttcctcacctctcagatgggggcacagtgatgagaggaagcatgttcttccacccactcttccccacgtgccaggcactcagcaacgggctttccctgacscaatgctccaaatcctcacaacactgctgggagtagattctgttgttatcctggtttcctgggtgagaaaagtaaagcgggtaggtgggacagtattgaggactggctaggaatcccagctcc

SEQ ID NO: 481702 - DNA, 605 bp, Homo sapiens
gggtcccccttgtcttttgctggcaggatggggcgatggcaacatttacttaagctgtggagtctggcactgccgcagccaggcgccatctggaaagcccttttcagaaagctgtgtcccccccacccccaaaaggaacttaggggaacaggacttgggcagagctgtgggacttgtttcttgggcagaacctgctcactgaggcacctgagccgggctgggttyccctgggagccaggtagataagacaggtctacctcggggtgcatgtgggctctttgctgtctgtggggccctcggttcatcctcgagccaggtctggtttaggtttactagggctgtattttccatctatttgttttgtgttgcattttgcttactctcttcacctaagtccttgtatattgtgagtatgatggggtggcgccagccgggattggtcagtgactgttccttccctgtaatagcagggctgattagcagaatataagaaatgaatgctgtgcctctgaaatgtgcctgtgagacaggatctagaactcagcggctcagcttgcaacaaacagggcaaactaagcacagagatttgctaccatcctttccct

SEQ ID NO: 481703 - DNA, 595 bp, Homo sapiens
acagagtgagacagacacatgggagggtttaccctggggcctgtgggagcaccttggtgcccagtttgttctcaaaggatctgaaagggcaaggaaccacttcaattagctcagcgacttctttggcaaggaggagtaactctttccctctgtagaattaggccaatcctggtgacttcctggaggaagcagacaagtctctttyagccactgtggctggctgctgttctttccctggctgggagccacagtctaagtaaatgccttgtcacatacagaagaggccctgggagaagagtccagtgggtgcttcccaggaaggcatcccaggctgggaagggagggagagggccggagcaggatgggagctgctgaggcccagtgaaagctttgttgcaccctacacaccacatagggggcctccccgagggagagcactctgggggacgcaggacagttctccacaccagaaagtgagaggcaggctcctggctccagctcatggccccctgaccatgctgtccttggaggcagtggctcatgaatggaggaagacacatcaggtggtcaggggtgtgaggctcctactgggacc

SEQ ID NO: 481704 - DNA, 408 bp, Homo sapiens
ctgacctctatgaaagcctgaccctcatctttgtgggacaggacatgactacaaatgaaggccacatactagacatgtgagcggggagctctgtggcctcctaaagtgygagggccccgggtctaaagctggacagccttgtctctgtcacccattgcttcctgttggatcagccaatgggatgctccggcaggggatggaagtgaaagaggtgactaaaatcagggtatttatcctcttaggtccttctcaagggactgccttgtcccccaaggaaaaagcaaatctccatggcactctctcctcattttccagtaactgtttcctcccctcacctctagcagtctaggggtggtaacgttcctttcctaactgttactagctcaggggctcctgcctacaactttg

SEQ ID NO: 481705 - DNA, 408 bp, Homo sapiens
ctgacctctatgaaagcctgaccctcatctttgtgggacaggacatgactacaaatgaaggccacatactagacatgtgagcggggagctctgtggcctcctaaagtgtgagggccccgggtctaaagctggayagccttgtctctgtcacccattgcttcctgttggatcagccaatgggatgctccggcaggggatggaagtgaaagaggtgactaaaatcagggtatttatcctcttaggtccttctcaagggactgccttgtcccccaaggaaaaagcaaatctccatggcactctctcctcattttccagtaactgtttcctcccctcacctctagcagtctaggggtggtaacgttcctttcctaactgttactagctcaggggctcctgcctacaactttg

SEQ ID NO: 481706 - DNA, 408 bp, Homo sapiens
ctgacctctatgaaagcctgaccctcatctttgtgggacaggacatgactacaaatgaaggccacatactagacatgtgagcggggagctctgtggcctcctaaagtgtgagggccccgggtctaaagctggacrgccttgtctctgtcacccattgcttcctgttggatcagccaatgggatgctccggcaggggatggaagtgaaagaggtgactaaaatcagggtatttatcctcttaggtccttctcaagggactgccttgtcccccaaggaaaaagcaaatctccatggcactctctcctcattttccagtaactgtttcctcccctcacctctagcagtctaggggtggtaacgttcctttcctaactgttactagctcaggggctcctgcctacaactttg

SEQ ID NO: 481707 - DNA, 301 bp, Homo sapiens
ctaaaatacaaaataagtaaatcaataaaagtttaaaaaatcctttcacttctgccatgcaccacatcacattcacaggtctcacccacaccaaggaagggggtcaggctgggcgtgtacaccagggagcaggaatgttgggaaccacataacgcattgtcctgatggaacttccatttcaaccagggagatacactctgcatgtaactggaagggcggcaggcaggcrcagaagagcgggcactgtgggagggcatctggctccatccccatagcagtagggcctggcccagtgcagggc

SEQ ID NO: 481708 - DNA, 301 bp, Homo sapiens
ctaaaatacaaaataagtaaatcaataaaagtttaaaaaatcctttcacttctgccatgcaccacatcacattcacaggtctcacccacaccaaggaagggggtcaggctgggcgtgtacaccagggagcaggaatgttgggaaccacataacgcattgtcctgatggaacttccatttcaaccagggagatacactctgcatgtaactggaagggcggcaggcaggcgcagaasagcgggcactgtgggagggcatctggctccatccccatagcagtagggcctggcccagtgcagggc

SEQ ID NO: 481709 - DNA, 633 bp, Homo sapiens
taatggtgagcactctggactctgaatccagaaatacattcaaagaattaagaacactatgtttaaataattaaagaaaaatcactgcttcacattctatcaaaaactgaactcaaaatggatgagcarcctaaatgtaagagataaaaccctaaaactcttagaagaaaacctagaagttaatcataatcttggatttggcaatggattcttagataggacaccaaaaacatgagcaatgaaagcaaaatagataaattagactttatgaaaattaaaaactttgtatcaaggaggttatcgataaagacaaaaagatgacctacagaatgggagaaaatatttgcaaagcacacatctactaagaatcaggcattcagaatacataaagaattcttataactcaacaagaaaaacataaatgcccaattaaaaattgagcaaagtacttgaataggcctttctccaaaaacatatgcaaatggctaagaagtacataaaaaacactcaacagtattagtcactagggaaatggaaatcaaaaccacaaatgaggtaaaactttatatttcatacagaaaataacatggtgaggatgtagagaaatcaaaactattccacattattggtgca

SEQ ID NO: 481710 - DNA, 633 bp, Homo sapiens
taatggtgagcactctggactctgaatccagaaatacattcaaagaattaagaacactatgtttaaataattaaagaaaaatcactgcttcacattctatcaaaaactgaactcaaaatggatgagcaacctaaatgtaagagataaaaccctaaaactcttagaagaaaacctagaagttaatcataatcttggatttggcaatggattcttagataggacaccaaaaacwtgagcaatgaaagcaaaatagataaattagactttatgaaaattaaaaactttgtatcaaggaggttatcgataaagacaaaaagatgacctacagaatgggagaaaatatttgcaaagcacacatctactaagaatcaggcattcagaatacataaagaattcttataactcaacaagaaaaacataaatgcccaattaaaaattgagcaaagtacttgaataggcctttctccaaaaacatatgcaaatggctaagaagtacataaaaaacactcaacagtattagtcactagggaaatggaaatcaaaaccacaaatgaggtaaaactttatatttcatacagaaaataacatggtgaggatgtagagaaatcaaaactattccacattattggtgca

SEQ ID NO: 481711 - DNA, 633 bp, Homo sapiens
taatggtgagcactctggactctgaatccagaaatacattcaaagaattaagaacactatgtttaaataattaaagaaaaatcactgcttcacattctatcaaaaactgaactcaaaatggatgagcaacctaaatgtaagagataaaaccctaaaactcttagaagaaaacctagaagttaatcataatcttggatttggcaatggattcttagataggacaccaaaaacatgagcaatgaaagcaaaatagataaattagactttatgaaaattaaaaactttgtatcaaggaggttatcgataaagacaaaaagatgacctacagaatgggagaaaatatttgcaaagcacacatctamtaagaatcaggcattcagaatacataaagaattcttataactcaacaagaaaaacataaatgcccaattaaaaattgagcaaagtacttgaataggcctttctccaaaaacatatgcaaatggctaagaagtacataaaaaacactcaacagtattagtcactagggaaatggaaatcaaaaccacaaatgaggtaaaactttatatttcatacagaaaataacatggtgaggatgtagagaaatcaaaactattccacattattggtgca

SEQ ID NO: 481712 - DNA, 517 bp, Homo sapiens
gtgaattcaggcaaaggtaggatggtaacatagccttaattaagtattcacagcctctttaatacttcagtgctcttggattcgctactaaaatctgtgaattatacctcattgaaaaatgtcyttaatcgactctgacatgttttattggaggcagaaaaaatgtttcagtatgatagataaggttaaaaatgttactactctgatcatttactctagtgccttgcaaaagaactccaaagccaaaaaccatttacatcattcatcggatgcaatggagaaaaaaagccttatctgacagcccattttagctgatgggacaaagtgcacattttcaattttctgacaaagttatgttgtttatgtagataagggtaaaaacaactgtaacatttctacagcatgccatgagggctggaaatgtggcttcaaatgtgaagtatctccaagccacacggagcgccacgcaaccaacaaaaagccactctttgggcatcagacgaaaacagtgcatgga

SEQ ID NO: 481713 - DNA, 482 bp, Homo sapiens
agtccagaccggtgtttcactcctagctcttccaggggacagcggcagtggaagtgatccatctttggtggctcactcagctgaggcttattgtaaccctctttgagccacctcctccagtgaatcttccattcagtcacctggcctttagttatttatttttatttatttatttattttgagatggagactcgctctgttgcccaggttggagtgcagtagtgtgatctcggctcaaggcaacctccacctcctgggttcaagcaatactcctgcctcaccctcctgactagccgggactaaaggcctgtgccagcacacctggctaatttttgtatttttagtagaaatggggtttyaccatgttgaccaggctggtctcgaactcctggcctcaagtgatccacccgccttagcctcacaaagtgctgggattgcaggcgtgagccactgcacctggccaactggtgtttattaagcag

SEQ ID NO: 481714 - DNA, 446 bp, Homo sapiens
cagccttgacctcctgggttcaaacgatcctgcctcaacctcccgagtaggggggaccatgggcacacaccactacattctgttggagttgaccacctkttttttttttttgagttggagtttccgtcttgttgcccaggctggattgcagtggcataatctcggctcattgcaacctccgcctcctgggttcaagcgattctcctgcctcagcctccctagtagctgggattacaggcgcgtgccaccatgcccggctaatttttgtatttttagtagagacagtgtttcaccacgttggccaggctggtctcaaactcctaacctcatgtgatccacctgcctcagcctcccaaagtgctaggattacaggtgtgagccattgcccctggccgtggagttgaccactttgagcccagtgtagaggccaggggtcttcggcttct

SEQ ID NO: 481715 - DNA, 553 bp, Homo sapiens
aggcccagcatatgcccacagacacctgtctgtctgggtgtcagcatgcaggacaatgcagcagargttgtgtgtctctaggttgtgtgcctgtttgtggggccctagtctggctggcagtggacacgccttcactgtggggcgtgtatgtgtgtacatccacgtggatttggcatgtgtgtgcaagggatcaggtcaggtggggcatctgcccgtgtatccctgggaaagcctcctggtggtggaaggccctagatccatcctctctcgagtgctcctctatgcagcaacccctcaggtgggcctggcttccccactaccccaaaacttgagttccctgcatcacccctggctgcctgtttctgcacgagtgactctgtccctcaaataacagttaaacctgccctggtccctcccctccactggtcctagccgtgtcttcagagtccagggcaaagaaactgctcggactcctggcctctgcagcaccataggctgtgactgtccctgtcctgctcagcttccccactcctgccagcaatcttacccccag

SEQ ID NO: 481716 - DNA, 553 bp, Homo sapiens
aggcccagcatatgcccacagacacctgtctgtctgggtgtcagcatgcaggacaatgcagcagaagttgtgtgtctctaggttgtgtgcctgtttgtggggccctagtctggctggcagtggacacgccttcactgtggggcgtgtatgtgtgtacatccacgtggatttggcatgtgtgtgcaagggatcaggtcaggtggggcatctgcccgtgtatccctgggaaagcctcctggtggtggaaggccctagatccatcctctctcgagtgctcctctatgcagcaacccctcaggtgggcctggcttccccactaccccaaaacttgagttccctgcatcacccctggctgcctgtttctgcacgagtgactctgtccctcaaataacagttaaacctgccctggtccctcccctccactggtcctagccgtgtcttcagagtccagggcaaagaaactgctcggactcctggcctctgyagcaccataggctgtgactgtccctgtcctgctcagcttccccactcctgccagcaatcttacccccag

SEQ ID NO: 481717 - DNA, 607 bp, Homo sapiens
tgacctcctttattctgaagggagtgggcatcaagggactggagatgagacgtgtgagaaaaactggctgagaacagaggaagagcttccccatttgcattcccttgaggtctggagttgtggaagaaagccaaggaggtccctatttaccaacccagattcctaggcattaccaggagaggccagcagagggcgctgtagcccagcatatggacatgaagggaaggggactttccagactaaaggccctgccacctcctctctggcgcattctagggtcccttttagccaccaaccttggttccttctcacgttctgatgccctacccgagattctgagactagtcagtttccctcccttgtttttgttgcccrtctccccttcacaaggctctgagctcccaccagggaagattggggctgaattggcttctcctgtggcccagcattgtctctcacaaggagccaggaacacagcatgtatgagggaacgaagacataaggttgctaaggaaggggaagatgggccatggggatgcaatctggagtcttttaccctggctcactcctccaggaagccctccctgcacaccaccccaggctctca

SEQ ID NO: 481718 - DNA, 541 bp, Homo sapiens
aaattataaaaagtgacaacagtaacttaaaaaaaaaaaaaaaaaaaaaaaaggaaggctgggcatggtggctcacacctttaatcctagcactttgggaggccaagacaggcagattgcttgagctcaggagtttgagaccagcctgggcaacatgacaaaacctcttctctacaaaaaacaccaaaaaattagccaggcatggtggcacatgcctgtggtcccagctactcaggaggctgaggtgggaggattgcttaagcccgggaggtcaaggttgcagtaaactatgatcgctccactgcactccagcctgggcaacagagcgagaccctgtctctctctctctctctctctctctctctcwcacacacacacaaagagggagacagcagggtggacaaaagccagaggtgcatgcactctgaagacaccaaccagcggagtctgagatcagagggaagacagagccaaaagccaggcaacaaagatgagagacataaaacaagaagaaccgtaactggaaatctcagaagcccac

SEQ ID NO: 481719 - DNA, 488 bp, Homo sapiens
ctggtggcaccgtgcacctggagatcggcctgctgctccgcaacttcgaccgctacggcgtggagtgctgagggactctgcctccaacrtcaccaccatccacaccccggacacccagtgatgggggaggatggcacagtggtcaagagcacagactctagagactgtcagagctgaccccagctaaggcatggcaccgcttctgtcctttctaggacctcggggtccctctgggcccagtttccctatctgtaaattggggacagtaaatgtatggggtcgcagggtgttgagtgacaggaggctgcttagccacatgggaggtgctcagtaaaggagagcaattcttacaggtgtctgcctcctgacccttccatccttcaggtgtcctgttgccccctcctcccactgacaccctccggaggcccccatgttgacagaccctcttctcctaccttgtttcccagcctgactctccttccgttctg

SEQ ID NO: 481720 - DNA, 532 bp, Homo sapiens
tgctggtggcaccgtgcacctggagatcggcctgctgctccgcaacttcgaccgctacggcgtggagtgctgagggactctgcctccaacgtcaccaccatccacaccccggacacccagtgatgggggaggatggcacagtggtcaagagcacagactctagagactgtcagagctgaccccagctaaggcatggcaccgcttctgtcctttctaggacctcggggtccctctgggcccagtttccctatctgtaaattggggacagtaaatgtatggggtcgcagggtgttgagtgacaggaggctgcttagccacatgggaggtgctcagtaaaggagagcaattcttacaggtgtctgcctcctgacccttccatccytcaggtgtcctgttgccccctcctcccactgacaccctccggaggcccccatgttgacagaccctcttctcctaccttgtttcccagcctgactctccttccgttctgggtccccctcctctggtcggctcccctgtgtctcatcccccg

SEQ ID NO: 481721 - DNA, 648 bp, Homo sapiens
gcatctggacagaggctggtagcatcatttctatttgaatctggcatggggcaaaccctcactgaacatcttattatgtgaaagagtcattccaagaacacaagtgaagaaagcttcttaacctgcttcctgtgtcttgctgagttggcttagaatctttcttccttttgcttgactcctctagtgagctcaacagagagattgatttaccctcaagggagatgagaaargatgtcttttacaggcatcctaagaccctgctctttggaagggattcctcaactggcagaagacagtctggggaccctggtctcaaccttgacactgctcatccagggggtggcctctgcaactcacagatgcttcagttcctggggaatggcatgcacatgtgcatcacttagcctggaaggatcctttcatcccatgcacctgtccttgtgtttcagctcaggcatcttttcctctaggaagccttctctgtttgtctgtctctagactgacgtgcattcactagactttgtccttatcaagaactcgtcttagggccttgagtttcctcatgcctctgcgtcctgtgttctgtgatggcttggttcaccctactcctttccatgtcctcagcacctaacacaggttgtgacagct

SEQ ID NO: 481722 - DNA, 458 bp, Homo sapiens
ggctcactgcagccttgaactcctgggcctcagcgaccctgagtagctggaactacaaatgagtgagtgccaccacacctggagatatacatatatatataatcctctatatgtataattatatgtatattacacaaatatattctaattgtataattttaggattagctgtagtctcagtgctcccgtgcaaaactgtttamtgtgtcttcactaggaagattactctgtagagaaatactttcatttgagaaggagatgtcgagtgtaagacaagacaggagaaaatggaagttggcaagattttggggcataatttttttctataagcacacacacacacacacacacacacacacgcaggatcatcagtcagaattatctctctaagtgtgaggagcaaacaatggaggtgtcaaaagagaatcaaaggagtgggtggagagtcttctgttgca

SEQ ID NO: 481723 - DNA, 683 bp, Homo sapiens
ataatgttactgtgatttttttttttaaatcttatgtactagagatacaagctaaaatatttatgggtgaaatgacctgatgtctggccaggtatggtggttcatgcctgtaatcccagcactttgggaggctgaggcgggcggggattgcctgaggccaggagtttgagaccagtttggccaatatgacaaaaccccgtctctactaaaaataagaaaaattagccgggcatggtagcacatgctggaattccagctacttgggaggctgaggcaggagaatcattcgaaccttcgaggtggatgttgcaatgagccaagcacatgccactgcactccagcctgggtgacagagcgagactctgtctcaaaaaaaaaaaaaaatgatgtctggggtttactctaaaacattctatcagaaacaaagaaggtcacaaggctgggtgaatagatgaaatgggaatggaaaatagttagtggttgttggrgctgatgggtgactcagtctcctctctgcttttgagtatgtttgcaaatttccataataaaaagattttttaaatgagtaaggctgtcaagaaaagtcacatgtcccactttctgggagcagtaacacggccatcgcagctcatattttccttttcttccatttcagcatggcgaggacaacatccttgctgcct

SEQ ID NO: 481724 - DNA, 602 bp, Homo sapiens
agcctcccctagctccaaggaaggtgrcaaatgttatttaacttttcagcctttcctgaggaggaagccagagaaaaaatgaattgagagtatctgttggggtggccagccagcactgcctggtttcatggggaaggaaaagcagtaataatgaacattaatgggtgctgactctgtgccaagccctgccgtaagcgcctcacgtgcatgatctcattcagttcttgtaactaccctaagacgtcactgctgtgatatccccatggtaatgatgaggaaactgaggcacgagtggtgaagctgcctgccaggtagaggagctgggacagggaggcatgcagcctgggtccagggcccctgttcttagccactacactttgttgcctcataagaggtccgggggtgcggggggtggggtacaggggaccaggctgctcactgtctggcctgggtttaaattcttccagcaagggcagagcccagcagtgtgttttgctttggggaagttgtgatcattaaaaaactgtcttgtgaatcacatccgcccctgtgtaactaactacctcccactggttcaggtctagtcctcgggagagcaccag

SEQ ID NO: 481725 - DNA, 419 bp, Homo sapiens
catgttggccaggttggtctcaaactcccgacctcagtgatctgcctgcctcggcctcccaaagtgctgggattacaggcgtgagccaccacgccaggcatgactgcttttcttgcaccattcctagcctggtcacttcccctctgtctccaatggctgcctccaagagacaggcaaactttcccactctccaatttcctcacctctcagatgggggcacagtgatgagaggaagcatgttcttccacccactcttccccacgtgccaggcactcagcaacgggctttccctgacgcaatgctccaaatcctcacaacactgctgggagtagattctgttgttatcctggtttcctgggtgagaaaagtaaagcggggaggtgggacagtattgaggacyggctaggaatcccagctcc

SEQ ID NO: 481726 - DNA, 621 bp, Homo sapiens
ctgggtgcaagtggtaggcaggctgtggggggggctccacttcactgaaatctaccaccattatagaagttttagagtagcctgcaaaagataaatttatggcacagccagaagacaaaatcatctgccgtgagcagttctggatatgaacttrctgctggttcataccatcttctacgaaccatagtctaaacttagatgcagttttttgtttttttttttccgagatagggtcttgatctgtagccaggcttgtgtgcaatggggtgatcttggctcactgcaacctctgcctcccaggttcaagcgattctcctgcctcagcctcctgagtagctgagattacaggcacacgctactatgcccggctaatttttgtattttcaatatagatggggtttcaccatgttgaccaggctggtcttgaactcctgacctcaggtgatctacccacctcggcctcccaaaatgctgggattacaggcgtgagccaccacgcccaaccaaagcagtttctcttaaagtaacaatatacgtgtcagtcaataacagtgggaatgactcctgtgactactgtctctcgtaatcctttcaaaaacatttgcttctccctttgcaacc

SEQ ID NO: 481727 - DNA, 621 bp, Homo sapiens
ctgggtgcaagtggtaggcaggctgtggggggggctccacttcactgaaatctaccaccattatagaagttttagagtagcctgcaaaagataaatttatggcacagccagaagacaaaatcatctgccgtgagcagttctggatatgaacttgctgctggttcataccatcttctacgaaccatagtctaaacttagatgcagttttttgtttttttttttccgagatagggtcttgatctgtagccaggcttgtgtgcaatggggtgatcttggctcactgcaacctctgcctcccaggttcaagcgattctcctgcctcagcctyctgagtagctgagattacaggcacacgctactatgcccggctaatttttgtattttcaatatagatggggtttcaccatgttgaccaggctggtcttgaactcctgacctcaggtgatctacccacctcggcctcccaaaatgctgggattacaggcgtgagccaccacgcccaaccaaagcagtttctcttaaagtaacaatatacgtgtcagtcaataacagtgggaatgactcctgtgactactgtctctcgtaatcctttcaaaaacatttgcttctccctttgcaacc

SEQ ID NO: 481728 - DNA, 559 bp, Homo sapiens
acttcctgtcccctgaagggaacttagtatccacctttctcttcttctcacctcccaaactgttcagaaaggggaaaaatgcacctgcaggccccagggctttggtcagcacggggaggggtaatgtaaatttcccctgtattcaagagaaaaggggccgggcatggtggctcaggactgtaatcccagcactttgggaggccaaggcgggcagatcaccagaggttgggagttcaaaaccagcttggccaacatggtgaaacccggtctttactaaaaatacaaaaattagccgggtgtgctggcgcgcgcctgtaatcccagctactcgrgaggctgaggcaggagaatcgcttgaacccccagaaggcggaggctgcagtgagccgagatctcgccgctgcactccagcctgggggacaaagtgagactccatctcaaaaaaataaaaagaaaaagaaaagagaaaaggaagacgggctgggagcttgcctgaaactccaggcttacgttagttaactcatggcctccagtgtggccggtacgagtgcttcaatgc

SEQ ID NO: 481729 - DNA, 587 bp, Homo sapiens
gacacgaaagtagctcactaagtcagctagaaaactgacgagagtggcttaccaccccractacaaaactagaggtggcaaaagtggctcgccaccccaactgcaaaactagaggtagcaaaagtggcttgccaccccaggtacaaacatgagaactaaaagtatataaaagtgtgtaaatggagggacctaattaggctcatcagtcgcaaaataagaaatcacaaatctcttaacgtaaactgtatgctccaagaaaattgtggggcaaactgagactaataacaatctacatatgactaataggagctgccctacaactccaagttataacaaaaataaaaaactctccaaagccaagcagcgtctgaaaactcctgtaataggagacagcatatagtcggccaaaatgagaagaaaaataactgtacaaaagtaaatgtgcagcatcataactgggagaaaatgggaaaaaactcatcaaaacctagtcccttaaaatatatatttaaaaacttaaaagttttacagaaaattataaagttaagttaaccccccaaaagttaaaaactctctgtaaattaaaa

SEQ ID NO: 481730 - DNA, 527 bp, Homo sapiens
tgctgaaagggatttacctccacgccatttttgtcttgtgtaaactggagcctctgtatatggacccstatttatgaagggttgaggtgccaggaaatgggacagtttcagtgctctttcatcttcccggccatccccggtcacccccggtcacccccggtcaccagcgccaaaacgcgccctttgccttgtgtacgtcagatactcaaagatggcggcccccatggagccaaggcgacgagggcgcggccatcttgcatctgcgcaaacgctgggaacgcctccgaccctggatagtcgccgtcaggcactgaggaggccgagagatgaggccggagcccaccaagttctgggaagtaagttcagtcactgggtggtcgctgtggtgacgggggaggaaattctgtccgtggctgggcgtgttcgtggacagtggtgatggactggtatctgtcggcgccagcgtttggcgacgccagtggaattctttcaggagcttagcgtgggtccgattcctatcgcagggg

SEQ ID NO: 481731 - DNA, 480 bp, Homo sapiens
gtctgggcacagggaccaggaaaactggcaggctctacagttactgattcccttgtgagtcgagtcgggtcagccttctgtgagtgggggactctgacctgcccaaatcccttgttgctctgaagtgtttcgaggaagtgaggaaaacctgatagctggtgagggaagagggctcatgggccccctctactggctagaaggtgtttttggggtgctgagctggtcaggcaatggagtgggcacactcacgaggcttgcagaaaaaaattctgggtgggcattcaccttggccttccccccgcctgaaagtaccccagactgacttctcttctgatgattcttctccaytctcagtgtagaatcctctagtgagaggcttctcgctatgatcccttctctgccctctcttaaaggtgttcttgatcgctcttatgttattctgtatttttcatttgtatatatcatcaaattatttaactg

SEQ ID NO: 481732 - DNA, 616 bp, Homo sapiens
gtgatctcaggtggacgttctgtgccatgcagctcaaagcatcagagtttgtgcggctccacacacaccccagctacagcgtggctggcaggtggaggtgaattctctatcgtttgactcacgggtgaggaaagggtccttcctcatagagataagagcccagatcagcagggagacagcgctcccacctgtcctacccacgatgtgatgcagcaggcagtgggggcctgggactccccacggttgccctccaggaccgggtccgttgccttcctgatgctcttccctccccgtggtacaaatgttaaaaacaaacaacaagacaaaacgaaaaactatgtaggaagggtacattttcatggtatgtcatgtcccaaacttgacgaaaaaccagcagtgcagaaaaaagtttttctcagacctcaaagatagctagtctagaaaaayagaatagtcctagtctcttgcgaacctgccattttagctgtgagaacagctgcgattcatgcatttgtccttcattagaaggtaatacattttaggagaacagggatctttgtcctgcactatcagcctgagggcagcggccagcacatagggttatagggtttataca

SEQ ID NO: 481733 - DNA, 616 bp, Homo sapiens
gtgatctcaggtggacgttctgtgccatgcagctcaaagcatcagagtttgtgcggctccacacacaccccagctacagcgtggctggcaggtggaggtgaattctctatcgtttgactcacgggtgaggaaagggtccttcctcatagagataagagcccagatcagcagggagacagcgctcccacctgtcctacccacgatgtgatgcagcaggcagtgggggcctgggactccccacggttgccctccaggaccgggtccgttgccttcctgatgctcttccctccccgtggtacaaatgttaaaaacaaacaacaagacaaaacgaaaaactatgtaggaagggtacattttcatggtatgtcatgtcccaaacttgacgaaaaaccagcagtgcagaaaaaagtttttctcagacctcaaagatagctagtctagaaaaacagaatagtcctagtctcttgcgaacctgccattttagctgtgagaacagctgcrattcatgcatttgtccttcattagaaggtaatacattttaggagaacagggatctttgtcctgcactatcagcctgagggcagcggccagcacatagggttatagggtttataca

SEQ ID NO: 481734 - DNA, 638 bp, Homo sapiens
tcaggaagaaaaggtgaagaaatgaagaaaagagaagacaaagacaagaaagaagatatcagataggagaatcccagttaatggttcctttaggtaaaagtgggagttgggggtttgaacagctacattaagggaaatataaatccccaggaaacaaaagcagaatggtagcaacacctgaaacaatagcattccaggtccacaatctcactttctattttaagagacagggtctcactctgttgcccaggctggagtgcagtggtgtgatcatggctcactgtagcctcaacctcctgggcccaagtgatcctctcacctcagcctcctgagtagctgggactacaggcatgcaccaccatgcctagttaatttttctattttttagtagaagacagggttttgcartgttgcccaggctggtctgaactccagactcaagcgatctgcctgtctcagtctcccaaagtgctgggattacaggcatgcaccactacacccagcccagcatctcacgttttacaaggagcttctcttgtgtggtaggttttgcacaggaaacccggtggagacttacaaaatgacctcttctctcttcttttggcttgagaaggcctcgcacaaggtcagaataccat

SEQ ID NO: 481735 - DNA, 619 bp, Homo sapiens
cacagcaggaaatattagcagattagwagacgtgatgtctaggacctgattcaaaacaacccttgcggggagagaggagaaagcaccccatgcaggctggcggctgtgggagccggaggtggggggcggctgctctgccattctctctgcttctgtgtatgctttttacgtcatctatattagaaaggagaattaaatagataagcttggcttggcccccagcctgcctcacagctctcaatttgaattcaacaccacctgtgtcccttccaccctgcccctgtcctggagctgggaagacagtggggaaccaggcaagtccccgccatggagcccagatggagccctccgccagggccttctccagccagcagcaaacaccttctccgccagggccttctccggccagcagcaaacgccttctccaccagggccttctccggccagcagccaaacgcctcctccgccagggccttctccggccagcagcaaacgccttgctctgcttcaggcggctaccttggaactaggcagcgagccctgtggggctgggtgtggggccacaggccttaccccgccacgccttagtcagtccacaccaacactccaggagggcatc

SEQ ID NO: 481736 - DNA, 498 bp, Homo sapiens
ctgccagcggcagtaccgcacccctcaaccccaccacctcctcacaggggcttggctggcctctcgggggtggcttttcaggaggttaagcccccgacaggattgacttccacggcaaagttatcttaggaataaaacagcagggaagaagaggagaaargagacttggccaccggcatggtcagcagagagtgagaaggaacgttagcctgtcatcgggatacttgctcctgcagaggatgaggaggctgaggccagagaaggctgcacaagtttgcccgactcaggtggatgtcggtaagcgtgacctgggtgaggtgtgaaacccagcagggagggccacacactctactgtcaccacctccagcacgggggctgagcacctgctgcaccacggacacatgcactgggagacaggggagccccaggtggctgggaccctcctcctgggttctagtttagcacctaataagagcattcccaagtgacgcaaacaaa

SEQ ID NO: 481737 - DNA, 629 bp, Homo sapiens
gtcagttaaaaaacaaagcatccctcctgctcgtcctccagtcccaccagtttcttggaagtctgaagagaatgtctggaaaaccaaggaaatacagatatatacatttttccaaatattttacacaaaagtggcctcagccaggtgtagtggctcatgcctgtaatcccaacactttgggaagctgaggtgggagaatcgcgtgaggccaggagtcggagaccaggctgggtaacatagtgagacaccatctctaaaaataaagtattttaaaaagaagcaagttccttggacaatgcacacatgtccggacagacaagcatctggtggctgggccatctgttcaaagaaaaacaggaagcctgtgtcctgcccctctgacctgtctaggcccagcttttgtctttgtaacttaaactcccaaaggcaggcctggacaccctgtgttggcttctggcttccttccccggctccggaaacagcagaaaaaacaatccaacacgtcagygtctcccttggttttgtgctctcctgacgccacctcactggccccgtgccagtggagcactgaggttgctgcgcccactttgtagatgaggaaactgaggcccagagaggtccaggtcacg

SEQ ID NO: 481738 - DNA, 470 bp, Homo sapiens
gttgtggttgcactgctgtcactggtcactggcgtactgtgttttcattgttattctcacctcctccatcacrttcttttttttttgagacggagtctcgctcttatcactcaggctggagtgcaatggtgcaatctcggctcactgcaggctctgcctcccaggttcaagcgattctcctgcctcagcctcccaagtagctggaattacaggtgcctgccaccacgcccagctaatttttgtatttttagtagagacggggtttcaccattcaccatgttgactaggatggtctcgatctcctgacctcgtgatctacctgcctcggcctcccaaagtgctaggattacagcatcctccttttttttttttttttttttttgagatggagtcttgctctgtcacccaagctagagtgcagtggtaccatcacagctcaccgcaacctccaagtcccagggtcaagcaat

SEQ ID NO: 481739 - DNA, 639 bp, Homo sapiens
aaatccatacatctgatggcttggcacttccacttccaggtgtacatggaagaggaacatggcatacaagtcaagaggacctgctcaaagatgttggctgcttcaaggtaaagttcagcaatggaagaataggtaaatgatcgtggcatattcayataataaaatataactgcaccactaaaataactgaaggtgtacatctcaacagggataaatatctcagaaatacaatgttgcataaaaatatattaaaggccagttgtagtggctcacgcttgtaatcccaacactttggaaggtccaggaaggtggctcacttcaggccaggagttcaagatcaacctgggcaacatagtgagaccccatgtctacaaaaaataagaacattagccaggcatggtggcatgtgcctgtggtcccagctactccagaggctgagctgagaggatcgctggagcccaggagttggaggctgcagtgagctatgattgtgacactgcagtccagcctgggcaacacaatgacaccctgtctcaataaaagtggcagatatgcatgtattgtgtgaccccatgtacttaaaatgtggatgacacataacaattatgtatactgttcatggatacatatacatgaggc

SEQ ID NO: 481740 - DNA, 639 bp, Homo sapiens
aaatccatacatctgatggcttggcacttccacttccaggtgtacatggaagaggaacatggcatacaagtcaagaggacctgctcaaagatgttggctgcttcaaggtaaagttcagcaatggaagaataggtaaatgatcgtggcatattcacataataaaatayaactgcaccactaaaataactgaaggtgtacatctcaacagggataaatatctcagaaatacaatgttgcataaaaatatattaaaggccagttgtagtggctcacgcttgtaatcccaacactttggaaggtccaggaaggtggctcacttcaggccaggagttcaagatcaacctgggcaacatagtgagaccccatgtctacaaaaaataagaacattagccaggcatggtggcatgtgcctgtggtcccagctactccagaggctgagctgagaggatcgctggagcccaggagttggaggctgcagtgagctatgattgtgacactgcagtccagcctgggcaacacaatgacaccctgtctcaataaaagtggcagatatgcatgtattgtgtgaccccatgtacttaaaatgtggatgacacataacaattatgtatactgttcatggatacatatacatgaggc

SEQ ID NO: 481741 - DNA, 544 bp, Homo sapiens
tgaaggacactcagggattgaagaaggacgaactggctctcatgtcctgctcctgaccactgcactaccaccttcttagagaaaaccagtcggaccctccaggcctgtggctggttcttgctttctgcatctgaacctgtcagtgagtccagaggagggctcgccaggactgtagccaaaaaacaagagtcccatacgkgcactagagggtccaaagagagcgcagtcggcgggacacctcctccttaatttgggcccaggatgccacacagacctccggagcttacctgctcttctccttggaagggacagatcagagctggaggggcttcgagctccctctaggggccagcgagacctgtgccagccccagagctgcagcaggccccgagggcaggcgctgaggcctttgctctacaatgggaagacgggagccgcccttccccagaccccactggctggggatgaacagaaggctcataaagaagagttgttccaaaagcttgcccttcctgggacccagtgaatcccccattgcctcaag

SEQ ID NO: 481742 - DNA, 521 bp, Homo sapiens
agattacttgaggtcaggagtttgagaccagcctgtccaacgtggtgaaaccccatgtctactaaaaatacaaaaaattagccgggcatagtggtgggcgcctgtagtcccagctactcgggaggctgaggcaggagaatcacttgaacccaggaggcagaggttgtrgcaagccaagattgcgccactgcactctagcctgggtgacagagcaagactccatctcaaaaaaaaaaaagaaagaaaataaaaagtaaaaaataactatattatctgggtgtggtggtgcatgcctgtggtcccagctactcaggaggctgaggtgggagaatcgcttgagcccgggaggcagaggctgcagtgagctgtgatcacgccactgcactccagcctggatgacagaaaacactgtctctaaaaaaccaaaaccaaacaaataaaaataacaaaacaaaaacttctccaatccccactaaccattagtgtgatcccatttcacgacgggcacactgaggttgctt

SEQ ID NO: 481743 - DNA, 605 bp, Homo sapiens
tgcctaaacacacattgtgcacattcgtgctcctagacacgtgtacacacagtcgtgaacatgtgtgcgcaggctcaagcttctttccccagaggctgctatactgtgcttaggtggaaatgatggatgtaaaggaaaaaagaacatactattttccaccaggacagttggggaggcacatgacagggggaaaggcccccttagtcacattacggtaataatagatgccacagggatgaaagaagaggcagaggggagaggaatcgtgagacacaaaaagacctttgttgctacaagccaaaccagagctgaataccttctctgaaaaaataatggcagaaatccccaaaggggccaaactcttgcacttggagacagagctacagaatgcagtagcaggaggctggagaagacggtgactagatctgagamctgctgtcctcagggctccaacccaaagcttatccagcaagaagccaggctgggcaacggcatggcgaactttcccaaaatgcagacgtgttgttcgccaaacgaatagtttcttcattcttggtgaatgtctaggtcagaataatgaccaaaagcatcagaacatatgtgtc

SEQ ID NO: 481744 - DNA, 588 bp, Homo sapiens
gatggacctcttagtccaggcgtggggagctgggaagagtgagtagctaccccaagctgtggggagaggtgaaaacagttctcatcgggactcccaactctgcctttttaaatttttttttcaattaaaaataaaggcagggtcttggtatgttgcccaggctggtctccaactcctgkcctccagtgatcctcccacctcggccactgccacaaagtggcgggattataagcgtgagccactgcacccagccaggattcccaactccttgagacaactgacatgtcctctttattgggtcaaaacttggtagacagcttgaggaagggctccctgcctcccttctcacatacatgtctcccagccagccactcccaactgcaccctcagtaatttgtatctaacaaattcagcgagtaccccagccaagatctggtatggaaacagacactcggaagaaaaactccgaacactgaggtgcgtgggtgtgtagtggccaggggtgaagacactcagcctctgcctctgagagataggtgggaagacagtgtctccctactgcctctcccaaaccctcctcccctcccc

SEQ ID NO: 481745 - DNA, 578 bp, Homo sapiens
cagctggaaaggccccctgttccttttcctgtaatcaccattagatgattgaatgactggaagtgtgataaaggcagaaaatctcaaagccgtttcttttttttataccctttccacctcattctcttggaaaacatggaaaaaaatcacaaaaacaaaactccaggaagaatagcagctcatgcttaygatgtgtgtcccccacccagactcacatcttctgttgctttctggacctgggtatccacctctgaacttctcaacacggtctgactctcctcttcttcccagctctcccttcccaccgccttctcccctgaccatcgtggagcatccaacaagcctccccacatcctcctggccgccctccaagctgttagaatagtgactcagggcccgagcccaccacttccccatggccacctcccctggccactccacatgctccccatccacgccctcctcagtctctgcctccacccactttggggttttggttggtgattttgtgcctggattgctttggcctccttctccagaccccactccaagccccacttcgtcaagggcactttcct

SEQ ID NO: 481746 - DNA, 578 bp, Homo sapiens
cagctggaaaggccccctgttccttttcctgtaatcaccattagatgattgaatgactggaagtgtgataaaggcagaaaatctcaaagccgtttcttttttttataccctttccacctcattctcttggaaaacatggaaaaaaatcacaaaaacaaaactccaggaagaatagcagctcatgcttatgatgtgtgtcccccacccagactcacatcttctgttgctttctggacctgggtatccacctctgaacttctcaacacggtctgactctcctcttcttcccagctctcccttcccaccgccttctcccctgaccatcgtggagcatccaacaagcctccccacatcctcctggccrccctccaagctgttagaatagtgactcagggcccgagcccaccacttccccatggccacctcccctggccactccacatgctccccatccacgccctcctcagtctctgcctccacccactttggggttttggttggtgattttgtgcctggattgctttggcctccttctccagaccccactccaagccccacttcgtcaagggcactttcct

SEQ ID NO: 481747 - DNA, 578 bp, Homo sapiens
cagctggaaaggccccctgttccttttcctgtaatcaccattagatgattgaatgactggaagtgtgataaaggcagaaaatctcaaagccgtttcttttttttataccctttccacctcattctcttggaaaacatggaaaaaaatcacaaaaacaaaactccaggaagaatagcagctcatgcttatgatgtgtgtcccccacccagactcacatcttctgttgctttctggacctgggtatccacctctgaacttctcaacacggtctgactctcctcttcttcccagctctcccttcccaccgccttctcccctgaccatcgtggagcatccaacaagcctccccacatcctcctggccgccctccaagctgttagaatagtgastcagggcccgagcccaccacttccccatggccacctcccctggccactccacatgctccccatccacgccctcctcagtctctgcctccacccactttggggttttggttggtgattttgtgcctggattgctttggcctccttctccagaccccactccaagccccacttcgtcaagggcactttcct

SEQ ID NO: 481748 - DNA, 630 bp, Homo sapiens
ggcaagccctccttgacctgtggggccagtttctcccactggctttctgctgccacctccccttccatcagagggatgctcaagattgtgtaagggcctgtggacaccgtgaagagtccagggaagtgaggaggggctgggccgggcaggctcaagcccagcacatggccacacccctcacrcctgagcagagatcagccactgccaccgcggggaggacagaggggcccaggatcccccagccagcctccctctgcatcaggagaggaaggaactacttccagaaaaaaagtatagaatagaaatgacatatctgacccaatcgagttttcagtttttcttttcttttctttttttaggtttaaatacatttttattaaatgttagaataaatttatacacagttcacaaattctttacaaagaattgccaatctttgtccaattttgtagtagtctctatacagattcagaaattctgctgtgaacagggtttataaaatatttcttttagagagcatcacaatgctaattttaggcaaaataatgttttaaaactgaagtctttgcatggaggtgagctcaaacacccttattctttattccagtgatgaaataatgagaaaaataa

SEQ ID NO: 481749 - DNA, 609 bp, Homo sapiens
ttttcttcttcctgtggccttttcccagtgcctctggcatccctccccaatgacccctgtaaaatagatcagaactgggttttctggaggacctagagagcccacaggtcttytctggctgctgcttctactcctgcattttgctcagctctctaaattgattcggctccaggtaaggtcaaattctttttctgtgatctagaccttcaggtttttcagtgaaagtgtgtgtttggtggcaaacaatccccctttcttactttcacagcttgggcattcacagcatttgggcagtctcccaggccctgcaggagcatctgcttttttcagagggtttgtggattttcttggcttttctggtatatttctgcagtagttctggaggaaaagttcatgatgcgagtctcaacacgctgctctgtgtgtctgagtggaagctgtgatctaattctgccttctgtataccattttttgttgagtcctgacctatttttttcttgggggcttttttaatacatatagatacaggtataagattggtggataaacatacagaatgggtcccctggttatgtttatacaaactccatatatgcatacgtctggcaa

SEQ ID NO: 481750 - DNA, 485 bp, Homo sapiens
gacacacagtaaaatacatttatcaaatttaatattttattttataatttgaattcaattccaaaatgatttatattcaagtttattgttatatttgcttttgaccaatttaggctttccaagctaaagataaactaaagcatgttttcaaaagttcaagagatttaagcttactggcatgaaatgctctgtagtaaaaaaaaaaaaaaaaaaaaaamaaactcattttttaatcaatattttaatagttttatgtctgagtacttaaacatcaaggacaggactctgaatgatgttgattgcatacttaattgataaagtagaagataatcatcaaagtctaataagtgatggatacagcaacataatacttgacaaaacaattcaagagatgtttgacaaacaagaaggctgcataggaactacgctgcattactaatgtaaagtgttctctctccctctctaactttagtctttattgacaa

SEQ ID NO: 481751 - DNA, 315 bp, Homo sapiens
cgtgctcctccatgtctccatccagcccagggtgacaagattattgatggcgccccatgtgcaagaggctcccacccatggcaggtggccctgctcagtggcaatcagctccactgcggaggcgtcctggtcaatgagcgctgggtgctcactgccgcccactgcaagatgaagtaggtgccrcccaagtctctgctggaggtgcaccagcgtctccagctcgctatgggggtggaagggcagtctttctgtgcctacggctctattctcctctctctgggtctctgtcctcctctctctgggcctctgtacccc

SEQ ID NO: 481752 - DNA, 315 bp, Homo sapiens
cgtgctcctccatgtctccatccagcccagggtgacaagattattgatggcgccccatgtgcaagaggctcccacccatggcaggtggccctgctcagtggcaatcagctccactgcggaggcgtcctggtcaatgagcgctgggtgctcactgccgcccactgcaagatgaagtaggtgccgcccaagtctctgctggaggtgcrccagcgtctccagctcgctatgggggtggaagggcagtctttctgtgcctacggctctattctcctctctctgggtctctgtcctcctctctctgggcctctgtacccc

SEQ ID NO: 481753 - DNA, 315 bp, Homo sapiens
cgtgctcctccatgtctccatccagcccagggtgacaagattattgatggcgccccatgtgcaagaggctcccacccatggcaggtggccctgctcagtggcaatcagctccactgcggaggcgtcctggtcaatgagcgctgggtgctcactgccgcccactgcaagatgaagtaggtgccgcccaagtctctgctggaggtgcaccagcrtctccagctcgctatgggggtggaagggcagtctttctgtgcctacggctctattctcctctctctgggtctctgtcctcctctctctgggcctctgtacccc

SEQ ID NO: 481754 - DNA, 315 bp, Homo sapiens
cgtgctcctccatgtctccatccagcccagggtgacaagattattgatggcgccccatgtgcaagaggctcccacccatggcaggtggccctgctcagtggcaatcagctccactgcggaggcgtcctggtcaatgagcgctgggtgctcactgccgcccactgcaagatgaagtaggtgccgcccaagtctctgctggaggtgcaccagcgtctccagctcgctatgggggtggaagggcagtctttctgtgcctacggctctattctcctctctctgggtctctgtccycctctctctgggcctctgtacccc

SEQ ID NO: 481755 - DNA, 389 bp, Homo sapiens
ctggtctcaaactactgaccttaagtgatcctcctgccttggcatccctgtgctgggaatacaggcatgagccacaacacccggcctatttttgaatctctgtgataggggatgacttcttaagacctaaaaaaaacacacatcatatgacaaaacattgattagtttgattattttaaaattaaacaytttggtttaagagaaggtaaggacgattcataggcatttatcagaatgggagaagttatttgtaacatccaaaatggacaaagaactagaacctgtaatatgcaagaagcacctgtgaattaatgagaaaaatatggatatccttataggtaaatggataaaagctacaaagaggtgatttgcagaagcagaattccaaa

SEQ ID NO: 481756 - DNA, 566 bp, Homo sapiens
tgccagccagggaaggccagtggtcagcagccgtcaacagaagccaggaaagactctacgcagagcctgagggcgtgtggccttgccgacaccrtggggaccttgatttcagacttacagtctccagagctctgagagaatacatttcttttgtttaaagccacccagtttgtgctagttcgttacagcagccccacagaactgatacacgagtgggtcagctctcggtgtacacaggtccacttgacaacagcagacatacaaagggccataaagcacacgaaacaatgctcaacttctttcgtcatgagaggaaatccaattcaagccacaattagacgctaccacccacccatcagatcggttttaaaaaattaaaataggctttgcagacactgccgctgcgagtcctgtactatcagccacggtcaaccccaccgtgttctttgacatcgccgttgatggagagcccttaggccacgtgtccttcgagctgtttgcagataagtttccaaagtcagcagaaaaggttcatgctctgagcactggagagaaaggatttggtt

SEQ ID NO: 481757 - DNA, 438 bp, Homo sapiens
cctgggaagccctcactgagaaggtgacaagtgtagtggcgcgatcacggctcactgcagcctcgaattcctgggctcaagcgatcctcccaccacttcagcctccctctagagtagctgggaccacaggcacgcgccaccaagcctagctactttttgcattttttgtagagacggggtctctgaatgttgcaaagacccgaaggacgtgcggccggcggttgcctgggggaagtccatgaccggggtgtaggaagagccagggcaaaagcttcccaagccaagggtatgactgtagggggttattagcgtgtaattactgcccctcccatgccaggctaagtgctggtggagtggaggcagtgaygccaaagaaggccgcctgcctccatggtggtcgctgtctggctggattttcacctgaggcagcaaatgagc

SEQ ID NO: 481758 - DNA, 530 bp, Homo sapiens
ccacacccggctaatttttgtatttttagtagagacagggtttcaccatgttggtcaggatggtctcgatctcttgacctcgtgatctgcctgccttggcctcccgaagtgctgggattagaggcagaagccactgcagccggcctgggatgcatctggatctctgctctgtcctcactggggactgatctaaccccctgaacaccacaggaagcgcccttgtgcactcggtacagcggcagtgatgagatgctgccaggcctcgtgcacagcgctcccagctcttacccatacctgagcctggctcagsaggacagggtgggtggggacagaagctctgagagctgaccttgctctgacagaacccagcccgcaggctgggaaaatgagaacgcatggcaaacgcgctctcctctctgctttggcccagaggaagggcctagccagggaacggccccaagcagggagccaccaggcggacgaagcctaaaagtggccaacggggcctgatgggaaggaggagctgagct

SEQ ID NO: 481759 - DNA, 429 bp, Homo sapiens
ccctcacagcacttgcctctgtcacctgcatgactatgtgggtaatgtcgcctctcccactggactgtgggttccacaaggcagggatacagtctgtcctagcccccactgtgtccccagctccactcagcacagggatgggcccatagctttcattacttcaggggggagtggtgaacagaaccacagcatttgtgccaagtgaaggtaaaacaaaaaatcctgcattcattcattccacaaatatcacaacaactctgcatcatcactgctcrggtcaccagggattcagcagtgaccaaaacagaactccctgccattggggagttgggggaatgagggaacaggcagcaaaataaaaaataaatacatacgcaaattagacaggatagccaaagctaacaaatgccatggagaaaaggagcacac

SEQ ID NO: 481760 - DNA, 571 bp, Homo sapiens
ctggcccgcaagcgccgcgcgcagcccgggttcccgctctcgcctcgccctccacacttccctgcaagctgagggagccggctcccgccttggccagcccagaaaggggctcccacagtgcggcggtgggctgaagggctcctcaagtgccgccagagtgggagcccaggcagaggaggcgcggagagcgagcgagggctgtgagaactgccagcacgctgttacctctcactcctgccttggcctccctaagtgctgtgattacaggcatgagccaccacacctggccccttctatgcctctagacctcatgaaatgcccttccgtgctatgcctgttgaaagaaagccagtttcwcgcttgagagagtgtgtcccttcctctgccctccctaactcctgttgtctcgcctctcccacaatcctcctgggtgcatccccgagtcctttccttttacccaccctgagactcccacagctctctcagtggagtcctccgcagaagtctggagcctcaccaggatgttgcctgtccccgagctcatttctgagtagaaggatttgaaaccctc

SEQ ID NO: 481761 - DNA, 571 bp, Homo sapiens
ctggcccgcaagcgccgcgcgcagcccgggttcccgctctcgcctcgccctccacacttccctgcaagctgagggagccggctcccgccttggccagcccagaaaggggctcccacagtgcggcggtgggctgaagggctcctcaagtgccgccagagtgggagcccaggcagaggaggcgcggagagcgagcgagggctgtgagaactgccagcacgctgttacctctcactcctgccttggcctccctaagtgctgtgattacaggcatgagccaccacacctggccccttctatgcctctagacctcatgaaatgcccttccgtgctatgcctgttgaaagaaagccagtttcacgcttgagagagtgtgtcccttcctctgccctccctaactcctgttgtctcgcctctcccacartcctcctgggtgcatccccgagtcctttccttttacccaccctgagactcccacagctctctcagtggagtcctccgcagaagtctggagcctcaccaggatgttgcctgtccccgagctcatttctgagtagaaggatttgaaaccctc

SEQ ID NO: 481762 - DNA, 413 bp, Homo sapiens
catggtgaaacctcatctctactaaaaatataaaaattrgctgggcgtggtagcacacgcatgtaatcccagctacccaggagcccgaggcagaattgcttgaacccgggaggtggaggttgcagtgagcagagatggtgccattccactccagcctagcaaacggtgagactccatctcaaaaaaaaaaaaaaaaaaaatgggtttctaataaactagtcaggactggggtgaccacagaaaatcctgatggcagatagaacttgtgagctcgtcagcaattcggaaagttgctgaaacctgcgaagttcaatccagagcccctcgctccacagggccatccaaatgcgttcaaagtgacatctcgtaattccttgccgcactgatcctacttcaaatgctcagcagacccg

SEQ ID NO: 481763 - DNA, 415 bp, Homo sapiens
taaaaaatgaattgctgcctttgttttggcaattcttgaaacaggtgttgtaaatactgctgtccaaatgctgccataaaattggtacacaaaatctggtatctcatcagttttctcatggcaggttatataaaccataggtacttttttgtttgtttgagacagtctcaccctgtcgcccaggctggagtgcagtaacgygatgatctcagctcacagcaacctccacctcccgcgttcaagagattctcctgcctcagcctcccgagtaactgggattacaggcgcgcgacaccacgcccggctaatttttgtatttttaggagagacagggtttcaccatgttggccaggctggtctcgaactcctgacctcaagcgatccgcttgcctcggcctcccaaagtgctgggttt

SEQ ID NO: 481764 - DNA, 438 bp, Homo sapiens
gctgcagtggctcacacctgtgatcacagcactttgggaggccaaggtaagcggatcacctgaggtcaggagtttgagaccagcctggccaacatggtgaaaccccgtctctactaaaaatacaaaaattagcctggcgtggtggtgggtgcctgtaatcccagctactcgggaggctgaggcagaaaaatcgcctgaacctgggaggtagaggttgcagtgagccgagatcgcaccagcctgggtgacagagcragcctctgtctcaaagggaaaaaaaaacagggaaccaagcttaggtcacacgctgtggctcctcggtggtggctgtagcaccatggacagctcccaggctttggtggactggggagaagctgttgctctttaaatgccagtctgggcaggcctgtctgtccagaatatgccttcctccctctt

SEQ ID NO: 481765 - DNA, 582 bp, Homo sapiens
ggcacgtttctttctcacatttgtaatcccagcactttggagggccaaggtgtgcagatcacctgaggttgggagtttgagaccagcctgaccaacatggagaaacccgatctctactaaaaatacaaaattagccaggcgtggtggtgcatgcctgtaatcccagatactcgggaggctgaggcaggagaatcatttgaacccgggaggcagaggttgcggtgagccgagatcgtgccattgcactccagcctgggcaacaagagcaaaactccgtctaaaaagaaaaaaaaagaaaagaaaaaacaaacgcaggcagacaaaacaaccwtaccagtttcaagaacacacacaggctttttgttttaaagcccattctgaactttgggaggccgaggcaggaggattgtttgaagccaggagttcgagaccagcctgggaaacatagcgagaccttatttctagaaaaaatttaaaaattagccggctgtggtggcattcacctgtagtcccagctacttgggaagctgaggtggcaggatcacctgagcctagaaggttgaggctgcagtgagctgagat

SEQ ID NO: 481766 - DNA, 594 bp, Homo sapiens
ggaaccagcccgtgcaaaggtcccgaggcagcgctaagtctgacagaacagcgaggaggcctgtgtggctggagcagagtgaggagggggagagagggaggaggggagcagagggtggggaagggatggggcaggtagtgcagggctaaaaagcacttcgtaaggacttgggctttgaccccaagggagatggaagccatggagggctgtgggtagaggagggatggacgctgactcataggaggttcataggagctctctggctgcttgctgtggggaggagagactgcggggtgggagccaggtaccagaatggaggtgaccctgctcatccagataagcagcgatggtgccaggtcaaggctggaaccacaggaggagtgaggagaggacaagaccaaggtctatttggagccaacagatttcattctagaagtattgggttgtgggggaggtggatcggtcgttcctgcacaggactggacccacagtggcaggaggggtraacagtagtgggatagttgggtggtcttttccttcccccactgcctactccagtcctctacattcaaggccaaatgaatgagtgagtca

SEQ ID NO: 481767 - DNA, 534 bp, Homo sapiens
aaaaattaaaaatagtaagaatagcagcagctgataattcagtggtttgcaaccccctgttttaggtacacacacgtatgaactcatttaatcctttaacataaagtgaacaggaaggtaccattatgcccattttatttatgtatttatttattttagagacaaggtatcactctgttgcccaggctggagtgcagtccttcaatcatagctcactgctgcctcaacctcttccccctagactcagcgatcctctcacctcagcctcccgagtagctgggaccacaggcatgtatcaccgcacccagctaatttaaaaaaaaatgttttttttcatagagatagggatctcactatattgcccaggctagtcttgaactcctgggctcaagtgaccctcctgcctcagcctcccgaagtgctgggatcatgggtgtgagccagcgtgtctggcctccattatctcaattttagagatagggaaactgagacccagagagatcaagatcrtgaactatgaacaaaagcagcagc

SEQ ID NO: 481768 - DNA, 631 bp, Homo sapiens
acctcagcctcccaaggtattgaacttatgggtgtcagccattttgccaggccttatcactctcatctttcaaatcggccctgtgtattttaggtattaagacatattgctgggtcaaaccaagtgggtgaaaggctcttgcttgggctctgcctacaagaggccttgtgacatakctcttcatccattactttggaggtgtgactctcctcttccatctgcaccatgcccacacagaagattgtggcatgcctctgagttcagcaaccaggtggtgattttcttgtacacatgtcttaactgcagagaaaattgtgacatatagctgagtccattacccaattaatgtgactttgctttctgtgccttgcttttggaagagaattgtaacataaccctggccaggcaaccaagtgatatgactctctgcttggcccctgccctaaaaaaattgtaacatatttctgtcccagcacccaggtgatgctactctcctgttttctttctacagtttgggttgcgacatataccttagccaagctcacagttgtgatgttgacactaataccatgaatcagccaaaaggagagatactggcacttgtaactaaacttggagaaatgggtatatt

SEQ ID NO: 481769 - DNA, 631 bp, Homo sapiens
acctcagcctcccaaggtattgaacttatgggtgtcagccattttgccaggccttatcactctcatctttcaaatcggccctgtgtattttaggtattaagacatattgctgggtcaaaccaagtgggtgaaaggctcttgcttgggctctgcctacaagaggccttgtgacatagctcttcatccattactttggaggtgtgactctcctcttccatctgcaccatgcccacacagaagattgtggcatgcctctgagttcagcaaccaggtggtgattttcttgtacacatgtcttaactgcagagaaaattgtgacatatagctgagtccattacccaattaatgtgactttgctttctgtgccttgcttttggaagagaattgtaacataaccctggccaggcaaccargtgatatgactctctgcttggcccctgccctaaaaaaattgtaacatatttctgtcccagcacccaggtgatgctactctcctgttttctttctacagtttgggttgcgacatataccttagccaagctcacagttgtgatgttgacactaataccatgaatcagccaaaaggagagatactggcacttgtaactaaacttggagaaatgggtatatt

SEQ ID NO: 481770 - DNA, 540 bp, Homo sapiens
ggattgtgacatatcgctggacccaacacctaggtggtatgactgtacatatgccttgacactgcccacagagggctttgtgacatgtgactgagacccacaccttggttatgtgactctcctgattgtgccctgcaattatggattattgtgacatattgctatgtccaacatccaggtgatgtaactctccttcctgggtcctgcctacaggaarcattatgacccacctctgtaccaatcactgaagtaatgtgactctctttttctaccaggtcccttcacacataaatgattttttttctattactggtcccagcacctagctgaagtgagtcttctcttctaaataggttctgctcacaatgtagatcatgacatactgctggactgaacaaggtaatgtgagccgtctgttgaaactctgctcacagcaggcatagtgacatatctgtgaacctaccatcttagtgctatgactcttttacttgggtttggcctataggagagattgtgacttatctctgggggcagcactta

SEQ ID NO: 481771 - DNA, 540 bp, Homo sapiens
ggattgtgacatatcgctggacccaacacctaggtggtatgactgtacatatgccttgacactgcccacagagggctttgtgacatgtgactgagacccacaccttggttatgtgactctcctgattgtgccctgcaattatggattattgtgacatattgctatgtccaacatccaggtgatgtaactctccttcctgggtcctgcctacaggaagcattatgacccacctctgtaccaatcactgaagtaatgtgactctctttttctaccaggtcccttcacacataaatgattttttttctattactggtcccagcacctagctgaagtgastcttctcttctaaataggttctgctcacaatgtagatcatgacatactgctggactgaacaaggtaatgtgagccgtctgttgaaactctgctcacagcaggcatagtgacatatctgtgaacctaccatcttagtgctatgactcttttacttgggtttggcctataggagagattgtgacttatctctgggggcagcactta

SEQ ID NO: 481772 - DNA, 540 bp, Homo sapiens
ggattgtgacatatcgctggacccaacacctaggtggtatgactgtacatatgccttgacactgcccacagagggctttgtgacatgtgactgagacccacaccttggttatgtgactctcctgattgtgccctgcaattatggattattgtgacatattgctatgtccaacatccaggtgatgtaactctccttcctgggtcctgcctacaggaagcattatgacccacctctgtaccaatcactgaagtaatgtgactctctttttctaccaggtcccttcacacataaatgattttttttctattactggtcccagcacctagctgaagtgagtcttctcttctaaataggttctgctcacaatgtagatcatgacatactgctggactgaacaaggtaatgtgagccgtctgtygaaactctgctcacagcaggcatagtgacatatctgtgaacctaccatcttagtgctatgactcttttacttgggtttggcctataggagagattgtgacttatctctgggggcagcactta

SEQ ID NO: 481773 - DNA, 584 bp, Homo sapiens
ctgtgtaatcctctcctttggagtgtaaaaaaaatgtgacttactgtggtggaaaatcactcatgaaattaggctgctaatatgttctgttcatcaaaaggaagattatcctgattgggctaaacttagtcagaggtgcttttatgagaaagagacacatcgtagaaaaaccmccctgctggcctggaagtgagtgacttctacgtggaacatgtaagctgcttatggtgaccacatggaagaaaatatacttgtatattatcatcattcctgcctcccacatgttgcttccagtaggaaggaagggaggatctcatgacagagataaaaaggggatatccttcattcaagaaataatcacctctcatctgggatagcttaagataaagagaggagaccacaacatgagcaaatcaatgggaggaaaagggcaacctggttgaaagggctcactggcatgatggagcagcatttactaagttgtagtgaatgatcagcctctgggatagcaatagtcagccaaggaggctgtactcatttttattctcattaaatcagcatatctgcaccattctggtggccca

SEQ ID NO: 481774 - DNA, 584 bp, Homo sapiens
ctgtgtaatcctctcctttggagtgtaaaaaaaatgtgacttactgtggtggaaaatcactcatgaaattaggctgctaatatgttctgttcatcaaaaggaagattatcctgattgggctaaacttagtcagaggtgcttttatgagaaagagacacatcgtagaaaaaccaccctgctggcctggaagtgagtgacttctasgtggaacatgtaagctgcttatggtgaccacatggaagaaaatatacttgtatattatcatcattcctgcctcccacatgttgcttccagtaggaaggaagggaggatctcatgacagagataaaaaggggatatccttcattcaagaaataatcacctctcatctgggatagcttaagataaagagaggagaccacaacatgagcaaatcaatgggaggaaaagggcaacctggttgaaagggctcactggcatgatggagcagcatttactaagttgtagtgaatgatcagcctctgggatagcaatagtcagccaaggaggctgtactcatttttattctcattaaatcagcatatctgcaccattctggtggccca

SEQ ID NO: 481775 - DNA, 584 bp, Homo sapiens
ctgtgtaatcctctcctttggagtgtaaaaaaaatgtgacttactgtggtggaaaatcactcatgaaattaggctgctaatatgttctgttcatcaaaaggaagattatcctgattgggctaaacttagtcagaggtgcttttatgagaaagagacacatcgtagaaaaaccaccctgctggcctggaagtgagtgacttctacgtggaacatgtaagctgcttatggtgaccacatggaagaaaatatacttgtatattatcatcattcctgcctcccacatgttgcttccagtaggraggaagggaggatctcatgacagagataaaaaggggatatccttcattcaagaaataatcacctctcatctgggatagcttaagataaagagaggagaccacaacatgagcaaatcaatgggaggaaaagggcaacctggttgaaagggctcactggcatgatggagcagcatttactaagttgtagtgaatgatcagcctctgggatagcaatagtcagccaaggaggctgtactcatttttattctcattaaatcagcatatctgcaccattctggtggccca

SEQ ID NO: 481776 - DNA, 613 bp, Homo sapiens
acctctagccaccactgggatggtgactcatatctgaacccaactaagaggcagagcaatgacttttatacctggacacagccaatatgagaaatgttgactctcatacctgggagtggggcaacaagtaaaatcatgcatttatacagcactaatgtctcacaggggattgtgagtctcacccaaacaatgtgcagccctctggtggtacagagagtgtcataagaggacccagaacacagctgagattgtgattctcatatacacttccagcccacagtaaaaattgtcatcctcccacatgaatacagacaactcttgagcttctgaatctcacacctggacacagttgaaagttggaattataatccttacatgtagattttgtctccaggtagacggtaactataggaccaggattcattatacctgtgaggctttgcctctgataccagtacacagcctaccggtaaaattgagggtctcatgcatgaatctagtccgtcattgagattgtgactcaygcatttggatgcaactcatgggaggtgttgactttcccacctgaagctggaacatatgtggaactgtgaatctcatccctggaccttcc

SEQ ID NO: 481777 - DNA, 654 bp, Homo sapiens
aggggcttcctggaggaggtgatacctgaagtgaggcttatgggagcttccatagaagttgggagcagggacaagacaggatttctagagagaaggatggcacatatacttgctttctcagtcattgactcatttgttgaatgcacaccccaccctgctggggactacgccctgaaggatgtgggtcagagcagatctctgccccttcsataactagacatttatagagcacctgctgtatgcagggcactgctctaggagctccctcctgatgcttacagtctgaagtgggaggaagttcgacagtggagagaaataaaattgtgacatggtgaaatgtaccagagaggacttcttgaaaaataactctttaagcagaataataaagaattgactttaaggaagtgaaacggaacggcctttcaggggtggcaggagccgagacccaaatgatgggaagatgacaggggaggggtggccccaggaagagggcacagcttgtgtgaaggcccttgaggcaagaggatgtgcgtgttcccggagcaaaatggaggccagggggcctggatggacagtaggggtctgaggggtgacaccggcagggttgctgtgacaggggcagaggacttgatgggccgtggagtggagcacccc

SEQ ID NO: 481778 - DNA, 497 bp, Homo sapiens
gcagagacccagcaacagggacagacatttagagagagagggacagagactgagagaggcatcccaagggcagggcttcgtcctgtctgccggggcactgcagtaactatcctctccccaccccgccagtcctacttcgtgtctgactacgaccccactattgaggactcctacacgaagatctgcagtgtggatggcatcccagcccggctggacagtgagggcggcaaggatggatgatggatgggggtggtgtcagtgggggctgagkgctcttgggggtgactgcggggagcctggtccccacgatggcccctctccctgtctctgcagtcctggacaccgcgggccaggaagagttcggggccatgagagagcagtacatgcgtgctggccacggcttcctgctggtgttcgccattaacgaccggcagaggtgacaggggttgctggtggcggagcagtgggtgggtgtggggaggacctgggctctgcag

SEQ ID NO: 481779 - DNA, 497 bp, Homo sapiens
gcagagacccagcaacagggacagacatttagagagagagggacagagactgagagaggcatcccaagggcagggcttcgtcctgtctgccggggcactgcagtaactatcctctccccaccccgccagtcctacttcgtgtctgactacgaccccactattgaggactcctacacgaagatctgcagtgtggatggcatcccagcccggctggacagtgagggcggcaaggatggatgatggatgggggtggtgtcagtgggggctgagggctcttgggggtgactgcggggagcctggtccccacgatggcccctctccctgtctctgcagtcctggacaccgcgggccaggaagagttcggggccatgagagagcagtacatgcgtgctggccacggcttcctgctggtgttcgccattaaygaccggcagaggtgacaggggttgctggtggcggagcagtgggtgggtgtggggaggacctgggctctgcag

SEQ ID NO: 481780 - DNA, 593 bp, Homo sapiens
cctgctttttccccttcttttccactccttccccctcaaggagcgcttttgggagagctacatctacaatggcaaaggaggtgagtgaggggctgaagccatcttgttctgtgcagctaaggtagtcccttcccagcgaggccaaaccaacgtcctccaccccaaattaggtacaagaatcgtctgccccccaattctgtgctctctgaagctggctgctaaaggagttccctcccttaagaccccagcttgcctgaggagccycccacaccttattttatttttaaatatttatttttgctttttttttttttttgagacagagtctcgctctgttgcccaggccggagtgcaatggtgcgatctcggctcactgcaagctccgcctcccgggttcacgccattctcctgcctcagcctcccgagtagctgggactacaggcacccaccaccacacccggctaattttttgtatttttagtagagacggggtttcaccgtgttagccaggatggtgttgatctcctggcatcgtgatctgcccgcctcggcctcccaaagtgctgggattacaggcgtgagccaccgcgcca

SEQ ID NO: 481781 - DNA, 593 bp, Homo sapiens
cctgctttttccccttcttttccactccttccccctcaaggagcgcttttgggagagctacatctacaatggcaaaggaggtgagtgaggggctgaagccatcttgttctgtgcagctaaggtagtcccttcccagcgaggccaaaccaacgtcctccaccccaaattaggtacaagaatcgtctgccccccaattctgtgctctctgaagctggctgctaaaggagttccctcccttaagaccccagcttgcctgaggagccccccacaccttattttatttttaaatatttatttttgctttttttttttttttgagacagagtctcgctctgttgcccaggccggagtgcaatggtgcgatctcggctcactgcaagctccgcctcccgggttcacgccattctcctgcctcagcctcccgagtagctgggactacaggcacccaccaccacacccggctaattttttgtatttttagtagagacggggtttcaccgtgttagccaggatggtgttgatctcctggcatcgtgatctgccygcctcggcctcccaaagtgctgggattacaggcgtgagccaccgcgcca

SEQ ID NO: 481782 - DNA, 549 bp, Homo sapiens
tgaaacccctaaagtaattgagtgccagcacaggacgctgaagaagcacagagagtccgaggctgagacagcaagtagagacctcctggaggaaccttctagaaaaagttaagggttttagactcttcctaagggaaaacgggaagctatgggggattttaagagaggagtgacttgacgttctgtgcttgttgggtggatcatgaattaattgtaggagccagacttggaaggctcctgcagcagtaattcaagccagagatgatggtggcttgggagagtgtgacttctgtggggactgagaagtgacaggcttagaacttccaggayattccaagaggtctgctatgggagtaaggaagagggaggagtgaaggatgactctcggagtgctccgtcagtggccggaggccagcactaatgcctcacctaaagttcttagtccttcgaggccagagtcaagctctgtcaccaggctggagtacagtggcgtgatctcagctcacggcaacctctgactcccgggttcaagcaattctcctgcctcag

SEQ ID NO: 481783 - DNA, 517 bp, Homo sapiens
gaagcacagagagtccgaggctgagacagcaagtagagacctcctggaggaaccttctagaaaaagttaagggttttagactcttcctaagggaaaacgggaagctatgggggattttaagagaggagtgacttgacgttctgtgcttgttgggtggatcatgaattaattgtaggagccagacttggaaggctcctgcagcagtaattcaagccagagatgatggtggcttgggagagtgtgacttctgtggggactgagaagtgacaggcttagaacttccaggatattccaagaggtctgctatgggagtaaggaagagggaggagtgaaggatgactctcggagtgctccgtcagtggccggaggccagcactaatgcctcacctaaagttcttagtccttcgaggccagagtcaagctctgtcaccaggctggagtacartggcgtgatctcagctcacggcaacctctgactcccgggttcaagcaattctcctgcctcagcctcccaagc

SEQ ID NO: 481784 - DNA, 294 bp, Homo sapiens
aaaaaccagagggctgaccttgtcttgtatgtcctttgagtggcatttgttactaagaagctcaargccagcactctgctccatagaccagctccttcccaggtggtacaaccccaggcctgggaatgttacactggctttcccagcaactcatagccaaagtcagggagatgaaaggcattgttgcttagtggcttgtagctctcttgacataatcagtggtctttcctttggggaaaaccctattctctgagtgacacacaagaactggcagcactagctgcttagtgaggt

SEQ ID NO: 481785 - DNA, 294 bp, Homo sapiens
aaaaaccagagggctgaccttgtcttgtatgtcctttgagtggcatttgttactaagaagctcaaggccagcactctgctccatagaccagctccttcccaggtggtacaaccccaggcctgggaatgttacrctggctttcccagcaactcatagccaaagtcagggagatgaaaggcattgttgcttagtggcttgtagctctcttgacataatcagtggtctttcctttggggaaaaccctattctctgagtgacacacaagaactggcagcactagctgcttagtgaggt

SEQ ID NO: 481786 - DNA, 632 bp, Homo sapiens
tgactcacacctgtaatctcaacaccgaggttggrggatcacttgagccctggagttcaaggttacagtgagatctgcccaagctactgcattccagcctgggtgatacagtgagaccctgcttctaaaaaattaaaaaataaaagaattcaagtataaatatctttagcaggaaagaaaacctagcaagtttcattagcactgggagcgttatctttcttctccttgggtgtcagaagcgtgagaacagtaaatactatgtaattcaaaaatacatttgcttcaattttctttggccttcaaatccagctaacattgagctgatcagaagttaacttccattcttaaagtggaagcacatcttttgatctgatgttttcttctaaaaaaggggtttggctgggcggacagtggctcatgcctgtaatcccagcactttgggaggctgaggtggaaggattacctgaggccaagagttcaagaccagcctgagaaacagggcaagaccctctctccaaaaaaaaaaaaaaaaaaaaaaattagctggccatggtggtgtgggcctgtagccccagctacttaggagactgaggtgggaggatagcttgagtccaggaagttgaggcgtcagc

SEQ ID NO: 481787 - DNA, 632 bp, Homo sapiens
tgactcacacctgtaatctcaacaccgaggttggaggatcacttgagccctggagttcaaggttacagtgagatctgcccaagctactgcattccagcctgggtgatacagtgagaccctgcttctaaaaaattaaaaaataaaagaattcaagtataaatatctttagcaggaaagaaaacctagcaagtttcattagcactgggagcgttatctttcttctccttgggtgtcagaagcgtgagaacagtaaatactatgtaattcaaaaatacatttgcttcaattttctttggccttcaaatccagctaacattgagctgatcagaagttaacttccattcttaaagtggaagcacatcttttgatctgatgttttcttctaaaaaaggggtttggctgggcggacagtggctcatgcctgtaatcccagcactttgggaggctgaggtggaaggattacctgaggccaagagttcaagaccagcctgagaaacagggcaagaccctctctccaaaaaaaaaaaaaaaaaaaaaaattagctgrccatggtggtgtgggcctgtagccccagctacttaggagactgaggtgggaggatagcttgagtccaggaagttgaggcgtcagc

SEQ ID NO: 481788 - DNA, 527 bp, Homo sapiens
tgctttaaggaaaagaacagtgttgtaggcacttgatattgtcagggttggggaagaaaaggcttcctggggtgacgatctaagatctgaaaagtataaatyagccaggaaaagagctgcgaaaagattgttctaggcagagaaaacagcatgtgccaatttcctgaggattaaaccagaaacgatccatttcgtccatttcgttcactcattctacatgttatttactgaatgtcaaatacttccgaagcgctccccagacttcgttttattgttcttgtagaaagcaatttataattttaattgctgttgctatatttagccgatgtcccattaggataaactcaaaactccaggttcctcatctaaatcccactttcaagttgtcatctgcgccttgcgtaaaatgttctggtgacgtaagagcctgggcctccctcctcttagggactatcccacgcgatcagccagtcgcagcgcagagcaatgagcttgacacctccttcctccaatcgcagggcagctcc

SEQ ID NO: 481789 - DNA, 533 bp, Homo sapiens
tcattgtggtgtgctgtgcattgcattgtgggacatttagcagaatccctggcctctacccactggatgtgaatagcatccctttgagccctccctgcatcatgacaaccaaaaacatctctagactgtgtcaaatggcccccgaggacagaggggtcagaattgcctccaccttgtacataattggctctacatatgtatttgctaacttgattatttgcagaatttaacagtttaccctttgacacttttatttgcagccatggattgcaaagatagaccagcttttccagttaagaagttaatacaaggtaattatttggaaatgggttaaagagttgttcgtagtttatagtcttccttgtctcttgttggagacctcagtggaagcctggagctagaggggagagaaacagtccttcttcagaccaggaagctgggaaaatgcttttcacacagtaatgtctcgtggggttcccacaagtaaaccccgaggcctccacttatgcacrattggtgttttgtaacttgca

SEQ ID NO: 481790 - DNA, 630 bp, Homo sapiens
ctggtaactggcacccaagtttgaaccctagactgtttaagcatcttattccccacacagtaaaaacagcccaggaaatgggtaccaccatctgcccacggtacagatgagtaaactgaggctcagagaagctgttaggtcatgtggagagaaaacaggagagttggggctcgggtcctgggccatagccccaaaagtgtggtctcctcactgcttcaatcaccaaatgctctctgggcctcggttttctcatctgtaaagtgggtttaattgcaaaatccaactgggaaggctgtgatgatgaacatatcagagcaggcatggaagaccccactgtgggatggggcagagcaggagggcctgcagaggaaggaaggatgtcgagtgagttggaggtcgccgtggggacagcagggggacaacgtttcccatggccacgctctcgaamctttctcccacctggagcagttggagctgcctctggcaccccctgcctgaaaactcatatccacagccgtcacccccagcatctccccagtcaccttgtgccccctgtcccctcccagagaacagcgcagcctctgtgtctaggcgtgaggtttgccagcgttgcccagagacgactgggta

SEQ ID NO: 481791 - DNA, 639 bp, Homo sapiens
cgtgtccatggacccccttatgttgatccatgtatctgctcattggcagtcggtttgcttctgcccttttgctgctgtgaacacgggtgccaggatctgttctggtcatctgtttttatttctcttttgacaatgccctacgcaaatgtaacggcatcaaagctccttcccacagcttccaagagaggaggaagattaggaaaaatcaccaagaggaagaaacaagaatctcaggacctcccatggagaagactacttatctttattaagcaccaactatgtgacaggctccagcattttttttttttaatggggggacagagtctcgctctatcgcccaggctggagtacagcggcatgatctcggctcagtgcaacctccacctcccrggttcaagtgattctcgtgcctcagcctcccaagtagatgggattacaggcacgcaccaccacgtccagctaatttttatatattttttagtagagacagggtttcaccatgttggccaggctggtctcaaactcctgacctcaggcgatccacccacctcagcctcccaaagtgctgggattacaggcatgagccatggcgtccgtcctaggccccggcatcttttggaatgttctcatgttaaacaa

SEQ ID NO: 481792 - DNA, 639 bp, Homo sapiens
cgtgtccatggacccccttatgttgatccatgtatctgctcattggcagtcggtttgcttctgcccttttgctgctgtgaacacgggtgccaggatctgttctggtcatctgtttttatttctcttttgacaatgccctacgcaaatgtaacggcatcaaagctccttcccacagcttccaagagaggaggaagattaggaaaaatcaccaagaggaagaaacaagaatctcaggacctcccatggagaagactacttatctttattaagcaccaactatgtgacaggctccagcattttttttttttaatggggggacagagtctcgctctatcgcccaggctggagtacagcggcatgatctcggctcagtgcaacctccacctcccgggttcaagygattctcgtgcctcagcctcccaagtagatgggattacaggcacgcaccaccacgtccagctaatttttatatattttttagtagagacagggtttcaccatgttggccaggctggtctcaaactcctgacctcaggcgatccacccacctcagcctcccaaagtgctgggattacaggcatgagccatggcgtccgtcctaggccccggcatcttttggaatgttctcatgttaaacaa

SEQ ID NO: 481793 - DNA, 639 bp, Homo sapiens
cgtgtccatggacccccttatgttgatccatgtatctgctcattggcagtcggtttgcttctgcccttttgctgctgtgaacacgggtgccaggatctgttctggtcatctgtttttatttctcttttgacaatgccctacgcaaatgtaacggcatcaaagctccttcccacagcttccaagagaggaggaagattaggaaaaatcaccaagaggaagaaacaagaatctcaggacctcccatggagaagactacttatctttattaagcaccaactatgtgacaggctccagcattttttttttttaatggggggacagagtctcgctctatcgcccaggctggagtacagcggcatgatctcggctcagtgcaacctccacctcccgggttcaagtsattctcgtgcctcagcctcccaagtagatgggattacaggcacgcaccaccacgtccagctaatttttatatattttttagtagagacagggtttcaccatgttggccaggctggtctcaaactcctgacctcaggcgatccacccacctcagcctcccaaagtgctgggattacaggcatgagccatggcgtccgtcctaggccccggcatcttttggaatgttctcatgttaaacaa

SEQ ID NO: 481794 - DNA, 464 bp, Homo sapiens
tggggtggccaggtcaggcgctaggactggggggcctgcgggccctgccactgggaggggacggatttggrgccagggagggggtttggggagcgctagaacgagggggggaatctctcagccacacaactggggaggggaccggattggagagggggtcgctggccgtatggagggatccggtgggggtccggtggcatcgctttggaggggctggattttggcctggggcgctccctgagcctccattatgggggtgtctaatggcaccgcaacgtggggggggcgcttggattgttgactgggggcctgtatgtgcagctaggttgggggttctgtcggcaccgcagcgggtggagattttgtcctgggggggcccggagaagacacaataatgaggctcgcggctggcgccgctggggagctggattggggcccaggtggggggttcggggcaggcaggg

SEQ ID NO: 481795 - DNA, 592 bp, Homo sapiens
ctgcgtggctttccctcgtggttattccacagtgtgtctatccgttctccagccagtggacatttagagtytccaagtttctgcattttcacacagcctggcagtgagcggtcccctgtggcatgtatctgagagcttctccagtgcggtaccttgcttaatatgatcatctgctgtagtgcttgatgactatgcccatgaatagccactgcactccagcctaggcaatatagcgagaccctgccttcaaaaaaagaaaaatagccacataggttttcagcagtcctagcctggaaaaaaacaacctgttcaatttgcatgaccgaaagtcctggaccggtggctagcaatatcgtgtgttgcgcactcgtaaagtgtgttatttcaaccctcctccaccgtgctgtatgtgcctgggggccttggccaggaagccaagtgggcggggaggaggctcccagctcagggttagctctgtgtggtccggagcgggatgaactggggggctcctgcgccatcagctctgaggactctgcttctgctgggcatcctcctcacggatgtaacatcccctccagcctgtaaattcctc

SEQ ID NO: 481796 - DNA, 434 bp, Homo sapiens
tttccactaattaatcttgcagaaatactcagagaagtgcacattttaaggcgagaattgcaaaatattggagattctctgtctatcaatatagaaatggtaaaataaatggtgttgcatccataccattgaatcttttgcagaaaaggttgatgcagagatgtgtgtttcagcataggaggttgccttgcctgggacatactgttgggtcaaatagggaaaaaaattaagttagtgaatgatatatagagtctgaattcaattctgttgaaagagtatatatgtatatatatgtttgtatttacttatatttttaaatacaccaagaacatttctggactttgtattttttttttttttttgagacagggtcttattctgtcacacaggctagagtacagtggcacaatcamcccctgtggtctcaatcaccg

SEQ ID NO: 481797 - DNA, 453 bp, Homo sapiens
tttctcttccaaggtctctgtggaccatgataactaagtcctctggcccctttgccttgctttgcccacgaatgactgtaatatcatttattaacttgtaacacaaatgcattatctctttacccttcaaaacgatctctgctgtttggaaccacctggttcttgaatctgacctgatgcatcaagggtgtgtctggccctgttctgggcagagcctcactttgtrccaggagctgtgcttggccccgggactagccatgggactcatcctccagctctgtgcaaggaaaacagactttgtgcaaacacatggtgctttctgtagactccaagatggtggtatggattgtaagatgtactgttactttatatacccacaggaaacagaaaaatgcccacaacttaagcatgactgccacccatgtaggacacagcctgatttcagagatgtga

SEQ ID NO: 481798 - DNA, 565 bp, Homo sapiens
gaaaacatatgccacgtcacgggtcattagggaaatggaagtcaaaaccaccatgagataccacttcacactcattaggatggctattacattaaaaaaatgaaaactaacaagtgtgaggatgtgaataaactggaacccttgaacattgctgtttggaatgtaggatggtgtggctgctgtggaatatattatgcagttcctcaaaaacgttactcatcataatatacatctctttggcaactgggatcaattttttctataaattcaataatgtcaattcactgacaataaaactgaagagaaaagtgaagtaagagggagaagaaagcaaaggaggaagggaattctaattcactccatctttaaattctaatacaggtattaaggatgcttcccttcatcacgaaaagagaacttgaggaggggtcctgagtctcccaccccaggtgaagaagacttcattatgactgaagtccaatcacctgtacctgcacatgtcctcacacagtctggaactaaggarcacacaaatcaagaactagacttaagaatctcaactttc

SEQ ID NO: 481799 - DNA, 481 bp, Homo sapiens
agtgtctttttctagcttgcacataagtacagcatgggatagtgtcaggccttacggttgggattatccagagccctatttacagatgaggaaactgaggcccagagaactgaaggggtttgttccaggacacagataagaaatcttgggagtggggacttggactcatgcccttacccatagataccaggtcactttgtccctactgtgtgtcctgctgagactctaggctgctccaggttggagctgtctgtgattgggtttgaggagggaccayctatgggaactgctgtgttccagctacagtacctgctggatctcctggggtcccggctgtgggtggccagccagggcccttgcctgtcctgtgaaggacatccccagagacctgtccccctcttggagttactacagggagcttgtgcttggcaccctaccacagcctgagctttggaggacatgggctcccaggtacacccag

SEQ ID NO: 481800 - DNA, 481 bp, Homo sapiens
agtgtctttttctagcttgcacataagtacagcatgggatagtgtcaggccttacggttgggattatccagagccctatttacagatgaggaaactgaggcccagagaactgaaggggtttgttccaggacacagataagaaatcttgggagtggggacttggactcatgcccttacccatagataccaggtcactttgtccctactgtgtgtcctgctgagactctaggctgctccaggttggagctgtctgtgattgggtttgaggagggaccatctatgggaactgctgtgttccagctacagtacctgctggatcycctggggtcccggctgtgggtggccagccagggcccttgcctgtcctgtgaaggacatccccagagacctgtccccctcttggagttactacagggagcttgtgcttggcaccctaccacagcctgagctttggaggacatgggctcccaggtacacccag

SEQ ID NO: 481801 - DNA, 545 bp, Homo sapiens
cgggcaacagcccgactctaccaaaaaaaaaaaaaaagtacaaaaagaaagaaaaagaaggaaaaaccagggcttcacggtcactcagacttggcgaggaggcttgggtctgccgctttccactgagtttttctgagcttcagcgttctctccaaaacggggatacggatctcctggggatgctttagagggcctaggagataaagccttgtttcttttataatttgctattcgctgatttcgccgcctcctcgcagcttggcctaccgcgctagtgttccggactaacgaacaaacggctcactaaattcaaacatragtttcagcctggtcgccgagccggcgggtagaaaaaacctttcccctcctaaccctccgcagatgtcggccccgcactccgcccaggccagccctgcctctctcaagatggcgacctggaagtgcgtcgcccgtgccagccccggaaatctcgtgttaggcgaggtcaacgggtaggttctcgcgagaggacccgtcagccccagtcaggcgtcgtgcgaacagca

SEQ ID NO: 481802 - DNA, 545 bp, Homo sapiens
cgggcaacagcccgactctaccaaaaaaaaaaaaaaagtacaaaaagaaagaaaaagaaggaaaaaccagggcttcacggtcactcagacttggcgaggaggcttgggtctgccgctttccactgagtttttctgagcttcagcgttctctccaaaacggggatacggatctcctggggatgctttagagggcctaggagataaagccttgtttcttttataatttgctattcgctgatttcgccgcctcctcgcagcttggcctaccgcgctagtgttccggactaacgaacaaacggctcactaaattcaaacatgagtttcagcctggtcgccgagccggcgggtagaaaaaacctttcccctcctaaccctccgcagatgtcggccccgcactccgcccaggccagccctgcctctctcaagatggcgacytggaagtgcgtcgcccgtgccagccccggaaatctcgtgttaggcgaggtcaacgggtaggttctcgcgagaggacccgtcagccccagtcaggcgtcgtgcgaacagca

SEQ ID NO: 481803 - DNA, 512 bp, Homo sapiens
tgacacagcttcaaatgtgtgtgccgggtgtggtggcacgtgcctttagtcccaactacctgggaggctgaagtggaaggatcgattcagcctgggaggtcgaggctgcactccagcctgggcaacagagcgagaccctgtstcaaagcaacacacacacacaaagttgtgtgtgcacacagcctcagtcacaggggagggcagtcattccctcacccaggcacctgcgcggagttacacacacttagtcactgcagatcccacagtggctcagagctacgcacagatatgcaggtggggatgaaaatctcatgttcttaagaatgccgcctcagagacaaattgcagtacagttacaacagagcatccaccccacacccagagatggccaaagtacacacggtacagtcgatcacacaggcggtttcacacattgattcacacagccaagtcatgcgggattgtatgcacacagccttctcacaggaaactgggcacactcgtgtccctca

SEQ ID NO: 481804 - DNA, 523 bp, Homo sapiens
tgcccggggcggggtggcatgggggtcagggtccctccattctgttctcccttcctttccttttgtccttcccaccctctttgtgctgcagagaatagaaycccactcagatgagttgaagcagagcctgggttttgtgagcacacaggaaacggttggctgtcttctgtgcacattcccaggcgtgttgagtaaaggtctgaaggatcggagggcgtgaggcatgtggagctcttggggaggagtgttgtaggcagcaggagtggcctgtgagataggatggcacagtcactggctacagcagggatggcgtgagatgagttagggagctcacgagggcctgcggcccattggagagctttggtgtttactggcgtaggatgggagggctgtaagggacacaggcagacttcaatgttaataagatttctctggtgactgtgttgagactagaccactggttctcaagccagggtgatgtttccccaggggacatttggtaacgtctggagacatttttggt

SEQ ID NO: 481805 - DNA, 589 bp, Homo sapiens
ccactggctggaggtttaagaagcgcccaggcatcgagaccttgttccagcagcttgcccctttatatgaaattgtcatctttacgtcagagactggcatggtgaggctctggggcaggggagggaatattggtgtggygggaggcgtagagatctggaggaccagggctcagcctgaccttttctcgctcccttcccacccccagactgcgtttccactcattgatagtgtggacccccatggcttcatctcctaccgcctattccgggacgccacaagatacatggatggacaccatgtaaaggtgccgtgggttcatgggtgggcctctgggatttggcggagttggcaccacctgagggaaggagggcccagctctgaccctagcctcacctggcttatggttctgcccagattcgattcctgctggcaggcacatgcctgcctctagccttggccagacatctgcacccttctttgttccctggaatctgggtgtgggagtggggggaaatggggtctctctaaagaagacagttgggggttagtggtaaggtcgtacgatttagaagctggttttatcttgct

SEQ ID NO: 481806 - DNA, 628 bp, Homo sapiens
ggaatctgaaggcatcagtctgcatcttaggggatcgctcttcctcacaccacgaatctgaacatgcctctctcttgcttacaaatgcctaaggtcgccactgcctgctgcagagaaaacacactcctttgcttagcccacaagtatctatttcacttgacccctgcccacctctccaacctaactggcttacttcctagtcctacttgaggctgcaatcacactgaggaactcacaattccaaacatrcaagaggctccctcttaacacggcacttacacacttgctgttccaccttccctcatgctgttccacctcccctcagactatctttcagccttctgtcatcagtaaaatttataaattttttttataacttcagtgtagctctctcctcttcaaataaacatgtctgccctcatggtttcgataatgtgactctttattcgccaaaagtttccagtgttatcattactatgtccatataacctgatatgttctctactgggttctcagccctggactctgagcttctggaagcagggtggagcctcatttgtctctgggactccaatttccatccaaagatgcagcacataggaggttccaaggatcgtgaatcacatga

SEQ ID NO: 481807 - DNA, 571 bp, Homo sapiens
aaaaactccacgtaccgagagataggcagaagactgaagttttggaatgagactgatcctgagttcgtcattgaccacatggacgcaaacaaggcagggcgctatcagtgccaatataggatagggcactacagrttccggtacagtgacaccctggagctggtagtgacaggtaaggaaacatccagggtccacagccctggtgtgatttttttcttatttttaatagagtatttttcaagaagttttagatttacaaacaaaaaaaaattgatgattgcttcagagagttctcagccatctggcaccccacttcccccagagttaacatcttacattagtatggcacatttcttaccattaatgaacaaatatcgacacattcccagctacagtctacagtttatttacattttcttagtttttacctgatagtctttctctgttccagaatcccattcaagatttcacattgcggctgggagtggtggctcacgcctgtaatcccaacacttagggaagccgaggcgggtggatcacccaaggtcaggagttcgagaccagcctggcc

SEQ ID NO: 481808 - DNA, 571 bp, Homo sapiens
aaaaactccacgtaccgagagataggcagaagactgaagttttggaatgagactgatcctgagttcgtcattgaccacatggacgcaaacaaggcagggcgctatcagtgccaatataggatagggcactacagattccggtacagtgacaccctggagctggtagtgacaggtaaggaaacatccagggtccacagccctggtgtgatttttttcttatttttaatagagtatttttcaagaagttttagatttacaaacaaaaaaaaattgatgattgcttcagagagttctcagccatctggcaccccacttcccccagagttaacatcttacattagtatggcacatttcttaccattaatgaacaaatatcgacacattcccagctacagtctacagtttatttacattttcttagtttttacctgatagtctttctctgttccagratcccattcaagatttcacattgcggctgggagtggtggctcacgcctgtaatcccaacacttagggaagccgaggcgggtggatcacccaaggtcaggagttcgagaccagcctggcc

SEQ ID NO: 481809 - DNA, 533 bp, Homo sapiens
ggcaaccaagaaatgagagacaatccacaaagaggaactgctatggttagcttcttattggattcccatcttcctccaggtatcgccagacacctgcatgctgtgattaggtactcagtggccatcatcctcttyaccatccttcccttctttctccttcatcgctggtgctccaaaaaaaaagtaagcctcacgaagcagaggccagagaactcagggccctgtgcggaagcaggatgggagcacgcaggtgtgtgttcctcactggcaggaaagtctctggcccaaggcaggagccagaggcagagctttctagagagagcaccagacaccctgcccctgccttcagctcacagaccgttgcctgattgtgaactgtatcctcacgtcccctgcagccactcacatccaggagaagattccatgacaggcagaaagtgggagatagaatcaatgggatgggaactgacagctattcatggaatggggtcttgcactcagagagatggaatgtctgagtctggctgttggca

SEQ ID NO: 481810 - DNA, 533 bp, Homo sapiens
ggcaaccaagaaatgagagacaatccacaaagaggaactgctatggttagcttcttattggattcccatcttcctccaggtatcgccagacacctgcatgctgtgattaggtactcagtggccatcatcctctttaccatccttcccttctttctccttcatcgctggtgctccaaaaaaaaagtaagcctcacgaagcagaggccagagaactcagggccctgtgcggaagcaggatgggagcacgcaggtgtgtgttcctcactggcaggaaagtctctggcccaaggcaggagccagaggcagagctttctagagagagcaccagacaccctgcccctgccttcagctcacagaccrttgcctgattgtgaactgtatcctcacgtcccctgcagccactcacatccaggagaagattccatgacaggcagaaagtgggagatagaatcaatgggatgggaactgacagctattcatggaatggggtcttgcactcagagagatggaatgtctgagtctggctgttggca

SEQ ID NO: 481811 - DNA, 559 bp, Homo sapiens
cttttgttgtagggagacaccttgtgtttgcgggatgggtccttcctttagccctgggcaccaagktgtgatagcagccatagaaacttggaaagcgaggagaatcttcagagcacagggagggaggggtggctccacatcctcctctctaaggcggtgcctccttctccccaaggtggtcaggacaagcccttgctgtctgcctggcccagctctgtggtgcctccaggacatgtgattcttcggtgtcattcttatcttgggtttaacaacttcagtctgtaaaaggaagatggggtgcctggcactgagctctacaacagaatattctggaagagccttttcatgggccctgtgaccccagcacacacagggacgtacagatgtcggggttcacacccacactaccccagtgggtggtcggcacccagcaacaccctggtgatcatggccacaggtcagagggctcctgtcttggattctcctttcccacctcctgaatcccagagcttctggtgggcgtgtccttgagggtcccatcacccaggccctgactata

SEQ ID NO: 481812 - DNA, 413 bp, Homo sapiens
atactcacaatatacaaggacttaggtgaagagagtaagcaaaatgcaacacaaaacaaatagatggaaaatacagccctagtaaacctaaaccagacctggctcgaggatgaaccgagggccccacagacagcaaagagcccacatgcaccccgaggtagacctgtcttatctacctggctcccagggraacccagcccggctcaggtgcctcagtgagcaggttctgcccaagaaacaagtcccacagctctgcccaagtcctgttcccctaagttccttttgggggtgggggggacacagctttctgaaaagggctttccagatggcgcctggctgcggcagtgccagactccacagcttaagtaaatgttgccatcgccccatcctgccagcaaaagacaagggggacc

SEQ ID NO: 481813 - DNA, 638 bp, Homo sapiens
ctccgtctctaaaccttttctgaacatttctatacaatgacatgctgctttggaatgctcactaatttttctcatgtgttttgattccagcctacttaccaagagtaccccgtgggtttgcctgtctcgtaatcatcaacagagccgagcgaagggctggcccacagagtcactcaatgaacacatgtgggttgacctttccgtggtgaaaggcgccattatcatctcctccagggctttcttcatagggcttcttcaaggagaaagaaagatctgaccaagtgacagaaaacactttagactttctggcctcattgtctcacttaagtttatgtccctagtgttggcttgaacgttgtccttttcctgttgcccctgagttcattcattcagccagcaaatattcatggagagcctgccctgcacaggttcagtgccgtggagacacacaccaggccggctggtccgtgcagggagaagctgcccaggaggayggaggacggcaaaggaggcacctgggtccttcctggctgatgtttgcatcttgtggtgaggtacctagttctctctatggtcctcattcatcttagagcaattagaccacagcaaacatgtccacccaattttcccttctgccc

SEQ ID NO: 481814 - DNA, 603 bp, Homo sapiens
atgtgaacagtcacagaagagttggtgaggggtggctgcattcagaattgatgttgaagggagcatgatgtggattcactggtgggttggaggtaaagtggcagagcaagagataactcagttataacctgtaggtctttggtctaagcaattgtgtaaacagtggtgccatttactgaaatagataagaaaggagaggaaggcttgggaggggaccagcagtttaatttggaacctgttgcgttggggtgcttattaaatattcaagtagtgatgtctactagactgctggatagacaagtctaaaactcagagaagttgggtctactagactgctggatagacaagtctaaaactcagagaakttgggtctactagactgctggatagacaagtctagaactcagagaagttgggactggatatggatatctagaagtcatcaaggtgcagatgactttttcaaactatgggacagtaatagatccctcaggaagagtgtggccaaaagtagtcccaggtactacgtcctgggtcccaagtgtttagagatcggatagaggaggagtccatgggaggataggaaggcctctgagttagggg

SEQ ID NO: 481815 - DNA, 601 bp, Homo sapiens
gggtgccctggttgacaattgcagccagcctgcatgcaacagagcagagggaaccaaagggaaccagggatccttttaccagaagaaggtatggmtgccacacaaaataagcacatctgatgcaaaccatctttgacatgtgcagaagcttactgtcctctgttcttggtatgactggatgatgtaggcagagcagccagaggcatgaccgtcagctttcattcctcaagaatgggatttttcttgtgcacttctcttttcttatgcatagtcctcaatcaccttggccccagagcctgcccagccagacttagcaggactgggtcacccagttccccgtggcagaaatgtcacagtcattcaggagcatccacatttgggctgggatgacaacacaaatcctgcagtaatttaacacctgctctgcttttatgctgttattaaagagttttagcttaaatatttgaggtgtgactctgctccctcatgcaaatacgggtgcagaatttcccacctggctcattgattggtgggatctgaaatagcccctttatggaaaatggtaaatttcttattactgcctaatgaataaagtgcatat

SEQ ID NO: 481816 - DNA, 654 bp, Homo sapiens
tgctccccactgtgcgctgaagttggacatcccccttccccactgcaggagtggcgcaaagcccccgcccccaaaacagcattcctgcactgcacacaccccacttgagcgtgtgccatggagtcagactgcgcacacccgcggcccagcacagggaaggtgcggggtcctaggaggagcacagcacggacttcctctgaccccaagtcctccccttctgaacaggatatacaggagctcaactccacctgcacaagcccaaatgacagatgtttatgtccaaagttgttacctccatagaacattctcgctctattccggtttgcaggtgggagcttggaggccgcccccagcatggcctgggaaggatgggatggtctccaccccaggactctgatgcactgcattgcatgcggtcaaggcttccaccattctaggacttgaggctctccgtagattaatgaccctggctggtccgaagggcatgaaattatgaataatctattcctgatggaacaacgctttgccttccactcccagccctgtccctggttgtaggaggctgcggagggccccattattcacgccactcaggttcctgcctgctccacactcacagggatgaatgyattgctcagaaacacgggagggagt

SEQ ID NO: 481817 - DNA, 340 bp, Homo sapiens
tccagggtgatgtgcctgccatgtaccctcatacacactccacatctctgtataaaatcttatagctccatggtggctctccatgaccaaaacacgatgaatagtatttagtgatgctacgagaaagctgcgtgttttacactgactgtattccttaatgccaatcatttgttatgggacaactcttgttagccccatctgtraaagatgaggaaactgaggcttagagaggttgaccagctgagccatagtcacacagtagaacaaggtctgatctctggtttctccaacatgaaacttcatgaccttctaagtttctggcagcgcccaaccctaacag

SEQ ID NO: 481818 - DNA, 611 bp, Homo sapiens
gctgaggacaggcctgtcggtgctagtggttagcgctgcagtccaggcacaagcttgccacggagctccagcctccagcgcttagatggtttgggtgtgtgtcccctccaaatctctgttgaaatgtgattcccagtgttggaggtggggcctggtgggagctgattgggtcatgggggcggatccctcatgaatggcttggtgtgctctctgaggtaatgagttcacacaagagctggttgtctaaaggttctctctcttgcttcctttctctccatgtgacactcgcctgctcccyctcctccttccaccgtgattgtaagtttcctgaggcctcaccaggagcagatgccagcaccatgctgcttgcacggctgcagaactgtgagctaaataaacctcgtttctttatatatcacccaatcgcaggtgttcctttacagcaatgcaaatggactgtcacacatggggataaaccagccagcaatggacagcccattgttgctgggcctaaggcacctcaaaggagtagcaggggctcagagcaaggaccctcctccctctgctagagcagcagaggctgcagcaccaaggagaggaagttagagctg

SEQ ID NO: 481819 - DNA, 644 bp, Homo sapiens
ctgccaaagcctctccatcccttactctccagagacctacagtccaatgtcttaggtttaaggttgaggggaagttgtcagccaacatcagtgtttggttgcaatgagtttggtgtattgaaaatgcaccttattaactgtgtgtgtggaatcccttcttccagcaggkgtggtgggagcaaaggaggggaaggaaccccaaaaaagagcctctgtggaaaatgtggatgctgacacaccttctgcctgcgttgtggagagagaagcttcgactcacagcgggagcagaggagacgctctgaatctgagaggtctcaaaagaagcaaaccagacgccacctccatttcccaagaagagcctcaaggagaagccacacctgtgggcaacagagaatccccgggacaagctgagatcaatccagttcattccccaggccctgcgggcccagtcagtcaccccagtggccaagaagtcaaggaactgctgccctttgcatgtgaggtgtgcggcaagaggtttaagtatcgcggcaagttagccgtccacacgagatcacacacaggcgagagactctttcagtgtaatctctgcgggaagcgcttcatgcagcgcataggcctgcaatttcaccagcgaacccaca

SEQ ID NO: 481820 - DNA, 644 bp, Homo sapiens
ctgccaaagcctctccatcccttactctccagagacctacagtccaatgtcttaggtttaaggttgaggggaagttgtcagccaacatcagtgtttggttgcaatgagtttggtgtattgaaaatgcaccttattaactgtgtgtgtggaatcccttcttccagcaggggtggtgggagcaaaggaggggaaggaacccmaaaaaagagcctctgtggaaaatgtggatgctgacacaccttctgcctgcgttgtggagagagaagcttcgactcacagcgggagcagaggagacgctctgaatctgagaggtctcaaaagaagcaaaccagacgccacctccatttcccaagaagagcctcaaggagaagccacacctgtgggcaacagagaatccccgggacaagctgagatcaatccagttcattccccaggccctgcgggcccagtcagtcaccccagtggccaagaagtcaaggaactgctgccctttgcatgtgaggtgtgcggcaagaggtttaagtatcgcggcaagttagccgtccacacgagatcacacacaggcgagagactctttcagtgtaatctctgcgggaagcgcttcatgcagcgcataggcctgcaatttcaccagcgaacccaca

SEQ ID NO: 481821 - DNA, 617 bp, Homo sapiens
gggctgattgtgttggctgtacggtccccatgggtgctgcgtttggaggacatggtcaccttcttgactacctatcctgmctcacccaggtccatttaggagaaagagtccttgaggtagaaacctgaatccgccatcaaatgtacacagactcccgtttaattcaagaagtggatgtttggtgggtagtggttctccatttagatattgggtccaacatccttctccagacacagaaaatgtgttgatgataccacctgcccacttaatttaaatcatgtttctctatgatccattaaccacatccgacatttctttagagcttcatttcccaattttcctacatgttggactcacttgaggtgttttttcaatatttttttaaaaagcaatgcctggggtccagccccaaggtaatgatgtgattggttgaggatgtggcccctgtgttgagagtttataaaactcctcaggtgatcaaatgtgtggctgagtctggcaggtcggttttctgattgtctggtcactccaattcctgttctctcatggggatcagtgagttcatttccacggagagtcatgcacctccattcccagtctaaagaaggtagactcca

SEQ ID NO: 481822 - DNA, 507 bp, Homo sapiens
caatcaggccaccatcccgaggccaccgctcgggctgccgggtgatggaaagccacttgtcaaaggagggttgatgatgtttacttacaagcacttcctaagcttgaactgaatttcatttgactttattcagtttattttgttgagtcctttttttaaaacttattttttaagttccaataaacaatagagatcacggaatgtgatttctttttctagcaaaacagtcctacccttctgccctccttctctagcatccattgtctgagaaatgtcacaaggggaagagaggccgggcctccctctgaattctttgcccttccaggggtgatacggtttggctgtgtccccatccaaatctcatcttgaattatagctctcataattcccacgtgttgtgggagggacccagagggagataattgagtcatggrggagttttcctccacactgttctcatggtagtgaataagtctcacgagatctgatggttttataaggggtttc

SEQ ID NO: 481823 - DNA, 507 bp, Homo sapiens
caatcaggccaccatcccgaggccaccgctcgggctgccgggtgatggaaagccacttgtcaaaggagggttgatgatgtttacttacaagcacttcctaagcttgaactgaatttcatttgactttattcagtttattttgttgagtcctttttttaaaacttattttttaagttccaataaacaatagagatcacggaatgtgatttctttttctagcaaaacagtcctacccttctgccctccttctctagcatccattgtctgagaaatgtcacaaggggaagagaggccgggcctccctctgaattctttgcccttccaggggtgatacggtttggctgtgtccccatccaaatctcatcttgaattatagctctcataattcccacgtgttgtgggagggacccagagggagataattgagtcatgggggagktttcctccacactgttctcatggtagtgaataagtctcacgagatctgatggttttataaggggtttc

SEQ ID NO: 481824 - DNA, 609 bp, Homo sapiens
tacttctggaaaattaggaccctactcctttgtttataaaatgaaaataaaatcctgttccatccatggccctgccactgagctacagcactctcattccctgctggtcaccatctctacctctggatcatgccatctctgtcattgtagacttcagctctttgttcagttatctccattacccagattcttcccaggactccatgtgaatttgggattctgtatgaatgctcagcgcaatgtatgatccttttatcacctcaayaccctgcactacaatggccattttttccacccagcccttgactaccagtccttacagatgtaccgtccttatctctaactccagcctcttgatttcctaatgagcttgcttcattccttgggtcatcattgtggttggaccttagtgaggtttccagcccgctgagtcctgcctttctttctgtcattcttctccagagctctctcactccctcccccagctttgattctagagctcgtcatttaataatcttttttgtggtttgtctttaatgcctttggcccaggaaaggccctaataccagaagaacctcagtgttaatgtctcttgttcttataagcaca

SEQ ID NO: 481825 - DNA, 517 bp, Homo sapiens
tggagtcattgatcatgaccttgtcaatcaatcaagtcaatcacaaccttgattaaaacctttgatgggctgggtgtggtggctcactcctgtaatcccagcactttgggaggccgaggttgagagttagagaccagcctgaccaacatggagaaaccccatctctactaaaaatacaaaattagccgggtgtggtggcacatgcctgtaaccccagctactcgggaggttgaggcaggaggatctcttgaacccgggaggctgaggttgcggtgagctgagattgtgccattgcactccagcctggggaacaagagcgaaactccgtctcaaaaacaaacaaataaacaacctttgatgactccattacataaataacaaagaccaaaacccacagcagagcactgaaaggcctttataataygtcccttacctaattcaccaagctttcctcctggcatgatgcctccattcgtactgcattgagctcttttctgtctcccctgtcaaagtggcg

SEQ ID NO: 481826 - DNA, 580 bp, Homo sapiens
tctagtcttctcttgataagcaagagagaccaggaggtgagagatggcagaggatgagagaggtgatatcagtgaccagaaagagcccctaaaaagtaacttccttttctttctgttagttttaatataaaatttcgctttaatatttttagacaattcttttttaaaaaagtatttatatccaaaggttcttaccacaccaaccacagccccaatctttttgccctaacctcagaatcagttagttgtctcctttaaaacctttctctctctcacacacccacacacacacacacgcaaacacacaggagagagagagagggaatatatagtattgtttttggagtatgagtgtgtgcttcagaataaatggtttcatactctataaaaaatgagattcaaattttataatccatcaagttttattggaacacagccatgctggattgcttgtgcattgtttatggccgcctttgcactgccrtaagtctccacggtcacaatatccactcactaccacttattgttgtctttcaacagcggcatataaaatctgtaacacagttcatctcacacctaa

SEQ ID NO: 481827 - DNA, 671 bp, Homo sapiens
gtaataagaaaatctggaaagcacccagagaaaaaggacacattacataagagaaaaaacaattcaaatgacttcttcttgtaawctatggagacttgaagaccagaagtcggtgatttatatatacatatatgaaacaatatatatctctttatgagtatatatatgtgtgtgtattctttgtgtgtgtgcatatacacacacatatattcatatatctccaaaaaactgccaacccagaattctatagccagaagaaatccttaaaaaataaaggcatttcagtaaaagaaactatgaaaattcatcaccagcagacgttcactccaagaaatgctaagttaagttcctcaaactgtagggaaatgataccagagaaaaattcagatctctggaaagaaataaacagcatgggaaatagtaaatatatgggtaaatataaaagatgaggattttcatcttaatttctttaagcaactgggtgtagcactgtgtgcctatagtcccagctactccagaggttgaggcaggaggattgcctgagctcaggagttcaaggctgtagtgtgctatataacatctgtgaatagccactgaattccagcctgggcaacatagcaataccccatctctaaaaatagaatacagaagactgttcaaatttccaacat

SEQ ID NO: 481828 - DNA, 362 bp, Homo sapiens
gttggggtctgcggcaacccagaaatgcctgccaggtctaaagggatcctgtgtttgggattaaggtggatgtgggggcttgcaggctctgtggaatggagataggttgggaagggggttgggaataggagtgaggggttataggtgggtcccagagaggtagaggtgatggccaygggaaggtagaaggtgactcctaaccttgcatgagctcatttcaggggacacaaagccaaatgctgaccagggaatgaaaatgcagaaattgggcaggtgtgaggcggtggtgaaggacagggtagctgaagttgcaccacccccccttttccttaggcacccgcttgctaccactcagctccagc

SEQ ID NO: 481829 - DNA, 362 bp, Homo sapiens
gttggggtctgcggcaacccagaaatgcctgccaggtctaaagggatcctgtgtttgggattaaggtggatgtgggggcttgcaggctctgtggaatggagataggttgggaagggggttgggaataggagtgaggggttataggtgggtcccagagaggtagaggtgatggccacgggaaggtagaaggtgactcctaaccttgcatgagctcatttcaggggacacaaagccaaatgctgaccagggaatgaaaatgcagaawttgggcaggtgtgaggcggtggtgaaggacagggtagctgaagttgcaccacccccccttttccttaggcacccgcttgctaccactcagctccagc

SEQ ID NO: 481830 - DNA, 362 bp, Homo sapiens
gttggggtctgcggcaacccagaaatgcctgccaggtctaaagggatcctgtgtttgggattaaggtggatgtgggggcttgcaggctctgtggaatggagataggttgggaagggggttgggaataggagtgaggggttataggtgggtcccagagaggtagaggtgatggccacgggaaggtagaaggtgactcctaaccttgcatgagctcatttcaggggacacaaagccaaatgctgaccagggaatgaaaatgcagaaattgggcaggtgtgaggcrgtggtgaaggacagggtagctgaagttgcaccacccccccttttccttaggcacccgcttgctaccactcagctccagc

SEQ ID NO: 481831 - DNA, 585 bp, Homo sapiens
gctctggatcactaattttaatgcctgggaggtgtttcagagaaggctttggcacacctctccatccatttaatttcccatctgatcagatctctaggttgtttctaatcttttcctcttagaatcagttctgcatctatctgggttgagaatttcctcatttcaaacgcctgagtcatggggttctgttttcttctgcctctagcatttggctttgatctgcccgcttctgccctccacacattctattctggctctttcccctcccatctaggccccacccattctcctctcagagccccaggcctccaggttccgctcccctccaccctcccctctgcagccagaggatcttgaaacagcgggcatctgagattatttgtctgagctggtttcctctcctagcccaaagtggggcgagtgcagggacagggcttgtctgccttccctaggcctgtgtgcccgtgcctcacactgccatgagatgaggaagacacagtcattaaacgggatgaaagtgtacctgtctcaacaactggcttcytgctcacaggtcgagagcgatcttggctgttgaaaatatgt

SEQ ID NO: 481832 - DNA, 600 bp, Homo sapiens
tacctagggcagcaaaatgaggggtgggagattgagcagggactcagaaggggtgcattctggaagcctggggacattttaggacactcaggggactgggggcattttagagggttatagggagcctcagcagtttgaggccatctatggggatttgggaattcccaagaatttctgagttgggtcctgggagactcagragctgggaagggtctcgggaaacctgtctgtatatggagtagtattctgatgagggtttgctagaacagaccttccagctccccagaacagacttgcatcaaagcctggctatgccacttacaagctgtgctggtttaaaataggtccataaattctttgaccctcctccctgcaaaagacggagaataaatcctctcctcttgagcatgggcaggacttagtgacttgcttctgatttggcagaagtgatggtgtgtgtgacttctgagactaggtcataaaaggcatgtggcttcctcgcactttctcctgggttgccatgttgtgagtaagctcaagcagtgccacaaaggggtccacatggcaacgaactgaagcctcctgctacagccatgtgag

SEQ ID NO: 481833 - DNA, 503 bp, Homo sapiens
caggtcttggctcctgttcacacacctgttgtctaatggcaactggtacttaggacatttgaaatatctctggtggctgcatgctgcactttggttggcaatggctgtacgtctctgaaaaccttctgtgatgattgcaaaacggtacactttcatctcctttcttatgggttccrgggagccgaatgcacttgatttcaccagtaatatatgtctatagacaatttctcagatcggcgtgaagaaggtaaattatatctttcatttagaaaaatataaatctcacttttacaaaacgtgactaagaattgtcaaggcttagagagcaggaataatcagggactatatgggtgttcatgtctaataaatgcaactctgatccttaaccgtatttaaaagcgctttcagagttccgaaaccttttcatctgctccagattcactgggttctgaagccaaagctttctgaaactgttcctcctctcagcccctaagtggtgaacg

SEQ ID NO: 481834 - DNA, 503 bp, Homo sapiens
caggtcttggctcctgttcacacacctgttgtctaatggcaactggtacttaggacatttgaaatatctctggtggctgcatgctgcactttggttggcaatggctgtacgtctctgaaaaccttctgtgatgattgcaaaacggtacactttcatctcctttcttatgggttccggggagccgaatgcacttgatttcaccagtaatatatgtctatagacaatttctcagatcggcgtgaagaaggtaaattatatctttcatttagaaaaatataaatctcacttttacaaaacgtgactaagaattgtcaaggcttagagagcaggaataatcagggactatatgggtgttcatgtctaataaatgcaactctgatccttaaccrtatttaaaagcgctttcagagttccgaaaccttttcatctgctccagattcactgggttctgaagccaaagctttctgaaactgttcctcctctcagcccctaagtggtgaacg

SEQ ID NO: 481835 - DNA, 541 bp, Homo sapiens
gggaggcaaatacgatgctaagagagtgaggtacagaacaccaggtatgtctgcaacattttcacagaaatgaggtggagagtgcataaatgcatatgcctctatttgtcatatttgcataaataaactctagcatgaataacttttcagcttaacatgtacttgtttatgtatgtataactatttatatgtttacatatttcacttgcaacatttattccatctgtgtgtataaccagtaatcctccccggtctccactctgtaggaccctgcaaggtgcctggtcattggactttctactgcaggagtgtrtgggatgcacctgagccagagttccctgcagcctaggaggccaaggaatcccagggcagtcaatgtccctggtgctgaaggagatggatccccttccttcccctgcaccctcctctcaccctcgcagcatcctccagacacctggacctgctgtcaggatccaaaagcagtgctttggaagccttagggaggtaaccactgattcccatgcttctactcacattggct

SEQ ID NO: 481836 - DNA, 541 bp, Homo sapiens
gggaggcaaatacgatgctaagagagtgaggtacagaacaccaggtatgtctgcaacattttcacagaaatgaggtggagagtgcataaatgcatatgcctctatttgtcatatttgcataaataaactctagcatgaataacttttcagcttaacatgtacttgtttatgtatgtataactatttatatgtttacatatttcacttgcaacatttattccatctgtgtgtataaccagtaatcctccccggtctccactctgtaggaccctgcaaggtgcctggtcattggactttctactgcaggagtgtgygggatgcacctgagccagagttccctgcagcctaggaggccaaggaatcccagggcagtcaatgtccctggtgctgaaggagatggatccccttccttcccctgcaccctcctctcaccctcgcagcatcctccagacacctggacctgctgtcaggatccaaaagcagtgctttggaagccttagggaggtaaccactgattcccatgcttctactcacattggct

SEQ ID NO: 481837 - DNA, 618 bp, Homo sapiens
gctctgtcacccaggttaaagggcagtggtgcaatcacagcttactgcagccttcacctcccaggctcaagcaagcctcccgcctcagtctcctgagtagctgagactatagataggctcataccaccacacccagctactttttgtattttttttgcagagrtggggttttaccatgatgcccagactggtcttgaattccttggctcaagtgatccacccacctcagcctcccgaagtgctgggattataggcatgagccactgtgcccaacctttgaggcaatcttgatcattaaccccaaatgtggggttgaccatatgtcttaagttgttctggacttctacttatgcttctttgtcatggcatttttttttatgaattcacctgggattttgttaatagtgcaaaagagtttattttggggtccattcatcttggacccaggaggagttacaggctctgggtttcaaatggttcaagatccaccacctgagggcctgaggtatgtggggacctgtgtttccaatcctgtgtgtttattatcaggcgctgtctctggtccacagcatccaaagagggcaggtatggtagcaggagtcatttcccctgtgcacc

SEQ ID NO: 481838 - DNA, 525 bp, Homo sapiens
cggggacaaggccggtcctggccaccagtgtgggagggggaggagggggttcctgtgcatccgccagccccagtcgtacctgggtgccccagggtgggaactgggcatggatactgggggttccggctggggcactctttgcagccgcttcgttgccaaactggattttgacaaaggaaaatcagtggacactcatctttcagtggttctttcctagaaatwctgtatttgtgtcagtcctcagagaccgccctgtggcctcccctgaccctgggctcccctgtgagtgaggagagtgactggaagcatgcgagttctgcctctatcctatcccctgtagctcctctcagtctctgttccccacaggcagcttggttaggagccccctgtatccagcaccagtgtccttccagaaacccatctgtgctgcctgccagcgcctgccccctgcctgttgtggcagtctggtctcctgcttttcctgtccccctcctcgaaggacttcccccaggactggcagaaatc

SEQ ID NO: 481839 - DNA, 616 bp, Homo sapiens
ccaaaggcactaagcccctggggtgtaggggagggtggcagccatcactatagctccaggccatgctacttccctgttggagycagagaggctagacaacttggtcccaatttgcagacaatggccagactgcctctttaggccagaccctgatccatcccttctcactgagtggggcctccctgcagaagctccaacaaatccagctaggagctcaggaacagaaccctgatcttcctggtcctgaccccctagggggaaaagttgccatagcctccaatgaccagcaaacttagtctttcctcttgctagctctgcagaatccaggcagcccagacaaatgggtttccctccagcacggcacaccccctccaccaagggacagccaaaattcttccttaaatggttcctggttcccatgctctcaactgtgtgagacccccaataggaatctccagatactttatacaggagtgttcctacagacattaggtcactgtccctcgagatcagaaatcccaaaggaaggaggaggcacctatctttgctgttctccagcctcctctgtgggcatctccagatgcaggagtgacctggataaataggcctgaagtga

SEQ ID NO: 481840 - DNA, 616 bp, Homo sapiens
ccaaaggcactaagcccctggggtgtaggggagggtggcagccatcactatagctccaggccatgctacttccctgttggagccagrgaggctagacaacttggtcccaatttgcagacaatggccagactgcctctttaggccagaccctgatccatcccttctcactgagtggggcctccctgcagaagctccaacaaatccagctaggagctcaggaacagaaccctgatcttcctggtcctgaccccctagggggaaaagttgccatagcctccaatgaccagcaaacttagtctttcctcttgctagctctgcagaatccaggcagcccagacaaatgggtttccctccagcacggcacaccccctccaccaagggacagccaaaattcttccttaaatggttcctggttcccatgctctcaactgtgtgagacccccaataggaatctccagatactttatacaggagtgttcctacagacattaggtcactgtccctcgagatcagaaatcccaaaggaaggaggaggcacctatctttgctgttctccagcctcctctgtgggcatctccagatgcaggagtgacctggataaataggcctgaagtga

SEQ ID NO: 481841 - DNA, 511 bp, Homo sapiens
ctaactaccaaaggcactaagcccctggggtgtaggggagggtggcagccatcactatagctccaggccatgctacttccctgttggagccagagaggctagacaacttggtcccaatttgcagacaatggccagactgcctctttaggccagaccctgatccatcccttctcactgagtggggcctccctgcagaagctccaacaaatccagctaggagctcaggaacagaaccctgatcttcctggtyctgaccccctagggggaaaagttgccatagcctccaatgaccagcaaacttagtctttcctcttgctagctctgcagaatccaggcagcccagacaaatgggtttccctccagcacggcacaccccctccaccaagggacagccaaaattcttccttaaatggttcctggttcccatgctctcaactgtgtgagacccccaataggaatctccagatactttatacaggagtgttcctacagacattaggtcactgtccct

SEQ ID NO: 481842 - DNA, 387 bp, Homo sapiens
tgtggacctggagaaccgctgccagagcctgcaggaggagctggacttccggaagagtgtgttcgaggaggtgagtgagtggcctggcctccagcctggcacagcggaaacrcaaagtccaccctcatggctgtggagggcggaagcctgagggcaccgtgtggccggggtccctcccacggctctagggaggctccttcctgcctcttagggtgcccttggcttcggctgcgtctccccagtgtctgcctctgtcttcccgcggctgcctcccctgtgtccatactctgtgtatcctacaaggacacttgtcattggatttggggcctgcctggatcatccagagtgacctaatggcatctgcagagaccccatttccaaataagg

SEQ ID NO: 481843 - DNA, 636 bp, Homo sapiens
agggcaaggcccccggacaggaatctgggtttaaaggatgccttgtccctctctcagcctgatatagagacaagtatatgaacagcaggatcagaacatgttcagaagagttcctgtggccggagggccagaaggtgggggtggaaggtgaggttacagagggaggcaattggggtcagatcctgagagctttctagactaagccagagcaacttggaaaaaaggatccaccagcttctcgaaaaagcacttagcctgtgagtgtcagggcaggcctagaattcaggtccaagggagtagcttgtccaacatcttctctttaagcagagactgagaccccttccagctctgacatcctctgactctcraatgtgatttgcagactcaaccattgcacccttggagactgctgttggataattcttacacagttcgtggcttcagtgacagaagtgtgatctgtcaaagctctgggcaccagaagctggatgttggcagggccatgctccctcccaaggctctagaaaagaactctttcttcctctttcagattctggtggctccaggtgccccttggcttggggcagcttctctccagtctctgcctccactttcaatggccctcatttcttctgc

SEQ ID NO: 481844 - DNA, 624 bp, Homo sapiens
ttagaatgtgagctaaagactcacaaggctcacaactttggaaaggagatctttatttctcatgaaggcctgcaacctgcaggctggccatcccacgggctgggaagtgtagcctccagccaaagcccaaagcaagcatgttgagggaggtgtggagggaacaggaatttaggctcaacaggctggctaaacataagtatttaacaagctataggagacatcatgaatatctgtgaaaggagaaacaagcacatgtgcaactgagcttcatgcttcttcatgggtcacatgttttaaaaaatggtgatgttggcatgatctaagagtggatatctgggccctcagatatccaaaaggtgacacagagaaggacacaaaaactctcactaagcatcctccacaaattggccaaaactagtccagagatggtcagtttttaggtggggaagcatcgtgaaactgctgagctgttgggtcaaatgtgtctatgtcaaatgaatccagttgtagcctcagatgactggctaaaggtgatkaaaaaatgagttgtctgtttcttgctttctagagctggtttctgtttactccttaggaaggaattctggttaaaggataatgaggaag

SEQ ID NO: 481845 - DNA, 452 bp, Homo sapiens
cttgagcttcctggtccactgtttttgattggctcctggggtgcattggagacctgcaggtgtctgaactgccaaagtgagtcctacacctgggacaaacgctcttggtctgtccagagctgtcccttccacaaatctgtgtctcttgttgtccctcaggttcacctaggacagcctaggtcatgtctcaaggatgttgaatggtaaacaacacagmccccccgggcagtgcaggcctctgagaaccactttcattgcatgcaatgtagggacattatcaggtaagagacgagatgctgcctccagccagaggcagaggatgtcagggacagtgtgtcccgcaagagtgaaactcaggctgcatcctcaagggagggatagtttcaggtggaggaggatattctgggctccgcgggcaaaggaatattgtctgatgagagaataagagctgt

SEQ ID NO: 481846 - DNA, 611 bp, Homo sapiens
gaggggtcactttgaggagaatttatgatctaaattacctaatacctggtgaacttctaatatgcatgatgaagtctgtctatggtattaaaaagataaacttcatgtcccaagactgtagcaaataaattcatcctgaagagggatccaagtatctcatcttctcctaccccaggtaaaaacccgaaaaccctgcccyggaggaagggattttcaccaggttgcattgcacaagcatcttcccagcctgggtcaggatggcctcacgtggtcatcaaacattaatccattctttggagagaaatctaagtcctgaaataattgtgtgttgataaaatatagcaataaaatacaacattcccttgccactgcggagtgcacgtcaaccaagaaaaacagcagaggaagctgcgggacacgttgtgggcactgcggctgtggctgctgccagatctgtccttcagtccaggtgacaactggcaatgcaacacctcacctgcgcacctggggtcagccttctctccatgcctggctgctgccacttttcctgctctgatgggcatgggagttgccaggctgacactggtggtgtctgggataagcccttggca

SEQ ID NO: 481847 - DNA, 525 bp, Homo sapiens
aaggactcctgggtctttacgggaggaggtaggggatagcgcttccgtctgaggaaggcaggctgggagctcagtctcctgagtccctgacagggcaggagatgagtgttggggactttagccctatgcagatggaagtggaaacggaggctcatgaggaggtagagatggaggcggggggagcgggrggttgtccagaggctggactctgtgatccctgagggcgtgggttctgggggttgggccttcagagtcctggaggactggggatgcccctcctcaggccctggagtgggggaggctgctctccctaatccctgtggttaggaactgagcatgcagcccccgtgagaagggtggggccgggggctgccctcctgggcctcagtagggagtgggacgcggggtccctaagagcagaagccaggtaggggtgggtctgggagaggcagaggaggggctggagggtgagcagccactgggaatggaggggagcgtgagtgttaaccccgcgggggccaggcc

SEQ ID NO: 481848 - DNA, 525 bp, Homo sapiens
aaggactcctgggtctttacgggaggaggtaggggatagcgcttccgtctgaggaaggcaggctgggagctcagtctcctgagtccctgacagggcaggagatgagtgttggggactttagccctatgcagatggaagtggaaacggaggctcatgaggaggtagagatggaggcggggggagcggggggttgtccagaggctggactctgtgatccctgagggcgtgggttctgggggttgggccttcagagtcctggaggactggggatgcccctcctcaggccctggagtsggggaggctgctctccctaatccctgtggttaggaactgagcatgcagcccccgtgagaagggtggggccgggggctgccctcctgggcctcagtagggagtgggacgcggggtccctaagagcagaagccaggtaggggtgggtctgggagaggcagaggaggggctggagggtgagcagccactgggaatggaggggagcgtgagtgttaaccccgcgggggccaggcc

SEQ ID NO: 481849 - DNA, 636 bp, Homo sapiens
ctaatggcatatagtgggtaggtgagaaggcagagaagttgggggctctgggggctgcaatcacctcctcattgaacagcttgctggtgtcctttttgatgagatccaggtactgcacttgacccgctgagaagcccaccagcagcgagatggtctcggtggcagcagtgaactggttgaaatcgtggcaggtgggctgggtgcccttgtagatccgcttgtcaattggcttgttgaggtcaatggacttgaggggtgggagaaaaggagttaatggtgtatgccactgaggagaaggaagaggatgttgaggttgggggaaaccactaagaggaagcagggttagaacccagagggaagtggggaggtgagtaggtggattgcgaaggacggggcaaccacagacgggaargggacccaaatcacagacaagagtagcaaaaaagatggtaaggatcccccttgaccacagtgcctccccaaagttgggtcacctctaattcagagacacccttgtccacataatcagggttctgggtccacacagttcctaagctccgattccttttagcctcaccactccatcctataacctcagcaactcccttgggacctagtaccacactattccaagac

SEQ ID NO: 481850 - DNA, 509 bp, Homo sapiens
ctgcgatgcctgcgctgacggcagctcctgctgtgcagactcaggagctgaataaatgacagttgtggttctaggctaccaaatttggggtgattcattacgcagcaatgagtaacaaagattaatgaaaggtgcccactccatccacaggtgctgttaggctaccacaarcgccccttacaggtgtgagccttacaggtcatacgccagagcatttcagtgagcacgggccgggggctcagcagcatttccggtgagcacgggccgggggctcagcatttccggtgagcacgggccgagggctcagcagcaattccggtgagcacgggccgggggctcagcatttcagtgagcacgggccgggggctcggcatttccagtgagcacgggccgggtgctccgcagcatttccggtgagcacgggccgggggctcagcagcatttccggtgagcacgggccgggggctcagcatttccggtgagcacgggccgggggctcagcagcattt

SEQ ID NO: 481851 - DNA, 231 bp, Homo sapiens
cagcccttcaccgcccccggctggtccagccaacaccctctcccacctggacccccagcccttcaccgcgccccckgctggtccagccaacaccctctcccacctggacccccagcccttcaccgcccccggctggtccagccaacaccctcgcccaaatggactcccagtccccaccagccagtcaaagcatccctcccccagcctcagcgatgggttcagagaaaccca

SEQ ID NO: 481852 - DNA, 231 bp, Homo sapiens
cagcccttcaccgcccccggctggtccagccaacaccctctcccacctggacccccagcccttcaccgcgcccccggctggtccagccaacaccctctcccacctggacccccagcccttcaccrcccccggctggtccagccaacaccctcgcccaaatggactcccagtccccaccagccagtcaaagcatccctcccccagcctcagcgatgggttcagagaaaccca

SEQ ID NO: 481853 - DNA, 527 bp, Homo sapiens
gagattcacacagagggagagggagtctacctactggtggaaagaatggcaaagtcacattggaaagagagaggggatggggggcaatgccattttttcaaataattaatcacaggagagatacagcaaagggccctggtgatggcctgtagaattaccaggagtcccaactaagccacacagggcctgggtttcttgcggctccaccctcacaccttccaccccttccttgctgcagtaaccctgctgtttcccctaaacacgcgaaaaccattttgctctgctacgtttttcactgacagttgagaatacttttttttacccatttatgggtgcaaattaatgagatgacaacagactgaaaccaatgacaactgctaatctgtaagcaaaaacaagggatgaggagccgagagcagtgcagctgttttattttaattgaggaatgattttatgttaggaacactcaatattcacagcaaattaaaaatartgaagtgaattgataccaatgatttttttttttt

SEQ ID NO: 481854 - DNA, 394 bp, Homo sapiens
tgtcttggggggatctgaggggatatggtcttgtcgggggtagaaggagggtctgtgtgagccacagatctcccaacccatccaactctccctttcaggtcactgcagaaagagtccagaatagaacactagggaagaagagaatttgaggtttgagsagagtgggcccagacaggaggctgagaaggaacagtcagagggatagcagggaagccagtggactatgccgtgggagaagaagttgtgtgggtgtggggtgggagggggtggggagggagcgcttttacagggagaaaccactccgacatgcaaatagaaggaatgggccaggaggggcccctacacctggtctagagtcctgcgagggacccacggacactcacggcagaagctg

SEQ ID NO: 481855 - DNA, 547 bp, Homo sapiens
ctggaaaggcagagccacgaacacgccgtcgacctgcgggcgggggatggcggcggggggatggggcgcggtgagtggagagaacacgggtttgaatcctggccccaccacctactagctgtgggacccagagcatgtcacctcccctctgaaaataataatgagcatctataggccgggcctggtggcaaagcctgcaatcccagtactttggaaggacgagatgggaggatcacttgaggtcagaagttcagacccgcctgggcaacatagtgagacccccatctctacaaaaaaaatgaaaaattagccagcatggtggcctgcgcctttagtcccagccacttgggaggcggaggccaaggcgggaggatggattgagcccagcagttccaggctacagtgagccctaatcctgtcactgcactccagcctgggcaacagagtcaggctaagaaaagaaagaaagaaagaaaaacagaaaagaaaaaacaaagagcctctatasgctcatgtcactgactcctcatccttctcaaaaacaggt

SEQ ID NO: 481856 - DNA, 596 bp, Homo sapiens
tgtagatagtgcttactatgtatctggtaccgttttaagtgctatgtgtgcatatttttatatatgcattacatatctaaaaactttttattctgaaaacgttcaaacatgcaaaaattaagagaatagtggaatgactgtccatgtacttacccatcacttagcttcaaaaataagccatattctcccgatcttgtttgatgtctaccccacgtatctctcctatctgaatgttttaaaggaaacccttttctgtttttgtttttktttttccttgagatggggtctcgctctgtcactcaggctggagtgcagtggcgcagttttgcctcactgcaagctccgcctcccgagttcacaccattctcctgcctcagcctcccgagtagctgggactataggcgcccgccaccacgcccgactaattttttgtatttttagtagagacggggtttcaccgtgttagccaggatggtctcaatcttctgacctcgtgatccacccgcctcggcttcccaaagtgctgggattacaagcatgtgccaccgcgcccggcctacccttttcattttatctaaattttacatgtctgaata

SEQ ID NO: 481857 - DNA, 409 bp, Homo sapiens
ggcactagcacagagcctggcataagggggggytctcccaggtgggagctgccatcctgagggacattagagtcacctctgcttccctgggggctgctgagaatgggggggtcctcagtgtgcagaccctttatctgtggggggaaccagagcccatgtggaccagccaggacacaaaaggatgtgggaatctgccctagggatatgtcctgaggccacactgccgtcccaaaccacctcccatggggacctttccctataaagcaatccccagactgaaatcattccaggatgagaaaacacatcctcttgagcagacagcttgtcttccctctctgctttggtatttaccttcggatcctgggacagccccaagagagaaggagcagaggtcagcagaaaccccctg

SEQ ID NO: 481858 - DNA, 592 bp, Homo sapiens
ctggcaggccgggtggagagcaggcagaaatcaggcggcagaatcttcctttgaaccaagcaaaggtcagaaagagccttgactccttggtacagagaatctgacagtgtctctgggtacgttcctagaaatgcatcttggggctggacacagcgactcatgcctgtaatcccagcactttgggaggccaaggagagcggatcatttgaggtcagtttgagrtcagcctggccaacatggtgaaaccccatctctactaaaaatacaaaaattagccgggcgtgggggcacatgcctgtaatcccagctactcgagaggctgaggcagaagaatcgcttgaacctgggaggcagaggttgcagtgagccaaggtcgtgccactgcacttcagcctgggcaacagaacaagactctatctcaaaaagaaaaaaaaaagaaatgacatctcaggtcggtcctgtggccacagaataataactctgacatccaggtcctaatccccagaatctgtaaatgtggtgccttccatggccaaagcgactctgcaagtgggactgagtgaagggcatggagatgggagataatcctgat

SEQ ID NO: 481859 - DNA, 592 bp, Homo sapiens
ctggcaggccgggtggagagcaggcagaaatcaggcggcagaatcttcctttgaaccaagcaaaggtcagaaagagccttgactccttggtacagagaatctgacagtgtctctgggtacgttcctagaaatgcatcttggggctggacacagcgactcatgcctgtaatcccagcactttgggaggccaaggagagcggatcatttgaggtcagtttgagatcagcctggccaacatggtgaaaccccatctctactaaaaatacaaaaattagccgggcgtgggggcacatgcctgtaatcccagctactygagaggctgaggcagaagaatcgcttgaacctgggaggcagaggttgcagtgagccaaggtcgtgccactgcacttcagcctgggcaacagaacaagactctatctcaaaaagaaaaaaaaaagaaatgacatctcaggtcggtcctgtggccacagaataataactctgacatccaggtcctaatccccagaatctgtaaatgtggtgccttccatggccaaagcgactctgcaagtgggactgagtgaagggcatggagatgggagataatcctgat

SEQ ID NO: 481860 - DNA, 513 bp, Homo sapiens
gctgacatccaccctctcaagaggagatgtatggacagaagacctggctcagaaacactgctctatgaaaagggcagatagttatgtaagaattttgcaaaaacttgagaaattaaaataagggagactatgaatgcaaaaacattaactgtcaagcaagtaagagataattcaaagaattttttaaaaagatgtagtccacataacttaaatcatgaggaagactggcagatgacagcatcagagtggatttcctaaataactgaggaggtgactgggaaaactgagccacctaccaaaacagctttacagagccaatgcatctcaattgttgtagaagaagatgagttctagaactcttatttactctaaagttttcaaatacattgaacaccacttaatgttttcctcaatcccaagcttcttgtaaaactttgaccctgccaaccatggcatcttagaggcagataaaagcttacctactttmtggaacttcagatttctaaatatagc

SEQ ID NO: 481861 - DNA, 608 bp, Homo sapiens
ctgcgaacctctctgagggggcccgggctgaccctcctcccagggagccctcctggctcagggtgccgggtgacagtgggggtgtgtgtggagctatcaaaatgctttgcagtttgccgaggaattacaggaactggctttggtatctggaaatgcctgtctgcagagggtggctgtggggtgcagcttgatggcagggaccgggacaggcagagccaggggtggctcagtggcttgttggctgggcctcggctgctgctgctgtggacaagttgacagggaactcagtgttaaggcctctggctgattctttgggccagtggattgttaaaaaaaaaaaaaaaatcatctcatctccagcacttgagcgcatgcagcgttccagaggcccaggctaggccctccactctatttctctttttgtcattgttttgagacagggtctctggcctccccttgtcatccaggctggagtgcagtggcgtgatcacagctcactgcagcttcaacctcccaggctcaagcagtcctcccacctcagccacccgtgtagctggaactacaggcttgcgccaccaygcccagctaatttttaatttttttgtaca

SEQ ID NO: 481862 - DNA, 547 bp, Homo sapiens
agactcgaagccacatgctcttctagggaaaggccaggggtccttcctgtggggagaaatcaagaaggttccccatgccccaaaccaatatgcaatgtccttcctccatttaaccacaagaattttatttttttttaatgagtctatgagcaacgtattctttcacagatgactgagagaatgtgacaaagaagataatgaaacaggatggatatccatgcacatccatcttgaagcaacttttcaaagacaatggaagccctaacatccctttgatgaaacgaagctacacagaaacacagcaagtaacatatgactgggtacaaatggtaaaattaaaggcaaacattgttgatgagctcactagagcttgaagtatggaagcacaatattagccttggaggaaaataacttcattgaaatatgtccttcctgccacacagctttgctaagattctgaaagcattctgtctctttcagcctctggctgtctgtcactaggcattttcaatasaacgaacagagaagagagtttgggaatgaaagt

SEQ ID NO: 481863 - DNA, 605 bp, Homo sapiens
tataatagaataagaaaaaactgtaatatcaattatttaaatgtggtataattgtaggtgattttttctttattcttgatatgtactggcatttaaaaaatttactacaattaatatatattttttatagatgaatatgtctgatataacatggaatcatcaacccatggtgttctcaagaaataatagcccaatataaatgcaaggtactgctattagcmtaaatgtttacttgagtaaatttatgaaagaagttcaatgtcactactattcacagaaatatgaattaaaacaatcacaatgatttccctccacgtttgctgaagttctgtgctgctgaagatagaaagaacagtcctcttcaaacactgctgcctggagtgtgtaattggtacagtctttttggaaagcagtgtgtcattatctaccaaaattttaaatgaacacaccttgaaaattagcaatttcacagctaggacagattctacaaacacatctacccaagtgaataaaattgatgtacaaaatgttcattgcagtatcttttataatagcaaagtactggggacaatctaaatgtccatcaaaagaagaatgtttaaaca

SEQ ID NO: 481864 - DNA, 592 bp, Homo sapiens
tgtaaaattaatagaactctctagtgctagcatgggagcaggtgctctttcttcctctgtgtaccctcccatgctatcttagtaactgatatgtattagttgctaaatacacatttatctaataagtgaagaaatgaataataagtctgagatctttatctggacraatattttgtcgtatttaagggtctctaggatccactcggtttgcctttgcatctgttatttatctttttgctgcaaccacaaattgggctggaatataatattacagtgatgagtcagtgtggactttcaacacagaagatctcaacctgaaacatccttaggattggcagtgcgttaaaaaatgagtttgttctactcaaatgccaatttgttctttaaaaatcaacatagcatgcaagcattggatcttcagaagtgatgagtttttatagttttttagtcccattcttcagccaatgaagcaatttgctctttatcaccccagacattaatcacccaatgtgctgattgaatttttccatcattatttttaaatcctggaggtggcgaggatggaagcaaaattagggacccattgtctgac

SEQ ID NO: 481865 - DNA, 592 bp, Homo sapiens
tgtaaaattaatagaactctctagtgctagcatgggagcaggtgctctttcttcctctgtgtaccctcccatgctatcttagtaactgatatgtattagttgctaaatacacatttatctaataagtgaagaaatgaataataagtctgagatctttatctggacgaatattttgtcgtatttaagggtctctaggatccactcggtttgcctttgcatctgttatttatctttttgctgcaaccacaaattgggctggaatataatattacagtgatgagtcagtgtggactttcaacacagaagatctcaacctgaaacatccttaggattggcagtgcgttaaaaaatgagtttgttctactcaaatrccaatttgttctttaaaaatcaacatagcatgcaagcattggatcttcagaagtgatgagtttttatagttttttagtcccattcttcagccaatgaagcaatttgctctttatcaccccagacattaatcacccaatgtgctgattgaatttttccatcattatttttaaatcctggaggtggcgaggatggaagcaaaattagggacccattgtctgac

SEQ ID NO: 481866 - DNA, 610 bp, Homo sapiens
gattttttttttaataccaagaagttcaagaaagcaccctatgaaattaacaatcttcttaatccatagaacgtgaagaagtcagggtaatgggtgccaatgaaaaacaattatgtactattttgtaactctcctccttccccatttcagccaaagatggggtcagatagcctyttgccatttggaaagaagatgagcaaaaatgtagaaaaagcaaacgcaactcctatccccaacattgtcagcaccattgctgtaaactgacaaagagatgtgtccctaaagtaagctacatttaccattaattcttcactcccccacggaagcattctggtctaatgaatgccatcacgaacatttctgatcactccaatcttcccaggaagaatcctcctcccttctattttatctttcagactgtttatctctggctctttacagcggatcatgtgactcaatcactaacctcttatgaacccccaaatactccagtttgtaactcatgatcaaacgatcctgtaacatctttagtcccatctttgaaagtttgtttccccccgccactacactgcttttaatgactctctcaagaaaatactattttatatac

SEQ ID NO: 481867 - DNA, 614 bp, Homo sapiens
gcctccccagccatgtggaactataaggcccattaaacctctttttcttcccagtctctggtatgtctttatcagcagtgtgaaaacagactaacacaattagtgatgctgagcaccttttcttatagttggtggtcataatatgtcttctttggagaaatggcttttcaggtcctttgcctacttttaaatcwggttatttgggtttgggattttttttttttaatctgatatatggtttgcaaatattaatattttctctcattctttaggttgccttttcactctgttgattgtttccattgctgtgcagaaaccatttagtttgatgcaatctcatttatctattttgttacctgtgcttttgtcgtcatatccaaaaaaatttgttgcccagaccaatgtcaagacacgttttcctatgttttcttcaaggagttttaccatttccagccttatgtttaagtcgttaatccattttgagttggtttttgttatgaataatggtcctaggcaaaaaagtaagaattaaatgtggtgtttccttatctcaagcatcacagccctgtgctatctattgtctaatatctgagaatagttttttcatacatgtt

SEQ ID NO: 481868 - DNA, 621 bp, Homo sapiens
tgaacaagttgatctaaagctaaagctactgaagaactcgctttataacctataataaaaatagttaaaactattattacttataaggaattttttatatgtcaacctttgagctaataattgtatgtgtatggtgtgttttatgtacatgagcatacatatataacatatatatgctatatataacatagatgtatatatgtatataaatgtgcatgtatataatttaatttatttctcatagatattctatgaagatattgttataggtacagaaataaatgcttaacaggattgtattacaagatagtaactggtaaatcaaggattcagmtgattttcctaactcactaattctatctgtatcttctttccattcttttcaactcattaacataggttcccatgaactcaaacattactcgatggcataagaaaggataatatattcaggagctctatggtctcacaaaatgccaaaagctcactttccaaccactcttccgggcctccttggcaagctttccaccatcactcccagcactgtcaagatgtgatgcttttctttcttctcttttttaagtgctttaagctctgagccatcattatttaattttaaat

SEQ ID NO: 481869 - DNA, 472 bp, Homo sapiens
tcgtcctgatttttggactcaagagccaaagagtcatgccaatgtgactctgttgactgaaatcataagctataaaattttggaaattttggttacctgagttcttgccacatggaaaaaactctttagaaagagataagaatgagcttgacatatggagaaaagaagcacggctaagagacagggaaacaagcttgatgctggagtttggttctcgatactataaaagatattgacctttctccaatcatggttgtcccattctttcatagcttagccttccattaaaatcccctcttttgcttaaatcaattcaagtgggattttgttcactcataagttagccaaattaataaagcttctttttcttctccmagatgttaccattctctaactgtccttttcttcttttatttttctttgccttattccaaggagcctgaatcctatccaatgacttcaaatatccttg

SEQ ID NO: 481870 - DNA, 519 bp, Homo sapiens
accagactcagcctggaattggggaaactggggctgggggcaggggaagcctgcttgaaggaagattggacactagatacataaaaggagggggaagctgtackagacagagaaactatacggtcaacaaaagcaacaagctgtaaagagtaaagtctgtgggttagggataggagagggatcaagaaataaacagaaatacttatcaagaaacactgggaggtaagcatagagagctgaactggggctggatatggcagtatagtgggttgaatggtagtcccccaaaagatatgaatatatcctaattcccagaacttctgaatattagctatttggggaaagaatctttgcagatgtaactaagttaaagatcttgagatttaaagatcatccttgattgtctgggtggacctacatgccatgacagatgtcataagagtaaggcaggaggatatttgacagacagggaggagaaaacacagaagaggaggagacactgtgcagatggatgcagaa

SEQ ID NO: 481871 - DNA, 587 bp, Homo sapiens
attctattttaatctatcaaatgcccaaaacaggtgctggacatgtcctacattgtcactaatcctccttgtcactaataagcttgtgtataaatagcagagacagcatcaaaaaccaggtctctcagacttcaaagcccatgttttttccaccagattaaatttcccttcttcagggcccatattggaactccaaaagggtacagggttgcgatgttcagctaaactgagtaagcaaaacagctttgcacagtccacagagccaaaagcggaagacaatttcttgcatatttgaagcatatatctcttaaaattctgttgtcctcaacacaaatacaattcaatgattttatggaataggattgtccctccacacagataawagaagataattggctttaaagatcatattgaaagattgcctgtggttgcagttatgtacaaaaaagaaaagcagaaattttaatgtggagaggacagagcaggtacacaagcagccccaggtgaggcctttgcttcaggcatccatctcaaatggcaacctaagattgaagaaggatacagtgtcacctttacccatgcaagga

SEQ ID NO: 481872 - DNA, 592 bp, Homo sapiens
tgtaacaaatcttagactttatacagttggagacctccaattctctcccctcccttaacagagggaaattttcctttagtgtgagtctttcaattctatgtcatttaaaatgttactacattttaaaatcaataaacaacataatgaataacaatgtgtttacttcgactttatgtaaagtgatgtcacatcatatcataacatagcttgctttgtcccccgacccaaaattttccctccataaaagcagcttctttttccctccaaattgtattctttagatttacctatgtcaataatacaaactcaatttattcattttgactgctttctcatatttgtgtgtgaatatggctttttctgatttggttttttttttttttttttttttgagatgggagtctygctctgttgcggctggactgcagtggcacgatttctgctcactgcaagctccgcctcccaggttcacgccattctcctgcctcagcctcccgagtagctgggactacaggggcccgccaccatgcccggctaatttttgttttagtagagatggggtttcaccgtgttagccaggatggtctcgatc

SEQ ID NO: 481873 - DNA, 411 bp, Homo sapiens
atttcaccagtagtttttcaaatgttgaatgctctaggaatgtatgaatcaaggaatattttttacatttctttcagatttttatctttggtgggaaattaacaaatatttmcatctgatcaaataaaaatattgaaaacaaaccaacaaaaggtaccagaacgaaggtacaaatactaaaagtccacacctcaaataataaaaccaacatagccttttccttcatcttcattaactttacatgttagatggattaacattttaaatgttataaaatgagatcatacaataaatagaagaaatatgggatgcatttttttatcttagactaggggaatgttttctaagcctgatcgcaaaacagaaacacaacaaaagtgattgtgtaatttacctgcataaaatttctgt

SEQ ID NO: 481874 - DNA, 502 bp, Homo sapiens
tgtgtttgaagaaattaattcatcaaattcaccaggacttcatgttcagtgtccattttacagcatatatgtatatayatacatatatatatacacatataatatgtatacatatacatatatatatatacacatataatatgtatacatatacatatatatataaaatcatttcttcagagagatttaatgttttaggaaattgcatttctgtataagtttgtttaaaaacaaaatccttttggtagctttgcaacaaagtgattaaccatatataagtttgggtttttttcctagttgttctgattgcaaatgtaaggttctcctaatatgcatgaattaaaagttaaaaacagtttaaacacttccttacaacacaatttacacacagaaaaaaactttaagtcacgtttctattgtttattaattaacaaataaaaattgcacatatcatatgttcctttcattctctcacacattcataaaataaatgtcagtcacg

SEQ ID NO: 481875 - DNA, 502 bp, Homo sapiens
tgtgtttgaagaaattaattcatcaaattcaccaggacttcatgttcagtgtccattttacagcatatatgtatatatatacatatatatatacacatataatatgtatacatatacatatatatatatacacatataatatgtatacatatacatatatatataaaatcatttcttcagagagatttaatgttttaggaaattgcatttctgyataagtttgtttaaaaacaaaatccttttggtagctttgcaacaaagtgattaaccatatataagtttgggtttttttcctagttgttctgattgcaaatgtaaggttctcctaatatgcatgaattaaaagttaaaaacagtttaaacacttccttacaacacaatttacacacagaaaaaaactttaagtcacgtttctattgtttattaattaacaaataaaaattgcacatatcatatgttcctttcattctctcacacattcataaaataaatgtcagtcacg

SEQ ID NO: 481876 - DNA, 502 bp, Homo sapiens
tgtgtttgaagaaattaattcatcaaattcaccaggacttcatgttcagtgtccattttacagcatatatgtatatatatacatatatatatacacatataatatgtatacatatacatatatatatatacacatataatatgtatacatatacatatatatataaaatcatttcttcagagagatttaatgttttaggaaattgcatttctgtataagtttgtttaaaaacaaaatccttttggtagctttgcaacaaagtgattaaccatatataagtttgggtttttttcctagttgttctgattgcaaatgtaaggttctcctaatatgcatgawttaaaagttaaaaacagtttaaacacttccttacaacacaatttacacacagaaaaaaactttaagtcacgtttctattgtttattaattaacaaataaaaattgcacatatcatatgttcctttcattctctcacacattcataaaataaatgtcagtcacg

SEQ ID NO: 481877 - DNA, 587 bp, Homo sapiens
tactatgtatgttttcaactcaacaagtcttcaaaaaattgcttagatatccaaaaggaaataggattatgccctttgaatttatttaccatgttctttgaagatagcaatttccctgccttagaagataaaacaatgagacaaattcagtcagaaaataaactcagtttagataacttggggaaaataattcgaatgcatttatyagaaatgtattcaaaatatatttttgacattattgagaaaaaactatttaaaaatattttattttcaatagttaacatattttaaatttattgacttgtaaatctggaaataccattggaaaaaaacacatctgtttgtttaccatggaatttctgaggatgagaatgcccaggtctatttttacctatatatttgcttatataaagatgcagagttaatatgcactaagaacaagaaaagtcattcttgaaaattattggactgtttactgtgttgtgatgctgcaatattatttaaagaattattcccctttgaatcaatataattactcagttggggtactgtggtcagccagagggtatatccaaatattgcacttt

SEQ ID NO: 481878 - DNA, 641 bp, Homo sapiens
tgatagcttgaaattattaagttgatagttttctaaaaagtagttgacttgggccataaaactaaggtttttttctctttttgaccaaataactracatctattaattctcgcaattaatggtcagacattgaccctatttctctacactattaagtacccagtggactctattttaagatgatagttgatttcttatgaaattatctttggaaatacagaagttagcatgtgtagagaagaaatgctggatgcaatgatggtggtagtgagactatataaattgcaaaataaatgtttcctggatgtcttatttttaatttttaaatgtttactgaagaaggaactctagaaatcatgtcgtttacccttgccaattttctgactaggagaaagggatttctaagccttccatcaatctatttaaatgactagcataaataacactattgcttctaggaaagtaatttgctaatcagagaaaaataaagtagagctgtttgtataatgcctctacatgctcactggctgtaaagctattttattttggtatagactggctaatttaaagctgttgtctagatagcagtggccttcttatcttctatatgtgttatcattaataaaatagatgagcaaaaa

SEQ ID NO: 481879 - DNA, 331 bp, Homo sapiens
caggcacaagccactacacccagttaatttttgkatttctttttttttttttttttttttttgtagagatgggtttcaccatgttgcccaggttggctctccctcactttaatgtgcttcttgaattttgccaaggaatacaaacaatgaaattacaataaaaatgattcttaactgtttactgaaaacaaggaatctgacatgatacgctattctaatgtacaaatatattcaaaaatatattttacttttacaaaggtttaatattgcagtgtctttgtgttagggagaaattaatgtgtaatctttctctagcaagtaaaaaattgta

SEQ ID NO: 481880 - DNA, 331 bp, Homo sapiens
caggcacaagccactacacccagttaatttttggatttctttttttttttttttttttttttgtagagatgggtttcaccatgttgcccaggttggctctccctcactttaatgtgcttcttraattttgccaaggaatacaaacaatgaaattacaataaaaatgattcttaactgtttactgaaaacaaggaatctgacatgatacgctattctaatgtacaaatatattcaaaaatatattttacttttacaaaggtttaatattgcagtgtctttgtgttagggagaaattaatgtgtaatctttctctagcaagtaaaaaattgta

SEQ ID NO: 481881 - DNA, 622 bp, Homo sapiens
ctgatggagtaatgccagcctgagtccaaaggcctgagaaccagggtcactgatggcataagttccagtctaaaagttggcagcctcaagctccaagaagagccagtgtttcagtttgcctcctaactcagggaaagaccaatgtctcagttcaagagagtcaggcagaagaagttccctctttgttctacccagggtttcaactggttggacgagaggcaaccagtcagggagggcaatctgctttgctcagtatactgattcaaatgttagccttatccaaaagcaccctaacagacacactcacaacaatgcttgaccaaacatctgggcacctgtggcccattcaatatgacacataaaattaatcatcacaatattcctacagcaactagcgtaacttgaaagatctcatcatacatatcttttttactttccttaactgtgtttcagagtctcagttgcattgtkgtcattacatctgatagaaaaacaaagccagaacaggtattagaagtcccaccaaatctgaccaaaggcctttggaaaagaggatgctccatcctgtctgagcatattcactgtgtttgacactcttatttttgggcattggctgctgacc

SEQ ID NO: 481882 - DNA, 669 bp, Homo sapiens
ggataaatctgctacagcaaatgaaaaaacaatcattcttcactaagttaatatgagttttactattataactaggaggcaaataaaaaggagttgaacattatccataataaaagaagcacacactcacaaagctccataccaactacattaaagtggaaatcactatatttggaaatacaatttaattggaaaacattaagtaatttcatcaaacwttttttagtgctttgacaagcaattacataaatttactccagtaggttcatcaggatatagttctattgacatacctttactatttttaaataaatatcagctgatcttaaaaactttttaatcaaaaccgcctctcccaaatcaaatgctaaagaaatctttgattatactcccctacccatagacaacctgcactaaactctatgaagatataaaatacctttcatctgtataatgatgttggtcaggctcttactcattcatttacttatttgttcactcaattacatattctgtactcaatcgtttgtgtccccatttcatttatgtattctgtattcaatcatctgtatttgcattaaatctgtgactcttgtcagggtgcacatcataattaacagaagtaaattcatgacagttgcccaatttgggtgcacagttaggcaacca

SEQ ID NO: 481883 - DNA, 669 bp, Homo sapiens
ggataaatctgctacagcaaatgaaaaaacaatcattcttcactaagttaatatgagttttactattataactaggaggcaaataaaaaggagttgaacattatccataataaaagaagcacacactcacaaagctccataccaactacattaaagtggaaatcactatatttggaaatacaatttaattggaaaacattaagtaatttcatcaaactttttttagtgctttgacaagcaattacataaatttactccagtaggttcatcaggatatagttctattgacatacctttactatttttaaataaatatcagctgatcttaaaaactttttaatcaaaaccgcctctcccaaatcaaatgctaaagaaatctttgattatactcccctacccatagacaacctgcactaaactctatgaagatataaaatacctttcatctgtataatgatgttkgtcaggctcttactcattcatttacttatttgttcactcaattacatattctgtactcaatcgtttgtgtccccatttcatttatgtattctgtattcaatcatctgtatttgcattaaatctgtgactcttgtcagggtgcacatcataattaacagaagtaaattcatgacagttgcccaatttgggtgcacagttaggcaacca

SEQ ID NO: 481884 - DNA, 610 bp, Homo sapiens
ctggtgtaatcattacccagattaaaaaatagaatattaccagcagtgtaaaatctccttgggactgtaaacgtatcagttatatccctcttccactactctagaggtaactgctaatctgatttatggtaatcattcttagcctttctttatagaactactctctatgtgtacatgtgaatataatatagtttagatttcagtgttttaattttatgtaaatggcaacatattgaggcattgtgttttgcccagtatattttaatttttttcattttattgattatagctatagtcattgtcactggtatatacaatacattgaacaaataaagcataatttacatatttattttgcaattgatagacatttgagctgtcactaattttgagctattctcaaaagttctgctaaaaacatatttttatttctattattgcataaaaggaaagtacttacttaagtcwgccaaattttttgactgggttgtttttatttttcttactgatttgtagttttttttctatattaagatgagtcattttttggtcagttatatatacacagcaaatattttctcccattttgtggctgtattttcaattttgc

SEQ ID NO: 481885 - DNA, 564 bp, Homo sapiens
cttccctgtgcccaatctgcaaaaacaaacaaacaaacaaacaaacaaaaaaacaggcagaaccaggtacaacaaaatcatacatgtagatgggaaattatcttccaatcctttcatgctccactcaaatggtcaatttatactcttgagcatagcctcctctctaagacaaatggagtaggtttggtttgtttgtttgtttacagatactggccttcagttaacaagtagacttgttggctgacttgaaggagatagttattatgtaactattgtctctgctcaaatggaaattatcctacaggggttaacagttcattagaaagaagaactgttaacaggttgagctcattaccagtgagcaaaaggagktttgtattttcccaaaatgaccataacagaaaaacctgccagtacatctctggattgtccttcatcttcatgtctttcttaaggccaggtattgcaggctacttctattgatgctattccactttactttcggaagaacgaatgatctattcagagtttaacaatgccggcaaagtattgcactcgtcgatg

SEQ ID NO: 481886 - DNA, 551 bp, Homo sapiens
agcataacagcaaaaaagagatggaaagggagagggtgagtgaactggaagacagataaatataaattatacagtctgagaaacatttatctctaacgtctctctctctctctctctctcatctaaaaagcctttagtgtctcttcattactttatgttgttcttaaattatgagatataagctgttgtttattgtttgattttggttaatcacagcagagtgtttcagaaatttggtacatctcacaattgattgattgagagataaatgtcattcaaacttaatattatctcttctaaagacctgttatgtggaaattacatctttatatattgtttttttaatatgttatcttatttaaagatcttgatgtcacttgcatgcaattgtgtgtacttcacacacacacacacacatatttgtttcacacaccatgctgaaaaatattaagttattagtttcatgggtttaccatgattatctacgtatgaagtacatgaagtgacaaggtctgtgtayacatgtgagtgtacattaaaaaagcaactag

SEQ ID NO: 481887 - DNA, 572 bp, Homo sapiens
ctccaaacacagcaatgacaaaatatgcagtcaatgtttctttttttttctttcatttatttaaatattttcattttactttaaattccaatatacatgtgcggaacgtgaaggtttgttacrtaggtatacgtgtgccatggtggtttgctgcacctattgaacctctaagttctctcccctcgctccccaacccccaataggccccggtgtgtgatgttcccctccctgtgtccatgtgttctcattgttcaactcccacttatgagtgagaacacgcggtgtttggttttctgttcctgtgttagtttgctgaggatgatggcttccagcttcatctatgttcctgcaaaggacatgatctcactcctttttatggctacagcagtcaataaatatttcatatgtattttacaaattaaattacatgtgaaatatataaatttaaaaggatggctatgctaaaaaatgagctaaacatccctagggatcagaaaaagagctacaaagcagaaagagtggggcactacagcaggcaggggtggtgaagatttaattcctgtagagtgacc

SEQ ID NO: 481888 - DNA, 274 bp, Homo sapiens
agaacagtagcagagtgtcgtgttgaggtgccccgcccgactgtcaggaaagctagggtcagtcccagctctgccgctcggctggaatcctgtcttggacaagactgtctttctctaggtctcatttccccacttccttttttttttttttttgacatcttttatttatttatttatttatttatttatttttattattattatactttaagttttagggtacatgtgcacmatgtgcaggttagttacatacgtatacatgtgccatgctggg

SEQ ID NO: 481889 - DNA, 480 bp, Homo sapiens
ggaacccaaactaatcaggaatggcctgtctgtggattatccctaaagccagttcagtctctgcctttttcccccctaaggttgagtaattgaattaaatcctgtcattctcaaacaaagaatcatgaaacagagaaggtgggtaagtcactcaaccctgggattttgagagaagtggtcactgggggatgtagggtggtggtctctcaaccttatctgagctcacacctcccaacccatggaaataattgaggcccagatgccatgaactgggcatatccctgtagagggtaagtaactgtctgtcctcccacccaaagaagcctgcattgagcagagtttggcttcagccacagaggcagcagtgagaggaggaggctgagctccactcatacaaggccacagtgacgcatggtctkagggggtaagcaggggctctcaccagacctcagggatggggtggttttccctactcagcca

SEQ ID NO: 481890 - DNA, 626 bp, Homo sapiens
tgattcacctaatggcacagctttgggatatgggagaaaacctaggcaggcatggggagaaagtgccawctccacacaggtggtggccccaccgggaagcaattttttttctcatcaaccttgtaaagaaaagacacgacatggctgggcatggtggctcacgcctgtaatccccgcactttgggaggtcaaggctggtggatcacgaggtcaagagatcgagaccatcctggccaacatgatgaaaccctgtctctactaaaaatacaaaaattagctgggcgtggtggcacacacctgtagtcccagctacttgggaggctgaggcaggagaatcacttgaacacaggaggcagaggttgcaatgagccgagattgcaccactgcactccagcctggcaatagagcaaaactctgtctcaaaaaataaaaaagaaaagaaaagaaaacacacgacgttatttgaggtcctgctatacataatttattcttcataacaacttattagataggtactattataccattttacagatcaaaaaactgtgccttcagaaaaataaatatttttgtcagtgggatggttcaggttcttgacttcggcacacaaaagaatttgagaatga

SEQ ID NO: 481891 - DNA, 478 bp, Homo sapiens
taactggcacatttatttactactttaaacatacttaatgtttattctggttagggggatgatgactacaaattcatgaagtttatgatattttgctaaaattgtctcactatggtgcatctgagaaaatgtcctaccatattaactaaaaaggctacgtttatatgctattactgatatatactagatagtagcaaagaactttcaatcaaattaaggttgaatttaacacaatctactatttcacratcatgtcaaagaagacttagtttggacccagccctctcacagatttcctgcagtggcagttaactaaactaggcaaataaattacttaatttaattaaatcactactgggtcactgtcacgttcatcacagctaaaagaaaataattcaaaatgcaaaaagaaattgcatttttaaaaatgtgagatgaatcctagcaatacaatgttaaatgagagacaacaagtcca

SEQ ID NO: 481892 - DNA, 579 bp, Homo sapiens
ggtgccattaggaagtcattcaaatgtttagtgtgtcactttgttcatttaaagaatacttctggattagataataagccctcaataagtagtagtattatgtgcattatatacactgtcatatttagacctcataagagttctatgagatggtcttctgcaaatgagtcaactgaggctgagcaggcttaagtagcttactcaagatcgcctgttttgaatggggctgaattcaggaatgtaaatgaaatgttaytttactcaaactcaaagttagcaagttattttttaaaactgtgtaattaatgaaagcatgtgttgtggattgaattatgttcccccaaaatatacgttgaagtcctaaccttcaggaccttatgtgaatgtgacgttatttggaaatacgattttggcagatatgatcaagttaatatgcagtcacactgaatcaggatgggtctgaaatcctgcaaccagtgtccttataagaaggcaaccgaaagagtcagagatgcacatgtgaagacagaggcagagtttgaaattatgcatctgcaggccaaggaacaccaaagtttg

SEQ ID NO: 481893 - DNA, 615 bp, Homo sapiens
tatagaaaacagtgtggagtattaattttacagtctatctctacaatgtcacgtatttctaactggaccaatgaatcaaaatatgccttccatccacaatcttcttattgacattctacaaccaccgaaataaggtggtttgtactaaggacactgcttaagaaaagtcccttaaactgagacaagaacagttagcctagccctttaaccctctttctttcttttttttctttttctttctttctttctttttctttctttcttttctttctctctctctctctctctctctctctctctctctctctctctctctctttctctctctttttctttttccctctcaggctggagtgcggtggtacaatcccggctcactgcaacctctgctccctgggttcaatcgattttcctgcctcagcctcccaagtagctgggattacaggtgcctgccaccaagcccagctaattttttatttttagtagagacagggtttcaccatatcagccaggctggtttcgaactcctgacttcaggggatccacccgcctcagcstcccaaagtgctgggattacagtcataagccaccacacatggcccctttcaccctttt

SEQ ID NO: 481894 - DNA, 544 bp, Homo sapiens
aatgtggttaggaggtgatatggtttggctgtgtcycctcccaaatctcatcttgaattgtagttcccatattccccatgtgtcatgggagggacctggtgggaggtagctgaatcatggagcagttacttccatgctgttgttgtgatagtgagtgagttctcatgagatctgatggttttacaaggggcgttacccctttttcgctctgcactcctccttgctgccactatgtgaagaaggatatgtttgcttctttttctgccatgattgtaagtttcctgaggcctccccagacatgctgaactgtgtgcgttaattaaacaaacctctttcctttaaaaattacccagtctcaagtatgtctttttagcagtgtgagaatggactaatacaggaggtgagttgaaataaaaaggaaataaattaaaagtaaaatggtaaaattagtatcttcacgaaattagaattactcaaaattagattcactgaagaacaaagctaacactgctgaaaattgaatagtaatgtgtacatttgagca

SEQ ID NO: 481895 - DNA, 634 bp, Homo sapiens
taaaaagccagcaggatacttactgctgaaaactggaaacgtttccattttagtgtgggacaaaaaaaaatattatttgtcatcagattatttgattgtgagatacttaaaaacttttaggttttttccaatctttttctatcataatattgcttcaaggagtgctgtttcacatatgccattttgtaaacatgggaatgaaatttctcttcctattgatatgaggtcttttgctctaaaatactatttgtacatatataaaaatgatactatatataggtgtatatatatacgtgtatatgattatattatatgtaatgtatacacttaaattatatatgcacattaycgtgtatatgatattatacacacatatataagttgcattatatatgtatttatgtattgtaatgatacgggaggtgagcagggaagcgctggatagagaaaggcagggtccctggtgaaggctccaccttcgggcctgtgcccatggacctatgtgaggagaggcactcctgttttcacacccaactgttgcatttttcaagaccactctggccagccaccctgcatccccattcctgtgcctataaaaaccacccagagaccctagtgggcacacacacacaaa

SEQ ID NO: 481896 - DNA, 581 bp, Homo sapiens
gagtatagttttctacacccccttcccctttggaatgcaagtgcctatcttggttctagtgttgcctgtgtcatctcaccattgtatatcagatgtgtatgtgtgtttgaaagcagataacttgtgtctttatataacagatgtgtaaataaaaagcatgacacttagaggatcctcatctgcaactggcctgattcagatgatgagattttaagcctgctggcctaaacaaataaaactttgggaatgagatacttggcataaatgagggtgtgaattgttagggctcaaagggaagactatggtgactagttttcaaacatggcctctcaataaaccatatctcctgtattaatgtccttaggtagttctcttcaatatgaaacctgtgctggtatatgacttgtgtgaactagcagtatgtggcagaaatgatgctctgcaaattttgagctagarctttaagaaacctgacatctttttcttatacgcttttgaaatgctacgtaaaaagttcagctatctaattggagaggccatgtgaaaaaggagagtagtgtaactgcattgagagaagacta

SEQ ID NO: 481897 - DNA, 581 bp, Homo sapiens
gagtatagttttctacacccccttcccctttggaatgcaagtgcctatcttggttctagtgttgcctgtgtcatctcaccattgtatatcagatgtgtatgtgtgtttgaaagcagataacttgtgtctttatataacagatgtgtaaataaaaagcatgacacttagaggatcctcatctgcaactggcctgattcagatgatgagattttaagcctgctggcctaaacaaataaaactttgggaatgagatacttggcataaatgagggtgtgaattgttagggctcaaagggaagactatggtgactagttttcaaacatggcctctcaataaaccatatctcctgtattaatgtccttaggtagttctcttcaatatgaaacctgtgctggtatatgacttgtgtgaactagcagtatgtggcagaaatgatgctctgcaaattttgagctagagctttaagaaacctgacatctttttcttatacgcttttgaaatgctacgtaaaaagttcarctatctaattggagaggccatgtgaaaaaggagagtagtgtaactgcattgagagaagacta

SEQ ID NO: 481898 - DNA, 442 bp, Homo sapiens
aaccagcagcgtcctctatcctacaatgacaaggaaacaaatttctgtccatgattgcatgascgtggagaagactctgagctccaggaaggagcacaggaaacacttcaagctcagcctttgtaagactctaagaagggattccagctaggctatgcctggacatcttatttacagaaactgtaaataaataaacggatgtcattttaaactactaaatttgtgaaattttgtaatgttgaaatagaaaactgatgcagcttccatgcctgtggaaaaggcatgtgaaagctcgcatgcagtaacattggttatagctctgtaagcaggaaagccaaattcatacttggaatatctattcatgcttatgaagacaaacttagctcttctataaaagtgaaggcccaatgtagtctgtttgctactaagtagcttgctggta

SEQ ID NO: 481899 - DNA, 644 bp, Homo sapiens
atatagtgtgccttttatgatttcagagattagaataaagtgattttattttatgaagaatctatacaaaacggtgatgaagttttcaattagtgcttaaaaattcttagtttcacttttagtactcattctgttaggattgtttttcacctacaaactgagcatgggttccgtttggacctagcctctatactataaatactttctgcttcacattttgatagaaatgataaatactctargtttatgaagtgaatgagtgtttctgtcattagttactggtatcctcagtttgaataatgtgccacccttattttaaaaaaataataaaatgtgtgcttttttaattgattatcacttaatattgacatatttgttccaatgaatgttgaaataattacttataattattttatataccctataaacatttcagtttaaaacagcaaattagaaaattggtttgtatgcagaattttaagtacagctataaaaatacacctgtaaacttcccatctggcacaagggtgctaagtaaaagcaaagtctaaagtagaatctaacaagagtttgtcagtgattctgagcttgttgctcaaaaggctatgatcctcacagttaatgaggatcagaatgcagtcgga

SEQ ID NO: 481900 - DNA, 633 bp, Homo sapiens
ggcttctgacttcctggggaagcccaacctttgctgcccctcccgaaacaggaacagcacctcctctcctcagaacccaagtcaaacttcctaaggcagtgattcagaaccgtttggggttatttaacttctgagaatctgatgaaagctatagaccttccccataaaaatgcatgcaggcttacatccacrtatccctgttcataattcaaagaggtttacggaccttttgaagctaaccataggtcccaggcttcccaatctcaggggacagcttgcccaagcagtgtgaaagccaagccccctctcctcgagctctatccagagttgcttcttcccttgccctttcagcttacacctttcgcttcattgagccctaatcagctcctctctgagaggtgactcagggcaattatccacactccccgcaactcccaatgacccactgggaggagaggggaagtgactttcacagagtcatacagtgagtcagtgtgcaagccaagactagatagaatgtggcatgtggggctcccagggctatatttaggccactgggaagagctgcttctcacagcagggtctggacataggcaggctataaacatagtcacatgtttaccccagctccag

SEQ ID NO: 481901 - DNA, 633 bp, Homo sapiens
ggcttctgacttcctggggaagcccaacctttgctgcccctcccgaaacaggaacagcacctcctctcctcagaacccaagtcaaacttcctaaggcagtgattcagaaccgtttggggttatttaacttctgagaatctgatgaaagctatagaccttccccataaaaatgcatgcaggcttacatccacatatccctgttcataattcaaagaggtttacggaccttttgaagctaaccataggtcccaggcttcccaatctcaggggacagcttgcccaagcagtgtgaaagccaagccccctctcctcgagctctatccagagttgcttcttcccttgccctttcagcttacacctttcgcttcattgagccctaatcagctcctctctgagaggtgactcagggcaattatccacactccccscaactcccaatgacccactgggaggagaggggaagtgactttcacagagtcatacagtgagtcagtgtgcaagccaagactagatagaatgtggcatgtggggctcccagggctatatttaggccactgggaagagctgcttctcacagcagggtctggacataggcaggctataaacatagtcacatgtttaccccagctccag

SEQ ID NO: 481902 - DNA, 532 bp, Homo sapiens
tgaccaatccctttttaagatactttcttcacttggcttccatggcaccattcttacagttttcttttcctgattcctcctcctctattcaacctctaaactttsgttgctgagcacttgaaatgtggctagtgagaaatgagatatgccataaagcataacattgactctgggtttcaaagactcagtatttaaaaaatgtctcatgaataattttttatatgggtacatgttgaaatactaatattttagatatattaagttattaaaattaatctgtttctttttactttttaatatggctactagaaaatgtaaaattacacacgtagctcatatgtgtggctcacacatttctactggacagtgctgttctagaaactcttccctatcaccctttttatttcatcatcttatgtagttctacagctttaaataccaactatatgttgactcccaaatgtagacctttaactctaacctcttattttaagccgagacttacctacccacttgtacttgaatttccatt

SEQ ID NO: 481903 - DNA, 473 bp, Homo sapiens
tatgaacacctatacacaaaattctccaaaattctatttgtatgtgtacrtgcatttatatacatgtactctttggaagattttctattatttgatttacaggaatggaatatcttccattctttctgcattttaatttcttgcttaacaataccttatagcagctcctcaaagtcacagagtgtagctcgaatcccttctttgccctggctccatgccattccatactgaaggcatagtcctctctttttggccattttggttggtaagcatttgctctgttttcagttttggggccagtgcaaacgatgctacaataaacctctgtatgcctgtccttatggatttgttctttcagttccatggggtaatttcacaggagggcaattgtagggttggatggtagatatattttttaatgttgaaatgatgttgccagactgcattcccaaaaggttattttcaccagcaac

SEQ ID NO: 481904 - DNA, 548 bp, Homo sapiens
tgtgaagatagttttacatgacagatttaactaaacctgcattccaaataggtctgagctctttatgattctaattttactggaagtaacatttacctaactagtattatacctaaatattcagtgggccattgtgagaaggatgagataactggtaataacattgattcccattcaatacaatgcctcacttatttttaagtgaaataattttgtggtcataaataatcagcactgtggtagtgagcaagacagttaggagtcattgggtgctgaaaagaggagaatctttaattgcctcttccaggcttttcttagcttttggctacataataccaaactctgcctctgttttcagatcatygtctcctctatgcgtctgtgtcttctcttggtctctcgtaaggacatcggtcataggatttaaaatctacttgagtaatgtgagatgatttcatctcaagcttcttactaatatttgcagagactttttttccaattaagttcacgtttacaggttcatggtcttaagacaaaggcatatcatt

SEQ ID NO: 481905 - DNA, 553 bp, Homo sapiens
gttaaatggtatacctagttgtttaatattgtgcaatgttgtagccattggtgcatgggagaaataaaatcaatttcaacgcccacacattggatatgtaagcagacatagatttgagattactgcgagggaagattgtgtaatgaaacggctgactgccattttcagtggctaaggagaactctttccgtagctcctggttgtgtgcaggatgaagagcttaacgctgagcacagcacaaagaaccctctacaaagtagcccctgcctgcttctccagctcattgtcatcttctccttcacatacrtgactgtggccacagtctaattcacatgtctggaacatcccatatgtctggctctctgctaagaaaactctctcaatctctgtgcccttctcatttcacctcacctgcctttcttgccctgggtgagagcagttccctaacacagcatttagcatagaataattcagtttagtttaactggccatgcctcaattttcagtatagaagcatggttcacagttagtacttgagagaatgggcccagca

SEQ ID NO: 481906 - DNA, 370 bp, Homo sapiens
tggcaatggctctgtattccagccaacagtggagccacataaaagagactacccaacagcatagctctgcaggaagcactgcctwcagctccgcaagctcaagtccctagccagcttccccacccaaacttgatactctccttaagccttctccaggctgggtggcaagtgcaggtcagtatttacccatggagggagcatctggccctgcacaacccagaggctgagctgtgatccaaccaagccccagctctccttaatccctcttcaggctgagaagcaagtgcaagtcagcatttacccacatatggaacatctgaccccacacaaccccagcagctgagcagtgactccaccaagcctcagtgct

SEQ ID NO: 481907 - DNA, 575 bp, Homo sapiens
tttatggggtggggtgattttctcctagggttatgtccagttggggtttttaaggcagcacagactgccaagtactgttttttttaaccgactgaaatcactttgggatattttttcctgcaacactggaaagttttagttttttaagaagtactcatgcagatatatatatatatatatttttcccagtcctttttttaagagacggtctttattgggtctgcacctccatccttgatcttgttagcaatgctgtttttgctgttagtcgggttagagttggctctacgcgaggtttgttaataaaagtttgttaaaagtttgttttgtgcaagtgtcctttgtgcgtccaggccagggcatccatggacgtccttgggctgccctttcccttggcgcctcccagggttcccatagcaaccaccgtctgcaggaggkgccgcccttgcccctcctccccgccctgccgctcagtggaacggcccaaccctcccctggctgcggtgagcgctgggcccaacccccggcctggagcagcgccccaactccgagcaccgtggagcaccggctgccag

SEQ ID NO: 481908 - DNA, 629 bp, Homo sapiens
ctgcagacttcaatactagctattatagaataatcagttgttggacatgcccctcccaactgacctagaaggctttctctgctgtgttataaggaaggcttcggtcttttatttccatactccccacaaagtgaggcttttggagctcttctgatatggagagctgcccatgcaaggtggaaacaggcctccagggccaatcagtttgggaaacaccaggctgcctgtggtttacagcaggacttctcagagcctttactatgctaaatgcagtgggactctccaagatgtgacattgggatttggccctagaaatgttattttttggcaagggtggggaccatctttcaggaytggtattcatagccacctcttgcaaaacatggaaccgtttcattccatgccttcctcatctccttgcaggatcctgggaggcaggaccatggagtggatgaggttcacaggctcgagctcttgagcagggggcaaggggtgtgtgtgtgcatgtgtgtatgcatgcatgtgtgtgtgtatgtgtgtgtgtgtaaatagagcactgtctcccagggttctggatgaatttgaacagggagaaagtagaattgattcagtgagatctgctaacaggc

SEQ ID NO: 481909 - DNA, 553 bp, Homo sapiens
aggtatggtggttcatgcctgtaatcccagtgctttgggaggccaaggcgggaggattgcttgagtccctgtctgtataaaatataaaaartttcgctgggcgtggtggcacatgcctgtaatcccagtgctttgggaggccgaggagggggattgcttgagcccaggaattcaaggctgcaatgagctatgattgtgccactgcactccagcctaggcgccagagtcagacattgtctccaaaaaaaaaaaaaaaaaaaaaaaaaagatgctgaatacagagcctagcaccaattagtactcataagtattagctattaatattcaggtttcagtcagctggtgggtacttgcattgtattttatgaactttttaactttttggtataggaaaaaaagttgacctgtttttttttaacaccttcagaagcagagtaaatagcacagtggtcccccaatgcattcatcagccagcttcaataaccattgcctttctgcccttctagtttcatcttcctatacccattttccctatattattcccccaacattt

SEQ ID NO: 481910 - DNA, 572 bp, Homo sapiens
ctgcagctttgacctcccaggctcaaataatcctcccacctcagcctcccgagtagctgggaccacagacacgcaccaccatgcccagctaattttttaaaaattttttgttgagrtgagggtcttaccatgttgcccaggctagtcttgaactcctgggcttgatcaagcaattctctcaccttggcctcccaaagtgctgagattacaggcatgagccaccctgcatggctgtaaaaacatttaaaaagtggatgtgctatatccatttaatcaaccctgtcctaatgatcatttctagtgttctattatcacaatcaaagctgcaaacagcatgctagcagcagaagggactatagcagggtggctggactggagactctgaagtcagatggctttgccaaagcgtggcttagccacttactgtgtgaccttgggcaagcttgccgcccctctgtgcttaagtgtcctcatttgcaaaatagggatagtgaaaatgcgtattaaataagataatccataaggcactgaactctggacctgaaacatggcaaactaatggtccatatcag

SEQ ID NO: 481911 - DNA, 572 bp, Homo sapiens
ctgcagctttgacctcccaggctcaaataatcctcccacctcagcctcccgagtagctgggaccacagacacgcaccaccatgcccagctaattttttaaaaattttttgttgagatgagggtcttaccatgttgcccaggctagtcttgaactcctgggcttgatcaagcaattctctcaccttggcctcccaaagtgctgagattacaggcatgagccaccctgcatggctgtaaaaacatttaaaaagtggatgtgctatatccatttaatcamccctgtcctaatgatcatttctagtgttctattatcacaatcaaagctgcaaacagcatgctagcagcagaagggactatagcagggtggctggactggagactctgaagtcagatggctttgccaaagcgtggcttagccacttactgtgtgaccttgggcaagcttgccgcccctctgtgcttaagtgtcctcatttgcaaaatagggatagtgaaaatgcgtattaaataagataatccataaggcactgaactctggacctgaaacatggcaaactaatggtccatatcag

SEQ ID NO: 481912 - DNA, 572 bp, Homo sapiens
ctgcagctttgacctcccaggctcaaataatcctcccacctcagcctcccgagtagctgggaccacagacacgcaccaccatgcccagctaattttttaaaaattttttgttgagatgagggtcttaccatgttgcccaggctagtcttgaactcctgggcttgatcaagcaattctctcaccttggcctcccaaagtgctgagattacaggcatgagccaccctgcatggctgtaaaaacatttaaaaagtggatgtgctatatccatttaatcaaccctgtcctaatgatcatttctagtgttctattatcacaatcaaagctgcaaacagcatgctagcagcagaagggactatagcagggtggctggactggagactctgaagtcagatggctttgccaaagcgtggcttagccacttactgtgtgaccttgggcragcttgccgcccctctgtgcttaagtgtcctcatttgcaaaatagggatagtgaaaatgcgtattaaataagataatccataaggcactgaactctggacctgaaacatggcaaactaatggtccatatcag

SEQ ID NO: 481913 - DNA, 420 bp, Homo sapiens
gtctccatccccaaaatgtaacctgagtgaagaaaggaacttgctgcttcttgttgctggtgtgtcccagtgcctaggacaagaagctgaagtctaagggagagaggctcaaagctgaaaatcatttgcccttagagccactatgacccagcactcccacacctaggcatttacccaagggaaatgaaaaactatattcacaaagcttgtatgtgaatgtttatagtgattttactcatagtaacctaaaatcagagaaacaaccctatgtggggcctactcctgtggggcatcccttctataccagtaataaaaaggaacaaataagtaatacaaatgtgcatatacgactgggcacagcrgctcatgactgcaattccagcactttgggaggccaaggcaggcggatttcttcagctc

SEQ ID NO: 481914 - DNA, 528 bp, Homo sapiens
caccacttgtttagattggtgatacactgtcatttcctctgcccatctacctttccactctgacacttatttacattattcttttggctcttgtaggcatttgagtttgtrgcctctccttaaagtttagattaattctcatttgtgtattcttcatttttgggaattcagcatgttatctctaagacagctactgttagctacacattgaaaaggggttgggtgggtatcttagactttctcatgtgtttctctgactggagagaagatagctcttgttcttcaaatatttaactaaaggatttgctgtgggtgtctgctgttggagccgtgggtgttaagagacttttgattatgcaggtttgaatcctggctctgttgttaactagatggatgatattggccaagttattaatagcttctttgagactcagttttcacatgtgtaaaaagggtttgttttgaagagtaaaggagataatctatgtaaataatttaccatggtgcctaggacttagtaagtgctta

SEQ ID NO: 481915 - DNA, 458 bp, Homo sapiens
ctgggtctgtggattgctggtttctcattttcttttcttttctttttttttttttatcaaatttggaagacttttgtccagtatttcttcaaatttttttttctgtcccattctgtttctcctcttcttctgggactacaattacactcatgctagacytctcagtacttagtacaggtcattcaggctctgttcattcttttttcagtttgtataatttctattgagagccactgtctagtaatccctgaaaaaatctaaatgttgacattttcccaaagcacagtaccctgctgatggctgtagtttcctttggggaaggtttagagatatgttagtcaggaaatcagaaattagatgatattactacagagaggatttagtattgagttttcattgactgaaaaagcaaaaacggaacactgaggttacccagaggtgataactgcagggagcag

SEQ ID NO: 481916 - DNA, 609 bp, Homo sapiens
tttctagtttttttggtaatccatttcttgcttaattccaacacgtcagaaaacactcaagaattgattattttgatcttttttattgtccagcatgtgtcaatttgggaaaaactttcataggcacttaaaaacaatctgcattctgtaggtattaggtgaaatattcaatgcatgtcaattagattcatttgataattatagtgtttaaatcttttatgtatttttgtctcattattctaattactcagagaggcaagctgaaatatctcatattatgcttatggatttgtctaattctccttttagttttgtccattttttgcctaccatgctggcaaagattagaaagaatgataacacagagttaaaaaacactgtggtaaaggtgtaaattggaatgtcttttctaaatagcagtttggcaacagtcagcaacattttaaataaacatctgtatctttgaaaccagttattttacatttagaaattgatcttaggcaggaagggagatccagacaggctcttcatggataccaaacactgcttagcagttacactgattcgtaaattctcaytgtagccttacagctatcctttgactaagta

SEQ ID NO: 481917 - DNA, 599 bp, Homo sapiens
gctctgccagatgagacacagggatagccaatgcacatgaataatctctgaagatggatctgatacatgcactttacctaacagtcttggaaggactcataggatacaccccaaggagtgagttaatgttgtgtgctttatttattcacaaggatggtttcctcctgaaacccagcactgtgttaacattctgcatgtcactttggttcaagcaagtcccaggaagatggatcactatttattcactgaagaatttcccaagttaaagaagagatacaattaataacgttagagtagcccagctagaaactctaacaagttatataacatagaagacagagaataatgagaacagttattcctttgtgcttcaaagagagtagtaaaatagactcgatagcatgaaaatttttcaatagttttttttttccccactcttggcctaatgggccttgattcatgccaggggtctatggggctgaaagagccaacatatctatctgaaatagagttctccaaccattatgtcagatataacaktagttttcaaaatcttgtctgataatgaggcgattgtttaaatgagttatgatatacac

SEQ ID NO: 481918 - DNA, 668 bp, Homo sapiens
atgacatatattgaaaagcagtactttttttcagtttgatgaaaattgtaagaaagctaatatctgacaatattagggcaattactattttgtctaaataatttttatagaaaagatggttaagtgacataatttaaaaatattctccagtagccaaaggaaaatatttggaagaatagctatatactgttggatatcctaaaatagactgaaaaaagagtcttacagagtgtgtgtaacattgtgcctggctggtattcagggatgtgtgcaattctggtacattaatcttaactgtcttaagaaactaaaagctttgctcactcaaagcattcttttttattttcatgcacttttaagcttgtggagaacacatgaacacctcttcctgaaaacaaaaatgtattcttttgtgaagccaaggtaaaaatcaaatgagagatgatgaactattttgttcraaagagacctaatttcacagaggtagatacgcatctctatgttaagcaaactgataacatctaagtaaagattcttgctggaattctgaggagactgtttcagcctttgccatctaaactgatagccatttccttctactcagtcactggaacagcatgggagtctcttaatgtgtttgaccttttccccaaagaagttagcgagca

SEQ ID NO: 481919 - DNA, 244 bp, Homo sapiens
catggaacacagcactctatagagtggcacctcagggaagccagcccatcccccagaacagaaatgtttccagataaataaagctgttcttaccaagtgccaaattatctttaaaattccaaccattttccacagaaaccacttgtgaatttgggacgtgccatatcttactaaacaaagtaaayggaatgaactagggattgctggaggtggtatagggttgtccaccctgacctaggcttct

SEQ ID NO: 481920 - DNA, 606 bp, Homo sapiens
catttataaattcatttagcttacttcctttgatatttatattccaatataactttatatattcaaagcaatattgaatatttatgaatattaagttatcctctttgcactagcgagtgaatctattttatcttgaaaacttcttcatataaagacttaaatagaaattttatataaagattttctaattgctttttgtttcttgtaggtctttattttaaagcaacacaaatccacttcgataaaactttcagaaaaaaataaattttattgaaagatattaaagagagtgggaaaaaaattcaagaaaaatataaacagacttcaaaaatgaagtaagccaccattacattagcaataggttattgtaatccttaaayctgaagttttattattaatgtatctcaggttctaacatcacatttctgtctctcactgcaaactctcaaaagaaataaactgtttagcccagcctgattacatacctttgtctaatcaagcatgaccaagttgaaagtgtcatttgaaagacacaatatgtggccaacagttctcctatttgtgttttagttttctagtgaaaaagacatgtatatttagaattag

SEQ ID NO: 481921 - DNA, 635 bp, Homo sapiens
  misc_feature (1)...(635): n = A,T,C or G
gaattgactttctctgttgtttgcagtatgatcctgttcaagttttgctggattattcctccaaagaaatgtacctatgtccagatattgaggtacagtatatctgaagttgcttcaccaagtttcagttagtaatgcataactgaccaaaggaaaattaactctggaggaaactgtataaaattatatttccataaatcatctaacttgagctctccattcaatttggscaattattcaaagcataaaaaagttgatattttatcatttaaaaggtagtgttaataaaatctacaaatatatcttagagatttacataaataagttttaatataaccatggaagtacccataaaataaaatgtcctatttagcatataagttggagctcaatttgaacagcttactgtttaataaaagtgacatttatattgctgactgaattatgttatattaatttcgggttttagtttgcaatttttttaaaccatatagttggactatatactaaggtaggaanaagaagattgattaattccaatctgacctaatccagaactttatgcatatcaaaacaaatgcgttatctcatgagatacatgctattattttagttatgttaatgttttctataac

SEQ ID NO: 481922 - DNA, 466 bp, Homo sapiens
gaaaggaataatcacagtgtggagggatgtgtgggagacagatttwcttccttaagtttctgttattagtgaatgggaaaatgatgactctgaaacagaaagcatagaaacatgctctgaagggtgcttggggccaattccacttccttcatagaagaggttctagataagaaaaaaacaaagaacacaaatgttcatattattacctgggtcaaggactcctttaagattcagacgaaaactactacatatccattgactgattaagtgtgtcaaaccttagctctcagcccaccctggctttagaaaaatgttgatgccgaggttttacagcaaggaaaaaaaaatctgaaatcctattttcttgctttgccaatctaaaaaataagagggagctggcaaatggcagatgcctatgtgtggaaggtgagttgaaatggtgatggctatgctatagcagcaatgg

SEQ ID NO: 481923 - DNA, 645 bp, Homo sapiens
tgtacaattgcaggtataatgtcagtattctctttaayggtaaacatcagcattttggtgcctctttacctaaaaatctttcttcaataccatagaagcctgctccaaaactatacatagccatggtcttgaactgcagaggaagtagtgctttggggaataatctttaatcaacaaaggataggagtcagtaaataaatgctcgagctttcacatccttcagtaagggataattctgaagtaatttctgcgtggttcctcagagaattacctgttggtttgagacccaattgccttcagtagtgacaagatcaataaaacactccttattgatttttgcctcctcctctgatattttctctccattatctctttctgcttccagaataatgtcttaagcagactatttacatccagatttttgcatcaatctttgcttttatattaaattaagacaaggtggattgtcttaatccaatcatgaattgaatagatttgaaactaggctttaatctttggagagctagtcaatttccacttcactctttcctctagattaaaggcctttggaagactaaaattgcctgaactagtttcccatttttcctagctgctgcttactgctcagcgtctcagcctctgctc

SEQ ID NO: 481924 - DNA, 317 bp, Homo sapiens
ttccactgaaaattgtgttagtctacataactctttagctttcctcacactcattaggcattagatgactaataaattataaaagtaaagacttatggccaattttatgaagtacctccataaggcatgcggcctccgargcccctaactattcacataactacgcaattgtacaatagccataacaaaattgctctgttaagcttggatcaataatcactctatttttgtgattttttacaaaagaaataaagacaattagggttcatttatccatgttttctcaaacgtcgtcttctttgtgagcaaacttgagt

SEQ ID NO: 481925 - DNA, 518 bp, Homo sapiens
cagctgtggaaacctggggtgcygggtaaatggagaactccagcttggacttcttgccataatcaactgagagacgttccatgagcagggaggtgaacccagaaccagttcccccaccaaagctgtggaaaaccaagaagccctgaagaccggtgcactggtcagcctgtaggggaataaaaaaatgtaatattttaatgccaggacacattatcttagaatttctatttcaactttttagattacgaaccatatctcactgatgtaagcacaaggaattggcaaaacagacatatccacaaactgtccataacctagggactatctgatttagaagtccaattaatatagcaagcagcctattccacattttggtaggtgccaaagaatgaatgatgtcagtcactccacccaacttgcactggaactatcacaccacattaaatgcatatttatatgtggtgcttaccagcttgcgaattcggtccaacacaaggtcaatgatctccttgccaatg

SEQ ID NO: 481926 - DNA, 318 bp, Homo sapiens
tgtggaaacctggggtgctgggtaaatggagaactccagcttggayttcttgccataatcaactgagagacgttccatgagcagggaggtgaacccagaaccagttcccccaccaaagctgtggaaaaccaagaagccctgaagaccggtgcactggtcagcctgtaggggaataaaaaaatgtaatattttaatgccaggacacattatcttagaatttctatttcaactttttagattacgaaccatatctcactgatgtaagcacaaggaattggcaaaacagacatatccacaaactgtccataacctagggac

SEQ ID NO: 481927 - DNA, 623 bp, Homo sapiens
ggaaacctggggtgctgggtaaatggagaactccagcttggacttcttgccataatcaactgagagacgttccatgagcagggaggtgaacccagaaccagttcccccaccaaagctgtggaaaaccaagaagccctgaagaccggtgcactggtcagcctgtaggggaataaaaaaatgtaatattttaatgccaggacacattatcttagaatttctatttmaactttttagattacgaaccatatctcactgatgtaagcacaaggaattggcaaaacagacatatccacaaactgtccataacctagggactatctgatttagaagtccaattaatatagcaagcagcctattccacattttggtaggtgccaaagaatgaatgatgtcagtcactccacccaacttgcactggaactatcacaccacattaaatgcatatttatatgtggtgcttaccagcttgcgaattcggtccaacacaaggtcaatgatctccttgccaatggtgtagtgccctcgggcatagttattggcagcatcttccttgcctgtgatgagctgctcagggtggaagagctggcggtaggtgccagtgcgaacttcatctggaggaggga

SEQ ID NO: 481928 - DNA, 640 bp, Homo sapiens
gctaacaaagtgctgctgtcctttgtcaaagcagggccaaaacacactttctgtttattgtctctcctaatagataactattttagatttaactttcaatgtattatgtttaatttagtttttgtcttttaaaattttataagcgctattgaattcttttcagaatctcaataaatggcagttctctggcaaggtatagaggcaaatatgtgtacatgaaactgaggtttagagtgctagctcattgtgttggattcttataacatatgagataagcattatcatgcccacttagcaaacaaggaaactgaggcyaagagagattaagtgatatacttctacaagtcatttggatgagagaaagcataatttgtctatttactttcaagaatattaactagcatggtatctcttagtaggtgcttagtgaatgtttcttgattgatggtggttacttagctctctgaaaaaaaccatccaacacttcgaggagaaaaaaaccctttttatcagttaattcaacatttcagtaaaagtgggttatttgagccacagtcatccacctcatcccagctctcctcctttactaatgaaagataatttcatttctcttggtatgtactaagttatcacagggatg

SEQ ID NO: 481929 - DNA, 615 bp, Homo sapiens
ctttataggcacaggatggggagtgtgtgctgactggtttctgagtatgcaaaaaaggttaaagtgaaggcaccactcaaaggtgggcatgacagtatagaaaaccaattaagaaagagtagttatatctaaaatagttggagggtgggaccagtcagaggaaagcctgccaaataagaagacaacttctcaatctggtctaaggctttaacttgtagcctggcttttggactttaaactgtcatcagcttggaggtggggtttcaccggaaacctgcccctatttgcctaggcatttggctgtctcctgtcactatcaggagcaacatctctacttagtgaatgctagaggttgtagtttataattctcaattggttaaaagatgttttgtatcagaatcaactgtaaaaatatattttaaaagaaatataattatatacctactgtagagattccaaattcaaacatgtgtgatatcgcttggatatctttaaaacattccacatgatgctaggattccttgatagaccaccatggtataggaaaaggtrtacctgagtgtagtaaagtcacaagaaattattactagaatatgggaactggcctggaagata

SEQ ID NO: 481930 - DNA, 464 bp, Homo sapiens
tggtctatacttttcatacagaattttggcaccggcattaataaggctttctgattggttttccagagaatccaggaaccaagattttaatgtagaattttccaatttttaagattgtgtgtgagccacgggaagcactagcaggacatatctagcttggttatgacctttagttcctatatatagaccagtgaaagaaccaaaaacagtcatcaaaattacatttctgacargtgataagtaaacacttagcatgtataatggagttactgatttaactagtcatttcctgaagtctgcctgagttgttgattatgaaacaatatgatcacataaatcaattttaaaaccagatcagtccatactagcaaataatatatttctaaatagttttaaatcaattcaatattttttcatgtcaatgatttttcttatagatcagagtaatggcatcagttaagttt

SEQ ID NO: 481931 - DNA, 640 bp, Homo sapiens
cattctagttttacttagtgaaaagctgaggcacagagaagggatatgttacagttagagatgcgagtttaagtcataatctttatttatttatttatttagcgacagagtctcgctctgtcacccaggctggagtgcagtggcacgatcttggctcgctgcaacctccacctcccatattcaagcgattctcctgcctcagcctcccaagtagctgggattacaggcgcgtgccaccacacccagctaattttttgtgtttttagtagagacagggtttcaccgtgtcagccaggatggtctcaatctcctgacctcgtgatccacccacctcggcctcccaragtgctgggattacaggtgtgagccaccacacccagctaagtcataatcttcttaaggacagtaaccatttctacttaaattactaaaatcattttaaatgagtgagccagcctggggtacctgaaatctcatctctcaggcatttgggtttattattacctttgcatttgtctaaggtgatcattgttttggctccaaagaatgaaataaatgtgacacattgcataggttctcactggcctgattaccaacctagtagcatctgaaactgacagcacctgagccttatctacag

SEQ ID NO: 481932 - DNA, 640 bp, Homo sapiens
cattctagttttacttagtgaaaagctgaggcacagagaagggatatgttacagttagagatgcgagtttaagtcataatctttatttatttatttatttagcgacagagtctcgctctgtcacccaggctggagtgcagtggcacgatcttggctcgctgcaacctccacctcccatattcaagcgattctcctgcctcagcctcccaagtagctgggattacaggcgcgtgccaccacacccagctaattttttgtgtttttagtagagacagggtttcaccgtgtcagccaggatggtctcaatctcctgacctcgtgatccacccacctcggcctcccaaagtgctgggattacaggtgtgagccaccacacccagctaagtcataatcttcttaaggacagtaaccatttctacttaaattactaaaatcattttaaatgagtgagccagmctggggtacctgaaatctcatctctcaggcatttgggtttattattacctttgcatttgtctaaggtgatcattgttttggctccaaagaatgaaataaatgtgacacattgcataggttctcactggcctgattaccaacctagtagcatctgaaactgacagcacctgagccttatctacag

SEQ ID NO: 481933 - DNA, 640 bp, Homo sapiens
cattctagttttacttagtgaaaagctgaggcacagagaagggatatgttacagttagagatgcgagtttaagtcataatctttatttatttatttatttagcgacagagtctcgctctgtcacccaggctggagtgcagtggcacgatcttggctcgctgcaacctccacctcccatattcaagcgattctcctgcctcagcctcccaagtagctgggattacaggcgcgtgccaccacacccagctaattttttgtgtttttagtagagacagggtttcaccgtgtcagccaggatggtctcaatctcctgacctcgtgatccacccacctcggcctcccaaagtgctgggattacaggtgtgagccaccacacccagctaagtcataatcttcttaaggacagtaaccatttctacttaaattactaaaatcattttaaatgagtgagccagcctggggwacctgaaatctcatctctcaggcatttgggtttattattacctttgcatttgtctaaggtgatcattgttttggctccaaagaatgaaataaatgtgacacattgcataggttctcactggcctgattaccaacctagtagcatctgaaactgacagcacctgagccttatctacag

SEQ ID NO: 481934 - DNA, 439 bp, Homo sapiens
caccatacctactaatacatacatactaaaattagtacatacaaaattagtacacacatactaatatgtttattttttgtagagtcgggggatctcactatgttgcccaggctagtcttgaacwcctgggctcaagcaatcctcccacctcaccctcgcagactactgggattacaggtaggagcggctgcacccagccatcagtggtgtagtttgatgggtaaaagcaagcaagcgtgcatttttgacatcaagcaggtgagcgtttgcatctcaattctcccacttctgacctttgatatattgcttcacctccctgagcctaaaatgggaataccaataggtacctctcagggttatcaggagagtcgaatgcagcaacaaacaaaatctcccagcacagtgctctgcccacagaaggggctgtgtaaatgatact

SEQ ID NO: 481935 - DNA, 528 bp, Homo sapiens
caaacgttgaccccaaatgggataataataatcccagggaccaagcccaaatgcaggacctcagagaataattaaagggatcaaagagtccactcctaggacacaaaatgtctyaaaggcattcgagattcaacaagaaaaagagaaaattccctccgcattcctgtagaggctcaaaaatcacatgagaaaattagatccggaggacccagtagggcaaggccttttgaaggctaactttgtaacatagagctggcctgacattacaaaaaaattagacaagattgatggatagaataaaaaactgattaaggaattattcagggaagctcagaaggtctttgtaaggacagaggaagagaagcaaaaacaaaaagcaaaaatcatggtttccactgtggaagaggtagtcagaaaaacgttaaatcaaaatccccctcaaaggagagaagggaatgatagattctgacatagagaaagaagggaaacgcaggaaaaagctcctaagagtggatgttacgagtgtgg

SEQ ID NO: 481936 - DNA, 669 bp, Homo sapiens
accatccagcaaagagcaggccctagttcaccctctctttgggttgccagattccaaagaacacatcccggtaggggctgagctgctccgctcattccttctcccaaagacaccaattagagaagttactcctttcctgsggctgggaggaaagaagatctgaggcaggaatgacagccgagtggggtgtttaatggttgctcttagtatggtgggtaggacaggtctcggttggactgttgtatgcattgtaaactcttcagtatccctgaatggtgggcctgtcacttaacaaccaaaatcgcctccacatattttcaaatgtacctcagtgccccaacagggttgagaactttgctttagaggaagtttcctcataggaacaggaggtctatgtcatatatgggaaatgagagggaagggggtgacagagatgaaagttccttgctaacagtaatgtctttattattaactttctgtgagctgtacatttttaaacgaattccttagaacaagagtgatgtagccaggcacagtggctcgcgtctgtaatccccgcactttgggaggccgaggtgggcggatcacttgaggccaggtggtcgagaccagtctggccaatatagggaaaccccatgtctccaaaaaataaataataataattagctg

SEQ ID NO: 481937 - DNA, 669 bp, Homo sapiens
accatccagcaaagagcaggccctagttcaccctctctttgggttgccagattccaaagaacacatcccggtaggggctgagctgctccgctcattccttctcccaaagacaccaattagagaagttactcctttcctgcggctgggaggaaagaagatctgaggcaggaatgacagccgagtggggtgtttaatggttgctcttagtatggtgggtaggacaggtctcggttggactgttgtatgcattgtaaactcttcagtatccctgaatggtgggcctgtcacttaacaaccaaaatcgcctccacatatttycaaatgtacctcagtgccccaacagggttgagaactttgctttagaggaagtttcctcataggaacaggaggtctatgtcatatatgggaaatgagagggaagggggtgacagagatgaaagttccttgctaacagtaatgtctttattattaactttctgtgagctgtacatttttaaacgaattccttagaacaagagtgatgtagccaggcacagtggctcgcgtctgtaatccccgcactttgggaggccgaggtgggcggatcacttgaggccaggtggtcgagaccagtctggccaatatagggaaaccccatgtctccaaaaaataaataataataattagctg

SEQ ID NO: 481938 - DNA, 669 bp, Homo sapiens
accatccagcaaagagcaggccctagttcaccctctctttgggttgccagattccaaagaacacatcccggtaggggctgagctgctccgctcattccttctcccaaagacaccaattagagaagttactcctttcctgcggctgggaggaaagaagatctgaggcaggaatgacagccgagtggggtgtttaatggttgctcttagtatggtgggtaggacaggtctcggttggactgttgtatgcattgtaaactcttcagtatccctgaatggtgggcctgtcacttaacaaccaaaatcgcctccacatattttcaaatgtacctcagtgccccaacagggttgagaactttgctttagaggaagtttcctcataggaacaggaggtctatgtcatatatgggaaatgagagggaagggggtgacagagatgaaagttccttgctaacagtaatgtctttattattaactttctgtgagctgtacatttttaaaygaattccttagaacaagagtgatgtagccaggcacagtggctcgcgtctgtaatccccgcactttgggaggccgaggtgggcggatcacttgaggccaggtggtcgagaccagtctggccaatatagggaaaccccatgtctccaaaaaataaataataataattagctg

SEQ ID NO: 481939 - DNA, 476 bp, Homo sapiens
ctggtgagctgcctaaaataggcaggctgctgttcaaggtgtgatttcaggaggaccataaagacagaaggcttagagttagagaacatgcttattttaaacatacacacacacacacacaacacacacatgcacacgcrcacgttacatgcacacatgcaacgctcagaggttgacggtaacccctttacttcctatgtgcagcatttcccctgtgccaggcactatgctcaggactgtccactccacttgtgcttcagccttcacgacatacccatgatgtgaggcgtcatgtttatccccatttaaaatatgatcccttgaggagttcaagtaactggttcaggtacaagtactaacatgcggtgggagtgggatttgaacccaggactcacctgactctaaagctggggtggctgggtatatttctatgcgactccatggctctctttgctactgaccacctagcccagaag

SEQ ID NO: 481940 - DNA, 476 bp, Homo sapiens
ctggtgagctgcctaaaataggcaggctgctgttcaaggtgtgatttcaggaggaccataaagacagaaggcttagagttagagaacatgcttattttaaacatacacacacacacacacaacacacacatgcacacgcacacgttrcatgcacacatgcaacgctcagaggttgacggtaacccctttacttcctatgtgcagcatttcccctgtgccaggcactatgctcaggactgtccactccacttgtgcttcagccttcacgacatacccatgatgtgaggcgtcatgtttatccccatttaaaatatgatcccttgaggagttcaagtaactggttcaggtacaagtactaacatgcggtgggagtgggatttgaacccaggactcacctgactctaaagctggggtggctgggtatatttctatgcgactccatggctctctttgctactgaccacctagcccagaag

SEQ ID NO: 481941 - DNA, 486 bp, Homo sapiens
aggcctactgtatgccaaacgctgtgccaaagccactaccattattacctcatttgatacaacaaccctatgaggtcagttctatcactttggtccctacattgcagatgaagagaccgaggcacagaggcgaagtaacttgtccatgtcccagagctgtaaattaatgctcagtaatgagcagaatagcgtcctggtccatgtaagcrcttaatgcacttgtactcggctttggaaagaatggagagactgcagtgtatacaaacatcccaggaaaacctcattcatttggaccatttccgtctagattttattataatttgaaaggagcctagggtcgtgttctctctttttttttttttttttttctgcttgcggggaaaagctaagcaaatagtacaaacaaagtaaaaatatttttgtggggcgttttagaatttagacgagatagggtgcattcaggatagtatgaccgtagacacattt

SEQ ID NO: 481942 - DNA, 434 bp, Homo sapiens
aatgtccccagctgaacacaccactgaaatccaagctccttgacgtgcccacacagctttgtggatctgtgtatccccatctcccttcaagctcaggccttctctctctctctattgcagcccaccatctcctccctggggctcatgcccacctctgagcttttgcacctgctggtccccttcctgcagtgctggacccctgatgctgtgtccttcaggcctcacctcaaatgccacctcctcagatctaaaattaaccctccaacacccagtattccctctcccatcaccctgcttaatggtctactatctgcaactctgttctygttcacttatcatctgtctccttcctggccccaagaagaaagactgttgcctttcttcttccttgtgtccacggtgcccactatcgtggttggcacagaatatggaat

SEQ ID NO: 481943 - DNA, 634 bp, Homo sapiens
aaatatgtgtttgcattattttacygctactttgatattttagtgttttttgggggggcatttaaaatgtcttcttttaacaaaaatattttaaatgtacaataattgtggaatatctttcataacatgaactggccatgttttctgcaaaacttaaatgaatgcaacttttgcatctggattgattttaattatatgaaagaacaacccccagatactatttggacacggaggagagataagtataaggtatataacgagagtcagcaaacccttttcaatgtaaatcatagcattatgtattgtcaacactagtaatttgtctgagggtagaggggatgagtctaatgaatacaaagattaaatatgtgtttaaagctataatatactaaaaattttgtagtattgcacagttttgcatcctgtgaaaaatccttattggagaatcacacattgaaattttttcaaatgctcttgtttctctgctcactggctactcaatttgatggatgttattaagttatgttcagccaattaatatcacacaagagaataaaccgattacatttggatcttccctcttgtggaatcttcaaagaataagtgtttttcatcgaaagagccaggaatggta

SEQ ID NO: 481944 - DNA, 634 bp, Homo sapiens
aaatatgtgtttgcattattttactrctactttgatattttagtgttttttgggggggcatttaaaatgtcttcttttaacaaaaatattttaaatgtacaataattgtggaatatctttcataacatgaactggccatgttttctgcaaaacttaaatgaatgcaacttttgcatctggattgattttaattatatgaaagaacaacccccagatactatttggacacggaggagagataagtataaggtatataacgagagtcagcaaacccttttcaatgtaaatcatagcattatgtattgtcaacactagtaatttgtctgagggtagaggggatgagtctaatgaatacaaagattaaatatgtgtttaaagctataatatactaaaaattttgtagtattgcacagttttgcatcctgtgaaaaatccttattggagaatcacacattgaaattttttcaaatgctcttgtttctctgctcactggctactcaatttgatggatgttattaagttatgttcagccaattaatatcacacaagagaataaaccgattacatttggatcttccctcttgtggaatcttcaaagaataagtgtttttcatcgaaagagccaggaatggta

SEQ ID NO: 481945 - DNA, 634 bp, Homo sapiens
aaatatgtgtttgcattattttactgctactttgatattttagtgttttttgggggggcatttaaaatgtcttcttttaacaaaaatattttaaatgtacaataattgtggaatatctttcataacatgaactggccatgttttctgcaaaacttaaatgaatgcaacttttgcatctggattgattttaattatrtgaaagaacaacccccagatactatttggacacggaggagagataagtataaggtatataacgagagtcagcaaacccttttcaatgtaaatcatagcattatgtattgtcaacactagtaatttgtctgagggtagaggggatgagtctaatgaatacaaagattaaatatgtgtttaaagctataatatactaaaaattttgtagtattgcacagttttgcatcctgtgaaaaatccttattggagaatcacacattgaaattttttcaaatgctcttgtttctctgctcactggctactcaatttgatggatgttattaagttatgttcagccaattaatatcacacaagagaataaaccgattacatttggatcttccctcttgtggaatcttcaaagaataagtgtttttcatcgaaagagccaggaatggta

SEQ ID NO: 481946 - DNA, 537 bp, Homo sapiens
catagtaatgttatttattttgctaatgactaaacagcaggtataatgctgacaaatgactcacatggaaattatcctggagaggcttctggaattgccctcactcttaaaaaggacataccacatcctgcctttggacatttttgtatgataatatgatgcttggatctctggcagccacctttaaggtatgaggtaaaagatgagagaatcacaaagaagatcacaaagaagttgagraggataactgatatcactgacccaaagaattaaccaaccgtttaaccacctacccaataccttctgttatgtgggataatgtattttctactatataagatgtacaaattaggtttttctataacttgtagccgagggtatcattttagacatagtggttaattttaagcttcttagaatttcaacaaacttttgaaatgagtacatgaatattcatgcaaaaagatgaagtgtaaccactaataaacttcacctttcaaattttctcttctcttctctcctcctcttctccaaacc

SEQ ID NO: 481947 - DNA, 605 bp, Homo sapiens
tatcattctccttattttatagataaggaaggagtctatgtttcacagtgttaaataaactggtcctgacagcccctgataacttcttaaaggctatgtagagtctcagagtttttacttaaaagattattatagaacaaagcacagggatgtttgcttcagcctcatagagaaagtaagttcctcattcattttaaatctgtatgtataaaacacttggagacagtgtaatcaatatataattatgtatagtattgcaattcataatacttgaaaaattatatgttctaacatgtatatgcaaggtcaaattctagagtatcttttaaaacaataaaaaaggaaaagattcctttttctaaaaataagtccaagatataggagtatgtcatctaataaaaactttccagatatagcttttacttgacataacctatttaaaatgtacaactcaaaaccaacctggtttgacctaagcgtatatgctcaagtatygcacgcacgatcttgaatattcacattacggttcattgaaaaggcaatgggctttgcaacaaggttgacaacaaaaggaaaaatgatgaagaaaattgcctcacttatct

SEQ ID NO: 481948 - DNA, 485 bp, Homo sapiens
acggtagctctgtctctcacagccaggaaatcacatctcaattcacaggacaaatgtatttcatctgacatctgcaggatcttgtcattttcagtggatgaaatatacaatgaaattccagggttttctaagcaaatcttgggcatcgattcactgtgatcttggataaactggcagactgaaaatgggggagaaaacaacagaggcaaaaagatggaaatttgtatcaccaaactggcaaacttacttgaatcaccctttcccracttgattctgtggaggccagcctgggttcccaaatgggaagagtaattagagggaggaagaaccgtaagattcaaagggaagaaataatccccaacagtttgctgagcgaataattggccctggtatagttgaaagttggcattaccatttcattgtttaatttggtccatgattttttcatttttatgtgtagatatgccatgccagggcttcactat

SEQ ID NO: 481949 - DNA, 600 bp, Homo sapiens
tttgatttaaaaagttctaggtcgggcatgctgactcacgcttgtaatcccagcactttgggagaccgaggcgagtggatcacttgaggtcaggagttcgagactagcctgaccaacacggtgaaaccccgtctccactaaaaatacaaaaattagccgggcatgatggcacgtgcctgtratcccagctactcgagaggctggtgcacaagaatcacttgaactcaggaggcggaggttgtggtgagctgagatcacaccactgtactccagcctgggggacagagagagactctgtctcaaaaaaaaaaaaaaagttcttaaagcattcatacagaaacaaaaacaaaaactgagtaatatttctgtcttcaagtcacttcactctgctatcatatgtttatcatcctgtttttgctactgacttttcatgtaacatgtaccattctattagtgtgtgaaatggaaaccactctaagtaaccgaggaagaattgcatgggcttggatggttgcaaaaaaaaaaaaaaaaaactggaggagctaggcctagaagaggctgcatactagtcttctaggttcttgatcacaaagcactgca

SEQ ID NO: 481950 - DNA, 600 bp, Homo sapiens
tttgatttaaaaagttctaggtcgggcatgctgactcacgcttgtaatcccagcactttgggagaccgaggcgagtggatcacttgaggtcaggagttcgagactagcctgaccaacacggtgaaaccccgtctccactaaaaatacaaaaattagccgggcatgatggcacgtgcctgtgatcccagctactcgagaggctggtgcacaagaatcacttgaactcaggaggcggaggttgtggtgagctgagatcacaccactgtactccagcctgggggacagagagagactctgtctcaaaaaaaaaaaaaaagttcttaaagcattcatacagaaacaaaaacaaaaactgagtaatatttctgtcttcaagtcacttcactctgctatcatatgtttatcatcctgtttttgctactgacttttcatgtaacatgtaccattctattagtgtgtgaaatggaaaccactctaagtaaccgaggaagaattgcatgggcttggatgsttgcaaaaaaaaaaaaaaaaaactggaggagctaggcctagaagaggctgcatactagtcttctaggttcttgatcacaaagcactgca

SEQ ID NO: 481951 - DNA, 533 bp, Homo sapiens
ttgtaaattagaaatgattgtgatcccactctgtctgaccttctgttttccactgacatagaggcagaatttattaatctgtttggaaagttcacactgactcaatttatggatttctgcgcaataccaatcaaattatagcttagtgtatacaaggtcaggaactataattttacttaattaaagtagcaggacataaggtcacaaagctattcaaaaggttagtaaaggtacrtttttcttttagaaatgtttccatacagaaaaatatttggctcttccattggtagacattacagatctaatacatctcactttcatgccttcactctatatacattgattcatatgtcaattttgttttactgtctgatgatggatgccaagcaactgtctgggaaatggcttataaatgtatggtttcacttgtaacacaattatcctaattcaattacacttttctgtttttttctacctttaaccatttcctttcccaaattgcatctccagttatgattttagtgaggttcttg

SEQ ID NO: 481952 - DNA, 533 bp, Homo sapiens
ttgtaaattagaaatgattgtgatcccactctgtctgaccttctgttttccactgacatagaggcagaatttattaatctgtttggaaagttcacactgactcaatttatggatttctgcgcaataccaatcaaattatagcttagtgtatacaaggtcaggaactataattttacttaattaaagtagcaggacataaggtcacaaagctattcaaaaggttagtaaaggtacgtttttcttttagaaatgtttccatamagaaaaatatttggctcttccattggtagacattacagatctaatacatctcactttcatgccttcactctatatacattgattcatatgtcaattttgttttactgtctgatgatggatgccaagcaactgtctgggaaatggcttataaatgtatggtttcacttgtaacacaattatcctaattcaattacacttttctgtttttttctacctttaaccatttcctttcccaaattgcatctccagttatgattttagtgaggttcttg

SEQ ID NO: 481953 - DNA, 533 bp, Homo sapiens
ttgtaaattagaaatgattgtgatcccactctgtctgaccttctgttttccactgacatagaggcagaatttattaatctgtttggaaagttcacactgactcaatttatggatttctgcgcaataccaatcaaattatagcttagtgtatacaaggtcaggaactataattttacttaattaaagtagcaggacataaggtcacaaagctattcaaaaggttagtaaaggtacgtttttcttttagaaatgtttccatacagaaaaatatttggctcttccattggtagacattacagatctaatacatctcactttcatgccttcactctatatacattgattcatatgtcaattttgttttactgtctgatgatggatgccaagcaactgkctgggaaatggcttataaatgtatggtttcacttgtaacacaattatcctaattcaattacacttttctgtttttttctacctttaaccatttcctttcccaaattgcatctccagttatgattttagtgaggttcttg

SEQ ID NO: 481954 - DNA, 588 bp, Homo sapiens
tgagtgaccttggtccaagtctggccccttaccaagctgcctgagttggcgctcctgctgggaccagctccacggcctcataggtgaagctcccagtggctcctggggaactctccatgaccagggagaagtcgctgccaaggctggtggtgctgccacggtcctttcgtcctaaaagaagccagtgccatcagtcagcgtgttaccttctcccactactggtcccccaccttttctataccacataactgggaagaaaaaaaaaaaaacaaaaaayctcttagcacaaacagttcctgcctgatctgtacacgggaagatgtatggaggaagggaagtctgttggggcccaggactcactcagcatgcagatgtcttccagggtgaagcctccatcccgggctggcaaactcttcctcctagaaatggaagccggagcagtaaattccagatctatctggggtcttattgtgtcccccgttcccaatcctgcctgtcctggaaagcagctcaattcactggcaacttgtggagacgggtcctagcctagggagtgttataagacaccagggccacttctgggaccca

SEQ ID NO: 481955 - DNA, 619 bp, Homo sapiens
gtttttgtctacacaggggatcttgccattccctgaatgttataacctctcattcctgcaaaatgatccctatttggaatgccctccatactttctgattggtgggctcctactcattcttcaaaaaaccagctcaaatgtcacttctgacacaacttctctgactctcccatggggagctgtttccacagcattccattctcacctctaccacagcacttgacatactgaaagttgtctcccccctggactgggagctgtgtagcaagggtaccagagcctatccacctctgyatccccagtacctagcatgcactggacattcagtttttggcgaacgaatgaatgacctgttgaacgaatagctgaatgaggggatcaccagactgagagctcagatgggatgaaggccatgtagaaagctgaatgggtgggtggctaatgctttagcgttggactcctgcagaaatcactggatcacagaaagaattcatttacttttgaggtctttatggggagcctggccctggtactgggtaggagatgtactgtgaaacaaagtgaaaactgaggtcatttagtcagtgacagcagcttgtattacatttgagctgttcac

SEQ ID NO: 481956 - DNA, 502 bp, Homo sapiens
aaaaaaaaaaactgaaaaagaacactcggatggtcagaggagtctgtaattcatacacaataggttttaacaaattcctacatggaactgctccagtttataggttagaattaactatagtgaaaaacagccttcagtttttatcaattccaggccagtgagtgctactataagttgaaaattctccatttacacttctctacagtacggcttgtgtagtctaagaaatcaaacatgtgaatgagctcccaaactattttcctcactctaacctactctacctgcagccccctttctcagttgacagcaatcctctgtacaratgctcaaactaaaaaccgtagatcagtactgcccttacaccaggcccaaggaaaggcccttatccaagggccctgagctttaggattgagtgctttagagtcaagatgacatgtcaatctagagagcatactcattctgcactacactctaggtactcaagaccccaaataccctgccc

SEQ ID NO: 481957 - DNA, 487 bp, Homo sapiens
ccacacttgcctgctgttttccgtaagatctgtaaccacaccgagttaagctttggcctccctgcctgtaacctgataaaagggtcaagcctgcaggacggtgtgttgttatactcactgatggaattttctctcccctgcctgggcaggtgaacccaaggctatgaaccagggcctgtaggtatttgaggctatcatgatgctgccccctgcattcctgcagtcaactgggagctgtgggggctgcagcacttgctctctcctggccagcagcccagggggtgagtgaggagggcttggggatccattgaatttcctttttgttttcttcatttctaytgggtctaactcacttgttaaaaagaaaaaagtcttactagtcttactattggaattaggaaattagtctttaactggactgcaaatatggctcacacttgtaatcccagtgctttggaaggccagggcctgaggatcatttgaggct

SEQ ID NO: 481958 - DNA, 627 bp, Homo sapiens
caaaagccaggagggcattttcctctttgctgagtggctgatgctcagagacacatctctattctttgaagctggtctgctttgtttacaattatgccctagtcattagccaacggggactttgggagtagcttgttctgggaatacttcctgtcaggtttttcccagcctgtctttggaatgcctctccaatccacttcatgackccaggggtggtccaatgtgcccaaagggactctgcctttgtgctcaaaaggattcccagcactcaacttcaaaaatagcttggggcttactaaaacctaattgaaagagtctctgtttttgcttaaaaacacaagtctggcctggtctttacaagtgactcataaagaattattttgctacttgctttttaaattacatgtcactgtcgggtactaatctgtacgcttattttggaaaccctgagaaatggctactagggtttctctatctgtctgaggaatcttcaagcctccaagtagaagcagcaaccggactttggtcttgacagtcagacacccaggagactggacttagcactcctgagctaagaggagactcaaggctgtcctgctatcctggaagagcagaggaggaggaaag

SEQ ID NO: 481959 - DNA, 585 bp, Homo sapiens
gacacaggataatatatctaggctatctaaatatttttcaagcaacaaaagatcccaatttggtgctacacaatttttgcaattaaaaaaaatcatgaaagaaactgctaactctcagacagcaaattatgcccattgcttaaaattcaattagcctctgcctttcctcttactagcctctctgccccaaatgccccctctacaatttattccctgccacccatgttcaaggctcagctcctacatcagtcctccacaggactttccttgacccctttgcagatcccagtgtcctttatcataccctcctctgaggtctcacagcattttatctctacctctcttatttgcctctttactgcttgcattttacttattagatattttatctcccctgcctcactgagcaacttaagagaagggtttctatatactctgaagatgcctaacatagcaccttgcccaaggcagagccttagtaaacagttttccaattgctaaaacaggaagttyagattcctttcttaaaggcagtaagacacaaacaaatcatcatctgcaaaatgaagaggaagtcctttccag

SEQ ID NO: 481960 - DNA, 610 bp, Homo sapiens
cacaaactatgcccatgtggccaaatccagcccaccctattattgtaaataaaattttattggaacacagatgcactacatttatgtattgtctgctttcacactacatcagcagagttgagtacagtcatccctcagagtctatggtggactggttccaggaaacctccctaccaaaatcctgggatgttcaagtcccttatataaaatggcacagtaattacaactaacctatgcacatcctcctgcatactttaaatcacctctagattacttataataatactatataccatrtaaacgttatgtaaatagttgtattatgctgggccagacaaagtggctcatgcctacaatcccaacattccggaagccaaggcaagaggatcactggaggccaggagttcaagaccagcctgattaacacagtaagaattctctattaaaaacaaaacaaacaaacaatagttgttatgttctattgcttatttgtatttattattgtgctgttatattttattgttttttaccctaatattttccatctgcagttggttgaattcatagatgcaaactcatggatgctgaacccacagacacagagggccaa

SEQ ID NO: 481961 - DNA, 512 bp, Homo sapiens
ctggtggacaggaagctcctaggaactagcccagggtctctctaatgaagtacatctgactgatactgttccaaagtgggagagaaaggccctcacatcagtgaagagcttcaagctctgtcgttttctaaggaarcaatgtctcctccacccaggtcagcacttcatagcccggaaagcagcaagtatggaattttgactagaaagtgccctttgtgaaaatcaaactttattcacacaggcaagaggtctgagcagattgctaaagagagacttagttaaaagtgaaatgtgagcagaatgctaaggctgaaaactattgctgggaaaggtaaatgtgaaaacaccctaataattgaatccaacatgccaaagggagcactttgaggtcagacctagaataggaaaataaccctggcctcgatccaagttggttaaaaagcacttagcacatacgatatactccacaccattgccaatcccccaaaacaaccaccttttggtgcttcttc

SEQ ID NO: 481962 - DNA, 441 bp, Homo sapiens
agccagggcaacatggcgaaatcccgtctctataaaaactacaatgattagctgggcatggtggtgagcacctgtcatcccagctactagggaggctgaggtgggaggattgcttgagccctgcaggtcatgactgcattgagccatgatcatgccacttgcactccagcctgggcagcaaagcaasaccctatctcaaaaaaaaaaaaaagtgcatccaagctacctggggatattgttaaaagacagatcctcattcagtagacctgggatggagcctgagattctatacttttaacatccactgatgctgatgttcttggccttggtgccacactttgagaagaggaaagctctacatcacttcatcgcatgagggtcagttgaggacctcacttgccttgctatactgtgagttccttgtgggcaggagctctttct

SEQ ID NO: 481963 - DNA, 677 bp, Homo sapiens
ccaagactggaaagtaataagcaaatgaaaattgtcattaaaatggtagtgcttgcaggcatggtggctgatccctgtaatcctgggactttgggaggctaaggtgggaggatgcttgagcccaggagttccaggctgcagtgagctatgatcacaccartgaactccagtctgggcaacagagcaagaccatgtctctaaaaaataataaaaattggccaggtgcggtggttcatgcttgtaatcccagcactttgggaggctgaggcaggcagatcacctgaggtcgggagttcgagaccagcctggccaacatgctgaaaccccgtctctactaaaaatacaaaaatacaggcgtggtggtgtgggcctgtaatcccagctactcgggaagctgaagcaggagaatagcttgaacccaggaggcggaggttgcagtgagtcgagattgtgccaccgcatctcagagtctgggcgacagagtaaaactccgtctccaaagaaataatgataataataaaattgtaaatagtatttctataatgtatttttctcttttttcaaagttgaatacaaggatgtggtcaactatactgttcttaccgttgaaaaagaagtgctgaggccaggcatggtggctcacacctgtaatcccagcactttgggatgccgaggca

SEQ ID NO: 481964 - DNA, 677 bp, Homo sapiens
ccaagactggaaagtaataagcaaatgaaaattgtcattaaaatggtagtgcttgcaggcatggtggctgatccctgtaatcctgggactttgggaggctaaggtgggaggatgcttgagcccaggagttccaggctgcagtgagctatgatcacaccaatgaactccagtctgggcaacagagcaagaccatgtctctaaaaaataataaaaattggccaggtgcggtggttcatgcttgtaatcccagcactttgggaggctgmggcaggcagatcacctgaggtcgggagttcgagaccagcctggccaacatgctgaaaccccgtctctactaaaaatacaaaaatacaggcgtggtggtgtgggcctgtaatcccagctactcgggaagctgaagcaggagaatagcttgaacccaggaggcggaggttgcagtgagtcgagattgtgccaccgcatctcagagtctgggcgacagagtaaaactccgtctccaaagaaataatgataataataaaattgtaaatagtatttctataatgtatttttctcttttttcaaagttgaatacaaggatgtggtcaactatactgttcttaccgttgaaaaagaagtgctgaggccaggcatggtggctcacacctgtaatcccagcactttgggatgccgaggca

SEQ ID NO: 481965 - DNA, 677 bp, Homo sapiens
ccaagactggaaagtaataagcaaatgaaaattgtcattaaaatggtagtgcttgcaggcatggtggctgatccctgtaatcctgggactttgggaggctaaggtgggaggatgcttgagcccaggagttccaggctgcagtgagctatgatcacaccaatgaactccagtctgggcaacagagcaagaccatgtctctaaaaaataataaaaattggccaggtgcggtggttcatgcttgtaatcccagcactttgggaggctgaggcaggcagatcacctgaggtcgggagttcgagaccagcctggccaacatgctgaaaccccgtctctactaaaaatacaaaaatacaggcgtggtggtgtgggcctgtaatcccagctactcgggaagctgaagcaggagaatagcttgaacccaggaggcggaggttgcagtgagtcgagattgtgccaccgcatctcagagtctgggcgacagagtaaaactccgtctccaaagaaataatgataataataaaattgtaaatagtatttctataatgtatttttctcttttttcaaagttgaatacaaggatgtggtcaactatactgttcttaccrttgaaaaagaagtgctgaggccaggcatggtggctcacacctgtaatcccagcactttgggatgccgaggca

SEQ ID NO: 481966 - DNA, 618 bp, Homo sapiens
tgatgtagatggtgatgccagcatctagaaacaaattaattatattagagcataaagaaaacagagcagagcattgcatttacactccacaaatctgtaaatcataccataaatgtgaaaatctaacattttctcattcttcagaaaaacataaaacaaacattctataatatattccatgtttcttaagagaatatcacaattcgataaaaccaaactgtagaaatgaaattaatttttaatactataagttttctaaaagtcacactaacttgagttacagcagcactactmtttcacttagcaagttaaaaaaataaaattatatagacatggtatataatttatgtatttgtgatgtgaacttcatggcacttgtacaatgcctttgaatttatccatttttttttccttgtagatgtaaattatttgaagatatgttcacagaacatacattcattatatatatcctcatagaaatgaatgtagcagtgttatatactcaaaagtaaatactgaagctgagtaaatgaaaatatgtgtgtgtgcatatttgcgtatttcctgtcttatattagacaaccatcaaaacatcctaattaaataagacatgagcca

SEQ ID NO: 481967 - DNA, 618 bp, Homo sapiens
tgatgtagatggtgatgccagcatctagaaacaaattaattatattagagcataaagaaaacagagcagagcattgcatttacactccacaaatctgtaaatcataccataaatgtgaaaatctaacattttctcattcttcagaaaaacataaaacaaacattctataatatattccatgtttcttaagagaatatcacaattcgataaaaccaaactgtagaaatgaaattaatttttaatactataagttttctaaaagtcacactaacttgagttacagcagcactactctttcacttagcaagttaaaaaaataaaattatatagacatggtatataatttatgtatttgtgatgtgaacttcatggcacttgtacaatgcctttgaatttatccatttttttttccttgtagatgtaaattatttgaagatatgttcacagaacatacattcattwtatatatcctcatagaaatgaatgtagcagtgttatatactcaaaagtaaatactgaagctgagtaaatgaaaatatgtgtgtgtgcatatttgcgtatttcctgtcttatattagacaaccatcaaaacatcctaattaaataagacatgagcca

SEQ ID NO: 481968 - DNA, 641 bp, Homo sapiens
ataattctcctgacatcacatgccaggacgcgttcagcacgcatctgtcttaatctgagtgaaacaagggatctgaaccgtgactaaggaaacacggaaacaatcaatcccagtaattgcctttatggagaacaaggccctgcgattattcattaacaccctctctgctgtctcctctcaaacttctcactccataaccgctgcccttatayccgggttcaggtagcaccaaggagcagctgctcatctcaaatgaagacgctggaggactcagaccccaaagcagacatgagaacgtggggggatgccctggctgagaccctcttagacacgacaagcctttaggtaaatcgattttgtattttttatcccataattcatatgagagtcaaaccaaggagtggggagagtacagagttgtggagcgtgggtgtgggtctcggtgcaccagagtggaacactgtgaggagtttttacccactgaacctctaaaccacttagctagcccaacacatgaattttagcatttgcgtattaaacccaattatgaaatgcaaaactcccatgcaaattagcagatgttgttatttttgagtggggactttggttattttcatatcagaatggcaaccttgccacga

SEQ ID NO: 481969 - DNA, 558 bp, Homo sapiens
accttgtattatggttatttgtatgcaggttttctctcttctatattaagatagtaaattatttttttgtttcccaaggacttaacagggtgccttgcacatagttggcactcattaattaaatrttaatagatagaactctaaaagtaaccagataaagaaagcattaatgtttagaagatactttgattaaaaaatatatttgacttttgaatatctggtctctgcttttctcatcttctccccctatgggaagcctccactacacctatacacacatctactcatatgcacacaccaactccagcatgctccatccttaatgaatttcttttgcttcaacattagaattcttctaatgttgttgttacttggctccaagtaattcacgtaaaattaatgtataatttgagcattagtctaattcctaatacccactcccatgccaattctcaagttagcgatccttccttctggaagctttcctcaagcctctaaaaccatcccactatatcttgttgcttcttctgtcgagcacgtgtcataccgttttagttt

SEQ ID NO: 481970 - DNA, 528 bp, Homo sapiens
agatggtaagaggaccactgcgttagtgcctgagtgttacactatcccatgtactttctctactcccttcccacacctttgcaagtagtatctttatcaaaccttctttgagttgccctaattttagtgggccattttggaccctgacagggggtcacaggtcctaaataataaagaatattcatttgcctgcattgtgcctttgaacatatattctctaagaaacaaaggggcaatagtgtgtggtttgataagaaagtagacaattttcaacctttataagcaattgataataatattcatatttagaatttattagattatattctctataccccctgaattatttcagaagtaactttgatgtttagggaaacagtttattccctacagaaccaacgaagctgctataacatccatggtgagaakaaattgactaatgcaagaactaggcacaggaagaacactgtgaaccaccatcttgaaagaggtgccacagttagccatgcttagcttttctgtgctaaa

SEQ ID NO: 481971 - DNA, 624 bp, Homo sapiens
taacttccttttactttagatgtactgtcctaatacggacttggaattctgaaaatttaactagttggtagacctctgcaggattctgggactgcttttctacacttcagcgtgcatgtgtcttattgggaaagttctattggcctggtgtcaacatagcatagtttgtggaattagaagataatcaaagggctgggcgcagtgggtcatgcctgtaatcccagcactttgggaggccaaggcgggtggatcatgaggtcaggagatcgagatcatcctggctaacatggtgaaaccccatctctactaaaaaaagacaaaaaattaaccgagcatggtggcacatgcctttagtcccagctactcaggaggctraggcaggggaattgcttgaacccgggaggcggaggttgcagtgagccaagatcacgccactgcgctccagcctggtgacagcaagactccatctcaaatgaataaataaataaatcaagacaatcaaagttcctatagacaatattatgacaaggaatagaagaggtaacatagccctgagacatttctgtgactgtgtactgctgtgtttaccatataaaggtatgtttattccaatccttcctgatg

SEQ ID NO: 481972 - DNA, 647 bp, Homo sapiens
aatatgtggaatgtggaatttatgtttttacatgttgttgtatattacagcaaacaaggggagaaggctggaatgatgcatgtaatgaattagagttgaagatattatatactcatgtttagcttgatatagatacagatggatatataaatatttacatatatttgtatgttcagaagttagtgtgcacacatatatttccttgctctgtcagatgagagggcctaggagcaatgacgctgcagtagcaatgagcatatctagcagaaagatcttgatttctaacaccattctccaataaaaggaaccagagcttcttgaggaaatagctaattccagagctggggcaggaaatatataagatgagcccgaaacttcttataatgacaggaattaaggaagtgttcaacaacaacaaaaaaaaccatgatagtgttatgtcaaagggacgtaaaagccaactgaaccaactcccaatggctaaagctggaaaaatttgagcaatgtaataaaattgtattggaaaatgatttagactatattataaatattcatgagtttatagtgatattcacaaatgattgaattaaaaaatggagcacaaaatataaatmtcccattcagaagaataaaaaatgatttatgta

SEQ ID NO: 481973 - DNA, 610 bp, Homo sapiens
ccattagaaaaaaaattagaaactactaacatcttttaccctggttsataacattttaaaaatatgagaatgatcgcagttttggtttattagctgaaatattagtttaaagcttatagaaaaatcccattcttcaaattttatgcaaatgcttaagtttgatttgtcctttcccattttagtatctagtgaggcagcctgttatgaacataagcaatctagtctcatgatgcattgcttctttgcagtagggtttaatgcttaaggatatataaaatgagtcacatctttgattttgacctagtttgaagacctatttagttctcattaagctcttctcataggtaaaataatgaattatattactaactcttaaatcacttctctaaagagctatgattttttgcgtgtacatgtatttagagattggaaggcctgatgataacaaacacaaagtcaaaacatcactgtatttctttagtgctggccacttgggaaagttctcattacagagtgatagccacaggccattttccctgttaaactcagatgaaaactaagctactttgatccaatccttttgaaaagataagactggtgttatggttaa

SEQ ID NO: 481974 - DNA, 558 bp, Homo sapiens
taagttgagatctagctaaagtattgctgttaatgtcatccagagggagctaccacaggcttgttttagaaagtggagacagaggagcacacagactggactatctgagaaagactgagtctgcatcaaagatcttaaagagttaggagagcattttgttacacttcttgaattcagagttatratcaaattcttttctgcatcacatggaaacaagtacctaaacaggtggcataagagacattgtcattttgttgttaagataggcaaatggcaagagagattattttggtggaaataatcagcccgagaatacccaagggtgcttacggtatatataaatgaaatattggcacagagcttagactattgcaggaaataaaaaccaggtaaatcataccagagggaacagtcagaacaaaacttaaagcaaaatattttctaacatctgcagtcaagtgctctgctggaaaatgtgaaagatggattccctctggtagcaaatgagaaattcagtggatgtatttacaatgttctgtatatattcattggaacata

SEQ ID NO: 481975 - DNA, 371 bp, Homo sapiens
ctggtaatgaggcctgagcaataatctggcaacaacaagcacaaaactctaatccaaaataaagtacaatctatcacactctccaaactatgttctcctaactaatactatcagggatcacaattagccagataattataatttcattatactarccttgtttctgcagattttagcttaaccgatacatcacatagctgattctgagtaacaagtgtatatagccgtgtcttacaatgtgtgatcatagtgaatgcaatctgtaatctttggggcaaatggtcacaggcgttgcattgcttactacatacctttaaaacaatctgaacttcgatgcaacattctgttgacaatagcaataaagaggacca

SEQ ID NO: 481976 - DNA, 371 bp, Homo sapiens
ctggtaatgaggcctgagcaataatctggcaacaacaagcacaaaactctaatccaaaataaagtacaatctatcacactctccaaactatgttctcctaactaatactatcagggatcacaattagccagataattataatttcattatactaaccttgtttctgcagattttagcttaaccgatacatcacatagctgattctgagtaacaagtgtatatagccgtgtcttacaatgtgtgatcayagtgaatgcaatctgtaatctttggggcaaatggtcacaggcgttgcattgcttactacatacctttaaaacaatctgaacttcgatgcaacattctgttgacaatagcaataaagaggacca

SEQ ID NO: 481977 - DNA, 593 bp, Homo sapiens
gtcatgcttctctctttcctgacagcttcctccagaaccagaggcaaagcaccttcagtgccctgtacaaaagcccaggtttgctgggctggggcactgcctcaacagagaggcccatcctccccaacctagtggcagaagtccagactacttccaccctaatctggcaatgggtgttcgccttgggggaaccaagacctctctgagaatcttctcaaatattttggaaaatgctcatgcatccattgytttacagacaaacttacagagctcagcggctgtgacagtccccctgggggccctgggctaatggcctctgatgaaatgcctctcccagtcacactgtccatttccttcctggacaccagctcctgtttttcatttctcgagtcccctctgtcctccaggaaggaagatgactgctctatggtacacctccacatacaggtgagcacactgatatccacagaggccatgcaacttgctcaggctcgcacagaagttactaggagagatgggatcgggatgtaggtccaggaggctgtggctctttctagaatttaatgcagccacacagtgctgtgtttgtggat

SEQ ID NO: 481978 - DNA, 593 bp, Homo sapiens
gtcatgcttctctctttcctgacagcttcctccagaaccagaggcaaagcaccttcagtgccctgtacaaaagcccaggtttgctgggctggggcactgcctcaacagagaggcccatcctccccaacctagtggcagaagtccagactacttccaccctaatctggcaatgggtgttcgccttgggggaaccaagacctctctgagaatcttctcaaatattttggaaaatgctcatgcatccattgttttacagacaaacttacagagctcagcggctgtgacagtccccctgggggccctgggctaatggcctctgatgaaatgcctctcccagtcacactgtccatttccttcctggacaccagctcctgtttttcatttctcgagtcccctctgtcctccaggaaggaagatgactgctctawggtacacctccacatacaggtgagcacactgatatccacagaggccatgcaacttgctcaggctcgcacagaagttactaggagagatgggatcgggatgtaggtccaggaggctgtggctctttctagaatttaatgcagccacacagtgctgtgtttgtggat

SEQ ID NO: 481979 - DNA, 593 bp, Homo sapiens
gtcatgcttctctctttcctgacagcttcctccagaaccagaggcaaagcaccttcagtgccctgtacaaaagcccaggtttgctgggctggggcactgcctcaacagagaggcccatcctccccaacctagtggcagaagtccagactacttccaccctaatctggcaatgggtgttcgccttgggggaaccaagacctctctgagaatcttctcaaatattttggaaaatgctcatgcatccattgttttacagacaaacttacagagctcagcggctgtgacagtccccctgggggccctgggctaatggcctctgatgaaatgcctctcccagtcacactgtccatttccttcctggacaccagctcctgtttttcatttctcgagtcccctctgtcctccaggaaggaagatgactgctctatggkacacctccacatacaggtgagcacactgatatccacagaggccatgcaacttgctcaggctcgcacagaagttactaggagagatgggatcgggatgtaggtccaggaggctgtggctctttctagaatttaatgcagccacacagtgctgtgtttgtggat

SEQ ID NO: 481980 - DNA, 596 bp, Homo sapiens
gtgtccctgttgtctgagtctgtgattctagctgtcagaagtgcaaatactgctttaaaagaaaggaaaactgggttttcacttctgctctgttgttaacctactgtgtgatgttgggtaaattccttcacctctctgggctaagattagccatcttttagaagtcacatygcacgcaacatgcaattaaaactgagttaatgtgaggccagggccatgaatgacccaggaagaaatcatgagaatctatgaagaacctttccccactttttcccactgtccttgccctgggattctagtcatgaggaagctgctggtccacccactgcatgtgcagtcctgctctgagctcctgcccttcctcccgcactaaaaaaatctctctgcttcgccagaattctctgaggccatctgtggctctgatccaccagtcaggtgagccgtgggaccagccctggggattctcagccttcagggatcctgggcctcatcacatgcagatgtagtcctgcctttccggggcaggtgtggctgcacactccagcgaaagtgaagctgcatctctctgcagccttacagcaaatgggtagccacca

SEQ ID NO: 481981 - DNA, 633 bp, Homo sapiens
caaagcatttgagcaggcatgacatctgccacctccaagggagagtgttgtgggctgaatgtgtttcccaaaatttatatgataaagccttaacctccagtacatcagaatgtgactgtattttgagatagggcaattamagaagtgacaaaattaaatggagaccattagagggtacccccacctaatctggttagtgtccttaggagaggaggaaatctggacacacaaagagacatcagggatgagcctggatagaggaaagactatgtgaggatagggagaaggtggccatcagcaagccaaggggaaagtcctcaggagggacaaccctgctgacaacttgattttgaactgctagcctccagaactgcgaagacaagaacaagaacttgcatgttccataactcctggaaggagttaagtaactccagttgttctttcaacccggaagtgaaagctaggtcacatcagttgcaaacaagtaacatgagaataaatgcttgttgtcagaaaccacacacacacacacagcaggatgtatgtgactattctttttggcagaatttaagtggggccaaattttacagatttgacattatggcacaggaacagtgattttgcagccctgtc

SEQ ID NO: 481982 - DNA, 488 bp, Homo sapiens
gcctattagctaatggaaaagaatgagggcatagccatgcaatggcttcctgcaaagaagaatttcataccactttcactcatgcaaggaaaagtagcttggccaaaatcaatttgatggccaaatgcaacatgaacaaggtagaaattggaggggatatataatattctcccaacgggatgcaacaaacatatagaacaataatatgatctaccacatgtactaaacagagacattcaaaatgtgtttcatttgaatttagaataattcaacagctattgcaatattgagatatgcraagtgcttattatcagagttttgagaggaattttattcaacttgatccgcatatttattcaccaattattgactgctgctataggcgagaatctatatatttcctctttactcttaaatctatacttctctatataaaaaatgaaaaaccctatttggaagggggaactaatgggactgaggcaaaggtt

SEQ ID NO: 481983 - DNA, 571 bp, Homo sapiens
ttcattttaatataatttagttggctctcgtctcatcccactgactccacgatgactacccaaaaggaatctctaccaattctccccttctcaggcttagaaagagttccaggttgacatgcttggaatgccaggcaaatgataaatcataactgggtttataagaaaatttcaactgacttcagcaaagcagccaactaaggagtaataaagagggccaaaaagcttgttcataggcctttttagaattgtttcttctatcttgaaatctgctattttgggtcttaggatcaggtgaacatagaggawgctatgcctttcctggaggcttttctacctggttgagagcagatgttaaataaagtctccagtattccatttttctattaaatcaccagaaacctgagtgttatagatgtaaatcattgtgcaatagcatctgtctgcaaagtgattcacttatcttctgccaacactggctctctagggttcagcttgaacaaggcaggagtcccagaccccagaccactgccagatgctccatgtgtgcttctccagagcaatatgagat

SEQ ID NO: 481984 - DNA, 644 bp, Homo sapiens
ctgccactgactaaataggagctatttgtcttgtggaatatgcacaccattcctcatcctcatccttctttcctcatagtcggtagccaatgacagacagattaaaatggctgttccctttgtatcaaggaacaaatctccagtgtarttggcactctagagctcccagtgtaatcaagataaggttaaacttacatttttgcttatcttcttcccctaatctattatgtttcctccagttgccttcttctgaagacatcttcagtcactagcacttgaatcccatctcagatttttattctagaatataaaaattcatatctctgattcaagggggtggaataaatcttacatttttaaatgtctacaatatcctacttggtactaggaatagtgttattattctcattttataccaaaaaaaaatcagaatcaaaatctcacactatgtacactgactcatttgagtgataagaaaaacttcaaaacactaaatttgcaaaattcaattatatgaaatgtatcactaaatcttactgtattatgatattaaattcactcagaaaagcaaaccaggtgccaataaacagtgttgtagtttagaggttaacaggcaaattgtggagtcagactacagagctttc

SEQ ID NO: 481985 - DNA, 625 bp, Homo sapiens
acttttaaactccttctaaatgcattctttggtgacyttacttctatcacaatacgtattagcctaccttctccaaactttctcatcatgtatcaatctttagacacaaacatgaatgcagacttgatctttgaccaatgaggaagacccaattggaactaatcaataatgtgaaaaagtctgaaaaagagcctgtaacattaaatttcaaaataacgaaagagctgagagagcatagtgtgaaggagctcttaatgttaagcaagcacacttcaaagttaaaagaaataacagtaatacacatgcctttgattatataactctttttatcttacagaggccttggtattaactcattttatcctggcaagtttgttatgagatattttaatctctcttttaaaatcaaggaagggaaatgagaaagcttaagtgactgtcttggattgcaagatttgtaaatgatggagcaagacctctaacctaggtcatctgataagtccaggaccatttccacctctctagtgttccacagccaataccagcaaaattaaatgtctcagattgatgggagttcttggagcagtctcaacgagaggttgaaggcaagtttatcaagattact

SEQ ID NO: 481986 - DNA, 625 bp, Homo sapiens
acttttaaactccttctaaatgcattctttggtgaccttacttctatcacaatacgtattagcctaccttctccaaactttctcatcatgtatcaatctttagacacaaacatgaatgcagacttgatctttgaccaatgaggaagacccaattggaactaatcaataatgtgaaaaagtctgaaaaagagcctgtaacattaaatttcaaaataacgaaagagctgagagagcatagtgtgaaggagctcttaatgttaagcaagcacacttcaaagttaaaagaaataacagtaatacacatgcctttgattatataactctttttatcttacagaggccttggtattaactcattttatcctggcaagtttgttatgagatattttaatctctcttttaaaatcaaggaagggaaatgagaaagcytaagtgactgtcttggattgcaagatttgtaaatgatggagcaagacctctaacctaggtcatctgataagtccaggaccatttccacctctctagtgttccacagccaataccagcaaaattaaatgtctcagattgatgggagttcttggagcagtctcaacgagaggttgaaggcaagtttatcaagattact

SEQ ID NO: 481987 - DNA, 625 bp, Homo sapiens
acttttaaactccttctaaatgcattctttggtgaccttacttctatcacaatacgtattagcctaccttctccaaactttctcatcatgtatcaatctttagacacaaacatgaatgcagacttgatctttgaccaatgaggaagacccaattggaactaatcaataatgtgaaaaagtctgaaaaagagcctgtaacattaaatttcaaaataacgaaagagctgagagagcatagtgtgaaggagctcttaatgttaagcaagcacacttcaaagttaaaagaaataacagtaatacacatgcctttgattatataactctttttatcttacagaggccttggtattaactcattttatcctggcaagtttgttatgagatattttaatctctcttttaaaatcaaggaagggaaatgagaaagcttaagtgactgtcttggattgcaagatttgtaaatgatggagcaagacctctaacctaggtcatctgataagtccaggaccatttccacctctctagtgttccacagccaatacmagcaaaattaaatgtctcagattgatgggagttcttggagcagtctcaacgagaggttgaaggcaagtttatcaagattact

SEQ ID NO: 481988 - DNA, 454 bp, Homo sapiens
ttgtagtggtctccacactggggaccaaaatcacaattctgtctactcatatttaccctctcattcattgtctcccagcatctccaaagttggctatatcttgaaaggatatttggtttcagcaacagattatgccaaaagcaaacatcttacacaacatcttagtcctttttgtgagtctagatttctagtcctcaaggtcatttaactwccaggactaattactccctctactactggccataatctaaaccgctttgttttacacctaactaattctctaacttatatgcctggagtactgaagttgagatattgcttcctacccccactccagaatgccctgagatccttatgaaaattgagttgctctccatctagttgctaagtcaatatctcaactaagaaattttagctaacccattccatttttaggcaagctctagctcaaagg

SEQ ID NO: 481989 - DNA, 553 bp, Homo sapiens
cagttgcacaaaaactagaattctaaatgcacaggttctttccaaagacaataggaaatagagaatttgaggaattatacaatgaattcatcacccagtggagataagttttattgcccatacctccaaacaccctgaaacatgaatttgtcttgaactccctacttatcttccaagtgccttacacttgaaaccacttacaaggaggaaaggacacagaactaaactgagatagataaaaattataaaatttaggtacataaaccctttgggggtaaactgagtttaaatatgtacatcttcagaattgctgaaacgtatgctttaaaactaaatgacattaatctgtgccacgtgtctattgtatgctaggtactgagcagctctattatttcctcattttgtagaaaaaggactaaacatytaaaatattgaataacttgtccaagatggtaaagaaaagaataaatgaaaagacaaaatacaaaaataagttagacttttttctaacctatttttatagaaatcgacctattaaactgtcctacctttg

SEQ ID NO: 481990 - DNA, 291 bp, Homo sapiens
gtcctgggaatatacaaggacttatrgaaagtttttcagaaagttgaacccataactgctactttgccagtaacagtgaaaactgtctccctatcaagagctgaatagaagggaattttcaggcatgcctcagctattgcccaagactccactttacaaaagtggcaagcaaacctgcaataacacagtaccctctccacaagtgccttgggggatgaactgcaatagaaaaggagaccagtgctgcccctgttgtggagcccccacaggagaagcctccaatgctacaca

SEQ ID NO: 481991 - DNA, 250 bp, Homo sapiens
ttctgcattttactcatgttcaaatatttttatatatttttcatatagtgtttagagtataaaattaagtgaaaaatgatgacttgaatccaaatttttttaaaaagctcattgtatgctttcataacatatattgtttaggacgtaatacttattgaacratcgtaaaacgtagcctttaaatattgtctccttcaaatttatttatcacgcttgcatacaaaacaacccacttaactgtttatttgcc

SEQ ID NO: 481992 - DNA, 600 bp, Homo sapiens
aatatgccatttctacttggcgacatattgaacacttttaatgtaacatggctaaaacatcaccttgtatttttccttccaaattcattgtccaaagacttccctaggaaatggtaccactatctctgcaattatacagaacaaaagcccgcagctttcttgattcttccctttttttcacatccctaaccttcccacatggaaggtctgtcgctcttcttctgtaatgtaacccaaatttcactcctagaatcccaaccatctttcctttctcctgatataaaacaatcgacttgtaactgctctaacagccctcataaccatcagcctccacatcccaaactttattcttcatacagaagtcagagtgaatcaaatcacatcacacccaaattttattttaaaagttttaagtaaataacttacttattatgtaagttacaattgtgttacttacttatatgtaagyaacaaactgagtttcataagtgataagtaaaaatactacaaataatagtaaagaaaaacactattcttttatttatttgatttttaattgaaaaataataattttttatacttatagggtacaatgtgtca

SEQ ID NO: 481993 - DNA, 633 bp, Homo sapiens
ctgagctcagtcagacatgcaaggttgaatgtgcctgccagacaggcttaactatttcctatgcatcttagtagatactaaaaagctactatattaaaattgttgatgaacaggaattaaaagcatccttcctcaggtgtaagccagcatgtgatatttctgaagatgagacgatctggcaataatcataaatactgaagctattgctcatataagttagtgtacattgccagaatgaattatttagtgaattttactgatggataccttaaatagcattcagtttagacagtgatgtgctttctagttaaggaaagcatctaaaacacaaacatactcatgttttaactactaaaatccaatatactactttgcattaacaatcatgtatctcaaccttaaaattcaccttctctgactacttgttaaaatctaatcctgcaccacttttctcatgactctttctaagaggccatgattgtgtttattaaatagtggtagccttactcacaagagtagcagtgctgtgstgtgtcaagagactgtcaaaacatttggagaaatacattatttctctggatttacaaaggaaaaacaaaacaaaatttttagaagataaaatcaatacattaa

SEQ ID NO: 481994 - DNA, 633 bp, Homo sapiens
gcttatgtgtatcacctaggacacagtaaacttcccacgctctactctgcagttggcaaatttaacatcattctaaggtagtataccttaaaggcattagatgacctctttagcccatgagggcatttttcccataagtgtctaaaaattactcctaatgttttagttttcaagttagcttagacttaaagctctatccctgaattcatcaatagcaggggtgtggggtgggggaatgaaggatgaaattactataattggctaagaataatcaactatgggaaataagccataaaatgctttaggagataaatagatttatttatgcacatctgtttccctccactaaaccattttcaactgaagtcaagaatcatgttgtatatataactcctagcacagaaggcactcagtgtttactgaatgaatgttgcaatgaatcacatagcttggaagggtgaactggtttgacttccatatcattgcccttacctatacacatagtatattcggtcagggttttccagagaaggagccaataggacagatagaaaaataggtagatagatagacagactagatagatagatagatagacagacagacagrcagaaagataagggatttattagg

SEQ ID NO: 481995 - DNA, 351 bp, Homo sapiens
attcagacctcaggactggcccaacttaactcaaaaaacagacacgttttccttccaacttgagttgttgcaagatactacctgctctcctttagaaactagtaatcacgggatacaagaaaacgaagcacaggaagtggaacaccttaagtctctgccatgtcccagaccagagtcagtgaggatacatgcatatgtatgtgaatattcacctttatgtatgcacatacgcataggcaagtgtattcatcagtctgcatgtgggtgtttctgcacaagcatatgcatktgtgtgactatttgcgtgggaatgtgtatgtgggcatatgtgcattttagtttgtgtattca

SEQ ID NO: 481996 - DNA, 592 bp, Homo sapiens
ttcaaaccaaattagaagatcaagtacccaagatgagcatggctcactttacctattagctcttcctgtttgcatgaactgggaaaactgtactgtcatacttggatgtagatgaaacctagaaatgctaggaatcttcaaacctgagagaagtatatttcttatgcccttttttgagtatgtttctattaagagctgtattttgtgacatgtggtgagacattaattgccatctactacgtgtttccttagcaccctgctctaaacagcattctacagtaagggatggcttgttaataaaggttaccagttgatattaatgctaaatattgcctcatttatactattcctactaacccaagtatgtggatatggggagaggggatgtgctttttaattaaatagtcaagaacagaaaacactgagctctatgagaaaggtaaaagaaaaaataggaatagctgctattctagcatctaatatgttactaagtcagtaaaatacatgatttctcctcttatttgcrtaacttaaataactgaggtaatttggtatctggaaacattgcagctccctctcttttcattctttg

SEQ ID NO: 481997 - DNA, 521 bp, Homo sapiens
aattaactaattgatatggttaggctttgtgtccccaccaaaatctcatcttgaattgtaatccccataatccccataatccccctgtgtcaagggagagaccaagtggaggtaattgaatcatggaggcagtttcgcctatgatgttctcatgatagtgagttctcaggagatctaatggttttataaggggctcttcccactttgcttggcacttccccttcctgctgccttgtgaagaaggggcctgcttccccttcaccttctgccatgattctaagttccctgaggcttccctagtcatgctgaactgtragtcaattaaacctctttcctttataaattatcctctcaggcagttctttgtagcaatacaaaaacgaactaatacactgatgaatatagttttccatttaccctggataagacctcagaatccatcttaacacagcatgtcagaaagccatgccaaatagatgattaccactctgtgagccctagttgccaactctgtcatagat

SEQ ID NO: 481998 - DNA, 642 bp, Homo sapiens
gtgggctctttatgtttccataaactctcttatcacagagccaccagtagagcatgggaaactgaaaaataagttccaattagagactgtgttggtccactcagggtgatayggctcccagtgtttttagagagggaaagagcataaaagaagaaggctgtgtgccccagcttgcccctgaaggagctgtgaccactatggtggcatggggaaatgtcactcattagctggcttgcctcctagcctagaatttgttcttaccttctctgtcttctcctaagccatccctttctctgagcaaatccaatgccttagagcaccaccaatgtattcacgtgtacaattaattttaatgtcacatgtataaccataactccgtgtggtgactcacagtgcccgcattatcctctttgccaagtaaatggtaaaacactgaacgaccctctaattgatctctggggtcacaacaagacctgacaacgggactcaccaggcacaagaacatgatggagaagtctgaaaacagaaaatggagaggaatcggggagaaaatccgctgagttcattttcactcccataatgaaaagaaatctggttcagcctggaggattacaaaataggacaagaccaaggtgaccccag

SEQ ID NO: 481999 - DNA, 421 bp, Homo sapiens
ctgggatgtgtcagaagatatccagtttcctttgaaactggacattctgaagagaagctgctgttgtttttgatrttaaaagcacaaatgcaaaaatggtccaaatttcttaaggtcttactagtgtggtaggatatatctgtgagatgagtctcaaaacatgcatggctttggccatacagcatgattttagccttcatcagattaatatgtgaaaagccaggccctcagttattttctctggattgccaaaaatcctatattatcttatatttgtttccaagtagtcacaactgacctttcttctcacattttagcatccagtttccactctatttcccatcactatacttgtatttgtatttatatttagacacttggtccatatgtgaacattccttttattatttatgaatgcatc

SEQ ID NO: 482000 - DNA, 609 bp, Homo sapiens
tggccactgtctttatagccgggaccacacggaaatgtggtggttaggttctaggagttgataacgtctgcagagctgagcaccgtatacaacaaagagtagaccctcaatcaatgttagccctttattcccagtacactgtcaatacctactatgtactaagtacctactacaggttaggtagtggtgatactaaagagggccttataaactagggtttggagtcaggcagttttgagtttgaatcccacttctgtcacttaatgttcattggasctttggcaaatgttcttagttgcatttctcttttctctgaattgtgcgtaatagtaattagcacagtactcatggcattgtgatggctcagaagtggttaggtgttgaagatattttgacattattaccaaagtcttactgtgcatcccttgcagatgatggagctcacagtttaacaggaatgagaaacacataaacaatggatgctctggtgaacacaggcatgatcttgagaaaagaatgcactcctcccccccatagatctagagactgcctcttcattttcaggaaactgcccttgtgggtatcaagaaggtcaaggtgacaattcag

SEQ ID NO: 482001 - DNA, 609 bp, Homo sapiens
tggccactgtctttatagccgggaccacacggaaatgtggtggttaggttctaggagttgataacgtctgcagagctgagcaccgtatacaacaaagagtagaccctcaatcaatgttagccctttattcccagtacactgtcaatacctactatgtactaagtacctactacaggttaggtagtggtgatactaaagagggccttataaactagggtttggagtcaggcagttttgagtttgaatcccacttctgtcacttaatgttcattggagctttggcaaatgttcttagttgcatttctcttttctctgaattgtgcstaatagtaattagcacagtactcatggcattgtgatggctcagaagtggttaggtgttgaagatattttgacattattaccaaagtcttactgtgcatcccttgcagatgatggagctcacagtttaacaggaatgagaaacacataaacaatggatgctctggtgaacacaggcatgatcttgagaaaagaatgcactcctcccccccatagatctagagactgcctcttcattttcaggaaactgcccttgtgggtatcaagaaggtcaaggtgacaattcag

SEQ ID NO: 482002 - DNA, 591 bp, Homo sapiens
gtaatgagaaaggacacacataatccctgtatttaatgaactcakaatatgttgcataagaaaaaaaaagctagagagcagcgtgatgcgttgacatggcaactgtatcaaaccccccctgtttaggacatggatgaagtaagggatcaggagagcatggcctgaggattgacaaccacaaagacagaaacaaacagctaatctgggtagctcttttagacagaggacaaacaacacagaaaaaacataattttaaaattatgggtatttggcaggcttggagtatagggttcatatgagtaagttgcagatgaaatcaacctactactttgtactcaaaatttggtccatgaacctgcaccatcaatagcccctgggatttctttgggaatgcatagtctcaggcttccctgcagacctgctgaatctgaatcgcattttgaccatatcctaggtgatttgcatgtatgttagagtttgagaagcactggactagggcacccaaaatctgacatattagttggaaaatgatgaaaaaattttaaaaagcttccagtccctggcacacaaaaacctgccaggaggcaactg

SEQ ID NO: 482003 - DNA, 625 bp, Homo sapiens
aaaacccgatttcctcattgctatatataccattaatttggagcaaagcagaatcacttaaaaatccttttaagtgatgattaaataaatcatcaattgttaaacaatgattagattcctaattattttcagtcatttgtttaccactaaatataacaatagtagtaataataataatgataacccatctgcctgtgttcttaagtgtcttatatattagttgtggaaataagacatatatgatgaactgttaaaaactatagaagagaatttatacctaaatatgttcatgtattaagtagtacaagaaagtcatctggaaattttaaaatgaaaggaaatctgcaaatattaagtcaactgggcatttcttttcaggaaatgaaaattaagctgaatctgaagggtgctaagaacaaaattgatggaggtgaagacagagacttctacataaaggaaatagttagaaattaagcacagagacaaaaataaaagacagtgttttgtaggggcagagtgattgggcatagccaagaaacaggatatattaagtagattgataataaggtttaaatgcttcaaaagttctaagcttagaygcttggaaacaaaatttgaccaagaa

SEQ ID NO: 482004 - DNA, 590 bp, Homo sapiens
acaggtaccttttatgtgtgcccctttaacatctcaagtcaaattgtccttcacaaaccacaatgtgcaatatctatctctgattaacagtaactaaagcaaagagtacaatttcccaacattgtggtggaaaaatcatcccatattacccacttttcttgtaattttcagtcatttattaaacagagggttttttaagtgtacatactcccactacaatgtaacgtcagcagtgtaatcccttaactcccccatatttgtatacttggccaaagaccacatcctcaagccaacttttcaaggatctgaagagtaacaagtggtacccaaaagctgaaaaaacctataacatagaaaaatatatttttcttttccaggagatggtggcaattaagccataagaattctttcttctgttttactagctctaggatatctccagcttattcaagtgtcagcctcacatttaccacaatsttttcctatattaggggagggaagtgaaaggcagcctagcagggcagttgagagcacatcctctggaaacacacagccacctccagcatatgtccagccccactgtttcccag

SEQ ID NO: 482005 - DNA, 537 bp, Homo sapiens
caagttcggggcaaagtgttcccaccggcagcaaatatggaatatatggtaagaagaattcttttttttttttttaagttctgagtgagaaagctttatattgtacatytgcagaatctcaaacgaccacgagtgtttatatgtccgggtatatggactttttacatattttaacctaaggttcttatgtgcctaataatgttgagtactgttgcatcacagaatcagagagacagagaggtccagagagacagagacagacagatagagagaatctatgtagactttcttctgtgagttccatagctactggtgaattgtatcttatgtaagaatcatagataaaaagtggggtatgttgactgatcacatttggaaggtccactttaaaaaaagtcacatgaactttttctgtgctttatctcacagtcatatttatcagctatatcatttcttgaaaatacttcttaaaattataggtttcatatgcatgatttattctctgggtaggtgtcttttcccttttttggacaaagt

SEQ ID NO: 482006 - DNA, 547 bp, Homo sapiens
gggaggctcctacagaatttacagatgtaaagcatggagtgaaagargacagcccaggctctccataggaaggctgtttctagacagaagagtcactctccccagtttgaacaaccaaataaataattcgcctccccaggggcagagtgagtacagggacaagagaagaaactagaagtaccacactagcagaattttctcttcctggcagaacatataagtagtagggaagaagcagttccctcttaaaacatctcaagttcgtcttgatttaatgtaaactcatcattttctcctcaaattagttaactccaaattttcttgtattgttcttctcaatgggtatgctatggggtgaattgtcgtgcttcccaaaatttatatgttaagttcctaatctccaaagtatatttggaggtgggcctttgggagatagttagatcatgagggtagagtcctcatgaatggaattagtgctcttataagaagaggcacaagagagatgatctctctctctctctgagaatatgaggatataagaaggcag

SEQ ID NO: 482007 - DNA, 486 bp, Homo sapiens
tttcagttgttgcattttccgcttaaaatttaaattttcttattttaaaatagtttttagctctctggtgaaagtctatttycatctaattttggacacaatactcacataagtctattttcatctaattttggacacaatactcacattttggaagtgcatgtttgtgagctttaatacttgtcttttgtgggtatttttttagtctatttttctcttgcttttttttttggttatttttcttgtcttgtctccaggaatattaaggattaaaaaaattgaaaccagacattataaatggaaaattgtagaaataaatttgagtctcctgatagtgctatattcctctagataatgttattttcctgcttgtggcagagagctagggcagggccacgttttcctaatccatttggggatggagtggattgatggaggtagacttcagccttagtagggaaatttccagtttcctgtactcctgga

SEQ ID NO: 482008 - DNA, 578 bp, Homo sapiens
taagtagagtagaaaattttggagtccaacacaaaatgaaaaaaaawtcaatgtctgattttggtcagctcattacctttttggtctcttggtctctcagtttgcttattcgtacaaggggaagattaaaagacataagttataaaaagtcaattctagttcacactcaggctctgtgacatcctataacaccttgttataaacagaatgcaaagaatgggtcacagcactccagtcaaagggctgatagcacagtcagtgttaacaagacagcaggctgtctgcataaatgcttagaccatgagactgttctaagttaagaagaccttagcccccaaatgaagaatcctcaaaatactgaatgtattgttctttaggaaaaaagaaaaaaaagaaaaaaacaacaacaaacaggatgtcacatgaaagaaaaagggaacagggtctctcaaaaaagtacctgcttccttctcttccttcctccctctttcttccttctttccttttttcttttttttttttttttttttttttttttgaaagaaagacaccagattagggtttggggccaacaaaaa

SEQ ID NO: 482009 - DNA, 507 bp, Homo sapiens
ctggaagagccctttcaagcaggccttgtctgtgtcctttggaatggtgtaggtcagctcacttccactgctgtctttgagaaatgcttgtggaatatagatctttatcagggatgtaacacaagccatgtctttcagatcatgggcctccagaacagaaggctatccataaraaaaaggaaaaaagaagccagtaaggaatgttaatccatatatacatcaattgatttcatgtatatccataagcaaattatttcaaaactccatttcaaagcttaaatgaaatatcacacttaagcaataggcatctcaatgacatctcgtatttttttctttctttttaaaaaatataaatctgcagtgataaaccttgtgaggccacacccacatgccccccaacatgcccgtcttagctactgggcctgccatggccagcctccagaggtttgtattcatgaagtgccccccgtccactgggagagtcacagagagatcctgggcctagca

SEQ ID NO: 482010 - DNA, 507 bp, Homo sapiens
ctggaagagccctttcaagcaggccttgtctgtgtcctttggaatggtgtaggtcagctcacttccactgctgtctttgagaaatgcttgtggaatatagatctttatcagggatgtaacacaagccatgtctttcagatcatgggcctccagaacagaaggctatccataaaaaaaaggaaaaaagaagccagtaaggaatgttaatccatatatacatcaattgatttcatgtatatccataagcaaattatttcaaaactccatttcaaagcttaaatgaaatatcacacttaagcaataggcatctcaatgacatctygtatttttttctttctttttaaaaaatataaatctgcagtgataaaccttgtgaggccacacccacatgccccccaacatgcccgtcttagctactgggcctgccatggccagcctccagaggtttgtattcatgaagtgccccccgtccactgggagagtcacagagagatcctgggcctagca

SEQ ID NO: 482011 - DNA, 580 bp, Homo sapiens
ctgctggaggagggtcatttggtccttcaggtttggacacactgggtgaaatagttctctctactacagggctgcctggagttttcaatcacctaaggtgcattttttttttttttgagatggagtctcaccctgttgcccaggctggaatgcaatggcacaatctcggctcactacaacctccgcctcctgggctcaagtgattctcctgcctcagcctcccgagtagctgggattatgggtgcgcaccaccttacccagctaattttttgtatctttagtagagacggggtttcaccatgttggccaggctggtctcaaactcctgacctcgtgatccgcccacctcggcctccccaaagtgctaaggtgcattttaaatctcgaagacagaggcagaagctctaaggacctcctgtcttgagagttgctttctgaggcaggaacttgccttaagagaacaaaagctctctacaagaactaccctgccattgaggtgactgttctttctayagaactgagagcacactgatgcaaatgaagaaaagcagagagaggttcagcaagttgcgtgggtcac

SEQ ID NO: 482012 - DNA, 598 bp, Homo sapiens
tgcgtcccatcgggacttacgcctctcaatgttgaccttggtcacctggctgaagtgctctgaggcttctcctcctttgcacactgtacttttttgagggaagttgccattggcagcccaaggagtrgggagttatgcagtggagaaagagacataaggatggaacagggaggtttgcagattctgggcttgaagactaaagggaagtggccacaagccaaggaatgcagcagccatgggttgccggaagaggacctgccaccacctgcatttcagcccagcgatactgaatctgggccccagacctgtgagataagaatgtttttccctaaaacaccaagtttgtggtaatttgttacaacagccacaagaaaccagtcatccttgagtacattagcatcaactcatgagtattgattttagactatgggttataatccaatactcctttactcttttgttgctgaaatggcttgagctttggccattgggtgctccttcagttcactcatgtgcccccatgacacacccctatcattgtgggggtttgtggtgctagtgatggtggcggttgctgtgccttcttactctccggcac

SEQ ID NO: 482013 - DNA, 629 bp, Homo sapiens
actggagtgggtgagccctgtttgcacctttttttttttttttttgagatggagtctcaccctgttgctcaggctggagtgcagtgatgcaatctcagctcactgcaaactctgcctcctagggtcaagatattctcctgccccagcctcccaaatagctggaattataggtgctcgtcatgacacccggctaatttttgtatttttattagaggtggggtttcaccatgttggctggcattgaactcctgacctcaagtcatctgcctgccttggcctcccaaagtgctgagattacaggtgtgagccacctcactggccttcctccacttttaaagtatattccagctttgtgtttttaccactaccactcagggccaggcccacttcctctctttcctggactagccccaagagccttttgaccctctgcttctctttgtcctactactacaatgcattcttctcagggcagcaacagctcttctcacaggtgatgtccctgaactgggtactcagatggtcctgggataaaccctgtggaaaggcatggagtcgggggagaaggtgagmtgtgcagacgtctcaaggaagggctcagctaagctcaccgggagctctgagcagga

SEQ ID NO: 482014 - DNA, 546 bp, Homo sapiens
gcccaggaggcagcaggttccaggggccgggagacagaactggctccgatctcccctgccacacatgtgttgggaatccctgaaggcttcctatccaggtccacccctcctgaaaaatactgcatgagctttyttatatgtgaaatctgtaaaagtccaaatcattgaaaccgagtacagtggtagttaccaagaatggggaagggaagaaatgggtcagggtatgatcttgcggtaatgtggctgaatccatctggagggctaatgtacagatgaggactgtggtggataacattgtattctatcctggaaatttgctaagagggtggatttcaggtgctcttacccacccctaccacccccacacacaagtaactatggaagataatggatatgttaatttggcttactgtagtaatcatttcactatgtacatgtctatcaaaacaccatgttgtacaccttcaatacatgcaataggaattaaatacatgctttagagaaagagctaagagtcaagtcccctatgtccaggccacctatcag

SEQ ID NO: 482015 - DNA, 546 bp, Homo sapiens
gcccaggaggcagcaggttccaggggccgggagacagaactggctccgatctcccctgccacacatgtgttgggaatccctgaaggcttcctatccaggtccacccctcctgaaaaatactgcatgagctttcttatatgtgaaatctgtaaaagtccaaatcattgaaaccgagtacagtggtagttaccaagaatggggaagggaagaaatgggtcagggtatgatcttgcggtaatgtggctgaatccatctggagggctaatgtacagatgaggactgtggtggataacattgtattctatcctggaaatttgctaagagggtggatttcaggtgctcttacccacccctaccacccccacacacaagtaactatggaagataatggatatgttaatttggcttactgtagtaatcatttcactatgtayatgtctatcaaaacaccatgttgtacaccttcaatacatgcaataggaattaaatacatgctttagagaaagagctaagagtcaagtcccctatgtccaggccacctatcag

SEQ ID NO: 482016 - DNA, 565 bp, Homo sapiens
gagtcaaataattgtggacataaaagacacatccttagcctcgttgtgcattttcattcgctttggagcatattgatgatcatgggacccttgggagccacagcacccaggcctcaggtttgagggtcaaggcagactccccctgaccccctatctcttagaggtctaggaacaaggcagaactttattagcaggtggcaaatccagcaagtgagggtttcaggagggggacagcaggacccacagtccctaaatgacccccttcccagaggactgctcaactttgggtttctgtcatcccagataaagcagtcaatattttatctgacaagcacaacccaaccagatgaaccacgaaaccagctctgcccctttactctctgggaccscaccctccatttggatttcttctataattttaaatataccgatcttaaataaatcacgtcttgtttccttgctgtacacagaaagtcctgttacctgtgcgtatagcacagcacctagaacgggtgatctggacatagaagttgcttagtagctgtttgtgaaatgaatcaaacag

SEQ ID NO: 482017 - DNA, 544 bp, Homo sapiens
ctggggttgcaatcatgattttccccacaatccctcctgcacctggtgacgcactgtcatgcacgtcacgctggtctgggtttgccctagatttcccaggcactcccgcctagcacaggtgagcagagggtgctggaaacctcccaactccgataacccggggaagggctggggactgcaggcttaacgaatacccagcattttcaaatgcccagcatggtttgggaagcagcaggctgaactgtttgagagcctgcgtgatcgttcttatcagacgtcctgtggaaatgcctgccactgtcacgagcacacaggctcaactcatacaacaccagctggcctgaaaagtcatggccacaagaagcagaggccgcagaccagactccagcacaaaggtgcgggctccttggctttgactcactggcatctcttccgtcctttsacttctgcttctccttagtaacacgactcttcctatgttttacaataatctaataagcgccagtagcggtcagtgtgcagtcaacagacagaactgtggctg

SEQ ID NO: 482018 - DNA, 531 bp, Homo sapiens
ctgcacacaggtgcactccctagcacagacgggaggcagggtctcacctgtgggccctgaaacagggcccattccgactccggaagtcaggcgggtgctctcctaccaagctcccaagaggagctaagggggccagggcggaaacggggagctctgtctggccctgggaggtgagctggctgcgtcaggagtctgggcgtcaggaaggtacctggaggtgatttctgtgaggaacgtcgacacgggcatttggggccacagtgctcagacagcaacctctggttcttaccaatcctccataacaatttcaagaactgttttttggaagaaagcttagtttaccatgttcatttaatagtcaaagtccccggctgggcaaggtggctcatgcccgtaatcccagcactttgggaggcccacrtgggcagatcactgaggtcaggagttcaagagcagcctggtcaacatggtgaaaccccgtctctaacaaaaatataaaaattagctggacgtggtggtgcatgcctgtag

SEQ ID NO: 482019 - DNA, 669 bp, Homo sapiens
cagcatagaattgagtcttgctttctgacacaaactgaaaataattttcttttaataggtcagttaaacttattcatatttattcatggagctgtatgttggggcttactgcagttatattatttcttgttatggttgcaatagttattcttgcatatttgctcttttctttccttttgtgatgtgttttctccagttctctcttttttctttctttctctctctctccctatcacccccattggcatttacattggtttgtgttttgttctagtggtaccttcgctcttacacctttttctatcacattagtcttctgtgaccttatctggtaatttgctgatcttttaaaaaattcgttttagtggtattcctgacagtcacttgtgctatatttcaatcaatagcttatatcacaatcaataagcttacttttcttttcccttttctcttttaatttatctccctttttagttttawtatttccatattgtcaaaatatataatacatattattctcagactctcatcaccacctatctttcagtcttaatattcaactaaatatattaaatagtaatcagtcatcttgcctatgatttttcagtcatctcttggttggatgaatgtcatcttttagtagatgcctcaaagactcatgagaacagc

SEQ ID NO: 482020 - DNA, 496 bp, Homo sapiens
tgccctgcagacatacttctgccggatccggcaatgcgcagagggtctggactgaacaggggtgccatgtagaggccctgcacctcccaggmagtggttctcttggcatgcatcgacaatacctgtgggctattagaacagattgccaggccccatccccagagtttctgactcaatgggtctggagtggggttcaagtatttgcatttctaaaagttcttaggtgagcctgttgcttccggttcagagcccacatgctgggcaccactgctttagtgttttagagtaaatatgttctctcttttgaagataactatttcctttgcataaatgctcttaatcttctagggcttccttagcaaggtaccacaaactgggtggtttagaaccacagatatttatcatctcatagttcttgaggctagaggtctgaatcaaggtgttggcagttgtgctctggtggttgctggcaaagttttgtgttccttgtcttgaa

SEQ ID NO: 482021 - DNA, 496 bp, Homo sapiens
tgccctgcagacatacttctgccggatccggcaatgcgcagagggtctggactgaacaggggtgccatgtagaggccctgcacctcccaggaagtggttctcttggcatgcrtcgacaatacctgtgggctattagaacagattgccaggccccatccccagagtttctgactcaatgggtctggagtggggttcaagtatttgcatttctaaaagttcttaggtgagcctgttgcttccggttcagagcccacatgctgggcaccactgctttagtgttttagagtaaatatgttctctcttttgaagataactatttcctttgcataaatgctcttaatcttctagggcttccttagcaaggtaccacaaactgggtggtttagaaccacagatatttatcatctcatagttcttgaggctagaggtctgaatcaaggtgttggcagttgtgctctggtggttgctggcaaagttttgtgttccttgtcttgaa

SEQ ID NO: 482022 - DNA, 496 bp, Homo sapiens
tgccctgcagacatacttctgccggatccggcaatgcgcagagggtctggactgaacaggggtgccatgtagaggccctgcacctcccaggaagtggttctcttggcatgcatcgacaayacctgtgggctattagaacagattgccaggccccatccccagagtttctgactcaatgggtctggagtggggttcaagtatttgcatttctaaaagttcttaggtgagcctgttgcttccggttcagagcccacatgctgggcaccactgctttagtgttttagagtaaatatgttctctcttttgaagataactatttcctttgcataaatgctcttaatcttctagggcttccttagcaaggtaccacaaactgggtggtttagaaccacagatatttatcatctcatagttcttgaggctagaggtctgaatcaaggtgttggcagttgtgctctggtggttgctggcaaagttttgtgttccttgtcttgaa

SEQ ID NO: 482023 - DNA, 496 bp, Homo sapiens
tgccctgcagacatacttctgccggatccggcaatgcgcagagggtctggactgaacaggggtgccatgtagaggccctgcacctcccaggaagtggttctcttggcatgcatcgacaatacctgtgggctattagaacagattgccaggccccatccccagagtttctgactcaatrggtctggagtggggttcaagtatttgcatttctaaaagttcttaggtgagcctgttgcttccggttcagagcccacatgctgggcaccactgctttagtgttttagagtaaatatgttctctcttttgaagataactatttcctttgcataaatgctcttaatcttctagggcttccttagcaaggtaccacaaactgggtggtttagaaccacagatatttatcatctcatagttcttgaggctagaggtctgaatcaaggtgttggcagttgtgctctggtggttgctggcaaagttttgtgttccttgtcttgaa

SEQ ID NO: 482024 - DNA, 571 bp, Homo sapiens
gttacggaagccacaagaagcaattacagatggagagtgtgaatgtctcccaggtgactgctgggacttttgttcctcattttgggaccaggataagagctggtgcctcctgttttatgactggactctgacttctatcttctgctttctgcagagtcctcrtaatagctctctggacactggcacagaggccatgggatgctgagttgagacccaatttctgggtagcacgtcccatgacagtggatggcagttgacaggtggcattcatagagcctgacttgataccagtttttcacagcaacatgaaccatccatcatcattgatgccaaaggtggggtctacccttccctgggcactgctgcaggataccaagcccactgcccacacaaggaatcctggtcaccaccagggtcccccaggggactcggacaagtggctgacgatggtgtcaccagcatcaggacgcatatggttgtgtcaagagaagaaatgagaattgttttatgttcagtcaggatgacagagaagacttaaaatgggatagctacctggattttgtttctgagc

SEQ ID NO: 482025 - DNA, 571 bp, Homo sapiens
gttacggaagccacaagaagcaattacagatggagagtgtgaatgtctcccaggtgactgctgggacttttgttcctcattttgggaccaggataagagctggtgcctcctgttttatgactggactctgacttctatcttctgctttctgcagagtcctcgtaatagctctctggacactggcacagaggccatgggatgctgagttgagacccaatttctgggtagcacgtcccatgacagtggatggcagttgacaggtggcattcatagagcctgacttgataccagtttttcamagcaacatgaaccatccatcatcattgatgccaaaggtggggtctacccttccctgggcactgctgcaggataccaagcccactgcccacacaaggaatcctggtcaccaccagggtcccccaggggactcggacaagtggctgacgatggtgtcaccagcatcaggacgcatatggttgtgtcaagagaagaaatgagaattgttttatgttcagtcaggatgacagagaagacttaaaatgggatagctacctggattttgtttctgagc

SEQ ID NO: 482026 - DNA, 312 bp, Homo sapiens
tggcccctttccttccttagcgttgctctcctgggtcccctttgtgactcctgtctgctcctaacatttctgggtgatggtgatgctttcttcctctctcatcaggacccccaaactgagctgtccccagggcyataggcttcctccttcctctgtggctggagggtccaccctgacaattgtctgaaggttgcgtccccgggtctctggctgcgacaccattcctccagctccacttcctcccttagagctctgtcaggcctggaaagatgaggggctgtgtctccccaggctccccctccacggacactg

SEQ ID NO: 482027 - DNA, 312 bp, Homo sapiens
tggcccctttccttccttagcgttgctctcctgggtcccctttgtgactcctgtctgctcctaacatttctgggtgatggtgatgctttcttcctctctcatcaggacccccaaactgagctgtccccagggccrtaggcttcctccttcctctgtggctggagggtccaccctgacaattgtctgaaggttgcgtccccgggtctctggctgcgacaccattcctccagctccacttcctcccttagagctctgtcaggcctggaaagatgaggggctgtgtctccccaggctccccctccacggacactg

SEQ ID NO: 482028 - DNA, 312 bp, Homo sapiens
tggcccctttccttccttagcgttgctctcctgggtcccctttgtgactcctgtctgctcctaacatttctgggtgatggtgatgctttcttcctctctcatcaggacccccaaactgagctgtccccagggccataggcttcctccttcctctgtggctggagggtccaccctgacaattgtcygaaggttgcgtccccgggtctctggctgcgacaccattcctccagctccacttcctcccttagagctctgtcaggcctggaaagatgaggggctgtgtctccccaggctccccctccacggacactg

SEQ ID NO: 482029 - DNA, 370 bp, Homo sapiens
cagcagcaaggtgcttccttcccacgtccgaagattccacatcagggtgggaaggacattcctgtgtcccaggggtgctggtggtagatcatggctggacccgcaggttctctagcactttctgtgggtggggctgatgcttgggctaactgctcctgaggtccccggtcccatgggcagctctcctctcactgtttccttcatcctcccagcctgcccagagcatggacctgcccgctgggatctctggggctggccgtgcacaytgagcaggaggtcagctcaccgggaggccctgggcccactgtgttatacaggtccccacacagagcagggaagccagtcccaccatcgtgggtcccatttcctt

SEQ ID NO: 482030 - DNA, 579 bp, Homo sapiens
gtaggtgttgaccagccagaccccaggcagcagtgaggcatggttcacagtgctagcccagtccactggtgcactccatawttgactgttgctcatagtttgctgacctctgatgtagaataaggggaactcttttaaactgtaggtaggagtaaagttagtatactgctttggaaaaccactggtattgtctcctaaaatacaagcacaaagcatactctgcaattcctaagtgtacatccaacaaaaatgcatgcacatgtgcatgcagagacatgtacgaaaatgtttataagagcattagtcataaaagccaaaatgtgaaatcaattatcaaatgtccaccagcattagaactggaaaataaatattgaactgttcacataacacaattctttacagcaatgaaaatgaaaaaaaaaagttgccacttcatgtgacagaaatgaatctgatgaagagaatgttgagaaaaaaatacattccatatgacttcattaatgtatgtgtgtaaggtatgtatgtttagctgataaaactacaaagaaaagcaaagaatatattaccatgaaagatagt

SEQ ID NO: 482031 - DNA, 429 bp, Homo sapiens
tggcccaggaaggtccgtgcagccccatgtcacatggtgagaatgaggctctactaagagtgatatctgcacccccaaccagatgagatggatgttcatagaaagggtaagtccaggtggaaaggaggacccttcataaaggggatcagattgcatcttcctgaaaggggacccaggctacctggtttatgagtgagaacagccaggatgaagagtctcggagctctctaggacctgggcgtgctttcatttctcccagctagctgtcttgcatggccctgctagggggactcagaaaggggctgggagaggttcgggatccatgcacagcatgasggggaccggaggtgggaagtgggtaaagtgggcatacagtgaggacactgaaaagaaagaccacaaagaaaacatcaggatagttgggaggtg

SEQ ID NO: 482032 - DNA, 642 bp, Homo sapiens
catctcactgccacgatggtttttaatgaaataggaataaaatgatctgtgcatgtctgtgtttgacagtggccttaaaccagtcttgggggtctcaaccacctaggtctctgccgtgagatactcactttaagaagaggcagcagaaaataatggttaatagcatgcgttatggagtctgacaaacctgggttcaaaagccacttttgccttatatgtactagatgatgtggccttgggcaagtcacttactgaatatttctgtacctcagttaactcacatgtaaaatggggataagaaagtcacttcagaagatgattttgtggattgagtaatgccatatgctttaaatgcttagcccaatgtccagtgcctaggaagtaatcagttaagcttcatattattttttagtcatttacaaaatatttattcggtawctaccatgaaccgaacaaaatagaaatgcagtttgtgtgtgtatatcttccaggaatgaagcatggcctgacaacgcctctgtattatatggaaatgtataattagagtttttaagcattttttaaccaccagcacattagcaaacaacaaacactattgcacggtgcagagtttgtttacttggcaaaatgtagataatgcag

SEQ ID NO: 482033 - DNA, 480 bp, Homo sapiens
tatcccaacccaagtgaaacactgggtcatttttttcttgtgagcaagaagtgaagggagaaaacaaaggatatactctaattacctttcctatttcttttttgttgcatgcattatgataactgtatattacacttatttataattaatatatgacaagctgtcagctaaaatttaacaggtgatttgtcaagaaggcccattaatgcatacattaagcagtggatttcagtgtttcctaacaaaattgtgtattggttttgttttttcattctatttagtataaacatttwgaggccacctatctttacattttgcagcatttttaaaaaataaaactattgctaacataaatgggtgcattgttagttatatgaggtataaacacatttctgtcaccttaacctctaaatttgtttcactgaggaaacaaattgcctagtgtttattttaaagttttaactttcatgggttttgata

SEQ ID NO: 482034 - DNA, 619 bp, Homo sapiens
ctgtgcccacgcacctgaaatgcagagccagatccatctgtgatctttggtctcatcttgactatagctggtacccataaactcaggtgatgtctagctatgccaggagctggggtcatttcgtttcttcgtccaccccatgctttgctttgctgactctctgattctgatgcatggggcccagttgaatccatgccactgtctttactgattactgactttawcctggggtccttgcctgacccagatggtgggtactcttttcatgcagttagattcctcagttcagtcatgccaacctctttaggcaaaagcaccagccatgctgtgagttattatttgctctgaataaccccaggagttactcactaagctgcctgcgtaaagctctttttcacttgcttttctgctctgactgtatataggaaaagtctgggaaatggcaagtttatatattttgcccagagccacagagggagaacccattggggtgtttgttacaaatcattgtctttacatgttccagctcattgttttggtctgtgggtcaaacagttttttaaattcctgatgtgtggtctccttgatcctcactttctttgtctctgaaataggaaca

SEQ ID NO: 482035 - DNA, 448 bp, Homo sapiens
ctaatgctctcagtttctcctggggcttccaggagagcagaacccccactggcctgcccatccacttctccatcctggtgtccctggagacagtctaagcataaatgctcaaaccaaagaatgtgaggggctggcatggatcacttaatrtgctatctgctctttggagaaatggcagagatccacataaaatgtagcttagcaatcacatactaagccagtagatatctaataatgttagtccggctcatttgggaatttttgaggcttaggagtattcagcataattccatttgtttagcaaattgatgatgtagaaagagagattcctatccacttaaacagtaaactactttggcagcaagctttcatacaacaacaattataagcaaattacaaatggttttatctatttggcaatggtgagcctttaaaatgagctcattta

SEQ ID NO: 482036 - DNA, 609 bp, Homo sapiens
atgatgtgatgctgagcagaactgttctctagaaggttaacaagacttgtgttctaaaagcaaatactctgagcatctacatgtgccaggttattgtcaaggcactggaggtgagccatgtataaatctttgaaggaaaccacaatctgttgtggaaataaatttgcacaaaaataaaaccaaaaagggatagagaggaaagcggaaacactgaatgagagttgagcttgtaactcctggtcctgggttgcaaaagtggcctctgctgttggaaatatcgaagaaggacctaattggaagaaaaagaacagaacagatggagaggccacagttttgttttgttttgttttggtaatagtgctttttgctaattttttaatcaaatacatgaacatgcctgaatggtaaggagatatttataatgaaaagcaacacactgcccacctctattgatgcttcctagagataaccacgtttmactcttttaactgtttattttggatatacaatctgcctctaccactatttcttaatttaccaatttggagtcatacccattgactttctgctctcctggatgagatttaagtctctagctccatctttgcc

SEQ ID NO: 482037 - DNA, 609 bp, Homo sapiens
atgatgtgatgctgagcagaactgttctctagaaggttaacaagacttgtgttctaaaagcaaatactctgagcatctacatgtgccaggttattgtcaaggcactggaggtgagccatgtataaatctttgaaggaaaccacaatctgttgtggaaataaatttgcacaaaaataaaaccaaaaagggatagagaggaaagcggaaacactgaatgagagttgagcttgtaactcctggtcctgggttgcaaaagtggcctctgctgttggaaatatcgaagaaggacctaattggaagaaaaagaacagaacagatggagaggccacagttttgttttgttttgttttggtaatagtgctttttgctaattttttaatcaaatacatgaacatgcctgaatggtaaggagatatttataatgaaaagcaacacactgcccacctctattgatgcttcctagagataaccacgtttcactcttttaactgtttattytggatatacaatctgcctctaccactatttcttaatttaccaatttggagtcatacccattgactttctgctctcctggatgagatttaagtctctagctccatctttgcc

SEQ ID NO: 482038 - DNA, 519 bp, Homo sapiens
ctgcagaatgaatgaaggcatctaccccatccttcctgctctgcccaacaataaggttttccaaggataactcgaaagggatattccccttttcacctgctaagccatctgaggaagtacagaatctactggacactcaagaggagaggcactctaggtagattaaatttcattcacaggtatttatggagtgcccacaagactgcacacataggtctaggtagcacgtgggtctacacaagtgggtctagggaaatacaactgagtcatagagatggtaagttggtggcatatccctggcagggatcaataattgatcacagcctctttcctgcagggccagaggtggcctaagaattctgtctcagcaaagtcctccaggaagctcctgcattgaccagaattggcactcaggatgaaacctatttgccaacctggtagttggtacatgcacaggatgggctcctcctrtactaagttcagcaaactaggcataagcaaaaacctcctggagctctg

SEQ ID NO: 482039 - DNA, 601 bp, Homo sapiens
tatcgatatttaaaataataatgtttatctctgtgaataacaaacctttgagaacctacttccctttgaaataagagacttatataatttgcgtcatccctatttcatgaaaaaatacatggcaaacgtttcttatcatctaataggacgctyctcctcttctttaaaaagccacagtaagatccagtcaccctcagcaacattttccttttggagaaaacacaagggcaacccctttctgaatctgtttagtctttactccatagataattgggttcatcatggggggaacaagaacatagagattggccagcaggatgtggacatacttgggaaattttcaggcaaagcgctgaacaatgacagtgaaaattcctggaaggcagaacatgaggatgacactgccatgggaaccacaggtgctgagtgctttcatccaagcaccaagggagggcagcctgaagactgcttgaactatgagcccctaggagatgactattgtcaccatatctaacgtaacactgagtagtggtacagagattccataccaaatattgatggtgatttcagaacaacctagctttgccagccccatgtgttc

SEQ ID NO: 482040 - DNA, 671 bp, Homo sapiens
cagacttcaaccttatacaattcacccatgtaatcaaaaaacacttgtacccctaaagccactggaatttttaaaagataatattagaattatttcatgtgggccatataattttcatcttaacaggtgccctaggttattcctttacaccataagtttgccgatatgttaagcattttcactagcagtatcctattaatttgtcaatccttataaaatcttgagagaccaccttttaatggaaattaagtaactcatccaaagtcctttatctggtaagtgagggcatgaacttgaaacctgggtgatatrataggcacatacacacagctttccacccacatacacatcagcttacaaataaataaataaataaagcactctaaggcagtgttaactcaaaggcatgaacaaggttaatagaatctttttcatcttcttcccttgagggtgagaagagggcatgtcagagtctctaatcccctaactacctaccttttccccacaaggagcagtgagtgatcagagaaaataaatggacagggaatcaacctctctaacgtccttccttttccttccactcatgtttttttttttggttggtgtgtctgctgtcttgtagattttgtcaacacactctttcttctttccctttggcctgatccccaaga

SEQ ID NO: 482041 - DNA, 663 bp, Homo sapiens
ctttgtttacctaagcaagcctgggcaatggcgggcgcccctccccagcctccctgccgccttgcagtttgatctcagactgctgtgctagcaatcagggagactccgtgggcgtaggaccctctgagccaggtgcgggatataatctcatggtgygccgttttttaagccagtccgaaaagcgcaatattcaggtgggagtgacccgattttccaggtgtgtccgtcacccctttctttgactcggaaagggaactccctgaccccttgtgcttcccaagtgaggcaatgcctcaccctgcttcggctcgcgcacagtgcgcgcacccactgacctgcgcccactgtctggcactccctagtgatatgaacccggtacctcagatggaaatgcagaaatcaccagtcttctgcgttgctcatgctgggagctgtagaccggagctgttcctatttggccatcttggctcctcccccaatacatataaattaggtttgtaataaactgagacagaaagaggacagattttgagatgaatgcaggcaggaatgctcccaggaatgaacctgggagcttcaaggaggtgagcctcaaggtgaccggtaggattgtggtgcccactggttccccactgaggtgctctccaagtgcacgtctgtgct

SEQ ID NO: 482042 - DNA, 623 bp, Homo sapiens
tgctttgtttacctaagcaagcctgggcaatggcgggcgcccctccccagcctccctgccgccttgcagtttgatctcagactgctgtgctagcaatcagggagactccgtgggcgtaggaccctctgagccaggtgcgggatataatctcatggtgtgccgttttttaagccagtccgaaaagcgcaatattcaggtgggagtgacccgattttccaggtgygtccgtcacccctttctttgactcggaaagggaactccctgaccccttgtgcttcccaagtgaggcaatgcctcaccctgcttcggctcgcgcacagtgcgcgcacccactgacctgcgcccactgtctggcactccctagtgatatgaacccggtacctcagatggaaatgcagaaatcaccagtcttctgcgttgctcatgctgggagctgtagaccggagctgttcctatttggccatcttggctcctcccccaatacatataaattaggtttgtaataaactgagacagaaagaggacagattttgagatgaatgcaggcaggaatgctcccaggaatgaacctgggagcttcaaggaggtgagcctcaaggtgaccggtaggattgtggtgccca

SEQ ID NO: 482043 - DNA, 623 bp, Homo sapiens
tgctttgtttacctaagcaagcctgggcaatggcgggcgcccctccccagcctccctgccgccttgcagtttgatctcagactgctgtgctagcaatcagggagactccgtgggcgtaggaccctctgagccaggtgcgggatataatctcatggtgtgccgttttttaagccagtccgaaaagcgcaatattcaggtgggagtgacccgattttccaggtgtgtccgtcacccctttctttgactcggaaagggaactccctgaccccttgtgcttcccaagtgaggcaatgcctcaccctgcttcggctcgcgcacagtgcgcgcacccactgacctgcgccsactgtctggcactccctagtgatatgaacccggtacctcagatggaaatgcagaaatcaccagtcttctgcgttgctcatgctgggagctgtagaccggagctgttcctatttggccatcttggctcctcccccaatacatataaattaggtttgtaataaactgagacagaaagaggacagattttgagatgaatgcaggcaggaatgctcccaggaatgaacctgggagcttcaaggaggtgagcctcaaggtgaccggtaggattgtggtgccca

SEQ ID NO: 482044 - DNA, 516 bp, Homo sapiens
ctgctgctgtggtaggcgtctatgttcagtgatgtcagagctagaaggcccttcgaggccccccaggcccaacctcaccattctactgatggggaaactgaaggtcagagaggaaagtggcttgctcaggccttcaaccaagccaggtccaggagctaggtgtcctgactcccggtccagccctcatcctaccaccccagctcagtttcacaaatgtgcagagaagacagaagagccggctgttcttggggccacacagagagaatgcttgctctctgtttccttctgcttggtctccccgagacagctatgcagctagagtagaccagtatactggcactgacagggcgagagtgtggcaggaggaggttggcaagtcccataaatcttcctggaagaaaggccttgaaggtgagtgagacctggctcaatgcatgaaggaagaggctttctgggctgaggcaagagacaggstgaggggcaggaggcaaaggccttgatggacagacagaggac

SEQ ID NO: 482045 - DNA, 612 bp, Homo sapiens
acagccctggccatcatctgtgtgcaggccccagactccttcagggcttccccagggtggggccctttcttagacaccaaaaacatacctggccttgcccagatgcagtgaccttcttgacagcagagggtmttttttcctctgcatggtttggttttggtctcccctggcatatggtaggtcaatacctgtagcaaggactgttcatgctcactgtgtgaccacatgctacctttcccagactcttgtgtgaaagggttgagaccacgttgctagttcaggccgatggtctgtagcttccagattgaagctaggagccagcatgtcttcttcctctctctggccctctgtcctggtcatgtatttcaatgaatgtacctacagaagaagaaagctactgtgatggttaattttatgtgtcaacctgaatggatcacaggatgcccagatatcaggtgaaacatgatttctggatgtgactgtgagggtgtttctagaagagattcgcatatgaatttgtcgactgagtgaagtgcatctgccctgcctgatgtaggtgggtatcatccaacccactgaaggcccgaatggaacaaagaggtagaggaaagg

SEQ ID NO: 482046 - DNA, 612 bp, Homo sapiens
acagccctggccatcatctgtgtgcaggccccagactccttcagggcttccccagggtggggccctttcttagacaccaaaaacatacctggccttgcccagatgcagtgaccttcttgacagcagagggtattttttcctctgcatggtttggttttggtctcccctggcatatggtaggtcaatacctgtagcaaggactgttcatgctcactgtgtgaccacatgctacctttcccagactcttgtgtgaaagggttgagaccacgttgctagttcaggccgatggtctgtagcttccagattgaagctaggagccagcatgtcttcttcctctctctggccctctgtcctggtcatgtatttcaatgaatgtacctacagaagaagaaagctactgtgatggttaattttatgtgtcaacctgaatggatcacaggatgcccagatatcaggtgaaacatgatttctggrtgtgactgtgagggtgtttctagaagagattcgcatatgaatttgtcgactgagtgaagtgcatctgccctgcctgatgtaggtgggtatcatccaacccactgaaggcccgaatggaacaaagaggtagaggaaagg

SEQ ID NO: 482047 - DNA, 612 bp, Homo sapiens
acagccctggccatcatctgtgtgcaggccccagactccttcagggcttccccagggtggggccctttcttagacaccaaaaacatacctggccttgcccagatgcagtgaccttcttgacagcagagggtattttttcctctgcatggtttggttttggtctcccctggcatatggtaggtcaatacctgtagcaaggactgttcatgctcactgtgtgaccacatgctacctttcccagactcttgtgtgaaagggttgagaccacgttgctagttcaggccgatggtctgtagcttccagattgaagctaggagccagcatgtcttcttcctctctctggccctctgtcctggtcatgtatttcaatgaatgtacctacagaagaagaaagctactgtgatggttaattttatgtgtcaacctgaatggatcacaggatgcccagatatcaggtgaaacatgatttctggatgtgactgtgagggtgtttctrgaagagattcgcatatgaatttgtcgactgagtgaagtgcatctgccctgcctgatgtaggtgggtatcatccaacccactgaaggcccgaatggaacaaagaggtagaggaaagg

SEQ ID NO: 482048 - DNA, 602 bp, Homo sapiens
gctgcccactgaggaaggctctttccccagatgcaaagtgtgcatctcacattagcttgcaaggcagctctgattagtaattaaatggttttttaaaaaaaataaagccattaaagctaatgccatcaaaatcagaacctcagacgctggctcataatgatgagtgtgcctcacgactcacaggagaggacatttacattttaacatgcacattgcacaggcattaatatttcccccacccacccctcctcccatcattatggaacctgctgatgaatccatttgttttccagctttactctgatcctagaaaaagcaggtcatcctgcaagaagtcaatgyggagggatgaaaagaggctctgcatgaagtcggctttagccctgccatgcctagatgtataacttcgaacaagtgacctaatcaccttggcaaacctcattttgctcatcttttaaatggggataagaatgcccatcttgtggtgctgtgccaaggattgaatggatcaatgcattcgtaaatgcaactcatagtcaattcttgttaatgactagccattattagacctggtacttggcataccgtaggcacttatccaa

SEQ ID NO: 482049 - DNA, 602 bp, Homo sapiens
gctgcccactgaggaaggctctttccccagatgcaaagtgtgcatctcacattagcttgcaaggcagctctgattagtaattaaatggttttttaaaaaaaataaagccattaaagctaatgccatcaaaatcagaacctcagacgctggctcataatgatgagtgtgcctcacgactcacaggagaggacatttacattttaacatgcacattgcacaggcattaatatttcccccacccacccctcctcccatcattatggaacctgctgatgaatccatttgttttccagctttactctgatcctagaaaaagcaggtcatcctgcaagaagtcaatgtggagggatgaaaagaggctctgcatgaagtcggctttagccctgccatgcctagatgtataacttygaacaagtgacctaatcaccttggcaaacctcattttgctcatcttttaaatggggataagaatgcccatcttgtggtgctgtgccaaggattgaatggatcaatgcattcgtaaatgcaactcatagtcaattcttgttaatgactagccattattagacctggtacttggcataccgtaggcacttatccaa

SEQ ID NO: 482050 - DNA, 611 bp, Homo sapiens
tggtaagtgggcacactgggtccaaaacactggctgcctctgaaagagccagcacccacacttaagccggcctccaggtcctaatcccccattttgcccagaaaaaagactagaaggaaatacaacaaaatggtatcagtggatctctttggttgatgtgattgtgggkggtgtttacttctatatgcttttctgcatttttcaaatttttaccagtgatcatgtatttgcctataatcacaagccaatgaaagtcctttcaagttgttgaaataaataacagaatctttttgtgaaggagccagttaagtcccagagtgtccaaaacaggtgatgacagaataagggccacagctatttcctgagtcccaatgcaacacttgagacctctcaggaggagagataggtgtgatctttacttacaggaaggggctttggaaaggcatgagaaaatgtccccaagcaaaaattgctgtagtgtcttcatttgactgtatatgttcttgtagaatagccagaatataaagaaaataaaaataaaacaaaataacctaacatctcaccacccagatgtaaacagtgggaaaatggggaggactactttttcagat

SEQ ID NO: 482051 - DNA, 611 bp, Homo sapiens
tggtaagtgggcacactgggtccaaaacactggctgcctctgaaagagccagcacccacacttaagccggcctccaggtcctaatcccccattttgcccagaaaaaagactagaaggaaatacaacaaaatggtatcagtggatctctttggttgatgtgattgtggggggtgtttacttctatatgcttttctgcatttttcaaatttttaccagtgatcatgtatttgcctataatcacaagccaatgaaagtcctttcaagttgttgaaataaataacagaatcwttttgtgaaggagccagttaagtcccagagtgtccaaaacaggtgatgacagaataagggccacagctatttcctgagtcccaatgcaacacttgagacctctcaggaggagagataggtgtgatctttacttacaggaaggggctttggaaaggcatgagaaaatgtccccaagcaaaaattgctgtagtgtcttcatttgactgtatatgttcttgtagaatagccagaatataaagaaaataaaaataaaacaaaataacctaacatctcaccacccagatgtaaacagtgggaaaatggggaggactactttttcagat

SEQ ID NO: 482052 - DNA, 611 bp, Homo sapiens
tggtaagtgggcacactgggtccaaaacactggctgcctctgaaagagccagcacccacacttaagccggcctccaggtcctaatcccccattttgcccagaaaaaagactagaaggaaatacaacaaaatggtatcagtggatctctttggttgatgtgattgtggggggtgtttacttctatatgcttttctgcatttttcaaatttttaccagtgatcatgtatttgcctataatcacaagccaatgaaagtcctttcaagttgttgaaataaataacagaatctttttstgaaggagccagttaagtcccagagtgtccaaaacaggtgatgacagaataagggccacagctatttcctgagtcccaatgcaacacttgagacctctcaggaggagagataggtgtgatctttacttacaggaaggggctttggaaaggcatgagaaaatgtccccaagcaaaaattgctgtagtgtcttcatttgactgtatatgttcttgtagaatagccagaatataaagaaaataaaaataaaacaaaataacctaacatctcaccacccagatgtaaacagtgggaaaatggggaggactactttttcagat

SEQ ID NO: 482053 - DNA, 597 bp, Homo sapiens
tgactggggaaccggctggcggggagcctttcctgctgggtggggaaatatctagttagtgcctgggaattcatgttaggccctgtgaggcccaaggatggaatcacaggcctcacaatctgcagtggacctatrtatcaggaagccctgcaggatggacagcacacaggattaggtgcatgtgggagactcccagatagcagccgaggaggggcctgctgccgagccaggagcgagtaaggaaactgcaaacccaggcaaggaggagggggtcctggcatctgtcaaggtggtgtgggcacagccagtgtggggatgagggaggctctgtggctccaggctgctaccaacccctggggaagatggaactcccacagccagagacaacccactggcacccccatcgcaggggcacacacccaccctcacctccccacacacaaagtaaccagacgtagctgtggaaagaaagcaggagataggtatcaagatcgtctcaaatacacaaatgagcagataagcaagaaccactgaatggttgaagactgtcaacactgtgaaagacacctacaataaacgcagtgagctcggattcag

SEQ ID NO: 482054 - DNA, 597 bp, Homo sapiens
tgactggggaaccggctggcggggagcctttcctgctgggtggggaaatatctagttagtgcctgggaattcatgttaggccctgtgaggcccaaggatggaatcacaggcctcacaatctgcagtggacctatgtatcaggaagccctgcaggatggacagcacacaggattaggtgcatgtgggagactcccagatagcagccgaggaggggcctgctgccgagccaggagcgagtaaggaaactgcaaacccaggcaaggaggagggggtcctggcatctgtcaaggtggtgtgggcacagccagtgtggggatgagggaggctctgtggctccaggctgctaccaacccctggggaagatggaactcccacagccagagacaacccactggcacccccatcgcaggggcacacacccaccctcacctccccacacacaaagtmaccagacgtagctgtggaaagaaagcaggagataggtatcaagatcgtctcaaatacacaaatgagcagataagcaagaaccactgaatggttgaagactgtcaacactgtgaaagacacctacaataaacgcagtgagctcggattcag

SEQ ID NO: 482055 - DNA, 597 bp, Homo sapiens
tgactggggaaccggctggcggggagcctttcctgctgggtggggaaatatctagttagtgcctgggaattcatgttaggccctgtgaggcccaaggatggaatcacaggcctcacaatctgcagtggacctatgtatcaggaagccctgcaggatggacagcacacaggattaggtgcatgtgggagactcccagatagcagccgaggaggggcctgctgccgagccaggagcgagtaaggaaactgcaaacccaggcaaggaggagggggtcctggcatctgtcaaggtggtgtgggcacagccagtgtggggatgagggaggctctgtggctccaggctgctaccaacccctggggaagatggaactcccacagccagagacaacccactggcacccccatcgcaggggcacacacccaccctcacctccccacacacaaagtaaccagacgtagctgtggaaagaaagcaggagataggtatcaagatcgtctcaaatacacaaatgagcagataagcaagaaccactgaatkgttgaagactgtcaacactgtgaaagacacctacaataaacgcagtgagctcggattcag

SEQ ID NO: 482056 - DNA, 597 bp, Homo sapiens
ggaccccctgaaaagctgatgaacrtaccctaaggaagagccagtgacacatgcctgccagagctggattaaccgggtaccagtgcagggaagtcctttcctatcccccagtggctccctcccttcaccttccctgaaactgcctagaaagtaggacaagaagaggagaggctgagaaatggaggagaaagcaacttttttctttcctaccgcaggcctccagcccagggagagagaaacgttaatgctaaatcaagttcagagatttgactgttaccgtggactagacatcccaattactgagctggaagtgtctgaatctgagagtcaccaggggaaactgtcttttacagaagggaaggcctgcagaatttccttccagtggcaggggaaggcgtctcctctgaacaattttaaagggccagtgggagaaaaataaatggtttgttcacacgtgtttgttcaacataaggtagttaagacgtgttttgttgagtgtccgttagtttatcagaggtgtcctgcatttcatcagtgctgtcacaagccagggcctgcctggagatgatccctgccccggggaccaatgcgggagat

SEQ ID NO: 482057 - DNA, 606 bp, Homo sapiens
ctacttcacagcctttcttttctgcccccagaaggattagttatacatcatgcttgctgaaagcgtaatatattgaaaatcagaagagtgccattgggtgtctgtttagaatatagatgtccgagtcaggaacactctgaattcaactcttgggcctgccactcactagctgggagatcttgggcaagagatatcccttggctaaacttcagtttgcttatctgtaaaatgaaaacaatagtacctttgagacatgggagctatgaggattaaatgaggtaatgaaaaggctcttagttgggtacaagtcattgatgatccaggttagcagtcgtaattaggaatsatgtggccaaatagtaacatcagcaacattgtaaaaatgtttctgggcaaggtgcattggctcacacctgcaatcccagcattttggaaggtcaagcttgagcctaggagttcaagaccagcctgggcaacatggtgaaaccccatctctacaaaaaacacaaaaattagccaggtgtgttggcgcatacctatatttccagctactttggaggctgaggtgggagaatcacctgagcccgagaggtcgaggctgcagtg

SEQ ID NO: 482058 - DNA, 575 bp, Homo sapiens
tggagaaaattgcagagcagagaagcaacacgacatctccatcactccacagcaaacgtctgttcaacacattcagtctctcggtatcaaggttactggtccattctttttcttctgctagtttagcakccttgccattaacttccaaaaacttttcctttcaacttccctagcttatccccattatcctaaaacataacctggctttctgatccaaaataaagttgagaccattgggtatgcacaagttaaattcctgtccaactctctcaaaattaactattcctgtgtcttcttcccttctagtatcagaagatgtattgatttcctattgctgttatgacaaattaccccaaacgtagtgacttaaaatgacacaaatattctcttacatttctggatgtcagaagtccaaaatgagtctcacaaggctaaaactcaaagtggtctgccaacaacaatcaggcagacctggtttcttcaggagaaaatcagtttcctgcctcttctggcttcaaatggctgccagcattccctggcttatggctgcatcaccccagactctgctcccgtgg

SEQ ID NO: 482059 - DNA, 636 bp, Homo sapiens
aatttttaaaaagtcataactaaacacaggtggggcaaacagtagattgggggaagctacggcaaaaatagcagaaagtctagtgtctttatgacacagtcaggaatgtgcgcgctgctatccgayggatgaggtcttccagcacactatggtgtacaatttctgcaacccctctgttttctgtctctcctttgaaagttgatcgggcaggaaagtgtgagaagtgacccccgagtgtgcttcctctgtggcaggttttagtacaagagaagcattgtcttttcttactggactcacccctcttttggaagcaaaaggtttcttttgccttgaagagtgccaacttggtcttgttctctctctgaaccccaaagcattttaaaataaaatgactgtactcagaatcttctcaattttctaatacctcttggctgtaaaatattaaaacaaaagtcttgtttcactgagcaacctcaagccatgttttaggaattatggaaaagaggttatgaagtctctttacttaagatgagctttcccagccattttagataaaactagtattttatcttgatattactgaaatcgtaccaaagaactttgaaagcattttaaaaagcagagaaaccaaggact

SEQ ID NO: 482060 - DNA, 529 bp, Homo sapiens
ggatataatgtttccctccaaatttcttccattttatgccatcacactgcgcaattatttcaggaacagtgatatgtgggtttaatagttgttaaggttgaaacattcccctggattttacatggattatttttgttgaataattgtgctttttttttttaaaaaaaattgtcgtctattttagggaggggtgatttgtgtgtgtgtgtgtgtgtgtgtgtgtgtgtrtatgtcacagaattacccagaatttatatatatatgtatatatatatgaatatatatacatatatatatgtatgtcacagaattacccagaaatgtccttgttttttagataaagatgtttttgtggctccagatcttcagtaccttgcttttcttatttctaatagtccagcagtgtcttttttttttttttccatcctttccctctatgctctgactgctccttggcattttggaccactccagaacattaagtggatttttccatttcctttttgcatctcaatggccacagcaggtt

SEQ ID NO: 482061 - DNA, 513 bp, Homo sapiens
tgagctattcctttgtatgtaaaccttcaattaaaagaaaatagttgggatccagaaatctaaatttctgaattctgaaatctgaatttttaacaagcacccaaggtgatttcattgcaggcaggtgttgcaaatacggtcattttctaagaatgtggtctatttgggcctcatgaagatccacctgctccaggagtctacaaccttgctttgccaggaatgcctttcttctcagacagctagtacttatcttctaaatgagcttaattactaaatycctaagggtgttgaacatcaaggactttatctcttggtgtagataaattagctcactgaagtgttgtacaccagtttggacctgggaggggtctagagagaggaaattattattatttgatacataacatttgtacatatttagggcatacagatgatgtttcattacatgtgtagaatgagtaatgattaagtcacgatattcagagtatccatcacttgaagtatttatcattt

SEQ ID NO: 482062 - DNA, 613 bp, Homo sapiens
ggtggctctgctgatctcaggtggatttgttcgtgagtctaagggttggatgggggttggctgacctaggctgggcccacatttgaggtcatgaaaagtgtgtctttgatctcatgtggcttggccacaacatttttaaggcacccttctctgacttgcacaaatttttattcccatattataaatgagtaaacaagttctgaaaaatgaagtggcttgcctacattaagcttctagcaaattgaaaagctacttcttggatgaagatctcaacttcaaatcctccacaaaatgcttctcctaatgtctaatgccattgagatacatagaggaatgttatttaatatgtgcaataattttttgagataggtattactaccccattttatcagtaaggaaattaagaccaagaaagggtaagaaaactgtactgattcacacagcatattagaaacaaagtgaaaactcaaattcagtggcttgctaaattttcattgcctttttttttttwaaagcatgccactgctatctaataaagatcacatttatctaagcttgcaaggatccaggaactctcccaatgatgaacttaaaccaaatcccacatattccc

SEQ ID NO: 482063 - DNA, 527 bp, Homo sapiens
tgctccaccagaacaccaagtcgggtgtggtgacacactcagggaaagtgggactgacatattttgtaggaacattctgtttcttacccaggacccattacctgtcttctctttggtaaataatgagacctgtgctttatgacttagaatatttttatttgatttccacaataagaaggtggcaatagataataataacaaaagaaattgtagtttcattttacagataagaaaattgagactcaagagtattacataaattgtttcagctaccacagcaaaaaatggtatggttgggaatcaagctcagggattctcatgctctatttagcaccaccttctcttctgagaagaacttggggatagaataaaaaaataagacactaatgaaatgtttagcacatgtgtcttttgtgaaagggagaaatagagtaktgtgagatttctgtgactcacttgaaaatgacttttaaaaactaatatagaagccaacatcaccctgataccaaagacaaagacacaacaaa

SEQ ID NO: 482064 - DNA, 574 bp, Homo sapiens
tgggtcttggggttaaggcgggcgggacgtcccctgtcccgagggggcgcaggctggggcgcaccgcaacgagagtgcaggcggcgcaggtgtcccaggacggggacggatccaaaccccaagcacgccyctgcaacctttcccggtcacctggacacgcagcgggggcgcgggtcagactcctacagtttcgcaaactgcgggtcccggggatcgctgcacagtcctgggtcagggacctggcccggctcggcgctggtgccgggctggcagcccaagactcgctcttctctcaacctcgcacgcctcgcgtcctgcctcagtttccctcacctcgaaaggggttgttaacagaggcacgccctgacctacgcgacttcctgggggccagagcgcgccctccttgccaggacccccccaggacgtgctaggactctgtggcagctcccctacctgcgcggtggctcacgccgccgccgccggcggcggctggggcgccctgaggacccccgcctggcatgcgccccgctgccagctcctcccgctccgcctgggctgcctcctgctccttccc

SEQ ID NO: 482065 - DNA, 594 bp, Homo sapiens
tattcaagagacacttaggaagtaaaattatatgaaacttggtaactagatgttgagggtaattgagaggaaagcatctaagatgactccagcttttaatttagttgactaggctaggtggatatggttcccaaatatgtttgttcattataagcacttggggaaaatttatatattttttcctagctgttatgtattatatattcctagtcttatcaaagacctgtgtgcaagattattctattttcaccttgattattctgggaactatgttttgcagaatcaccttccctgaatggatcccagctacacttrgccaaaagaataatatttgggaggtggcagtgagcagtagtcattttgttctaaggttactgttggttggagacagtcagagacagatgcaaaggtgctggtggtttccagtttgccctgtctctccctattccatgcccaggtctcctcctcaactactagctctatggaccaatagcagccccaggctccctatgagatgcttgtctgcacattcacagaggaagtagacacagaaccatcaaccttctgtagatgtctataccagcccctttacag

SEQ ID NO: 482066 - DNA, 622 bp, Homo sapiens
gttccctgtaagacaccaacgacacctggaggctctgaaaggatcctaaatgaatgcaaggggagaattacaaggatgtccatcataaaattctttaatagcaacaaagtagaaattatctgaattttcaatgataggacatgcttaaataaagagggcttaaatgaagccacccaatgaatgctctgaagtcattagaaatggtaayatggctgcatattcattgataaggaaagacatccattcattatatattgttgaaagaacaaagctcatcccaaacagcaggtacagtatggttaattgttttaagatataaatgtaggaaacaccatcttgataatagttactatcaccagatagtgatttttaaatgttctttgtgatcatccagttttatttatcctaattttgtgtgtatgagtgacttgtgtaataaacgaacattaaggaatattaaagcctttcctcacagggagctgctttttgtgttcagagggtaacatgattttgtctctctctctctctctacatgtacatatatatatacacatatatatatgtcaatataaaatttttaataagaaagatagagtatcagtacttccccccaaaggatcta

SEQ ID NO: 482067 - DNA, 623 bp, Homo sapiens
cttagagcagtcagcaattttcaaactgtagtctcagggctcctcaggagcctccccagaaccactttagggagacgggaacaggggaggaaagtctctatgttctcaaagtccacttcacccagakattttatctgctttccatgatggacttatcaaatttcatatgaacaaagtaatccctcagctaacataccaaaatatatatttgtttgctaaggctgccataaaagtaccacaaaatgagtggcttaaacaacgcagatgtactgtctcatagctctggagttttgttgatctgagatcacaatattagcagtgttgattccttctgagagctgccgggatgaattggttccatgcccctctcccaacatctggtggcttgttgttcagaggttgggagagaaggttgggagtttctttgatttgaagaaacatcaccctgatctcttatttcatcttcatttgatgtttccccatgttcatgtctctatccaaatttcctcttgttataagaacgccagtcatttggattagggtccactaatgacctcgctttaacttgattcactctgtaaagaccttatgtctaaatcaggtcatactctgaggaactggag

SEQ ID NO: 482068 - DNA, 458 bp, Homo sapiens
tagttctactctccctttgattcccagccctgccccctccaccaacaaacaagaaaatagaaaactccccaaaaccaaccatccaatcgcaggtatacaatctatcagtaccacccttgaaaacatctgtaaaccatatgggttaacatacagaacaaagaaggatgctaatcacaaagcttcagaaatgctcagcaccctccaggtcacctaagctggggctctatgggttacaagaaactgaaacattttcaactcaggctccagggcattggcacacactgtccccactttgcagaawagtctcctcccatatgtccacctggcttaccccactacttcctgtctttgctcaaagatcccctctccaaccatactatttaaaacattgaccatgcgccactcacatcccagcaccccatccccctcccggtaattattttcctcattgcacttat

SEQ ID NO: 482069 - DNA, 458 bp, Homo sapiens
tagttctactctccctttgattcccagccctgccccctccaccaacaaacaagaaaatagaaaactccccaaaaccaaccatccaatcgcaggtatacaatctatcagtaccacccttgaaaacatctgtaaaccatatgggttaacatacagaacaaagaaggatgctaatcacaaagcttcagaaatgctcagcaccctccaggtcacctaagctggggctctatgggttacaagaaactgaaacattttcaactcaggctccagggcattggcacacactgtccccactttgcagaaaaktctcctcccatatgtccacctggcttaccccactacttcctgtctttgctcaaagatcccctctccaaccatactatttaaaacattgaccatgcgccactcacatcccagcaccccatccccctcccggtaattattttcctcattgcacttat

SEQ ID NO: 482070 - DNA, 528 bp, Homo sapiens
tagttctactctccctttgattcccagccctgccccctccaccaacaaacaagaaaatagaaaactccccaaaaccaaccatccaatcgcaggtatacaatctatcagtaccacccttgaaaacatctgtaaaccatatgggttaacatacagaacaaagaaggatgctaatcacaaagcttcagaaatgctcagcaccctccaggtcacctaagctggggctctatgggttacaagaaactgaaacattttcaactcaggctccagggcattggcacacactgtccccactttgcagaaaagtctcctcccatatgtccacctggcttaccccactacttcctgtctttgctcaaagatcccctctccaaccatactatttaaaacaytgaccatgcgccactcacatcccagcaccccatccccctcccggtaattattttcctcattgcacttatccttttcttacatgccatatattaatattttactgatcttgtttactattatttttctcattgcctcccc

SEQ ID NO: 482071 - DNA, 602 bp, Homo sapiens
ttgccctctgcccatccttcttcctccctctcccttccatgagtgtccatccaaaacatccttgccaatcagcatgctacgtgtcaactctgtctcagactgcttcccaaggaggacggcctgcgacaggcacatgtcctgtgttttagccctatccctgggtccctcccgttttcgtctcttaattataagccctacacatccctctgtatttggccagattcggggatcttctgtgattaaaaaaaaaaaaaaaagactaaagggaggatggggaaaacaaaaagagaggctaaacaacccacttataaagggctgaaaggaaagaggagatgaaaaagtcctgtacagactgaaagttggggggagttttcgaagcttgatggatgccagtatctgggcaaaacaggattgcattggtgataaacagcttttgagaggagtcactaaaattatgagtcatatccccattggcatttttcaggagacacaagtaaatattggaatcactttttaattactcckgagtactggactgtgcatttaatattccacttcacatattaatagaatttgagaccctgactttattgagtgtattg

SEQ ID NO: 482072 - DNA, 579 bp, Homo sapiens
ttaatatagccactcctgctccactttcttttgattaatgatgtatcatttgccatcctttcactttcaatttacttatactactccattggaaataagttcttacctacagcatgtagttgtattatgttttctgcctgctgtcaacctctgtattttaactggtacatttaggccatttaaattacacaaataataaacgtttgattggatatgataattactctgatctgatcactatacagtatacrtattaaaacatcactatgtaccccatgaatacacaaaattactacctgtcaattaaaaaataaataaataacatgtaaaaataaaaaaattgctggcttttttgtttgttttgtttttgaaaaaaaaaaagaagttaatatttttcatttctattttctctttccttcatgtgggttacctgaacatttttaaatccactttgatttacctgtagtgtttttccgtgatcgttttgtataggttttttagtggttgctctaaccactaaaggccactatacagtaggcctttcatatccatggatttgaatctgtggattcaaccaaa

SEQ ID NO: 482073 - DNA, 424 bp, Homo sapiens
tattgcatgcaccagttcaagtgacatgtgaaaaccttacctccctttaagtccctttaccctcgcacacatataacattacatattacttctatatacattgaaaagcccaccaggcagtgttataatttttgcttcagctatcagaatgtaatctagaaaactgaacgggagccaggtgcagtggctcaagcctgtaatcccagcatttttgagaagccaagcctgkcggatcacttgaggtcaggagttcaagaccagcctggccaacatggtgaaactccatttctactaaaaatacaaaaattagctgggcgtggtggcgggtgtctgtaatctcagctacttgggaggctgaggtacgagaatcgcttgaacccaggaggtggaggttgcagtgagctgagatcatgccactccactc

SEQ ID NO: 482074 - DNA, 556 bp, Homo sapiens
ctgcatgtccatctgaccaagatgaaaataaaaccatcacaatggatgtttcaaatccattaaattggtggtgtggctcaatgtgcagaaaagagaaggccaaaagatgtaaagcctcattaccgggagaaacccgtcatgctcagaaatcacgccatagtcattattttaaaccatgactgccacggccaccgcccgtgggcttttattgagtttctgctatgtttagagtggtgatgtaggcactgtacattctgggatgtttgagaaacacaacacataccctctcactcactccctcactcacacagggtgagttccccaggctggaataaaaaagctggcaaatgtataggtttattctttctcaatgtgagaatttagagtctgttgataaagccgcaaaaacaaacgcactaaaggaagagcatttggttggggacgagcgcacagtctccctctgcatctggagcgctgggttttctgcagaatgtttcatataattgtttgcttaatctcccgggtgaartaaacgtatggcagttttactacacta

SEQ ID NO: 482075 - DNA, 433 bp, Homo sapiens
aggaccctgggcactgcagcagcgcccttgtgccccttcttggcctraccattaattattctagctcttctaccagcaagcagaggcctcagctttaacacccacgccaattgttcctccatcctttctgtatacagatctgcagtccctctccgtctatatctatctctgtgtgtgggcgtctctttctctgtctctcggtctctctctttctaccttctcgtgctgtttgtctgtgctatctctatctccctgtgcctctgtctccaattctgtccctctttcttattctcacacgtgcacacctgtgtgtgcatatgcgcacgcacacgtgcacacacacacacacacaccagaatcagaagagagatttcagtcaccttgctgaaccatatctggcttccctccctccaatctgggagctcaggcctgc

SEQ ID NO: 482076 - DNA, 582 bp, Homo sapiens
cctgggcactgcagcagcgcccttgtgccccttcttggcctgaccattaattattctagctcttctaccagcaagcagaggcctcagctttaacacccacgccaattgttcctccatcctttctgtatacagatctgcagtccctctccgtctatatctatctctgtgtgtgggcgtctctttctctgtctctcggtctctctctttctaccttctcgtgctgtttgtctgtgctatctctatctccctgtgcctctgtctccaattctgtccctctttcttattctcacacrtgcacacctgtgtgtgcatatgcgcacgcacacgtgcacacacacacacacacaccagaatcagaagagagatttcagtcaccttgctgaaccatatctggcttccctccctccaatctgggagctcaggcctgctctggccaacaagaaagaactcagcccaggatccattcagaaagaaccagatcaaagttaaggattagacagggggtgaatgtgcagaactaagagatcacatttcctcagagagaaagagaaggaaggagagaggagacagacagggaggaaa

SEQ ID NO: 482077 - DNA, 654 bp, Homo sapiens
cttgggggaggacatgcccacggctggcagaaagctgcctggcaaatcttgacaccctggaagagagaagatggcgatggagattcactttctaagaatgcattcctttgttctcaaagaaaataatggatttggtgttttcttgaacttggggcatttaaatgcatctctaaatcaaactgcagcagagagctcaggttcaggtgatggtctgtcacttacctctcctgtcgccgtggacaggccatctcacctgcctgtcttccatttytttagctggccacttggataccaatagagttgtgcttactgtgcttaaatattgcttttccaggggaggtttgatgactttgtctactcccatactcctcagatgccggaaacgacaggctctgtgtacccctgtggaccagccagattcttgagcagattttcctgatctgtttaccaggaaaatggtatacccagcagtttcggcaattccagagtccttggtggcctggcagtaatggtgtctctccagtcacccagatgtccctatacagctctctacatcagggtttggccatgggccaaatccagccaccacctgtttttgtaaataaaagtgtattggcacaaacctgcatatttgtttatgtaatgtctagggct

SEQ ID NO: 482078 - DNA, 524 bp, Homo sapiens
tactcaaggctgatgcctgagagttgcttgtacccrggaggtggaggttgcagggagccaaaattgcaccactgcgctccagcctgggtgacagagtgagactctgtctcaaagaaaaaaaaaaatagtagaaggactaagaggctacaaattacaattgtttaaaggggaaaaaaaagttttagaaataagcaaaatggaagacatgctgttttacatttggtcatatgtagtatctaccgaaattttggaccttttatcttgtttactatagaaattttaaattatatatgttatgcctttatggatatgtttttatcatttaaataaactgaattaaaatgtgctttgaaaaaagaaagatttctgtatatctggttcaagattttaaaccgctgtttatctactttccctattgagattctgttaaaattgttgcaagaatacaaaacagaataaattagatagacccacaatatactctgagaagcccaaggagagtcttgggccttggaaatgccagg

SEQ ID NO: 482079 - DNA, 524 bp, Homo sapiens
tactcaaggctgatgcctgagagttgcttgtacccaggaggtggaggttgcagggagccaaaattgcaccactgcgctccagcctgggtgacagagtgagactctgtctcaaagaaaaaaaaaaatagtmgaaggactaagaggctacaaattacaattgtttaaaggggaaaaaaaagttttagaaataagcaaaatggaagacatgctgttttacatttggtcatatgtagtatctaccgaaattttggaccttttatcttgtttactatagaaattttaaattatatatgttatgcctttatggatatgtttttatcatttaaataaactgaattaaaatgtgctttgaaaaaagaaagatttctgtatatctggttcaagattttaaaccgctgtttatctactttccctattgagattctgttaaaattgttgcaagaatacaaaacagaataaattagatagacccacaatatactctgagaagcccaaggagagtcttgggccttggaaatgccagg

SEQ ID NO: 482080 - DNA, 506 bp, Homo sapiens
tgcttcattagtcatactattggcttttcatttttcataccacttacrttgtgatatttctgtaacaaaacaatcaatcaaacacaaaacacattggacttgtcaggcccttgtgttcctattaaccgtgggttaaaatagaaactttttgttttgacgctccaggcccttcaccagcatcactgatgcatccactcctttccctgtcctcgttgttctctcggactcaaccagaacacctgtttcttgaatacaccagaagcttttcttagatcagtgcctctgaatgtgcttctctgcctgataacctaatggttcccaaaaccccagcataaacatcatgtcttctgtttattcgttctcagtcctccaaggcagaggtccctaatgagaggccctgataactcttgcttttcatgctgtgctaaaattttgtcttacttctcttcatcactcaagaggttgtaagctttgtggaagctgagattctgtcttattctgagatg

SEQ ID NO: 482081 - DNA, 517 bp, Homo sapiens
cttcattagtcatactattggcttttcatttttcataccacttacgttgtgatatttctgtaacaaaacaatcaatcaaacacaaaacacattggacttgtcaggcccttgtgttcctattaaccgtgggttaaaatagaaactttttgttttgacgctccaggcccttcaccagcatcactgatgcatccactcctttccctgtcctcgttgttctctcggactcaaccagaacacctgtttcttgaatacaccagaagcttttcttagatcagtgcctctgaatgtgcttctctgcctgataacctaatggttcccaaaaccccagcayaaacatcatgtcttctgtttattcgttctcagtcctccaaggcagaggtccctaatgagaggccctgataactcttgcttttcatgctgtgctaaaattttgtcttacttctcttcatcactcaagaggttgtaagctttgtggaagctgagattctgtcttattctgagatgctctcccagcccc

SEQ ID NO: 482082 - DNA, 641 bp, Homo sapiens
atgttggcaagaatcactctagagtgtgggtggggcagattggattaagtccatagttttcacacttttttcaagacaaatctcttccttcaaatcaaattggtctgattgaacagggggtggaggggccctccgattccatcaacttgctgctccttaccttcaggtttgagattctgtaatgctaatgcagaagccttccatttgcaggttttgatctcctcttgcttttttttctccacatcatcccttgagaagagagcatagaacacgtgagaaacytaggccattatacaggcaatatttgctgagaaccttctatgtagcagccactactctaggtgctgagaataaatcagaaaaaaaaaacagatggactttgctctcttggagttatcagtctggaggggtaggcagagtcataaacatatttaggcacattgtgataagtagtggtgggcagagggcctagggggagcacttaccaccctactggaagcatctggtctaaggccctccaatccccaggatgcttctctctcctcattaccaagctgtgttcagaagggagtgaagacagtgactcctccctggatgtgagcatgggagcagaagggctgtcagaaaatgagtgtccccag

SEQ ID NO: 482083 - DNA, 548 bp, Homo sapiens
tgacagggagaaatcaaatgaacagctctgcgtggatcacacaggcagcacacactttggaggaggtaggagagcccggtttaaggaagtgtggaagacagaagagccttccattgtgtggtcagttaccatggaacctctaggacctcttctcctgagcatgtagaatgatttatggtaaaactgcagcctctgaaaagggaagggggtagggagtgtgagagtgggtccttctgaattctaaggactagtataaatgacttgctcttttcaatgtctgggaagagttcatgcaaattccttttagtgaacatrgcttcagtccttctccattttgaggctgggtaagtggtttcacctctcaggaatgtcctacagtgccagccatgaaacctgtattatcttgctccatagcttcctggttggggatgatggcagggtgtatgaaggtgttggctggaatatccaaggagtgcacacccaaggctacaacaacatctccctgggctttgccttcttcggcactaagaaaggtaacagttatcaca

SEQ ID NO: 482084 - DNA, 136 bp, Homo sapiens
ctgattgcagtttaaaaaccctggagggcaatgatctatcccatttrgtttcaaactccactttatattttctcagtaggaaaattggggggaaagttgatgttttgggtggtagctcatacagctaaagtttcag

SEQ ID NO: 482085 - DNA, 637 bp, Homo sapiens
aaaaccaagagcagaataacaatagaagctgatttgtttccatgttcaaatctgatgttaatggtgaagaggcaagctatacttccatctatatctcccaaggagcatacttccctctaaaatacagagcctgtgtcttaaaatgtaaggatgggatccctgcaggtacaatgggcatcacttgcatatactttgtatatatttgcataaaactgcatgctaagattaagtgactttaattccatgtttatagaataaaatcaaacaaattgatactgcagccaactacaatacccaccagcttcaatatcaggaaaaatatatataaagtayacagtagacttttttttttttttttgagacagagtccagctctgtcaccacggctgaagtgtagtggcatgatctcagcttactgcaacctctgcctccagggttcaagagattctcctgcctcagccttctgagtagctgggattacaggtgcccaccaccatgcccggctaatttttgtacttttagtagagacggggtttcagcatgctgaccaggctggtctcaaactcctgacctcaggtgatccgtccacctctgccttccgaaatgctggggttacaggtgtgagccaccgcgcctg

SEQ ID NO: 482086 - DNA, 637 bp, Homo sapiens
aaaaccaagagcagaataacaatagaagctgatttgtttccatgttcaaatctgatgttaatggtgaagaggcaagctatacttccatctatatctcccaaggagcatacttccctctaaaatacagagcctgtgtcttaaaatgtaaggatgggatccctgcaggtacaatgggcatcacttgcatatactttgtatatatttgcataaaactgcatgctaagattaagtgactttaattccatgtttatagaataaaatcaaacaaattgatactgcagccaactacaatacccaccagcttcaatatcaggaaaaatatatataaagtacacagtagacttttttttttttttttgagacagagtccagctctgtcaccacggctgaagtgtagtggcatgatctcagcttactgcaacctctgcctccagggttcaagagattctcctgcctcagccttctgagtagctgggattacaggtgcccaccaccatgcycggctaatttttgtacttttagtagagacggggtttcagcatgctgaccaggctggtctcaaactcctgacctcaggtgatccgtccacctctgccttccgaaatgctggggttacaggtgtgagccaccgcgcctg

SEQ ID NO: 482087 - DNA, 535 bp, Homo sapiens
tgtttctacagaggtgttaactgctttcctcaccggggactgtgcaaagggagacctctgtttctggttcagcgacattacccacggaccttgttaccaaccttggcgaccagagaacgctgatctccaaaggtctagacccggtgaaacagcgttyggtggccactgaccggtttccagagtcagagctccccctgctggaatccaaagcacgtcgtaaccctgtctggacgtattttattccacaagaccgtgcagccctgattgagtgaactttccaccagccactttatcctcatacacaggcattttccgaggaggacttgagccgacatcagtgtttggccattcgcggttctcgcttccccttggttatttccccttcgctgaaatatattctagttttcccagcccagatctaattggactcctccgggctgggaatttaggtttgggagatttcccaaattaaaccatgaagtttatcactaatataattacatttctcaaataccagaccttttgcattgctcat

SEQ ID NO: 482088 - DNA, 535 bp, Homo sapiens
tgtttctacagaggtgttaactgctttcctcaccggggactgtgcaaagggagacctctgtttctggttcagcgacattacccacggaccttgttaccaaccttggcgaccagagaacgctgatctccaaaggtctagacccggtgaaacagcgttcggtggccactgaccggtttccagagtcagagctccccctgctggaatccaaagcacgtcgtaacccygtctggacgtattttattccacaagaccgtgcagccctgattgagtgaactttccaccagccactttatcctcatacacaggcattttccgaggaggacttgagccgacatcagtgtttggccattcgcggttctcgcttccccttggttatttccccttcgctgaaatatattctagttttcccagcccagatctaattggactcctccgggctgggaatttaggtttgggagatttcccaaattaaaccatgaagtttatcactaatataattacatttctcaaataccagaccttttgcattgctcat

SEQ ID NO: 482089 - DNA, 585 bp, Homo sapiens
atttactagaggaatgttaatagggcatgtttcttcctcttttttgagacagagtctcattctgtcacccaggctggagtatagtggcatgatctcggctcactgcaaattcagcctccagtttcaggcaattattgtgcctcagcctccccattagctgggactatagatgcatgccaccatgcccagatagtttttgtattctttgtagagacaggatttcaccrtgttggccagggtggtcacaaactcctggcctgaagtgatccacctgccttgagccccaaagtgctgggattacaggtgtgagccattgtgcctggccggccatgtttcttcttttacaatttgcctataaatagaccacatgaccacatgctctcttaaggtattgatgtgctcatgttttatgtacacacacacacacacacccctcacagacacatcagattttcatactaaaaaatcaagtttggaggaaattttaaattttaggctaggttagatactacttgaaattttgaagggtattttaaactctccatatacatccctggggtaaagcagtgacaggggccacatttg

SEQ ID NO: 482090 - DNA, 557 bp, Homo sapiens
tagacaaaacactaggagagaatacagacataatcamcatttccatggcccttactgtgtatgtttttcaattcttctaattattcttctctctgagggacacattaaaaaatgaaagtagtttcttaccacaaagaaagtactttaaaaagctatgttagattgctaaatatggattttaatgagtatctaaaaaattctcatggccaaagcatatttatctgagcattcagtatatgtgttttaattatattaagtgagatttctgaacatctgacatctgtttactagtcaactcttaattatttgagcataacaatgttaaatgaaatgttttaaggaagctgttggaactctgcagttctaagtgcggtcctaacaaattcataggaaagccttagaatccatccctgcactcagacacaatggagtccacttgctctttgttcttcccttatttccttgttttcttgaatttgtctgctttttcttaccacctctccttcagtaatggtgcattattcaccaggccctgtgtaagacaatgttggcatctt

SEQ ID NO: 482091 - DNA, 557 bp, Homo sapiens
tagacaaaacactaggagagaatacagacataatcaccatttccatggcccttactgtgtatgtttttcaattcttctaattattcttctctctgagggacacattaaaaaatgaaagtagtttcttaccacaaagaaagtactttaaaaagctatgttagattgctaaatatggattttratgagtatctaaaaaattctcatggccaaagcatatttatctgagcattcagtatatgtgttttaattatattaagtgagatttctgaacatctgacatctgtttactagtcaactcttaattatttgagcataacaatgttaaatgaaatgttttaaggaagctgttggaactctgcagttctaagtgcggtcctaacaaattcataggaaagccttagaatccatccctgcactcagacacaatggagtccacttgctctttgttcttcccttatttccttgttttcttgaatttgtctgctttttcttaccacctctccttcagtaatggtgcattattcaccaggccctgtgtaagacaatgttggcatctt

SEQ ID NO: 482092 - DNA, 397 bp, Homo sapiens
caactcctcttctttgaagtgtggaaagaaagatggtaagtcctcacgtgaagtgatgttcagagttctagaaagttattaccatctttaaaattcttattcaactccctgatgcctaagattctgctaacataatcagcttgcaattttattttaaatatttttggttaaaattaaaaagtaaagctaaaagtaaaaaatcatagagccgatttggtggtctaaagaagagagtaacaaggcagtgggtaccaaaagtggaagaaaggatagaagggagagaagagacacccaaatatgaatagttcgaacctgggaccattaacraaaaacatgttttgcctcaggctggccttagaagtcagagaagatatggcagaatcttcttggtaatagt

SEQ ID NO: 482093 - DNA, 623 bp, Homo sapiens
tcacacctgtaatcccagcattttgcgaggccaagacgggcagatcacaaggtcaggagtttgagacagcctggccaacatagtgaaaccccgtctctactaaaaatacaaaaagttagctgrgtgtggtgatgcgtgcctgtaatcccagctactcaggaggcaaaggcaggagaatcacttgaacccaggaggcagaggttgcagtgagcccagatcaagctattgagctccgcccaggcaacagcgtgagactttgactcaaaaaaaaaaaaaaaaaaaaaagcaaccaaattctcaaccaaaaaggcaaacaaactaaattctctggagcctttcacccaacagagactagatctctatgcgacatttacaaagatcataaatggtcagaccataaaactaattctcaatggggaataatttactggctataaacaaaccaaaaccaaaattagtaagggcaaaataaaattagaaaaacagagtcagcaaagttctattgttcacttcatgttacttgacctcatgaatcaggaaaatatatttctgtgcttcaactgcccatgtggtgcacttttctgtggatgaagtctgcctggctctggtcagcaaatccacag

SEQ ID NO: 482094 - DNA, 512 bp, Homo sapiens
ctcacacctgtaatcccagcattttgcgaggccaagacgggcagatcacaaggtcaggagtttgagacagcctggccaacatagtgaaaccccgtctctactaaaaatacaaaaagttagctgggtgtggtgatgcgtgcctgtaatcccagytactcaggaggcaaaggcaggagaatcacttgaacccaggaggcagaggttgcagtgagcccagatcaagctattgagctccgcccaggcaacagcgtgagactttgactcaaaaaaaaaaaaaaaaaaaaaagcaaccaaattctcaaccaaaaaggcaaacaaactaaattctctggagcctttcacccaacagagactagatctctatgcgacatttacaaagatcataaatggtcagaccataaaactaattctcaatggggaataatttactggctataaacaaaccaaaaccaaaattagtaagggcaaaataaaattagaaaaacagagtcagcaaagttctattgttcact

SEQ ID NO: 482095 - DNA, 623 bp, Homo sapiens
tcacacctgtaatcccagcattttgcgaggccaagacgggcagatcacaaggtcaggagtttgagacagcctggccaacatagtgaaaccccgtctctactaaaaatacaaaaagttagctgggtgtggtgatgcgtgcctgtaatcccagctactcaggaggcaaaggcaggagaatcacttgaacccaggaggcagaggttgcagtgagcccagatcaagctattgagctccgcccaggcaacagcgtgagactttgactcaaaaaaaaaaaaaaaaaaaaaagcaaccaaattctcaaccaaaaaggcaaacaaactaaattcyctggagcctttcacccaacagagactagatctctatgcgacatttacaaagatcataaatggtcagaccataaaactaattctcaatggggaataatttactggctataaacaaaccaaaaccaaaattagtaagggcaaaataaaattagaaaaacagagtcagcaaagttctattgttcacttcatgttacttgacctcatgaatcaggaaaatatatttctgtgcttcaactgcccatgtggtgcacttttctgtggatgaagtctgcctggctctggtcagcaaatccacag

SEQ ID NO: 482096 - DNA, 623 bp, Homo sapiens
tcacacctgtaatcccagcattttgcgaggccaagacgggcagatcacaaggtcaggagtttgagacagcctggccaacatagtgaaaccccgtctctactaaaaatacaaaaagttagctgggtgtggtgatgcgtgcctgtaatcccagctactcaggaggcaaaggcaggagaatcacttgaacccaggaggcagaggttgcagtgagcccagatcaagctattgagctccgcccaggcaacagcgtgagactttgactcaaaaaaaaaaaaaaaaaaaaaagcaaccaaattctcaaccaaaaaggcaaacaaactaaattctctggagcctttcacccaacagagactagatctctatgcgacatttacaaagatcataaatggtcagaccmtaaaactaattctcaatggggaataatttactggctataaacaaaccaaaaccaaaattagtaagggcaaaataaaattagaaaaacagagtcagcaaagttctattgttcacttcatgttacttgacctcatgaatcaggaaaatatatttctgtgcttcaactgcccatgtggtgcacttttctgtggatgaagtctgcctggctctggtcagcaaatccacag

SEQ ID NO: 482097 - DNA, 623 bp, Homo sapiens
tcacacctgtaatcccagcattttgcgaggccaagacgggcagatcacaaggtcaggagtttgagacagcctggccaacatagtgaaaccccgtctctactaaaaatacaaaaagttagctgggtgtggtgatgcgtgcctgtaatcccagctactcaggaggcaaaggcaggagaatcacttgaacccaggaggcagaggttgcagtgagcccagatcaagctattgagctccgcccaggcaacagcgtgagactttgactcaaaaaaaaaaaaaaaaaaaaaagcaaccaaattctcaaccaaaaaggcaaacaaactaaattctctggagcctttcacccaacagagactagatctctatgcgacatttacaaagatcataaatggtcagaccataaaactaattctcaatggggaataatttactggctataaacaaaccaaaaccaaaattagtaagggcaaaataaaattagaaaaacagagtcagcaaagttctattgttcacttcatgttacttgacctcatgaatcaggaaaatatatttctgtgcttcaactgcccatgtggtgcacttttctgtggatgaagtctrcctggctctggtcagcaaatccacag

SEQ ID NO: 482098 - DNA, 536 bp, Homo sapiens
tggtgactgtctctactagtagtgcctcatatgggtataaggctttgtggttttgaaaagctttccagtgatcaaaacaatgtgacatgggtgaaagaatagacaaatggaccaactgaacagaatagagagcccagaaaaagacccgcccaaatttagtcaactgagctttgacaaaggagcgaaggcaatacagtggagaaaggacagtcttttcagtaaatggtgctggaacaactggacatccrcatgcaggaaaaaataaactagaatctaaaccaagaccttacatctctttcacaaaaattacctcaaaacggatcaaagacctaaaggtaaaaatgcaaaactgtaactggtgacagccagaaagaaaaaataataattgagtgactactagtgccagctatcgagttaagtacttttaatagcttatcgcattgattctaaactctgtacacaatgtattattcccaaattgcaaatgatgaattttttgccagtgataaagtataatttctctatgttattcccta

SEQ ID NO: 482099 - DNA, 361 bp, Homo sapiens
gctgcttattccccatcagtgctgtcctaataattctctcatgtttattgccaagaactktatgagcacgtgaacttttgattcgctctgggaaaaaagtctttgttggtatttttattgagattccattaatgttataaactagcctggggggagccaatatcctcaggctgctgagtcgttctctccaagaacaacagcgctcctgcacctgtccaagtccaccctgacgccttcggggagaacttaaaagcagtccttccatggtcttccacattgttttctcctaattaacctttgtcatggtcactgcaaataggatttcctctgcccttatgttttctaactggctagatcatga

SEQ ID NO: 482100 - DNA, 597 bp, Homo sapiens
caggagccactttgcatctcccggtggccctctgggtgttgcagtatgattgatctgagagtccaccgccagccctgagactgctcttttatcacacaccaaatgtcggcgtgcacttgtctccgtttctcaaggctgcaatctgtcccacccatgtgcctgtctacctagccgcgggaggcagagaggctgccgggacatctcgacctctgctgggggaggggagggtcctgatgttgctgcttattccccatcagtgctgtcctaataattctctcatgtttattgccaagaactttatgagcacgtgaacttttgawtcgctctgggaaaaaagtctttgttggtatttttattgagattccattaatgttataaactagcctggggggagccaatatcctcaggctgctgagtcgttctctccaagaacaacagcgctcctgcacctgtccaagtccaccctgacgccttcggggagaacttaaaagcagtccttccatggtcttccacattgttttctcctaattaacctttgtcatggtcactgcaaataggatttcctctgcccttatgttttctaactggctagatcat

SEQ ID NO: 482101 - DNA, 620 bp, Homo sapiens
ggccactctggcgctgttacctgggcgccctgctgcaaaacgcaggctgatggccctgtggtggggactaaagggatggtcgctgtccttcggccagacgggagtggggcggwgagccagggccgcccagactctgcacccaagaccccatttgccatctgggaccctgcctggcgccctggctgacgcgagcccgcggcatcccctgtcgtccacccggtgcgtgcggccccgccatgtcccgccccgccgtccctggcagggaggggctgtggaagcctccgcccaccacggcacgcccggcacccccagactcgtggctgggctttgggaacacaggtggaggcccagggcgcggagggcggcgggacccaaaatccaggcgcttccctcccaggtgggggaggcagcgagcgagaacagcttcctgcaggggacgcccggccaccgcgccgcaatcccgccgcggccacagagacgctccccgcccctggacaggcctgaagcagtgggagcccgagacgctgggagccccgcaccccggtggccgcccggggcccagtgcctgtgggcggggaggcggaatcgacaccccaccaggacccccgccctcgggtggt

SEQ ID NO: 482102 - DNA, 620 bp, Homo sapiens
ggccactctggcgctgttacctgggcgccctgctgcaaaacgcaggctgatggccctgtggtggggactaaagggatggtcgctgtccttcggccagacgggagtggggcggtgagccagggccgcccagactctgcacccaagaccccatttgccatctgggaccctgcctggcgccctggctgacgcgagcccgcggcatcccctgtcgtccacccggtgcgtgcggccccgccatgtcccgccccgccgtccctggcagggaggggctgtggaagcctccgcccaccacggcacgcccggcacccccagactcgtggctgggctttgggaacacaggtggaggcccagggcgcggagggcggcgggacccaaaatccaggcgcttccctcccaggtgggggaggcagcgagcgagaacagcttcctgcaggggacgcccggccaccgcgccgcaatcccgccgcggccacagagacgctccccgcccckggacaggcctgaagcagtgggagcccgagacgctgggagccccgcaccccggtggccgcccggggcccagtgcctgtgggcggggaggcggaatcgacaccccaccaggacccccgccctcgggtggt

SEQ ID NO: 482103 - DNA, 502 bp, Homo sapiens
acccagttagaaaaaatgaacgtacttgtttaggaagattgcattgcagaacaggcagaggtgctgcacaacaattcctatggaatcattattaactggtcccctaaggggatgtttagcttgaattgctcctctcagtccgygtcccacggtcatgctatgttcagataatctgaataaaacggtcagatggtagaaataatagaagtatggcaagagttcctattatctggaaccatgtcggtatagtggcacctcaacctcaaatgatatggcccactctaggagcttaacataaggatttgtggaaactattaaatgcacttaatgagatcaaaatttggaaaagaataaaaaagcatctagaaggacactctacaaacttgtctttggatattgcaaaattaaagaacaaatatttaaagtatcccaggcacacctgaccttaatgccaggaactggagtccttaaaggagctgcagacagattagcagccagtaac

SEQ ID NO: 482104 - DNA, 523 bp, Homo sapiens
aattcaaccattcaaacccttctcacgatttgagggtggagggacccacttaaaacttttgtttatgtactcaaaattggtaatttttgcagaaattcttgaaccttttccaaaatgcaggcccctcagtctgttatttttggtcgctccctccctctgcgactgctctggcctctgcttgctctatacattccttccaacaccagtcactgaagatgttagcatcccacttctrtggctgcgtctagaagttgtcacaggctgaatggactgatacttctgaatgtatatttgacgtcaattaccagtgattgggccaagtccttctagatctctcactcctttgccagtatccatgttcttcaaattcacagtcttccaatctcttttgttttttcaatctcttttgtttttttttccaatgtcttctgttctcccaatttcaggaaagccacttttaggcactgttttatttccattcaagagatcatgtcattgaacatgtcaataatgcttcaagtta

SEQ ID NO: 482105 - DNA, 566 bp, Homo sapiens
ttaggagaaaactatgggaaaagttttgtgaagatcaataaatgtaaacatatcactggagaatatatttttgtctttgcatgagagacacatttttataattctacattttggatgcactaagcatctttaaagcagaaacagggatgagaaaatataaaataattgaacagcaataataccctacagacttttctcagaactccttctttactttgacacaatgaatagcttataaagaatgatctgataaatatctaaatcatgataaatgaagtccaaggaagagaatacaaaaatgtgaactggctataaaataagccayggttatatgagtacaataagtccagttaactttacacagattatttaacattgagtcacaactgaaagctttttttaaaaaaagcacagctctagctagataagaggagttattgcttttacaattgaaaatgaattatttacatgtaaaactaaataaaatgagatcagaaaattctaaggttatttttaaccctgctccaataatacaaacatttactgggtaatctttaaaatattac

SEQ ID NO: 482106 - DNA, 611 bp, Homo sapiens
tggaatattgttaggaagaaataatccaaaaataatgtattaaaatgaaataactactttgatttataaaatgttttacatkaaataaactcacctggcttttacattatacaggtaggaagatgtttttgagtctgactttaaattgctttaaccctctatttaatgcacctgataactgaatattctgaacagaaaattttcagaatgcaaataccatcacacctgttcctttttagcacatattctttatttgtataaaatctatgaagattttagggacagtccatggaaattttagggggagtcaagtggcccaaaacacatggcatactggatgatgaaactgttgattgagttaactggctgcaataattttggcttaaagaattaatatgattaaaacatactgacttactgctaaatcattagtttcactattacatagaaaatttatgaaacaaaaaaatagaagaatttgtttgcaacttataaataacaataaattaatttacattaaaccagtttcagtcaaaaatcaagtcattggccgggcacagtggcttacacctgtaatcccagcactttgataggccgaggcgggcaaatca

SEQ ID NO: 482107 - DNA, 611 bp, Homo sapiens
tggaatattgttaggaagaaataatccaaaaataatgtattaaaatgaaataactactttgatttataaaatgttttacattaaataaactcacctggcttttacattatacaggtaggaagatgtttttgagtctgactttaaattgctttaaccctctatttaatgcacctgataactgaatattctgaacagaaaattttcagaatgcaaataccatcacacctgttcctttttagcacatattctttatttgtataaaatctatgaagattttagggacagtccatggaaattttagggggagtcaagtggcccaaaacacatggcatactggatgatgaaactgttgattgagttaactggctgcaataattttggcttaaagaattaatatgattaaaacatacygacttactgctaaatcattagtttcactattacatagaaaatttatgaaacaaaaaaatagaagaatttgtttgcaacttataaataacaataaattaatttacattaaaccagtttcagtcaaaaatcaagtcattggccgggcacagtggcttacacctgtaatcccagcactttgataggccgaggcgggcaaatca

SEQ ID NO: 482108 - DNA, 585 bp, Homo sapiens
ggttccctcacttccctcagaattcccaggagcatgcgtcccgaagtagagagattgtcctcctcattcactggagtcccatttctggctctaattagctatgtgagcccagggcagttcagttaaccactgcctctaaaacaggcagcacaattattagatgtacttcccggggttatcatgaacatgaattgaggaaatgtgaaagtgctgggttcaatcttggctgagcacaatcctcctctctgtgagagcttagtcaagtcacctaatgtcttggaaccttgattttctcatccataatgataataagactagtacctccctcacaggatttcccaaggttaaattaactaatacatggaaaatattcagaacagtgtttgacacatagtaagtgctcaataaatgttagctatcattgtaaagtaaggcatgttatttttttctttttaaattgctggcaaacagttggcctgactccaagacttgcctcctgctaaatcctgattctgctcaattcaattcaatgtaatacagcatagggaagatcatgctccrtggcctggcagacctggctcagcc

SEQ ID NO: 482109 - DNA, 384 bp, Homo sapiens
tcctctgggatgcagaagtgccccccagtccttaacactgcactgtccctccacccctaagcagcaggcccccttctcctgcatccagtcctcttctgcttagactccctctccctcagtctgcagcagcaaacgctctccctcctgagtcatgagaaagccctttggaggtgtgggtggtgctggcctctccaggcaggaccttgtctctgacacagcacagcacctggtccagaaagaaggctcagaaagtgttgatggggatcsccatgaatctcagaggtcacaggagggctggagcaagcctcggggtgggctggcacagggtcagggctgacctgactctcaccctgcccatcccagagacggagggaatacttgtag

SEQ ID NO: 482110 - DNA, 610 bp, Homo sapiens
gatgtttgacttaattgacagagtagtttcactgtctcggttgactaactcaaagctcaggcctgctgtcagtaggagcctccggaaggascccctgtgaggagactccacaagagtccacatggggacttctgaacttccaaccgctcctggttgcagccaccttctctgccatcaatattttccttgagcccagcttcatgggcacccatttgtccctgtcaagaatgagggcagcgttgtacagtggttataaatattggcttgcaattgcagcttcctaggtttgaatttcttcctccctagttgttagctgggtgaccatgagtgagtgacttcacctcttggtgctcttaatagtgcccgactcatagagttgatataagaattaggcgaaatcatgtatgaggcccctagccagagacaaagattaaatgttctcattaaaaggtcctccctccatccaaaccacaagtctttgctgtgtgtcttcaccaacccatccagaaggcacatagtgccaagcatcccaaaagaagcataggtgaaagtgccttggtatttggacatgggagcaactgacctggttgtagggaacatgcagattttt

SEQ ID NO: 482111 - DNA, 454 bp, Homo sapiens
ctgaccctgtctcctggatcggcaccacactccatccgtgtcagggcccgctgtctgctttctcataaatccttcctcctggaatgaaactatttcctttatgatgaggaggcagttggtactgtctcactgctaagcagaggtgacaagaagggcatagctagctcctggccctctggagctggcaygggtacacagaaagcccctcaagatccccttggtaaaggttttgccaaaggagacagcaaattctgcctactgtgtatgctaagacagcccgcactcctggcagggagaggggacagaggcggctattctctctgagccaggaatgctgacaggctcaagagggaggatgatgtggtgggcaggagactgtgtgtgaccttgaacttggaaccaaggatgctttcagggattcagatgctcctcagggggatttgggatataatgt

SEQ ID NO: 482112 - DNA, 629 bp, Homo sapiens
tgggaccccacaggggtttcaaagaaaaaagagggaatcagggatgacagccactcatgccttccctgagcctgtgtcatgtttgtgactctgtcctctgtatgatgggcagaaactggggctgagtgtaaggtgcagggcctgcagtggatgtgaatgcacctgtctggaagatgagtgtgtaataagggaaggasagacacacaggcactgggccaagttagcaaatctgccatcagaatggcgttagggagactgagtgtgcaaacatgcactgtgacgcaaggtgtctcagtaggtgtgagctttccttttgttaccatggtcctgttgcttcaggggctcaaggggccatttgaagcccagaggaacaacagactatgtgtcactgggccaaatgagataacacctgtgaaggtccttgccacacagcaggtgctcaataaatgctcaatgcatggtgaatttgaacccctccttgtcctccttctggaggactctggcctccagttttgctcttgcagacaggccccttgatgcagcgcccacctaactcagcaagagtgggtttcacgcaaaatggggcacaccccacccacgccccaccatgccctaaccatgggcctcag

SEQ ID NO: 482113 - DNA, 629 bp, Homo sapiens
tgggaccccacaggggtttcaaagaaaaaagagggaatcagggatgacagccactcatgccttccctgagcctgtgtcatgtttgtgactctgtcctctgtatgatgggcagaaactggggctgagtgtaaggtgcagggcctgcagtggatgtgaatgcacctgtctggaagatgagtgtgtaataagggaaggagagacacacaggcactrggccaagttagcaaatctgccatcagaatggcgttagggagactgagtgtgcaaacatgcactgtgacgcaaggtgtctcagtaggtgtgagctttccttttgttaccatggtcctgttgcttcaggggctcaaggggccatttgaagcccagaggaacaacagactatgtgtcactgggccaaatgagataacacctgtgaaggtccttgccacacagcaggtgctcaataaatgctcaatgcatggtgaatttgaacccctccttgtcctccttctggaggactctggcctccagttttgctcttgcagacaggccccttgatgcagcgcccacctaactcagcaagagtgggtttcacgcaaaatggggcacaccccacccacgccccaccatgccctaaccatgggcctcag

SEQ ID NO: 482114 - DNA, 629 bp, Homo sapiens
tgggaccccacaggggtttcaaagaaaaaagagggaatcagggatgacagccactcatgccttccctgagcctgtgtcatgtttgtgactctgtcctctgtatgatgggcagaaactggggctgagtgtaaggtgcagggcctgcagtggatgtgaatgcacctgtctggaagatgagtgtgtaataagggaaggagagacacacaggcactgggccaagttagcaaatctgccatcagaatggcgttagggagactgagtgtgcaaacatgcactgtgacgcaaggtgtctcagtaggtgtgagctttccttttgttaccatggtcctgttgcttcaggggctcaaggggccatttgaagcccagaggaacaacagactatgtgtcactggrccaaatgagataacacctgtgaaggtccttgccacacagcaggtgctcaataaatgctcaatgcatggtgaatttgaacccctccttgtcctccttctggaggactctggcctccagttttgctcttgcagacaggccccttgatgcagcgcccacctaactcagcaagagtgggtttcacgcaaaatggggcacaccccacccacgccccaccatgccctaaccatgggcctcag

SEQ ID NO: 482115 - DNA, 639 bp, Homo sapiens
tgtctttctgcagccactaagctagaaccttctgagagcaggaggctcactcaggggattctctgtctctctttctctcttttccccctaccttcaaattagaaactgtgactccaaagtcgaactaagaggtccctgaagtcaaaggctatgcctcccctgtcagagtgggatctctctggatcaggggccctctcctaccccaacacacactcattgagcctgcttctgctgcctcttctcaagattctagaagaatctctatacatggtggctttggaaaggaggttttggaaatcaactcactgatgctacctcttagatgaaacctcagaatgtcacttcctgagagtgtatgggcaccctgcagggaggcggatgtgctggagacagcaaggctgggataggggcttcacactggagctggcacatggtgctggcagcattcacccccagcaactcccaaatcagaaaagcagcatgtttctgggcttgtatgcccccatacaagtggaactcaagtttcctttccccaccctttctccagagctggtccctccagggctcaccttgagtggtgtgatttatggggagcagtggggytctgggaggggaagtctggaaagaaggtgcaggcag

SEQ ID NO: 482116 - DNA, 605 bp, Homo sapiens
ccagggtatgcatctggaagcgtctgggccttctttgcttgctgttgccattgctgtctctaccagagggcaggcaacacagccaagggtagaagggcacaaaggatggcggaggcagtccatctatattgcacagatgcggtccatatggatcagcctcccagaatgcagagctggcggggagagggtggagagaggatctggagggacagtggaagatatccagcacaggccatgaatagccttggccctgggcccaggggcacctgacaaatatcatttcctgtgtgccaggacttgaaaatgttgggaagtgctgtttagccttagaacactgatgcatttactgataagagctcataagagagatggcctttctcatggggccatagaacactaccccatacacatacacacacacacacactcaaccacctcttgattaattagcaagggacatccttggatgtggctgtggctgttcatgtgctctcgtgggtatagagaataccactcaactatatttgagcagatgccrtagccagaaaaacgtcagccttcttcattctgtgaccacaatgagtcacagggaggtgtagctagaa

SEQ ID NO: 482117 - DNA, 595 bp, Homo sapiens
ctggtcagtggtggaccaggcagtctgaacggcagagcctgttctctgaaccactttcgaacattccagggggccaggaacactgagacccagtgttagctctgccagcagctatgtgaccartcacttctgctaggtctccatcctctcactgtgagatgggctcaatgaactagacgagttgttctcacgttttgggggtcatggactcttatgagaaatggtgaaagctcccccaaggaaaatgtgaattgcacattttcatggaaatgtccatgtaacacaagagggctccccagaccctgagacccccccactccccccaactgctgatccatggactagcaactctatggagagttcaaatagtagctttggcagtacctggctctgcaacggcaggcggacaagatctgtgcaggctctgaagtcagctctatggccctggacaaatatggaactgtcctgtgcttcagtttcccctctggaaaatggacctcataataacaatatttcataaagattttatgagacttggctgagaaaatacacacagtgagctcaggatggtgcctgacacatatcaggtattgct

SEQ ID NO: 482118 - DNA, 640 bp, Homo sapiens
agaaatggtgaaagctcccccaaggaaaatgtgaattgcacattttcatggaaatgtccatgtaacacaagagggctccccagaccctgagacccccccactccccccaactgctgatccatggactagcaactctatggagagttcaaatagtagctttggcagtacctggctctgcaacggcaggcggacaagatctgtgcaggctctgaagtcagctctatggccctggacaaatatggaactgtcctgtgcttcagtttcccctctggaaaatggacctcataataacaatatttcataaagattttatgagacttggctgagaaaatacacacagtgagctcaggatggtgcctgacacatatcaggtattgctattattattgttggcgctcattcctcaccttccttctagggtcatcactctccccaggtctctgggcccagkctttgggcaaggtgacccatagcctgtggtctagaacaggggacctcttggccaagaccaagacagataccacttactgagcacttcctaaatgccaggtgccccgcgcccatcttagaaaatccctaggcaatgagtaccaggatctcatttcacagatgaggcgcctgaggctcagaaagctggaac

SEQ ID NO: 482119 - DNA, 505 bp, Homo sapiens
attgtggccactggtctgtggtccccggtaccttcttctggcagtgcatgctttctttggttagctagtctggggtggaaagttctttcttgtccattgtcttctctggactcctctgagatgaatattagagaaggcctctcttctgtgctactttgacggatgccccctactggatgaggatgggaacttgaagtatgtcttaaggtttgagcaatcaaaggccattgccagccaggcttgacaatgtgactctctaaagacgttagattaccagtccgtacacttcccagtcaatatcawgtgccaataactgcagcaagagatactgctgagtcagtcttaagtctgagcattgtctcctagcaacagagctgcttgctctgctcataccctagcccttcatttcatagcttctgcctccatattgggctgtacctcctagggggtcctctttgccttaggatagggcattaccactgccgtttgcttactggctgtgccc

SEQ ID NO: 482120 - DNA, 505 bp, Homo sapiens
attgtggccactggtctgtggtccccggtaccttcttctggcagtgcatgctttctttggttagctagtctggggtggaaagttctttcttgtccattgtcttctctggactcctctgagatgaatattagagaaggcctctcttctgtgctactttgacggatgccccctactggatgaggatgggaacttgaagtatgtcttaaggtttgagcaatcaaaggccattgccagccaggcttgacaatgtgactctctaaagacgttagattaccagtccgtacacttcccagtcaatatcaagtgccaataactgcagcaagagatactgctgagtcagtcttaagtctgagcattgtctcctagcaacagagctgcttgctctgctcataccctagcccttcatttcatagcttckgcctccatattgggctgtacctcctagggggtcctctttgccttaggatagggcattaccactgccgtttgcttactggctgtgccc

SEQ ID NO: 482121 - DNA, 599 bp, Homo sapiens
tatccaccgcgccgtccacaccgttctcccggaaggcccatgccggggagggtgcattcctccagggctacctgcaggccccggmgctgggccccggagctcggacccgcctgcctccccagcgccccccgcgcccacccacggggccagcagcatccgcagccgtggcttgcttctgcggtctctcactctggccctgcgaagctcctgtgcaccgctcagctctctgagcccgctgggaggtgcctcctcccctgctcttcccctgggtggctatgcccacagaactctgggcagaggtcaaagagccaggaaatgtctctttctccaaattgactttggtgtgcgcctggttctctccactccctcctgccctgtccacactgttccctggggcccgcaggtttagcaaagttccctgccccctgcctgggccaggaagcagtcctgttgcccactcccacccttcaacccttttatggcccattctctctccccactgggtctcccacacgacaacccctcctccctactgtccccggagcccctctctggttctcgcgctcagcctcttccctgactgcttctccatctccatc

SEQ ID NO: 482122 - DNA, 484 bp, Homo sapiens
caccctcacatatgtgctcagcccactgttgaggttctgaaactcatatctggaggcattcaaaagtttgaattgtgactctcatatgtgaatctgaacccaaggtaggatagtgaatctcagaccraaattcagcacacctgtgaggctgtgactacactactgcctcactgttcacaaaagcagtggagctctcatgcgcagatcctgttcaccactgggattgtaatctgaggacttgggggcaactcactggagatgttaactcttatacctggagccagggaatatgcaggcttgtgaatctcattcctggatctttttgcaggtttgttatatataattctgcctagcacctgattgattttactctcttgcctgggcccaacgaattgttggtattgtgacatctatctgagccaagaaactagatcatgtggtatctctgcctgggccctgcccacagggcgcattgtgacatatc

SEQ ID NO: 482123 - DNA, 630 bp, Homo sapiens
ctgccctgattcctgggcacactgctccctccctcacgaacagaagactcaaatggccagaatgcaagatgagcttggctctttgccaatgtgcccaggaacacattatcaataagaaaaccacaccgaccttggatttctcctttgccagtgctcaaaatagaggttcttacctcactctctgtccagaaaaaaaaaaaaaagtcgaaaattacccatatattttgaggcagcattgttaaataaatttctgaaaaaaaaaaatctcagtggcttattacagcacattctaaaagtttttctcttcctcaacatcatagctttttaaccctcatggtttaggtgtgaaacagaaaacatttaatcatcacttcacaagtctgggaaggcataaacacaggtgaatgatattatacwgtcaatatttttaaaatactgattctaatgaggttccagtaagctatttacactttcttgtgcattgtgcaaagacccttgaaattgcagtacttaattatatgacaacaattttaagatggtcagaaaaatatcacactcctctgactttatcctcttaccaaccacaacaaaatagagaaaaaagatggaatatgtgtaaattgaaaaatc

SEQ ID NO: 482124 - DNA, 526 bp, Homo sapiens
cactagcatgacatagtgctctatttaggtcacaatttatgtgcttcacttatattttcctcatattttatatttttatccataaaaatgttgagtcttatttcttaggtgtattttgaagaagctaaagattttgcttgcyattttaaatggaaggttgtatttttttcatttataatttttaatttgtatatatgggtatatagaagtgctctattcttttaaagccctaatcataagtttgtaagtctccttcaattttctgcataggcaagcagttttatttcttcattcagcctttatgttttctatttttcttgtcttattgcatcatctataatatatagtgcaaagttgaatggaaactataatagaaggcttttgtgtcttttatctgatgtcagtattatgcagtcacaggctgctgattgctgcaggtttattttacttttttaagatcagaaatttttattctggtaaaaaacacataacacatctttcttaaccatctttaagtatactggag

SEQ ID NO: 482125 - DNA, 526 bp, Homo sapiens
cactagcatgacatagtgctctatttaggtcacaatttatgtgcttcacttatattttcctcatattttatatttttatccataaaaatgttgagtcttatttcttaggtgtattttgaagaagctaaagattttgcttgctattttaaatggaaggttgtatttttttcatttataatttttratttgtatatatgggtatatagaagtgctctattcttttaaagccctaatcataagtttgtaagtctccttcaattttctgcataggcaagcagttttatttcttcattcagcctttatgttttctatttttcttgtcttattgcatcatctataatatatagtgcaaagttgaatggaaactataatagaaggcttttgtgtcttttatctgatgtcagtattatgcagtcacaggctgctgattgctgcaggtttattttacttttttaagatcagaaatttttattctggtaaaaaacacataacacatctttcttaaccatctttaagtatactggag

SEQ ID NO: 482126 - DNA, 526 bp, Homo sapiens
cactagcatgacatagtgctctatttaggtcacaatttatgtgcttcacttatattttcctcatattttatatttttatccataaaaatgttgagtcttatttcttaggtgtattttgaagaagctaaagattttgcttgctattttaaatggaaggttgtatttttttcatttataatttttaatttgtatatatgggtatatagaagtrctctattcttttaaagccctaatcataagtttgtaagtctccttcaattttctgcataggcaagcagttttatttcttcattcagcctttatgttttctatttttcttgtcttattgcatcatctataatatatagtgcaaagttgaatggaaactataatagaaggcttttgtgtcttttatctgatgtcagtattatgcagtcacaggctgctgattgctgcaggtttattttacttttttaagatcagaaatttttattctggtaaaaaacacataacacatctttcttaaccatctttaagtatactggag

SEQ ID NO: 482127 - DNA, 480 bp, Homo sapiens
gagccatgagagggaaggggaactgtcccttcccgccagctgccaagtgatggcgcttggtgttttagatgctgaggtgcggtgctgtgtccgtgccctgtgccttgtggcatggattcagacaaagactctgggtccctcagagtctaaacactgaggttccacatattttccaaaaggaaatacatttttttaaagtaacatattttataaaagtcatccttcgccctccttagtccattaggtacatttgcacacaccatttcattgggtggaactctgtgagacaggcacaaggaggaaataggtgctcaaaggatagacctgtattcyagcccacatttttctaactacagtgcttgcaatctttccactacacaacttacatctctcagtaaaagtacagatataagtgaaccaaatacctctgacaaagagtgaaaacaatccactatgtaaagggggagaaagaaaggacta

SEQ ID NO: 482128 - DNA, 473 bp, Homo sapiens
aaaacagagctcctcgggatcctggaggtgaggagctcatggtggctcaagatgaagaacctactgctgcttccccctagacccacagccctggacaagcagactaaggaaagtgaggcactactgggggtggggcctgcagatccccaaatgcttcgcagcacactctacggtgagtgacaggttgcagaataacctccagaatccctcagggcatggaacgaaagtctgctctgacctcagagctgattcccctaggccccaccctccacagctcctgaagcccttgcagtcgctctgcgatgtctgcatgggtgagttgttcccacggcagaggttcctgcctgcagacactgctctccaggaagctccttgcaagccttggggaagcacccgagacaggggcacagttactctgcacattgacaamcagcacagtctgcaccagggctcctcaacctttttgaggtcgg

SEQ ID NO: 482129 - DNA, 600 bp, Homo sapiens
cacaggccagtcgttttatggaacagtccctggtgtgtttgcaattctcacaattacagcaagagttttggctaagatgtgaaagtgcctggatygggtaggtggctctgctgcttgactcttggtggggaggttgggctgtggcccccagtgccctcttctcttcctcttcagcctctcaagtagctttgacaacgacattcccagagcccccccctcccttcctctctgtgtccagcccggaccctctcctggctccttccaaccatggaaactctcctccgtccctccccagggagagcttccccacactcaagaactctgctcttggcgtccagcgccgaggatttcagtagctcacagagttgccagatggctgctgggggtggcggtaggagaggaaaaggtgctgtatgagcgggaaattctgtctaattccaagaggggagctcctcatcaccaagccagaagctccccatcaaggatgtgggactcttgtgttctttggtatgtgcagatagtcccacccctctgcccacctctataccctgggggcaacacgcaggctgggggcaaaaggtggaaagggagaagctcctc

SEQ ID NO: 482130 - DNA, 600 bp, Homo sapiens
cacaggccagtcgttttatggaacagtccctggtgtgtttgcaattctcacaattacagcaagagttttggctaagatgtgaaagtgcctggattgggtaggtggctctgctgcttgactcttggtggggaggttgggctgtggcccccagtgccctcttctcttcctcttcagcctctcaagtagctttgacaacgacattcccagagcccccccctcccttcctctctgtgtccagcccggaccctctcctggctccttccaaccatggaaactctcctccgtccctccccagggagagcttccccacactcaagaactctgctcttggcgtccagcgccgaggatttcagtagctcacagagttgccagatggctgctgggggtggsggtaggagaggaaaaggtgctgtatgagcgggaaattctgtctaattccaagaggggagctcctcatcaccaagccagaagctccccatcaaggatgtgggactcttgtgttctttggtatgtgcagatagtcccacccctctgcccacctctataccctgggggcaacacgcaggctgggggcaaaaggtggaaagggagaagctcctc

SEQ ID NO: 482131 - DNA, 624 bp, Homo sapiens
ccagtaggtgtgaccacctcctcacacacaaggaaaccaaggtcagggtcacacagctttcttgtcactgactgcctggagttctctgaggcctgtgtgccatttttagtgtgatttattttgttacatttcactttatgcattcttttcattacatgcttttgaatacatgattgttgcatatggtacttgtttagtaggataaagcaaacttactgttttcttctaccctatactctctctctttttttttttttttttttttaaagacagatcttactctgacatccaggctggagtgcaatggtgtgatcatggctcactgtacctcctgcgttctgggctcaggtgatcctcccacctcagcctcctgagtagctgggacaacaggcatgcaccatcacacctggctaattttttgtagagagggagttgcattttgttgcccaggctggtctcaaactcttggactcaagtgatcctcccgcttcagccttctaaagtgctgggattacaggcgtgagccactgtgcctggccctactttatactcartacaacacaggtcatttctgtgaccaaatgtggggttttttccgcgactcacaaccagttctctgacacc

SEQ ID NO: 482132 - DNA, 505 bp, Homo sapiens
gcaaccactcttctattttctgtttttatgaatttgattacgcaagtacctcatgtaagaggaatcatacagtatttgcctttttgtgtctggctcatttcacttagtaaaatgtcctcaaggcttatccatattgtagcatgtgtcagaatttccttccttctgaaggctgaataatattgtattgtatgtatgtatatgtggcattttgtttatstgttcatctgtcaatggacacttgggttgcttctacattttaactattgtgaataatgctgctataaatgctagtgtactaatacctctttgagaccctgctttctattcttttgggtatatacctggaagtggaattgctggatcatatggtaatatctatttttaaatgttctaattttaacagagtgatctgtgagggttctttcctacctggcctttcggtttccccccgagagctgaatgaattgcattttttcgcttcttcccgtggctgcagggtacccaa

SEQ ID NO: 482133 - DNA, 505 bp, Homo sapiens
gcaaccactcttctattttctgtttttatgaatttgattacgcaagtacctcatgtaagaggaatcatacagtatttgcctttttgtgtctggctcatttcacttagtaaaatgtcctcaaggcttatccatattgtagcatgtgtcagaatttccttccttctgaaggctgaataatattgtattgtatgtatgtatatgtggcattttgtttatgtgttcatctgtcaatggacacttgggttgcttctacattttaactattgtgaataatgctgctataaatgctagtgtactaatacctctttgagaccctgctttctrttcttttgggtatatacctggaagtggaattgctggatcatatggtaatatctatttttaaatgttctaattttaacagagtgatctgtgagggttctttcctacctggcctttcggtttccccccgagagctgaatgaattgcattttttcgcttcttcccgtggctgcagggtacccaa

SEQ ID NO: 482134 - DNA, 278 bp, Homo sapiens
tgctgaatgaataaatgcattaaatattttaatttttttcctcttgtactatacccaagtaggaggtatgatgtcaactcttgtcaattaatgaattaatctgaacagctaagaagatttgagagaaacacatgcttttgtaaggtctaagttctccacataaaaattagtgccatataaaagagagtcctgttaaatgtaagctcatccctgctgccctccytagctcccaatacaataaatgaaacgtacatttctgttggctcctatttgctggt

SEQ ID NO: 482135 - DNA, 603 bp, Homo sapiens
gggatgccctagccctctataggtcaaacttagtttgtcaggagttctgtagcaagctcttagctgactttcaaatcagtgtaaccagtagtagtgtcaagatagctctgagtccaaaaggccaaagaacacctctaggtggaagctaatcctttactggaggctccaaattttaaaatcaagattttcttgacctcaggatgaactgatcaatgcaaatctccccaaatattttcactaatccttaattggaaagtaagactccagattttttaaccttcactaaaaataaatatctgattttttttcacctggggatctatgtatgtktgttggagcatgcttttactaatcagcataaagttacaactctccttgtgcctctattttctacttgtgcagagtttaaagtacacaggtgacagcttacggttttctgggtcttttgctaagcatgtacctgaccctgagcatccccatttccccatttctttgttgatctcaaagaccattatcacagtcctaattcccaggagcttttcctcctagagctttttggcatgattattcttagacccaactgatatcctttgttcctggtga

SEQ ID NO: 482136 - DNA, 503 bp, Homo sapiens
tttttgttgtttgtgtatgctttaattactttctctttttctttactatgtttttttttccccagtggttatcatgagacttatgtaaaacctcttgtattttaatagtctagtttaagatgataacaatttakagtattctgaatttcagtatgtatttaccatttttagtgacatttatactttagtatttttcatattgttagttagcatttcgtcatatcaatgtgaagatttcttccagaccatggctggagaaggaaagaaggtgtgttttgcctgattcagggactatagagagaaccaagttctgcaggcctgtcacctaagtctcagatgagtatgaattctcttgtgtttttcacagatttttgcagtggcaggaccaagttcaaatgagttatagccaagtctacagtaagatgtggcagtattctgttttgaaccgaggaccatgattggcaagcttgccacttggtcaagtgcttaccctctaaagatgt

SEQ ID NO: 482137 - DNA, 537 bp, Homo sapiens
  misc_feature (1)...(537): n = A,T,C or G
actctcctttatgtttcactttctcaaatgaatgtcaagctggtgatttttagattcaaaaattctaaaataaattgctcaaatttccacattatgtaagctattaataaaatgtcttgtaggtgctacatatttattaaaatttttggttgtaattttaagctcactgcaggcagaaaggaatcattaacatttatattcttttytttagtctgtatctaaatgatggcatattttaattccagatatttactttatactgcagtaatgctcgtcatattttgcaaaatgtatgttgttcttttatttggaaatataaggcttttttagctcctgaaatctatattnatagtcatataattttattatgttttgtggtaagaagtgcagcaacatattgagaacataataaaattatcctgtatttttaatgattatttattaaattcctctcattagagcctgttattaatgattgtaatgtattttctgtataattttactgcaatttattaaattctaatgacttaaattgtc

SEQ ID NO: 482138 - DNA, 470 bp, Homo sapiens
ctgtgctcttctcgctatgctttttcggagatgtattctcacacactcccagccctttggtcactgggctgccctttggtcacagggctgcagcactacartcctagcatgcatgggactgagggagcatgcgctaatcagtggaggaaggagcgaggctctgcacgcctctctgggcttggtggaagatgcagtctcataaacactcacagcccttttgtcacagggctgcagcgctacaatcctagcatgcaccgggctcagggaaagttggcgtcactggagaaagaggcagggttgtgtgcacctcctgggcttggtaggagatgtagtctcataaacactcccagacctttcatcaccgggctgcaagactacaatcccagcatgcacccggctcagggacagtgcgcattactggaggaaaaggctaggctgtggacgcctccttctgcttcctgggagatgta

SEQ ID NO: 482139 - DNA, 303 bp, Homo sapiens
ggatactgggcttagtacctgggtgatgagatgayctgtgcagtaaaccacagtggtacgcatttatgtatgtaagagacctgcatactctgcacatggacccctgaacttaaaataaaacttgaaaaaaaaatgtgtttctggtggattctctatgttagacccaaactgaggatcttgaagctctcgctgggggaatcggggctgggggcacactggggagccgctgccaaggccatccaccctccctacaagccacctcccttcccggccagtatggaaaggagaagggttatgtgaaca

SEQ ID NO: 482140 - DNA, 627 bp, Homo sapiens
ggaaaaaagtctaaatttttttagcaaaaaaatacacctatggctctagtcacttgggaaattatgagggttgtaggagctgggaaccagaagctgtgacaaaagccagaatatgtattttttattatatcacaatagcacaactatwttacataatatagagtcttcaaagaaaaggaagagagcattaaaattatttgaagaagtattagctgagttttctaaatgtttttgaaaatataagttgacatagtcaaaaaactcaagaaagcaccagtcaggataaatacaaagaaaatcatatcagggcatttcataaccaagtttatgaaaatgagaaatcttaaaagtcaccagaggaaaaatactcatgtacagagtaaaataactaaaaagtaataaagactcacatgaaactacgcaagccagaagacgatggaacatctctagtgtgtagaaaggaaaggaaaagagactgttgatctagaattctatagccagtgaaaatatccttcaaaagtaaagacaaaataaagaattttcagacaaattttcattatccctagcatacctgcattataagaattattaaacaaagttcttctagctgaaggaaaatatcagaca

SEQ ID NO: 482141 - DNA, 286 bp, Homo sapiens
ccagaggctgccagtgaatggctggtcagcagcatkgctggccttcctccttgcaggatgttcttgtataaatccagcagagccttggtgcaactcacttcttctgaatgcctactatctgcatgcccctgaagacacaaagaaccccagaaaaatggcaataaaacataattaagaaacaccaggacaatcttcactgcacagtgggagcccagaaggaatgatcatctctgtctacaggaacttgttcccagagcaaacaggcacctgagcaacccagatgggt

SEQ ID NO: 482142 - DNA, 573 bp, Homo sapiens
aaaatagagctcacctgatcacttacacaagcttccgtgctaatgtggcaacattatgtaaaataatcgacatccatgtggctcagaatatatttatattttcagattatcaacacagtttttttaattaaacaaatttaaactactaagagttagcttgaaatccttagcgacttgtgaacctccagtttaagaaacccccagttaagaaacattgttataaatggaaaaagagtcagacagactggattcaaatcctgtctcaactccttattagttgtgatctgacatgttcttaaaatctctatgtctctgtttcctcataaaaaaatagatagtaatgyacatatataattcattggttcgaaaaattcaatgacgaattcactaattcagtaaatacttattgagaatttacaatgtgccaagactgcttctaggccatggacatataccaatgaacaaaagggggtaaaagtccagtaagtgaagacagacaaagtacatatatacatacataatgtcaggtggtgatatggactaggaagaaaaaaagcagggccaggagacagg

SEQ ID NO: 482143 - DNA, 566 bp, Homo sapiens
tttgttatcttcaaatccgattttttggtgactattacctacaattaccaggtaactcattgcaattggaaagtaagttctcagatttcaagacatttacagtattcttttgggacatcagcttctccaacagaatgcatttgctgatgtatataaataagacctcaaagctctattgaaatggaagagttccgtgacccccctttcaggatgtgcaacaggggtgtggcttgtctgtttggctgccactgctgctcagacccctaaggggaagaggagcacacagatgggcaagtgcaggagccagggtgagcagttttgggctccagccccaaagtagcatctaggggtgggtgcctgcaactcccaaarccccagtgggcatgctacagagctcttttagctctgccatctatagatgatctaagtgttaatcagctcagtgccctcttagtaccgagttcttgtctggtgtctggcaaccaggaagaatcaggtcacacacagacttgaaggatagtgaatgcagaggtttaactgagtgacggaggtggctctcagtggga

SEQ ID NO: 482144 - DNA, 400 bp, Homo sapiens
gcttcacagtgctggagggatgggatgaatgaggaggaggcaacagctaggaggccaaccccaagacttgaaattgtgsgtttgcaaatgggtgcttcaggtgacaccctggccacaccctcacctacacacagactcataaacacctatcctgcattcctccctccacctttctttccaaagaaatcttggattcattggcccctaagtgaaaaaaactggggggaaataagggagtgggggcaaaaaaatgaggtcttcctgcaaagacagttcagaagaattgttgcaccgagacctgaaatgacaaacccaaagccagagccaactgctgtagacacagaaccaggaagtgtgaattattaatgagtgtcattttggtgctagaaagagctattac

SEQ ID NO: 482145 - DNA, 633 bp, Homo sapiens
tggcttgctctagctaattaaatgtgagcagaagtgacatgtgttaatccccaggagaaattttaagagtagtgcacaatttgccccatttcctttcccttgccacagcaattacaaaaacagctgttgggatagaccctccttcagcctgggttcttgaatggtgagcaggaggcaaagatgaatcacttcttgctactttaagtcactgaggtttggaggttgttattgctgcataatctagcctatcctaccaacrcaggcattaagagatcatctggatttgtccacagaacaaaaatacaaatgaacaagggtattttggtaattcaactagaaatcaccttgtttgtcgaatttcaaaacaaatattactgttaatagtttgaacagtaaattcttggcacatacatgccaatcagctttttgctatggtaaacaagctgcttgagaactgtgtggttaaaagttgtgtacatattcttaattattccttaaaactaaattctttgaaatggaatttctgatctagcatagcatgtaagccaagtttagtctcttgttacatactctcaaatcccctccagaaaacatgcaagaatttaaacttccagtggcgatctatgtagtgaa

SEQ ID NO: 482146 - DNA, 390 bp, Homo sapiens
tcactcaacatcttctgttagttatagctgtaatttgcactagttgtcaatgccagttttgactttcctagtcaataaagtgttcggagagtggygactaaggctgagcactacccataatcatgagtattacagaggcaagcccccttgcccacccacctgcaggtgatgacacaccctaggaaatcactcaattctttggaggaccctgaataaaagctcaagtccatctgttcatctgtccgtccatccatccaccattccatccatccatccatccatccatccatccagacatgcatacatccatccacccacctacccatctatccacccaccacccacccatctatccatccaacccactctcttatgcacccagctatcatc

SEQ ID NO: 482147 - DNA, 571 bp, Homo sapiens
ctggtccttcaagtagtagttcaagtgcctgccccaccccaccccactcaccaagcactctctggtttttgtcctcacctcctcatgttaagttattaaatgcccgtgcatgctcattgttactttatttgaccttcttcctgactaaacaaggattccttgatggtaatgactatgccgtctaattttccaattgcctaatacagatgttcattaaatgtttgacaaatcaatgaagaaaaggatataaatgagccttaagtctctttcaacaataactggaattatttccttcttccctgatagtgtttttcctcattcaccacccatgcctataccttgtttcagcagcatgggagcatattagaaaatgtcaggaaaaaatcactcccaattatctgtttcttatatctaaaaatagttaagccctcttgggtagcttttctctggaatttgaaggccaattaatatttcaggctatacctatacacttamcagtatataataaaattttgcacaaaattccactaaggatcaaaagttgatggtcagagacacatctgagttggaa

SEQ ID NO: 482148 - DNA, 515 bp, Homo sapiens
cttagggctgggaggtgatgttcaagaagagccttaaaagatgagtaggattgcaaaagagatggagaaagaggacattttaggtagagtgaagagtaggagcaaaggcatggaattctggaaagcccagggtaggttaatagatgagcaaatagaatagttgggggtgtgtggaggacaaagtttaggtggaacccgatcctccaggactttgcaaccaagctgagtagaagttgctgaagatgatctcattggcttctgggaagtttggggtaaatttgcaacactagagagttctgctgactgtgcacactgttggccatggggtgtctggataatgtggggacaaaaacagatgcttcttctttccaactctcacatataccaggtcactktaccttgatactttctccctgagaccaactccctgtctcacatgagattttataagctgcctttttgggacactattcacccttcttctcttgagctctttagccagcatttactgggca

SEQ ID NO: 482149 - DNA, 630 bp, Homo sapiens
tggaacttctgtggatcccataggcagcagacaaacgtccagttattttttgggaaagtctccttttgcctttccttcgtcaacataaaggggcgcagacgcggacctgcctggcgaytggcaaggtgcgtttaactgtctcccattgctccttttgactgaggtcttccagagtccttttctcccttgcattcttggtcactagccctttctcgccaccgctctgtgtcacgtctgctcaccatggcagcattgggtacacagagaagttaagtaatatatttaatttttaaaatatttcaaatttttaattgacaaattaaaattgtatatatttatgacatacaatataaggttctgatatatgcatatattgtgaaatggctaaatcaagccaattaatgtaggcgttacctcactttcttgccatttttggggaatgagaacagttacaatctcttaaaaattgaagggatttatttttatttgcaaaataaaagtcatttggcagcagaactcaggttagtggggctacctgtatatggctccccagttgatatatatggaaagacagaaatgcagagcttcactagggacaagggactgctctttaatccctgtagagaagta

SEQ ID NO: 482150 - DNA, 532 bp, Homo sapiens
gccctgtctgaggaattgaatatgaaagtcaaataatactcaagtttctggattaagaaatctatgtagcacctgtttctggtatatggtggtgccacttatcacgctgttatatggtggtgccgcttatcatgatgggaagcctacagagagaatatctttgtagggggtggaatcaagatttccatttggaggctcattatttgaggggaatgtccagttgaacacactaagtacacatggttagatatgtgattgtacccaagctcaagaagaagtctgattgaagacagatgtgctatgtgtgtttagakaatgaggcaattaattcagatgagggcaatatagaagagttttaagggcacactaaattcagcaaagagcataggcaaaggagtagagagtggaaagaggaagagtttgagaaatgcctttctttgtatgatgaaaggagaggattgatgattagtgattttaaaaggattgcacttctacatccttctccagagaaatttaagtaggggaagggacc

SEQ ID NO: 482151 - DNA, 644 bp, Homo sapiens
attccttgctatctgagagtgaaaagtagagggtaaggggtcaactagacaatgagagtgggaaagaaagaagatggttgcattcatagagtttgaggatttttctagtaatttagtataaaggaatgaaagtcaagaaataggaattcagctgacctccgtgtggctggcttggggtagaaacactctccatgtttttttgcaacttctgtgtaatccagtgttcttattcagaatctaattgctgagttgcccccactgtttctgttttcctagctggaaaaatagataatctgctctgaggatcagagggcaactagaaaattctctgtggcctacagaatgtgaggctgcatgaagcaaaacaatgaaatattgtaaatgtgggaggcaagcaaaattaaatagaaaaatagttactctaacttgggtatagcaatagcagtaattccaagcataagcaaaaaggaactccaaagaccaattctttctatttttctctcttgtgtatgagaaatattataacaatgatagcaataataatgatggcagstaccgcatggtattttgtttccaacacctgtacaagctagaggctagcagggaaaaacacaattaagaactctggagtgagactacttagg

SEQ ID NO: 482152 - DNA, 642 bp, Homo sapiens
caagttacttcaattgccctatatataaaatggtataataatagtacctatatcttagggttgccatgaggattaaaggaattagtacatgtgaagttcttacagcagtacccagcacatagcaagcacccaataactactggaagctattattgtaattattgttatcatccttattttatagataaatgagttggcattcaaaaagggtaactttcccaaggtcataaaacacagatggaagtggatggtatgttgaaattcaaagttctggggcagtctggttcttgacattatgctcacatgtctcctacttagtaaatacaactyagggatttaggccaattcatcagttctatcagatccaagtgtgtttaaaaatagtgtcccagggataaaagtcctagcaataaatgagaatcatggataatcaaaaacaaatgagggatttaataagccaatataaatcctaatatgagggtttcaatttattcaggcttcattctgataataatcccttaactcgccctgaggtaacaaaacatcaaagagtaaaacatgcattctacatgaagagatctttgaacctaacttgaaaaatcagtttaggtcacttttgtgtggtcatatataaaaacattt

SEQ ID NO: 482153 - DNA, 643 bp, Homo sapiens
agctaggtcttatttccactttacagaaaaaaaaaaaaaaaaaaagctgaggctcagagaggtaaacaatccaatgaaggccacacaggggctagaatttgtttattgccattcattgcaacatttgctaagctcctactggacaccatgctctggacgcagctggagaaaaagtccaaactcagcttctctcctccgtggttgtagcaactcctgcgtgcttgcagacccaatggagggtagtgtgaccgttgcttcatgaggagggctcccagcctgatcagcaccaagcctgccragagcctggtcttagtctttcacccaactgggctttgccattcaattcttagcttccactcttgtgaccatccctgactggcaggagccagcccatgattcaggttggagagtagaatttaaagtagttcatctatattctagtgaccctggaaaatttaaggagttctccctaaactctgatttctgagaggcaacatttaaacatagctcttagacaatgccatgaagctagaccacctgttactcattacaagtcctaccagctccttctaagggcttttctagtgtgtcgtttgggcttgattaagaacaaaatctatggtctcagagctaatgattcaag

SEQ ID NO: 482154 - DNA, 643 bp, Homo sapiens
agctaggtcttatttccactttacagaaaaaaaaaaaaaaaaaaagctgaggctcagagaggtaaacaatccaatgaaggccacacaggggctagaatttgtttattgccattcattgcaacatttgctaagctcctactggacaccatgctctggacgcagctggagaaaaagtccaaactcagcttctctcctccgtggttgtagcaactcctgcgtgcttgcagacccaatggagggtagtgtgaccgttgcttcatgaggagggctcccagcctgatcagcaccaagcctgccgagagcctggtcttastctttcacccaactgggctttgccattcaattcttagcttccactcttgtgaccatccctgactggcaggagccagcccatgattcaggttggagagtagaatttaaagtagttcatctatattctagtgaccctggaaaatttaaggagttctccctaaactctgatttctgagaggcaacatttaaacatagctcttagacaatgccatgaagctagaccacctgttactcattacaagtcctaccagctccttctaagggcttttctagtgtgtcgtttgggcttgattaagaacaaaatctatggtctcagagctaatgattcaag

SEQ ID NO: 482155 - DNA, 636 bp, Homo sapiens
taacaaattaccatagatttagtggcttaaaacaagacacatttactctgttacagttctggaggtcagaagtccaaaacagatcttactgggctaaaatcaagattgaccaagatgtttccttctggaggctctacggggaaatrtattcgtcttttccagctcctcaaagccacctgcatcccttggctgtggcccttctcccatctgcaagaatggcagcatagcatcttcacatttctctctgactcgctatcttccccattataaggccccttttgatgacatgaggcctacttgcataatcgaggataatcccccatctcagtattctttcttaatcacatttgcaaagtcccttttgtcatgtgaggtagcatattcataggtttcggggattagggtgtggatttctttaggggggcagttattctgcctatcagaagatcaaagaattaaataatatatactatcatgcattgttgcccaaaacgtaaattaggataacatttctgaagggcaatttagcaatgtatatcagtattttcaaatgatacctactgagctatcagtgctacttcagtcatgtaacctagggaaatatttggtcacagagatgtatgtactaggaaattc

SEQ ID NO: 482156 - DNA, 636 bp, Homo sapiens
taacaaattaccatagatttagtggcttaaaacaagacacatttactctgttacagttctggaggtcagaagtccaaaacagatcttactgggctaaaatcaagattgaccaagatgtttccttctggaggctctacggggaaatatattcgtcttttccagctcctcaaagccacctgcatcccttggctgtggcccttctcccatctgcaagaatggcagcatagcatcttcacatttctctctgactcgctatcttccccattataaggccccttttgatgacatgaggcctacttgcataatcgaggataatcccccatctcagtattctttcttaatcacatttgcaaagtcccttttgtcatgtgaggtagcatattcataggtttcrgggattagggtgtggatttctttaggggggcagttattctgcctatcagaagatcaaagaattaaataatatatactatcatgcattgttgcccaaaacgtaaattaggataacatttctgaagggcaatttagcaatgtatatcagtattttcaaatgatacctactgagctatcagtgctacttcagtcatgtaacctagggaaatatttggtcacagagatgtatgtactaggaaattc

SEQ ID NO: 482157 - DNA, 537 bp, Homo sapiens
gtcctcatttgcttatctataagataaagatttttaaaagtacctacctcataggggttttgtgcagataaatgaattaatatatgttaagcattcatgtgagttcctggttaattaagaatagattctatatttgagtgtttcagttgctaaaaatgcactaagagctggaatcaggtgatagaataggggacccagatggtcactagacatcatatatttttcactaggataagaaaggattttcttacagccgtgctgtgagaagttttgcgttttctctatatcttagtctttaaaactatggaaargaattgagtatgataatgcagttaccccaggtaaaaatcttctatgctttcaaacatgtgcgtagccatcaataagaaaaggattccttgctatctgagagtgaaaagtagagggtaaggggtcaactagacaatgagagtgggaaagaaagaagatggttgcattcatagagtttgaggatttttctagtaatttagtataaaggaatgaaagtcaagaaatagg

SEQ ID NO: 482158 - DNA, 537 bp, Homo sapiens
gtcctcatttgcttatctataagataaagatttttaaaagtacctacctcataggggttttgtgcagataaatgaattaatatatgttaagcattcatgtgagttcctggttaattaagaatagattctatatttgagtgtttcagttgctaaaaatgcactaagagctggaatcaggtgatagaataggggacccagatggtcactagacatcatatatttttcactaggataagaaaggattttcttacagccgtgctgtgagaagttttgcgttttctctatatcttagtctttaaaactatggaaaggaattgagtatgataatgcarttaccccaggtaaaaatcttctatgctttcaaacatgtgcgtagccatcaataagaaaaggattccttgctatctgagagtgaaaagtagagggtaaggggtcaactagacaatgagagtgggaaagaaagaagatggttgcattcatagagtttgaggatttttctagtaatttagtataaaggaatgaaagtcaagaaatagg

SEQ ID NO: 482159 - DNA, 629 bp, Homo sapiens
tatatctggaggtgatgcaaatccatgttataataaacacagtatttcttcttagtacattaccttttactggacaatttctggagtatagattaaaatttttaaatattatatttatattgaaataaaaaatgagctatcatatattttaatgcaaatttgatgataaaagaaagagataatttcatgaaatattgtattagtggtggcagctcagagtaagctcctgacttctagggcttgaggtcactctcttttcygattaagggaatatcagtaaaaatatctaagatgaaaagctttagagtcctaatcagattcagatgattgatccacacaatgaagtatttcttgcgcccttatcagtgccattaatcggtgctagacagggtgggtagaaaagccatttgcaagatgttgtttattttctttattccagtcctctagggttaccttgtagatataagagactaccaagtatgttataaatgccaactatcgatagtttaatatgcctggtatgtatagcttgataaaattaggtttgatccttatgttacagtagatccttaagggaaagtttattggatggtataactgggaagcacagggatgaagctgatcagagg

SEQ ID NO: 482160 - DNA, 629 bp, Homo sapiens
tatatctggaggtgatgcaaatccatgttataataaacacagtatttcttcttagtacattaccttttactggacaatttctggagtatagattaaaatttttaaatattatatttatattgaaataaaaaatgagctatcatatattttaatgcaaatttgatgataaaagaaagagataatttcatgaaatattgtattagtggtggcagctcagagtaagctcctgacttctagggcttgaggtcactctcttttccgattaagggaatatcagtaaaaatatctaagatgaaaagctttagagtcctaatcagattcagatgattgatccacacaatgaagtatttcttgcgcccttatcagtgccattaatcrgtgctagacagggtgggtagaaaagccatttgcaagatgttgtttattttctttattccagtcctctagggttaccttgtagatataagagactaccaagtatgttataaatgccaactatcgatagtttaatatgcctggtatgtatagcttgataaaattaggtttgatccttatgttacagtagatccttaagggaaagtttattggatggtataactgggaagcacagggatgaagctgatcagagg

SEQ ID NO: 482161 - DNA, 573 bp, Homo sapiens
cctctttgttatgtttaatctttcttctaattttcataagtgataaggattaaattattaatgcatcaatttctttatttaacagctatttattgaatgyctactcaaatttaggtactattgcagattctgggaatttagtgaatcagaaagaaaagaaaagaccacccttcttctcataaaacttaaattcaagagaaaaaaataggtacaatacagataaaaaaataaacagatgaaaatgtaattttagacaatgataacctctagggagatgataaagtattgttccagggattggagtgcttcattgttcttaactggggtacttgaatgcctagggcttatatatatatatatgtatatataatctattaagtatatatatatatatatatatatatatatatatatatatatatacttaatagatttcatgaactccttgaaatggtgtagaaaattccatgtcaatgaatgtgtgcaatttgggcagaaagagttcctagcatgcattcaagtctcaaaggaatatgaatcttacaaacggcttggaacctttgactgatatga

SEQ ID NO: 482162 - DNA, 645 bp, Homo sapiens
catctcaatattactactgctcttattctctaaaagagaatgactaaacctatatgaatgactatggaagatgaattgtcaacattttattacagacttgaggctcattattttctatccttgtttctagaggaggtagatgagatattggaaaagaagttaacataaactcaaactaagcctactctaatactcacccctgacaaaattatactcaatgaattttgctgtttgtttttgtttaagactaagaagttttaactgtgaatacatacccattcttatatgtagattctgtcttgtgaaacttcaaaatctcytgtgtgtaggattgtggttctctttctgcccttctttgttcatctataaattgagagagaaatatttaggtcgttatttcccttccagctttcaaagctaatggttctattcccagggaagtagtatttacccatataccttctgaagtcagggccaatagatgcccattttgctactttaatgcctgaaaagaaggaaagaaatatctaggtgacactaacaattgcacttctataactgtgtttctgcttcctcttttgacttctggcaaaaagaaaccaggagcaactagccaggatgcagaggggttttttaaatcaactg

SEQ ID NO: 482163 - DNA, 645 bp, Homo sapiens
tatttgtttcagtattatttgcattctaatgaagacagtgggagagggcaacacttaacacagataaagaaaacattaatagtgggactgtaagcatagtgtagagaacatagtgtagtgtaacatttcagactgggaggccatgacaataccactcagctcatacaaattcaaaaaccactatagtgcctagacataagaccaacctggagaaaaaggcaacgttatctctagtattctactggtgtgcatgtgggtgtgtaggagatgtcatagcaagtagccttactagaaagcccttctgtttctagtacrcataagagatgaagttaaatgagcattgctcaggtgtctagtcggagaagacagtcagcattcctcattcctaaaaccatcattctgcttttatgctgataaacatagtaacattcaaagaggttgctgtttgggcaagctatagttaattcacaaatcagataaaggtctattctgtggactaactgctgggacttataacttcagtttcattgtttatgtgtttattgtctcagactccaatttctgagcttactcagtaatatggcatcactatttcctttgttcctaagtacataattctgatccagaataagtctttaaaaataa

SEQ ID NO: 482164 - DNA, 522 bp, Homo sapiens
attgatatttgcttaatacatgtcctcaaatgttgaatatgctttctgttcagaattagtatgtgtcctgactccatgtgggacattaatgccaatctgatagaataccaaaaggcagttgagtgttgtgctcaatggcaactagcactgmtgccctattgagataagctatttccataggtttatcatctaccaagtaaaacctctcaatcactaagttaaaaaagattaccaggcaaataaacattgtgtaaaatttacaacattttaatatatagagatttaaataatatatttattctggtattcaatgtatcttttgactgggataagttttcttttcctaatttctctgatttcttgctatgcaataatccagaacacaggacatttaagtaatttaccacacataatccccagatgaggattattgattttgaacaaatgattgaacacaaactgttttatgaaaaatttaagttaatttttgaaattaatttcatagttactggcatttgtttt

SEQ ID NO: 482165 - DNA, 479 bp, Homo sapiens
aatagctataactcatcataccaagaagtagaaactttcttaaatttggttcatgtaacataacaaaaagctgtcaacttctgttaaaggcaaacctttccaggaaaattttatactcacctgaaattactaacttcatwttcatgctgcagagagataccaggtttttaactagaaaccacatcttccagattacagcatatgctgctggggcactggcaggctggctgggagggtgacgtctgtcacagaaaggagcccagactctcacttgggctggactcttcttttccggtatcaactgctgttcaattggatgccattttatccttgtcctttagaaaatgattgtgcacttttctcctgtctcagaaacacctatgagatgatcttgttaatgcaattctcaatttcacaatgtaatacaatatggctggtgtgatgttgttcatgttttggctgaatatgcaacattacca

SEQ ID NO: 482166 - DNA, 613 bp, Homo sapiens
gagttgcaggcaaagcagattcagaagaattcagtttgtgaaaagtgcctgatattcttaagaaatgaaaatgcatctcctgggcaccactcacttgtycttttgctgactttttcctgttataaagattagctaaggtctagttggctgtccatatctggaacactgataaatgaccactgggtggaattggattgtaacacagctactcaagtagtaaccataggaataaaagaaaaaaattgggaccaggaaaccagtcatcattagaacactggtgaggctgatagatcgatagcagtcactaaagccttcgtgccagaaggcctggtgtcccatgcaccacgggcatccttaaggctgattcacagcactttagtctgacctcagtcctacctccaaacagcctggtcttcattttagtttctatcttgggtaaaccctcatcctcagatgtgtttggattctgtttgctttcctcctctgcccctacatttacctctaggacaagaggagttttgaaaagaagcctgctttttttttttttttttaaatcaacttctgttcccaagtgttgaaatttgctaaattgcctattcctgtctggctgcat

SEQ ID NO: 482167 - DNA, 571 bp, Homo sapiens
attcagtttgtgaaaagtgcctgatattcttaagaaatgaaaatgcatctcctgggcaccactcacttgttcttttgctgactttttcctgttataaagattagctaaggtctagttggctgtccatatctggaacactgataaatgaccactgggtggaattggattgtaacacagctactcaagtagtaaccataggaataaaagaaaaaaattgggaccaggaaaccagtcatcattagaacrctggtgaggctgatagatcgatagcagtcactaaagccttcgtgccagaaggcctggtgtcccatgcaccacgggcatccttaaggctgattcacagcactttagtctgacctcagtcctacctccaaacagcctggtcttcattttagtttctatcttgggtaaaccctcatcctcagatgtgtttggattctgtttgctttcctcctctgcccctacatttacctctaggacaagaggagttttgaaaagaagcctgctttttttttttttttttaaatcaacttctgttcccaagtgttgaaatttgctaaattgcctattc

SEQ ID NO: 482168 - DNA, 563 bp, Homo sapiens
ctggggaggacagactgtgttttttcgggggrctagggagggagcaggtagattgatggtcctgaactgggtagctaaagatttttcagatgccctttgaagcaaggcttttaaatatccccgcattgaatttagtaaaaaagaaaaaggtgtaatcatcaaatcctggtttgtggctccacaatgagagttaacactgagtcacgagcttatggtaatgatttcaggtcagatacatcatgtgtgagtcttctataaaggggtggttccttagatgaaataaaaatgcatccacttaattgaatatagaactgtctaggacttacttgatgatgcaatcttccagaagtcctgaaaaagccatcctggaggtgtcctttccatcattctgggtagagagacaaggacatgtgtgtcctgtctggccaagagagtaagacacaatgttttgacttatttgttaatgaaagtatttccttagccgagatgcagcttgggatcctggagagggcaggattccatcaccagacaggtgaaaatgtgtgttcccatcccatcattta

SEQ ID NO: 482169 - DNA, 636 bp, Homo sapiens
ctgctggggaggacagactgtgttttttcgggggactagggagggagcaggtagattgatggtcctgaactgggtagctaaagatttttcagatgccctttgaagcaaggcttttaaatatccccgcattgaatttagtaaaaaagaaaaaggtgtaatcatcaaatcctggtttgyggctccacaatgagagttaacactgagtcacgagcttatggtaatgatttcaggtcagatacatcatgtgtgagtcttctataaaggggtggttccttagatgaaataaaaatgcatccacttaattgaatatagaactgtctaggacttacttgatgatgcaatcttccagaagtcctgaaaaagccatcctggaggtgtcctttccatcattctgggtagagagacaaggacatgtgtgtcctgtctggccaagagagtaagacacaatgttttgacttatttgttaatgaaagtatttccttagccgagatgcagcttgggatcctggagagggcaggattccatcaccagacaggtgaaaatgtgtgttcccatcccatcatttactacctgtgtgaccatagaaaatttactcaggctccaagaccagttttctcattagtacaaaggacacaa

SEQ ID NO: 482170 - DNA, 636 bp, Homo sapiens
ctgctggggaggacagactgtgttttttcgggggactagggagggagcaggtagattgatggtcctgaactgggtagctaaagatttttcagatgccctttgaagcaaggcttttaaatatccccgcattgaatttagtaaaaaagaaaaaggtgtaatcatcaaatcctggtttgtggctccacaatgagagttaacactgagtcacgagcttatggtamtgatttcaggtcagatacatcatgtgtgagtcttctataaaggggtggttccttagatgaaataaaaatgcatccacttaattgaatatagaactgtctaggacttacttgatgatgcaatcttccagaagtcctgaaaaagccatcctggaggtgtcctttccatcattctgggtagagagacaaggacatgtgtgtcctgtctggccaagagagtaagacacaatgttttgacttatttgttaatgaaagtatttccttagccgagatgcagcttgggatcctggagagggcaggattccatcaccagacaggtgaaaatgtgtgttcccatcccatcatttactacctgtgtgaccatagaaaatttactcaggctccaagaccagttttctcattagtacaaaggacacaa

SEQ ID NO: 482171 - DNA, 636 bp, Homo sapiens
ctgctggggaggacagactgtgttttttcgggggactagggagggagcaggtagattgatggtcctgaactgggtagctaaagatttttcagatgccctttgaagcaaggcttttaaatatccccgcattgaatttagtaaaaaagaaaaaggtgtaatcatcaaatcctggtttgtggctccacaatgagagttaacactgagtcacgagcttatggtaatgatttcaggtcagatacatcatgtgtgagtcttctataaaggggtggttccttagatgaaataaaaatgcatccacttaattgaatatagaactgtctaggacttacttgatgatgcaatcttccagragtcctgaaaaagccatcctggaggtgtcctttccatcattctgggtagagagacaaggacatgtgtgtcctgtctggccaagagagtaagacacaatgttttgacttatttgttaatgaaagtatttccttagccgagatgcagcttgggatcctggagagggcaggattccatcaccagacaggtgaaaatgtgtgttcccatcccatcatttactacctgtgtgaccatagaaaatttactcaggctccaagaccagttttctcattagtacaaaggacacaa

SEQ ID NO: 482172 - DNA, 328 bp, Homo sapiens
gaggaggactggatccgggtcctgccccatctaagggaaagtggcgactggagccgcagtgatggtggccgcctattccctggggaactccgtcttcttaggcagtttgtagtccactgtgctgacasacagtgatgccaagccagtgggttttagcttgtggagttccataggagcgatgctacctgtctccctggcttcagccccctccccacgagagtggatggatctcttgcctcatgggagttcccagagctggagtatgtaaatactcctgtgtcagtgcctgctcaaaatggccacccacaggaacagcccaccggagcag

SEQ ID NO: 482173 - DNA, 587 bp, Homo sapiens
catgggagttcccagagctggagtatgtaaatactcctgtgtcagtgcctgctcaaaatggccacccacaggaacagcccaccggagcagctgccatgattcttcacagccttgtgctttggacccaaggctctggtagtgtaggctcaggaggggcctcctaatccacaggttgcaaggatcmctgggaaagccctggttttcagggaggggaagcacaatccctcaccgtctcccttggctgggggagggagttgcctttgctgcatgcagcccccaggtggggtcttgctctactctgtttttgcttgctctctgtgggtcacgccaaccacctagtcagttcctataaaaagaactttggtacttcaattgaagatgcagagttcactcagttttgtccttctttgtgggagctgcagagtggagctgcctctattcagccatcttagttccaccccaagaagacatttcaagtctaccaacttaccaaatgttttaacttaatattattagtaaagggacaattaatatcatttgccttattttagaaatgactgagactacctcatcatctatgtaacatt

SEQ ID NO: 482174 - DNA, 518 bp, Homo sapiens
gaacttaactattctcacataatgggtgagatcattgaaatccaacagagccagtgggtgttatagttggaatcmaacccagtctgacaggtgaaaactgagctccactcagtgtgataatacagttcttgtaaccacatttatataacaaaaccctacatggaggttttacaagttgattttattttgggaaacagaaaaattaaatctgacgttaaacgtgttatgtccttagttatagtgtttgaaaatgacatgatttcatgtcaactttcagtatgtactatgttcataagaattctagcctgtggaggggaacagatttaaaagcagtgttggggagaaagaagtactagggaagaagagaaattatatggttctttcttttcctaccttttagagaatgtacattccatttctcaacacagcagcaagctgacaacctgtgcttcctatgttgaaaacctcacatgctggacaaaaatggctaagtattggttaattccatgtccactcca

SEQ ID NO: 482175 - DNA, 518 bp, Homo sapiens
gaacttaactattctcacataatgggtgagatcattgaaatccaacagagccagtgggtgttatagttggaatcaaacccagtctgacaggtgaaaactgagctccactcagtgtgataatacagttcttgtaaccacatttatataacaaaaccctacatggaggttttacaagttgattttattttgggaaacagaaaaattaaatctgacgttaaacgtgttatgtccttagttatagtgtttgaaaatgacatgatttcatgtcaactttcagtatgtactatgttcataagaattctagcctgtggaggggaacagatttaaaagcagtgttggggagaaagaagtactagggaagaagagaaattatatggttctttcttttcctaccttttagagaatgyacattccatttctcaacacagcagcaagctgacaacctgtgcttcctatgttgaaaacctcacatgctggacaaaaatggctaagtattggttaattccatgtccactcca

SEQ ID NO: 482176 - DNA, 570 bp, Homo sapiens
accacatagttggaattaaagcactcctcagcaaatgtaagagaaatttaggaaaagacaaggcctttgggggatcttgaagaaattcttttcaggaattttttttttctagtgaatgagacatgtattagttccaagaggtgatgggtatttaaatgcatacttttcttgcccaggtgttctcttttgaaggtggtaagaactgaggctttcaaacaaagcacaggcaactgagtttagtgaaaaagtgttgggtaagaacaaaatgagctttgtgccatcgattcwgagattgatagtgatcaccaaaaaactcaaagagtggaataaactcaggtaagatgaatagagacagacagtggggctcacacagtatctactgtagcagggcaacctctatggcctcaaggtagtcaatagggctctgtctgggtatttagaatattgttaatcagttaatgagtctgctgcctttgaataatgacatttatttgctactttcctcaggaatattttattaaattcctactctgcaccaagcacagagatgctagagatagtgtggggttc

SEQ ID NO: 482177 - DNA, 478 bp, Homo sapiens
ctgttagttctatagaactgaagagcaagaattactataatattacttgtcatgatgattttcccttagcagatgctactttcaagaaaaatattgattcattttttttttttttttttgaggcggtttcgctctgacacccaggctggagygcagtggtgtgagctcagctcactgcaacgtccaactcctgggttcaagtgattttccttcctcagcctcctgagtagctgggactataggcgtgctctaccatgcctggctaatggggtttttttttgttttgttttgtttttgtatttttaatagaaaaggggttccactatgtcagccaggctggtcttgaactcctgacctcaagcaatctgcctgcctcagcctcccaaagtgctaggattataggtgtaagccaccacacctggtcaagaaaaatattgattcttaaaaaacagttacacatgcaactagtatgttctac

SEQ ID NO: 482178 - DNA, 458 bp, Homo sapiens
agctgcatctagaaaggaattttgagatttacttttctcttcattagagagcagaatgatctccagtacttccaaagagttttacaactaatatatggctcagccagattaaagccatccatggagaatctcccaaaagacagattcaatcattgttcaggttactgaagtcagtgccatgcrtgttaaaactcatcttgactttttttcctgtttctccatagagaagacccattcttttccttccacgcttctatgtggctgttctaataaatgtcatcttgagttagcagcaactacatttctcactgtaactccaagtaaggcgtagttaaatctatggggaatcacagacattaatgtctactatttgcatgataaagatcaagattaaaatcttggtgccacacaatcaattctcttccatttcaattttttggtgtcatcttaagaacatt

SEQ ID NO: 482179 - DNA, 458 bp, Homo sapiens
agctgcatctagaaaggaattttgagatttacttttctcttcattagagagcagaatgatctccagtacttccaaagagttttacaactaatatatggctcagccagattaaagccatccatggagaatctcccaaaagacagattcaatcattgttcaggttactgaagtcagtgccatgcgtgttaaaactcatcttgactttttttcctgtttctccatagagaagacccattcttttccttccacgcttctatgtggctgttctaataaatgtcatcttgagttagcagcaactacatttctcwctgtaactccaagtaaggcgtagttaaatctatggggaatcacagacattaatgtctactatttgcatgataaagatcaagattaaaatcttggtgccacacaatcaattctcttccatttcaattttttggtgtcatcttaagaacatt

SEQ ID NO: 482180 - DNA, 482 bp, Homo sapiens
cccatttgaatgggcgggtgtgtttagaagcagtatctacaacaagactatttgtattcctacttttacataaataatctcatttaaatttttataatcaccctttgatgtaactatagttccaggtattataaataaattgagatgatgtctcccctgtaatttcatcggatattaccyctagttctttactgtgagaactcagtctctggtgcaaatctccttgaggaacacagaagcaaccaaactctttggtgtttctattttgtttgtatcaactaaaacttgtggcttttacaaattgataaaaaaagagagacttataaataaattaataattcaatgaattttgcttgctctagttaacgtaaatgaagagtcaaggtagtcttaggaaaatccagaatgtaggattattctatccattttcctaagacattctatgtctgtgtggaatcatgataaattagacagcattttaa

SEQ ID NO: 482181 - DNA, 482 bp, Homo sapiens
cccatttgaatgggcgggtgtgtttagaagcagtatctacaacaagactatttgtattcctacttttacataaataatctcatttaaatttttataatcaccctttgatgtaactatagttccaggtattataaataaattgagatgatgtctcccctgtaatttcatcggatattacctctagttctttactgtgagaactcagtctctggtgcaaatctccttgaggaacacagaagcaaccaaactctttggtgtttctattttktttgtatcaactaaaacttgtggcttttacaaattgataaaaaaagagagacttataaataaattaataattcaatgaattttgcttgctctagttaacgtaaatgaagagtcaaggtagtcttaggaaaatccagaatgtaggattattctatccattttcctaagacattctatgtctgtgtggaatcatgataaattagacagcattttaa

SEQ ID NO: 482182 - DNA, 482 bp, Homo sapiens
cccatttgaatgggcgggtgtgtttagaagcagtatctacaacaagactatttgtattcctacttttacataaataatctcatttaaatttttataatcaccctttgatgtaactatagttccaggtattataaataaattgagatgatgtctcccctgtaatttcatcggatattacctctagttctttactgtgagaactcagtctctggtgcaaatctccttgaggaacacagaagcaaccaaactctttggtgtttctattttgtttgtatcaactaaaacttgtggcttttacaaattgataaaaaamgagagacttataaataaattaataattcaatgaattttgcttgctctagttaacgtaaatgaagagtcaaggtagtcttaggaaaatccagaatgtaggattattctatccattttcctaagacattctatgtctgtgtggaatcatgataaattagacagcattttaa

SEQ ID NO: 482183 - DNA, 605 bp, Homo sapiens
taattgatgtaattaaattagtttaactctgtcctttcccccttggagactattcccaggggaacattgccagcttggtatatgcagcattaagcttctcctatctccctccactccctgggtagcacatcctccagcatcaaacctacttttctttttgatatgctgttttctgttttcctcagttacttgctcagaggggaagcagtcccagttttcacagaacatatattattttgcaggtatagcaaataaacrtatttggtacccactgaatgctatgagattccaagaagggacagaatctttgctcaattgaaattactagaagccttcatggaaaaggtgagccaactctcctatgtaattatatctgtagaatagcaaccacatctctattctccttctgaacttaaacaatgtaagggttcatatcatactttgtgctttttaattcttaaaacagtgccttgcacagtgtgttgataaataactagtatttattgagcgattcctgtatgttagacacagagctaaatgtgctgtaggaaatatttaatcctcatgatagtcctatgacttacttgctattattattcccattt

SEQ ID NO: 482184 - DNA, 605 bp, Homo sapiens
taattgatgtaattaaattagtttaactctgtcctttcccccttggagactattcccaggggaacattgccagcttggtatatgcagcattaagcttctcctatctccctccactccctgggtagcacatcctccagcatcaaacctacttttctttttgatatgctgttttctgttttcctcagttacttgctcagaggggaagcagtcccagttttcacagaacatatattattttgcaggtatagcaaataaacatatttggtacccactgaatgctatgagattccaagaagggacagaatctttgctcaattgaaattactagaagccttcatggaaaaggtgagccaactctcctatgtaattatatctgtagaatrgcaaccacatctctattctccttctgaacttaaacaatgtaagggttcatatcatactttgtgctttttaattcttaaaacagtgccttgcacagtgtgttgataaataactagtatttattgagcgattcctgtatgttagacacagagctaaatgtgctgtaggaaatatttaatcctcatgatagtcctatgacttacttgctattattattcccattt

SEQ ID NO: 482185 - DNA, 605 bp, Homo sapiens
taattgatgtaattaaattagtttaactctgtcctttcccccttggagactattcccaggggaacattgccagcttggtatatgcagcattaagcttctcctatctccctccactccctgggtagcacatcctccagcatcaaacctacttttctttttgatatgctgttttctgttttcctcagttacttgctcagaggggaagcagtcccagttttcacagaacatatattattttgcaggtatagcaaataaacatatttggtacccactgaatgctatgagattccaagaagggacagaatctttgctcaattgaaattactagaagccttcatggaaaaggtgagccaactctcctatgtaattatatctgtagaatagcaaccacatctctattctccttctgaacttaaacaatgtaagggttcatatcatacttygtgctttttaattcttaaaacagtgccttgcacagtgtgttgataaataactagtatttattgagcgattcctgtatgttagacacagagctaaatgtgctgtaggaaatatttaatcctcatgatagtcctatgacttacttgctattattattcccattt

SEQ ID NO: 482186 - DNA, 603 bp, Homo sapiens
ttctatacatataggcagcagcagcagatacagagtcaggacacatacactgacctagagtgaaggatttgggaggagccgtgttattttgtgtgtagtttcaaattatccagttttagcaggacctccaaacatacttgaatgtcagattatgtgatgcataccatatagagcacagacttatacaagagaaggaatatgactgtctgcctgcccaggccacaagctcagggccttccttactgtttggtcacctgcccacctcaccatctgggctcttgagctggttttgcctatattggtaccccctttcctgaccttgtgckgcattttactggagcctggcttccttgatttttttttttcttttgggataaaaactatatttttcctttgttttgctgggtaacagaatcctctctgaaaatttattctgagccaaagcattcaagggaccctactttatagattattatacccataaaaattggctttgatcagggccatttaaggtcttgttctaaaatggttaattttatgatgtaaatgctaacacctgtgacgggggagcttgtgtgtgggatatctcttgagatggatgat

SEQ ID NO: 482187 - DNA, 593 bp, Homo sapiens
gtggtctgatccaggcatggcaccatcctgctgggataaggaccctttaaattgcttccaatgtgcctaattctcacttaaagagtgtcctcctttctatctcttggagacttgcttgcctcagattaaatggtctggttatcattgagtaatcattcatttatccaatatttattaagcatcatgtgcgtgttttgtgctaaacaccagggacaatttgaggcacaagtcagacctttcagttctatggagaagacagacatttaagaaattagcataaagtgaggcacatattgtgatggagcaaataagatgctatagaaacagggtctaagcaaataaaatactatggaaacagggtctagggagtcaaggaaactcctctaaaagaagtgaggcttaagctgaaatctaaagacgagttgaagctagccgtgtgaaatatgtatgcatatctgcattgtcttcatgtgtatggctgtgtgactrggtggaaagaatgtaacagggattcagatagggaaacagtatgtacaaagggaagaaaatatgacaataccaaggaatcaagcagaacccaatattaatggagt

SEQ ID NO: 482188 - DNA, 577 bp, Homo sapiens
tgttggggtgctatataaaaatttctccaatttattttctaagcaatggaaaacttttcttcaaacagtactctcatatcacatctcacaaattatttaaaaattaaatgagagtggatctgttaatagtgatggaacgtggagccctcttacataactttctctttatgcctctttctgaacattgagcaaaattcttacatttctgaagagattaggtgtttaagtttctagctttttgattctataattctaattgccagtgtacatacatctctctgtttctcttgtactcaggcttaaaccagatgctgtgagggcttttrgagatgaagacaatatagtccctaccactatttagaaggataacctgactcacatgaacaaagcaagtagaggatccataacagcactgtgtatttttctgtctatggaggcgttgacgcaggtaatcctcacagtctcttccagttttcacattctgtgactcttaagtgttaatgatgtggccatgtgcattaagtactttgagctcaggagtaacacactgtataaattcaaggaccattacatgcat

SEQ ID NO: 482189 - DNA, 577 bp, Homo sapiens
tgttggggtgctatataaaaatttctccaatttattttctaagcaatggaaaacttttcttcaaacagtactctcatatcacatctcacaaattatttaaaaattaaatgagagtggatctgttaatagtgatggaacgtggagccctcttacataactttctctttatgcctctttctgaacattgagcaaaattcttacatttctgaagagattaggtgtttaagtttctagctttttgattctataattctaattgccagtgtacatacatctctctgtttctcttgtactcaggcttaaaccagatgctgtgagggcttttagagatgaagacaatatagtccctaccactatttagaaggatwacctgactcacatgaacaaagcaagtagaggatccataacagcactgtgtatttttctgtctatggaggcgttgacgcaggtaatcctcacagtctcttccagttttcacattctgtgactcttaagtgttaatgatgtggccatgtgcattaagtactttgagctcaggagtaacacactgtataaattcaaggaccattacatgcat

SEQ ID NO: 482190 - DNA, 449 bp, Homo sapiens
agtcagacataacacctatacacacccaaataatagcagggggtgtggggagtgtatgtgtgtgtgtgtgtgtatgtctgtgtgtgtgtgagagagagagacagaatatgtgcagtttctgaacacaatcagtaatttgtcaaagcmattttttatcattgcttttttgtctttatattagactatttgatgtaaggtaaataaccactgttaatattttttagctctcgaattgttatacaaattagaaaagcgggaaataaggcttggaaacaaatctggtcacaccaaagattgtatatagtaaatacataaagagaactaggtgtcgaattcaaccctattaaatgaaattcccaattcttatttgaaggcccatttttaaaggcaatctcattgtatttactatattgaaatccagggccgaacagtaagaaaacagttgaaaa

SEQ ID NO: 482191 - DNA, 449 bp, Homo sapiens
agtcagacataacacctatacacacccaaataatagcagggggtgtggggagtgtatgtgtgtgtgtgtgtgtatgtctgtgtgtgtgtgagagagagagacagaatatgtgcagtttctgaacacaatcagtaatttgtcaaagccattttttatcattgcttttttgtctttatattagactatttgatrtaaggtaaataaccactgttaatattttttagctctcgaattgttatacaaattagaaaagcgggaaataaggcttggaaacaaatctggtcacaccaaagattgtatatagtaaatacataaagagaactaggtgtcgaattcaaccctattaaatgaaattcccaattcttatttgaaggcccatttttaaaggcaatctcattgtatttactatattgaaatccagggccgaacagtaagaaaacagttgaaaa

SEQ ID NO: 482192 - DNA, 449 bp, Homo sapiens
agtcagacataacacctatacacacccaaataatagcagggggtgtggggagtgtatgtgtgtgtgtgtgtgtatgtctgtgtgtgtgtgagagagagagacagaatatgtgcagtttctgaacacaatcagtaatttgtcaaagccattttttatcattgcttttttgtctttatattagactatttgatgtaaggtaaataaccactgttaatattttttagctctcgaattgttatacaaattagaaaagcgggaaataaggcttggaaacaaatctggtcacaccaaagattgtatatagtaaatacataaagagaactaggtgtcgrattcaaccctattaaatgaaattcccaattcttatttgaaggcccatttttaaaggcaatctcattgtatttactatattgaaatccagggccgaacagtaagaaaacagttgaaaa

SEQ ID NO: 482193 - DNA, 584 bp, Homo sapiens
gaaaatagaatgatccatgaaacaacttacagcttatactttgccagttaaattgagggttacagcaattttaagatcatatttatatctaatattagatagagaatcaattcatttggagagggaatgttgcaggtggaccactgaatttcagggagagcccacacagatgcactagaagatatgatcacttccccaatttatcagtcaggaattggaaatgaatctggattgaaacagagtgaacagcagcagccgaagcatcttactgagtgcaccatgccagggtcccccgaagtccctgaaaggaatggcccaggctgtgctattttacaaggtagagaccttgcagatcaggggttattcctggatgtacacagcrcttttatattagaaacaaacacataatgtggaacaaatcaagcacttcctggcctgaaactcttcgtggtttcccatcccccacgatgaaaatgccaaagtacttcaacctttttcactttcacatcctccagggtcctctccagctccaccctacctctgtgtcctttcctgttcgccacaggcacacttgatcaatctat

SEQ ID NO: 482194 - DNA, 670 bp, Homo sapiens
atgggttgaattgaatcctctcccaattcaaatgttgaaatcataatccccagttccttagaaggtgaccttatttagagacagagtcttcagagaggtattcaaattaaagcaggtcatgaggatgggtcctaacccaatatgactgatgtctgtataaaaaggagagatttaaacacgggaacatacacagggaatagatggccatctaccaagccatggagtgaagcctcagaagaaaccaatcctgctgcccgacaccttgatctcagacttctcatctccagaatgtgagatgatacatttcattgtctttttttgttgttattgttttgtttttgttttggctcactgcaacctccacctcctaggtttaagcgattctcctgccttagcctcccaagtagctgggactacaggcgtgttccaccacacccggctattttttgtatttttagtagagatggggttttaccatgttggccaggttggtcttgaactgtgacctcaagtgatctgcctacctctttctcccaaagtgctggggtaacaggtgtgagccaccgygcctagctgatacatttcattgtgtaagccacccactactttgttatatggagttaactaacccacatttcttgaaagcataatgtccttagcatggtttcag

SEQ ID NO: 482195 - DNA, 671 bp, Homo sapiens
ctgctaggccagatttcataaacttttttttttttaataaagaggtccacctgggaagtttttaaacacctgtgctttcaaaacatttataaacacaatggtctgacctgcctcggtgactcatgcctgtaatcctagcaatttgggaggctgaggcgartggatcacctgaggtcaggagttcgagagcagcctggctaacatggtgaaacctcatctctactaaaaatacaaaaattagcctggcgcggtggtgggcgcctgtaatctcagctactcgggaggctgaggcaggagaatcacttgaacctgggaggtggaggttgcagttagctgagatcacgccactgcactccagtctgggtgacagaatgagactctctctcaaaaaataaatacatacatacatacatacatacatacatacatacatacacacaatgtcctcatatagagctcacaaactagaaggaaaaaaaaagatttctacgtaattgaagttaaaagttaaaaactttacttcaacatctaaaccacttaaatagaatttaatggccatcagtagcataaatctgaatgatttgcacatctgctaccaaacaataaaatgttgtcatttaaaattaaaggtattgttaactcaataaggtataagtttaaacactggcctt

SEQ ID NO: 482196 - DNA, 610 bp, Homo sapiens
gtgtgtatgtgtgcgtgtgtgtgtrtgtgtgtgtgccctcttcagtttagttggcttagcttctccctatccaaaaattctataatattaatatgagaataatttgttatgcttacgctggagattatttttatttgtgagcaaagaaaggttttagttgttacaattcctgtgctgactgctctgggattgtaaaggtaaactgttagagataggaccacaattgcctgaaaggtgaaagcttgcaggaaaaatagggtgggtcatttagttcttgaaatgaaggagggtgcagattaggaatcattatggcttgccagaagttgctggtcatagaagtctgtttaagtgctcactgtcaacaaggaaatcatgggcagcacttgaagtggctcacctctgatttattcataaaccttacacgagcacttggctttgttcttactctagtaaggcggtctgatgccaataagaacaggaataaagagctccttgcatggtccaagactgaatagcactttacctcaaagcctgacctcttttctagaagtctgttatgctagagttgactctgattggctgtggctcctcagatgaattgagagaagag

SEQ ID NO: 482197 - DNA, 608 bp, Homo sapiens
actcttagatatgcatatgccagagagattagtcagttacatcttaaagactagcaatataacatatgaaaaacatggtaactatgatttataaattccaaaaatgatcgatgcggttcatgtttttccaaggaaaactacagtgttctgtgttaaagcttcatgtttagcagtgtaatttacttgaactttcagatatggtagaaattgagggagggggtctgtgaaagaaaaataattctgtccattattgagatgcctgtaaatgtaagtgtaatttacacaacctttccataacttcagggtatatttatatgcattttatcatagtacctgattgatttatggattaatatttttttarggaagaaaaattaaaaggatcatatagtcatttaactctaatcctactttgcatagatgagccaaagaggagatgattaatgctgaagtatggctgggtcactggcatttggaagtacctttttcctcaataaagacaggaaaaaaaagtcagtatattctcagtattggcaaacaacagctttctagtaatactttagctgattaggaaatccttaacctttaatgaagcaatcactacaaag

SEQ ID NO: 482198 - DNA, 617 bp, Homo sapiens
taccctgctgtcagaaactgatatggcttttatggagtgcatcttgtcctcaacaaatagggtttctggtctaagacgcctgcttgcaaaaaaactttaaaaaaaatgaaggattttcattgggagtgcttgtgtgtgatttgttaagccaggggagatgtcgattgaggcagtggttgagagatgggcaactcaccaggattggtaacatcaaaatggtatttgaaatggtgttcattacrcattgcagtgaaaaaaactaagtgaatgtgattgtcccctaggatgataggactggttgcagtaaatattaatttctgttctgttgcccattgaggtgactgaagtgtggggaggaattgtgattggtgcttaatcagggccagccagatacctgctgagagcttttgcacaaggaagatttgtagtaagctgatttactggcaaaatgaaaaccagagaagtttggtcggtgctgcctgtggctgtaatatttctaattttaaggtttctttatttgttggtctccctcccacactcatctccccttctagtcactgcctgataaagaaaaggtaaatttttagaattataagttatttctgttgttctttcat

SEQ ID NO: 482199 - DNA, 627 bp, Homo sapiens
cctgccttataagacatgctaaagaaagttcttcaaactgaaagcaactgaccctatatggtaattaaaattcaaatgaaaaagcaaagagtaccaataaaggtaattatgtaattataaaagatagtatatttcttctccctcattaaatgattgaaaaagcaattgtataaagctatatatatatgtatttcatagatatgacacaaaaagttaaaacaaaagaaaaaataaactggacattatcaaaattaaaaacttacgtgcytcaaaggacaccatcaagaaagtgaaaatacaacacacagaatggaggcattaaatagttcctcccacttttatgattttctaagtactattcttatttatttttgtttttatttttatttatgaatgggtcctggcttccctcacggacaagtatgtcttcttagtcagcttagcttagcttagtggctacttgaaaacaattgttgatgtttgaagatggtctgaacctaccactgcagggagaagaaaatttgaatgggagaatagttacacatggacttgatggagtactttggaaagtttgccaactcctattgtaacctcctgtgggagccggacgggaggcaccctggagcc

SEQ ID NO: 482200 - DNA, 550 bp, Homo sapiens
tgagtccatttgctccttggaacactgcaaggtttgcaggaccaagattgttgttgtgcaagtgaggaacacagaggctcaaagtggggcagtgacttggcccaggtcccagggccgatgatccttggctgacccctttcttggcttgtgcctgtgtcagcaccatccaggtggtctcttatcactaagaagaattagggaatccctccttctctgtaggttcagccagacctccagtaaagacacccacatctgttgcttgttttctaaacattgatgactttggaggtagaagattagaagcaccaaaaaccaaacagcattstgatccccccaggggctgcttcatctattgctccctcttggactaggggctctcccagtgagagcaacattttccatgcagtcagggccattcttcccatatcagactgtaccctgcccaagaacagggacttacacaaggatgatacatatgaaaaaggggagatacgtgggatgggagcagtcaggggacacagacaaaggcatctaatttagggcaggggag

SEQ ID NO: 482201 - DNA, 548 bp, Homo sapiens
gtataaccaatgctatctaaattctttctcagccttcctggttgcagcaagcgatagagaaacattgaaggaaaagagcttgtttttagctgaaaagcgtaacctaatatgcataataaatgctcaaatgattaaagtaaaaggtttttttttccattaaagaacaatgacagtcttgagcttttattgataattctttctaataaaatatatcaaattgttctaraggcataagctttggaatcaaatgtatgtgtgtcccaatacctactctgctacttaagatatcatctcaaactttactgtgcatcagaaccacctggagggcttgttaaaacatagattgccagattctgtttctcaagtttcagactcagcagatctggggtgggacctgagaatttgcttctctaacatgctcccagataatgctgatgctgctggtctggggaccacactctgggaattaatgttctctccttccctgttttaaatgttgaagtgcaattgccactggagcattccgtccctcttatccagctaatccc

SEQ ID NO: 482202 - DNA, 592 bp, Homo sapiens
ggcgacacagtacactgcagagtctcagatgcttacactcctgattctgtggctgacggggacctgcagacactgcccagcatcacaagaaggtatcataccacacatccctagcccaggaaagatcaaaatttaaagtgtgaagcatggcttatactgaatacatgtttctttcacaccattataaagttgaagtcaaaccatcataagtcagagactgtctatagaacaaaaagtagaacatgaagcaaggtaaaaactrtactcagaagataatgtataacataaaaatgtttttattattaagaaaactgaaaatgaaagagacttactaggtttttaattaggaaaacaacaaaactgttttagaaaagaaggtagatattttataaataaaaaggcataaatatataaaacaaaaagcaaatgttcgtcttgtgtactatgatatgctacacatcccaaactttagtttacacacacacacatatatattttgcatgtttggctgagctggcatgaaataataatttgaaagacttgaacactacacttaacaagcttcacctaatgaaaatacagaaaatagtgt

SEQ ID NO: 482203 - DNA, 569 bp, Homo sapiens
gctggctgaggcttattcaggtcaacttcacagttgagcttctccctcttcacaatgatttctctgcccttgtttctggcagcattggtccctgattgtatattatgttatgccccactccatctcagcgtctggtgtagacaactgaacctctgaaggtgctaacctacgatagtactaagatatggcctgaaatgcggctttgtagctggatcactttctgattggccagaggactccttcatcagatgtaggtgagcaatagtaagcttctagcacaaagtgggggtccagtacttaaaactcactggtggtgtactggcacgaggaaaggcactaatgggcatgatatatcaggcatttgaaaaatatggagaaaatagtataaggaaaacgagggttaytgacgcactacagagtgaaactaaccagtggtgagtaacaagcaattgaaagcctggtgtgaaagccagagggtgtctttggttgcggacaaagaaactcgaacactcaggtgggctgagaaagctgtgcgctaagcctaggacatatcaagcaaagtcactgag

SEQ ID NO: 482204 - DNA, 551 bp, Homo sapiens
attgttcttagatgcagtagttctgtgtggcctctctggagaggacttgtggaatgaacaaccagcagagttttcttgtgaagctgtggccatcccattatcacgtgattttggacctttctctccctccttgtttcccttcctttccacctcattcttgtttcctgggatttcacctacctccttccccttattaagggttatcacatgagctctgcctcagttttccagggaacctaggctaaggaagtaagaatactgagttttgctaagtgccaggcatccttcttagtgtgatatgggtattaaatcatttattctccatagtaacaccacraagtaggtagtattattatctccaccttacagatgaagaaagtgaaacccagacaatgtagatgacttgcccgaggtcactatgctaggaagtcttagacccaaaagccagatcagatattctggctcctgaatctgtgctcctgcctcctgaagaatggccattgtcagagcattcgctaaaatttccacgtttccagcaccatgtggactgg

SEQ ID NO: 482205 - DNA, 513 bp, Homo sapiens
tgttttaaattaatacacgcagaaacctgcagaatacatgtgtgaatgaatactaaacatgtgggaaaatggtaaagggaacataaagttgcatcaggctaaatttattgatacgggctctctgagcagaatctagattcaaagctatagctcaaggggttagacaaggctctaaatgtttgtttggttggttggctggagcatgagccaaaagtgggctaacactaagtgaaggacttcttccttgctatgcggtacaggaaggtacccaaaggcttggggagattagaatttcagagtgcatttatcaaataagscctgcttacccaccctgggaaggtccaagggacatgattttcacaactatgagaaataaattgtgaaggtagccctagcatccttcaagaggtctgtagtcactcttctctgcaggccagaaataacagtaggaactgctacctcagaggcgggatacttacatgcaatgtaagagattgcaagatccagagagaa

SEQ ID NO: 482206 - DNA, 513 bp, Homo sapiens
tgttttaaattaatacacgcagaaacctgcagaatacatgtgtgaatgaatactaaacatgtgggaaaatggtaaagggaacataaagttgcatcaggctaaatttattgatacgggctctctgagcagaatctagattcaaagctatagctcaaggggttagacaaggctctaaatgtttgtttggttggttggctggagcatgagccaaaagtgggctaacactaagtgaaggacttcttccttgctatgcggtacaggaaggtacccaaaggcttggggagattagaatttcagagtgcatttatcaaataaggcctgcttacccaccctgggaaggtccaagggacatgattttcacaactatgagaaataaattgtgaaggtagccctagcatccttcaagaggtctgtagtcactcttctctgcaggccagaaataacagtaggaacygctacctcagaggcgggatacttacatgcaatgtaagagattgcaagatccagagagaa

SEQ ID NO: 482207 - DNA, 619 bp, Homo sapiens
atcaaagttacaaactccaactaycccaagtaccaagtggatgccaccctggctcccttctccatgggagcagagacctcgccactcacctggatcgctgttgctggggtcttgggctggcacggctgcatctgacacgcaactgtccacacgtcctttgggaggttgttcaggatctttttctggggcttttgttggctgcatttccagtaactttgtctgtttttcaataaaagattccatcgcagacatggatagagtctcagactcctaagaaatagtcagtggcatatcacatatggaatgctgacagtaggggagcaaatgcagcactctaggtttccctgcctctcccctgcataagtaccttgggtataaaacccaactgatgctatgactcctttaggaaagattttattttttaccgaagttgcaagtaaaacaggcctgccctgggattatcatttctgcacccatttttggtcatccatttttttttccaggaactagctttctttcttatcttgtcatccattatccgaaacccaccatggttgagaagccaacctgccaacccagaactggtaggaattccaaaccacttagagaaaatactttt

SEQ ID NO: 482208 - DNA, 589 bp, Homo sapiens
gctgtctcttacctaaccatgaatccacagagtattgtagtctgcagtttttctactagaacaatcagtgaaaggataaaagaagataggttggggagggagctgagggcaagattacagcagtgccagataataagaatgccaataacgcattgtgatagaatcacatttgcattacagccttgtcaataaaagctcttcccatcctcactgaaaaaattaaaaggcgacaaccaattcactcttactatcagtgacttgtccgggtctcttctctcagatgggatccagttgagcaaatagcaggggtgtattttaaggatgcagagtcctgagaaagggaagggggaagcaggcatatggcctccacattggcccactcctggcccaaagagcagctcaagaytgaagatgatggctgttgaataaaagggcagaattcgtggctaggtgaggatgaatgatagcttaggaaaggacaaaagggagctcctggtatttagtaatagctgaaaagtagctaacttttactaagcctatagatagtctgtgtcatagtcgcacgatggaatatcacacagacgtgaac

SEQ ID NO: 482209 - DNA, 549 bp, Homo sapiens
gcaaattcactctctctgtctgagctagggcaaaaatcgcctcctgcccttggacattggctcccccagttctcaagcactcaaactcatattgggagttgcaccatctgcattcccggttttcaggcctttggactcaggctaaaatttcagcactggctttcctgattctccagctttgtggatggcagattatgggacttcttagcctccataactgtgtgagccaattccttaaaatctctctctttcattctctctctctctcctattggtctgtttctctgaagaaccctaattaatacatccatacatacgtatgtcttacacacacagatgtgtttgtggtcatttcatctacaagaggaatggagtcataggaataagctccttcacttctgtacatacatacatacatacacacgtgtacgtatgtataatactatacttattcatatgtggttcattcatccctaaaacatgagaaggggcttctggaaagayagcaaacttaaaataatgcaaaaaaagaaaaaataaattaaatta

SEQ ID NO: 482210 - DNA, 629 bp, Homo sapiens
ggggaatctgaaagacacggatttaaattatggcttcattatttactagctggatatattgtttattttgaggctcaactaatctgtataattcacagacaattatctcacagtttttgtaaacagaagatagtatttgacattcctaacatatattttaaacactcagcaaatatttattcttattctttcacccctcaattatggtgatgcactgatctttgtccaagtgtccaaaatagcatatggaaagtccacagaacagyattaacagtattaaggagtatactagatactttcacaattatagcgactctacttaatacttccttcagtcttgtatgacgtatcccattttatagatgagtaagaccagactctgaagggccatattcaagagctggaccagtgtaaccacaaagctcttctcccatgcatctagttgccctcactctctgtcgaggcagcatttgttctatcggcgggggtgtctgctctcttaggcaggagtatcacaatccatgctgtaaagagtcctcccaggctctgcccaggctaagaattcatgtaggcatccatgcaatagatatttatttattgagcatttcctgtatgccaggcactgtcac

SEQ ID NO: 482211 - DNA, 533 bp, Homo sapiens
atgaagaggaaaatgatgtcacaaagcaaaggaaataaggctgctgcaaaccacaagtcaatacagaagcatcagctaaccatttacraccaatcattagtttttgtgtgcaggtggaacagataagatatggaaaagatagagagttctcttcctgtctatgaatcaacttaccttggtcaagatttcttttgggaggaaaaagaattttttttaatgggcaagaacctctttctgtttaattttctttaggcagtctctacgtgactcttcataaaatcacaaataatgtttaccattgctcatacagatgacaacacaagctttctcaaatacctaagagttattcagaaaggtttctgatacagttgaaatgtgccgtcttagtctgttcaggctgccataccaaaataccatagactgggtgggttttaaacaacagaaatttatttctcacggtactggaggctgcaaagtccaagatcaaggccccagcagatttggtgtctggtgagagcctgcttcctcataga

SEQ ID NO: 482212 - DNA, 617 bp, Homo sapiens
aaaagcttactaaaaatcatcccttacaaaatgctgtaacggaatcatatagaagtgattaacttcatgaacataatgaagcagctcaatctgagttcaaatcctagctccrtctcataactgtgcaatatagtataattaattttattcatttgggcctctaattttctcatctatcaaaaacacaataatgataatacctaactcacatattttctgaaggaataactgtgaaaaaaatacatggaagatttggtggaatccctgataagtaaaggcattcaatactattaactgtggaactgtaacagttataggtgggcaaagctacttgtgaggctgagacagaatgattgcttgagcccaggagttcatgctgcagtgagctatcatcactcatgccactgctctgaagcctgagccacagagtgagactctgtctctaaatataaataatacaattataattgactaagtgtgtcaaatagcactggttttcttccaatatccattccttacttcttcattagtaatcaagcccctttcatttagcaggatacatgacttctagaaatcaacccctgatggaaagtattacacctctgggaaaagaaaga

SEQ ID NO: 482213 - DNA, 589 bp, Homo sapiens
agctggggtggggcggggggggagcaggaagaagtattgaacttaattatactatcccctcctcagttaaaattaaaatttaattgaatcaatcaggatttttgttgtacatcctaaatttggttttatatgttcaccttggttaatgtgagtggtcccttaataaactaatctacatgaaaaacaattcaactttctaaaactgcaaggtttggagatgaactatgaacaatgggaatcattaacaagtcttggttctctgagattttctagaataattttcagacttgtctttcttgagaaagctacctgcaaccaagcaaagaaacaaataagaaaataaggaacagacatttggttacccacttttatttgtcttggtaagaacattaagaatgaaacaaaaccttgcttctgttagaagatagcaaaaagtaattagaataataataagaattttgaaagaatgaagaatgaaataaaaccaacaaaaacatctatcatcttgatcaccattgcacatgtrcacgcacacacacacacacacacacacacacacacatgcacacaccaagcgttttaacataaa

SEQ ID NO: 482214 - DNA, 633 bp, Homo sapiens
tatgaagtctcagtgctccaccctttcaggttctctgacaagcatctttatgtgaaagaatcactcaacaacattctaatcataggactcagttaatctaggtctgtttgagcaaagaattgcttgaaaatgatgacatatatgaccattaagcaaatttataaccccaaccctgatattcatctgagataaatagctggtagtagcagcctctgaaaagtggatttctgaatagagttttaaatgctaacctcccacactttgaatgtgctttcctgaatagagtacttcaaatgataaataaccacatctagttagattaagataacagataaatatgaaccwacttataatttagtacttaaaatgcagataatatggcaaaagtgaagggcaaaaatgataggagggagcattttgagaggggcatcacttaaactgagttttaaatcccaaaaagtcactacgaagtactaatatataaatgaagtgcctgaaactttgggggcaggtgcttaataaatgttttccttccatttcttctttgcacatgtctgttttttcagtccaagacattcttcccatcactattgctctaaatctatccatctctgaaagcccagcataaaggcc

SEQ ID NO: 482215 - DNA, 633 bp, Homo sapiens
tatgaagtctcagtgctccaccctttcaggttctctgacaagcatctttatgtgaaagaatcactcaacaacattctaatcataggactcagttaatctaggtctgtttgagcaaagaattgcttgaaaatgatgacatatatgaccattaagcaaatttataaccccaaccctgatattcatctgagataaatagctggtagtagcagcctctgaaaagtggatttctgaatagagttttaaatgctaacctcccacactttgaatgtgctttcctgaatagagtacttcaaatgataaataaccacatctagttagattaagataacagataaatatgaaccaacttataatttagtacttaaaatgcagataatatggcaaaagtgaagggcaaaaatgataggagggagcattttgagaggggcatcacttaaactgagttttaaatcccaraaagtcactacgaagtactaatatataaatgaagtgcctgaaactttgggggcaggtgcttaataaatgttttccttccatttcttctttgcacatgtctgttttttcagtccaagacattcttcccatcactattgctctaaatctatccatctctgaaagcccagcataaaggcc

SEQ ID NO: 482216 - DNA, 592 bp, Homo sapiens
ggggttgatattttccaaagttttacagataatgggagtgttaggactgatattctcatctcttgattgtttatccattgccgtttccactggtcggtgtacttttcaaatgtgaatattatggctaaagagccagtttagtcgtgtcaaatttagccatttgaaagctaacgactttttgaaaattttgcccaaatagggttaagaatatcatctgttttatcaaactgcagttatagctcaattgtggaacagtacacrcactggactctaatagcctgatggagcaggcaatattttccaaagatgactgctgcaaatattctctcctatatgttctttttacaatgtgactgtgaagctacttaagagcatggtgaggtctatttcacctgcccttcaacctgggcaagtgtcaatttccttgtccagtacagtactgtgtaagtgatgtgcgtgatttccaatgttacttcaaaaaactgccatgcatttgcacctttttactactcttgggtgttcactcttggaacccagccaccatgctaggagaaagccaagctacctataggtgtccaagccaaaagcccca

SEQ ID NO: 482217 - DNA, 621 bp, Homo sapiens
cctcaatcttctatgtttgcatagctgatgaatatccttctacttgacattgctttttttttttttttttggatactgctgattgattcagtcaggttatagtgatccaggcttactcagaaagactttacattatctgaatcaaagtcaatatgttgattttaataatgatatcaatagttaccacagagatcataccataggcatgttcagaacatgccatcccaaaatatgccactttggcatactgattattttgagttaaagcatttaataacaacagatgcaaaaagggcactctgatcttccttttcttcctgaaaacaagagataaaatttctatgagaaaggtaccctccctgtaccaggagraagaaagacatttttatcgtccatattggcaaatcaaggctaaaagaaaactatacaaatcttctaaaactaatcttatctacctagtattttttcacaattaactgccctagctcaaacccctttttcttgacaaattttcacaatgcactactctttgtccatctagtacataaactttcagctctcactgctttttgggtcttcatttttttctttggaaggctcccacgtagatataaaaattac

SEQ ID NO: 482218 - DNA, 621 bp, Homo sapiens
cctcaatcttctatgtttgcatagctgatgaatatccttctacttgacattgctttttttttttttttttggatactgctgattgattcagtcaggttatagtgatccaggcttactcagaaagactttacattatctgaatcaaagtcaatatgttgattttaataatgatatcaatagttaccacagagatcataccataggcatgttcagaacatgccatcccaaaatatgccactttggcatactgattattttgagttaaagcatttaataacaacagatgcaaaaagggcactctgatcttccttttcttcctgaaaacaagagataaaatttctatgagaaaggtaccctccctgtaccaggagaaagaaagacatttttatcgtccatattggcaaatcaaggctaaaagaaaactatacaaatcttctaaaactaatcttatctacctagtattttttcacaattaactgccctagctcaaacccctttttcttgacaaattttcacaatgcactaytctttgtccatctagtacataaactttcagctctcactgctttttgggtcttcatttttttctttggaaggctcccacgtagatataaaaattac

SEQ ID NO: 482219 - DNA, 503 bp, Homo sapiens
ctgaaaaatggaatgtcctactggccagattaatattttctacaagggatgccttgtgactgggctcctctctgaaaaataaaatgtttaaactacaaaatccctaayaatacctttctacctaaagtaaattaagtgtattctactgtcagccaatgaaaaaccgttgtctattggttcctgtaacagatgcaggtaaaaaaccaccaagaagaattttgggtgggtcattattatttgaactgacacttggatgttatggtacaaagtcacttaagttactaatttcaatgcagtgcttagtgaaaggactggtttggctgtccatgtgactgttgcaatgaaccgttttaataggctttaggaatacaaggatggtggagtatgctggctgcttcttactgtgcactagagtcttaaagaacaaaagtcactcgttcaaaatattaatttcttagctcatggaatagtgagaaaattaagaactttattatcacccactt

SEQ ID NO: 482220 - DNA, 581 bp, Homo sapiens
aaataacaaatacataagtgttaattttttggaaaaaaatattaattcttaagtaaaattttaattggccctctttgcacacstcaaaacttgtttcagtgaaagagcttgactttcttttcttgacactaagaaggtaaggagaaatgatattttcttaaagacagtggaatgaagtgaataagctgaaatgatatatttgcctccataacattcttacaaagaaacattggccttagcacaaactctttacagttggaggataaaataatggaatttgaaagcctatataaatcaatataatgtgagactcaaaaataagaaaaagctctgaaaaggaatgcttgctcctagggcatagaggatattgattaaagaaaagttttgagggcttactgaagtggcatcattacttaagtctactcctcaaaagagaaattggttacatataaaagacacaggtgtataattctggtgccttaaaaggagttccccaattatgtgagtctcttgttatatccaagaggtgtgaggaattccttaaagaactcagtagagagctgatttaaaaatgcaaataa

SEQ ID NO: 482221 - DNA, 581 bp, Homo sapiens
aaataacaaatacataagtgttaattttttggaaaaaaatattaattcttaagtaaaattttaattggccctctttgcacacgtcaaaacttgtttcagtgaaagagcttgactttcttttcttgacactaagaaggtaaggagaaatgatattttcttaaagacagtggaatgaagtgaataagctgaaatgatatatttgcctccataacattcttacaaagaaacattggccttagcacaaactctttacagttggaggataaaataatggaatttgaaagcctatataaatcaatataatgtgagactcaaaaataagaaaaagctctgaaaaggaatgcttgctcctagggcatagaggatattgattaaagaaaagttttgagggcttactgaagtggcatcattacttaagtctactcctcaaaagagaaattggttacatataaaagacacaggtgtataattctggtgccttaaaaggagttccccaattatktgagtctcttgttatatccaagaggtgtgaggaattccttaaagaactcagtagagagctgatttaaaaatgcaaataa

SEQ ID NO: 482222 - DNA, 617 bp, Homo sapiens
cttgtcctcccaaagtgctggattacaggcgtaagccaccatgcctggtgctatttctttgataattatttccctcttatttttcttgttctttatttgtggaatttccactagacacaaattattctccaggactaaccctctcatttttttatcctttctctctatcttttrttatactttctggaaacttccttaactttctcttctagcattttaaaaaattcctgctctcatatttaaatttccaaaacctcttcttatttcttttaagtcttcctggttttgttccatgaatttgatcattccttttgtcatctgaggaggtaggtaattttttatttctttgtcttttcctccgagtattgcttcttttccctctgagtcccttttctttgtttgttttggtctctgtttttcatgccggatgcattctgcaaatatccagaaatcttgaccttctgtatgtaccatttaagaatgaggcacaaaaatgctgactgaatgttctggtgcactgccgagacctgttgactgatgggcttcaccgtgtggaacacagagggaacccagccagtgtcaggatttggagctctttttcctcaaactgccccctt

SEQ ID NO: 482223 - DNA, 617 bp, Homo sapiens
cttgtcctcccaaagtgctggattacaggcgtaagccaccatgcctggtgctatttctttgataattatttccctcttatttttcttgttctttatttgtggaatttccactagacacaaattattctccaggactaaccctctcatttttttatcctttctctctatcttttattatactttctggaaacttccttaactttctcttctagcattttaaaaaattcctgctctcatatttaaatttccaaaacctcttcttatttcttttaagtcytcctggttttgttccatgaatttgatcattccttttgtcatctgaggaggtaggtaattttttatttctttgtcttttcctccgagtattgcttcttttccctctgagtcccttttctttgtttgttttggtctctgtttttcatgccggatgcattctgcaaatatccagaaatcttgaccttctgtatgtaccatttaagaatgaggcacaaaaatgctgactgaatgttctggtgcactgccgagacctgttgactgatgggcttcaccgtgtggaacacagagggaacccagccagtgtcaggatttggagctctttttcctcaaactgccccctt

SEQ ID NO: 482224 - DNA, 617 bp, Homo sapiens
cttgtcctcccaaagtgctggattacaggcgtaagccaccatgcctggtgctatttctttgataattatttccctcttatttttcttgttctttatttgtggaatttccactagacacaaattattctccaggactaaccctctcatttttttatcctttctctctatcttttattatactttctggaaacttccttaactttctcttctagcattttaaaaaattcctgctctcatatttaaatttccaaaacctcttcttatttcttttaagtcttcctggttttgttccatgaatttgatcattccttttgtcatctgaggaggtaggtaattttttatttctttgtcttttcctccgagtattgcttcttttccctctgagtcccttttctttgtttgttttggtctctgtttttcatgccggatgcattctgcaaatatccagaaatcttgaccttctgtatgtaccatttaagaatgaggcacaaaaaygctgactgaatgttctggtgcactgccgagacctgttgactgatgggcttcaccgtgtggaacacagagggaacccagccagtgtcaggatttggagctctttttcctcaaactgccccctt

SEQ ID NO: 482225 - DNA, 641 bp, Homo sapiens
atatccccacttaatatttacttttctcattttagctatagttgtacttctattacttgattgtggcaatagctactggatacaaatactattacctgatttattaagatgattaattttcataagaaataaggtaatatacttgccctaccaattactttatttatttagagacagagtctcgttctgtcgcccaggctggagtgcagtggcgttcgagaccagcctgggcaacatggtgaaaccccatctctacgaaaaatacaaaagggtgtggtggtgcacatctgtagtcccagctacctgggaggctgaggtgggaggatcacctgagcttggggtttaaggtagcagtgaactgtgattgcaccactgccctactgccctccagtctgggtgatggagtaagactgtctcaaaaataaagtaaataaataaaaagaaaaaagaaaaacagaaacgatgctgtgctctgcaagatgttttactattaattaatttttgagcattgattycataataccatatccaattacaagtattttgcctggtttggttgtaatcttaaagcaaaagagaaggtacaaactcaaatgcttacagaaggaaggggagttagaaagtgtagttcaggagtgact

SEQ ID NO: 482226 - DNA, 641 bp, Homo sapiens
atatccccacttaatatttacttttctcattttagctatagttgtacttctattacttgattgtggcaatagctactggatacaaatactattacctgatttattaagatgattaattttcataagaaataaggtaatatacttgccctaccaattactttatttatttagagacagagtctcgttctgtcgcccaggctggagtgcagtggcgttcgagaccagcctgggcaacatggtgaaaccccatctctacgaaaaatacaaaagggtgtggtggtgcacatctgtagtcccagctacctgggaggctgaggtgggaggatcacctgagcttggggtttaaggtagcagtgaactgtgattgcaccactgccctactgccctccagtctgggtgatggagtaagactgtctcaaaaataaagtaaataaataaaaagaaaaaagaaaaacagaaacgatgctgtgctctgcaagatgttttactattaattaatttttgagcattgattccataataccatatccaattacaagtattttgcctggtttggttgtaatyttaaagcaaaagagaaggtacaaactcaaatgcttacagaaggaaggggagttagaaagtgtagttcaggagtgact

SEQ ID NO: 482227 - DNA, 479 bp, Homo sapiens
tcaaaaggccaggcagctcaggacgcctgggaaagatgggatggagagggcagggtccagggcctgctggggaggggccagacaggaacacagacacctttgtgtgcacctgatcagtgccagccactggctgcttcctgtcggaggggctttgtccctgtcctgtctcccatgcctggactttaggcaactctgggcctagggccacatccaaccacactgtgttctgtccccagcrcttgctcggggccaggctccgagcttcccctgaaagcgtgtcctggaggggatcgaacttcaaggcgaggcaggtgacggtgaatgtcttgacggccctcagcagatggggcttttactgaggttgagtttctttctggcaagaagttttggggaccagggttctaggccgtgggccccagcccagctcattccaaaaccattaggccaggtaaccgcagcagcacagtggggccaggtga

SEQ ID NO: 482228 - DNA, 479 bp, Homo sapiens
tcaaaaggccaggcagctcaggacgcctgggaaagatgggatggagagggcagggtccagggcctgctggggaggggccagacaggaacacagacacctttgtgtgcacctgatcagtgccagccactggctgcttcctgtcggaggggctttgtccctgtcctgtctcccatgcctggactttaggcaactctgggcctagggccacatccaaccacactgtgttctgtccccagcacttgctcggggccaggctccgagcttcccctgaaagcktgtcctggaggggatcgaacttcaaggcgaggcaggtgacggtgaatgtcttgacggccctcagcagatggggcttttactgaggttgagtttctttctggcaagaagttttggggaccagggttctaggccgtgggccccagcccagctcattccaaaaccattaggccaggtaaccgcagcagcacagtggggccaggtga

SEQ ID NO: 482229 - DNA, 571 bp, Homo sapiens
tagcacaatctgttctgcctcttaagccacatgactcagtaaatccagagatgctagatgtatctgtaatagataatgaagctacatggagtctctgacaagcccaaatataagggttgcagaacagacccatagggttttagataaaagccatgccttccttagcgtgcaactggaccccagcagactgagcaccgtaatgcgggatatgaagtgattttccaatcattctttcctcatgagttggatatgttcagatctgtcaatttatgacactgagggtttgcaacatcaatatattatacaatatttgatgggaaaagtattgtactgatgtttgtagttgtgtaacaaatcaccataaatttagcatcttaaacaacacgcatgtattatttcacagattctatggawgaagagtgtgggcacagattaactgggtcttctgcttagggtttcaatggctgagaaatcaaggtgttgactagactgttttctcatctagagtttactggagaaaatccacttccaagttggaaaaattcatttccttgcagtcacagggttaagg

SEQ ID NO: 482230 - DNA, 602 bp, Homo sapiens
actctgtcacaaaaaataaataagtaaataaacaaataaaaataatcatcctcatgagggcccttccgaatcattaaaaatagaatgtatttatccagtagggtctgaattctatgtattatttactttgcaaaatttggcaacccatgccatatttcactttgtgtaccaaagacataaagtagaaaataacatagtgtatatttgggaaaaaagggaaaagaccratcctgaactttgcatttagctggattttcattcatatctagtttagacctttccatggcaagaaatcttattgccattgattatcctactgactctttttcattttcctccaattaatgtgggcatccaagacccttctacccattagtttttcaacaacctacttgggcccattttgctttgcattcatttatatggtgctacgatgtgaatgtgcctcctccaaagtttatcagttggaaacataattgccattacgacagtattaagaggtgaggcctttaggatgtgattaggatgtgcatacctcgttttattgcattttgctttattgagcttttgagataattcattttttagaaattgaaagtggt

SEQ ID NO: 482231 - DNA, 602 bp, Homo sapiens
actctgtcacaaaaaataaataagtaaataaacaaataaaaataatcatcctcatgagggcccttccgaatcattaaaaatagaatgtatttatccagtagggtctgaattctatgtattatttactttgcaaaatttggcaacccatgccatatttcactttgtgtaccaaagacataaagtagaaaataacatagtgtatatttgggaaaaaagggaaaagaccaatcctgawctttgcatttagctggattttcattcatatctagtttagacctttccatggcaagaaatcttattgccattgattatcctactgactctttttcattttcctccaattaatgtgggcatccaagacccttctacccattagtttttcaacaacctacttgggcccattttgctttgcattcatttatatggtgctacgatgtgaatgtgcctcctccaaagtttatcagttggaaacataattgccattacgacagtattaagaggtgaggcctttaggatgtgattaggatgtgcatacctcgttttattgcattttgctttattgagcttttgagataattcattttttagaaattgaaagtggt

SEQ ID NO: 482232 - DNA, 402 bp, Homo sapiens
ttaatgtgccttgtgttctcatgaaaaagaaaaactttaatacaatccaaaatccatcagaaaacgagacaaacaaccttaaagattcagcgaggcttggtttgtttctaaagtgatcgcttaggcaatagtgcctataatatygtcaccaccaagtactgccttgaggtgtcacagaatgtcatacgtgacagtgatagcattctacattacaccctcttgcttaacatatttgtttttaacaatttttttatttctttgtaaacttgactggttaaaataaactagtattacctagaagtaggaggtcaatcaaagactaatctacagatatatgaaattcagctggagtcatttatatgtaatagttgtatgacatctgagaaatatcacaggactagg

SEQ ID NO: 482233 - DNA, 402 bp, Homo sapiens
ttaatgtgccttgtgttctcatgaaaaagaaaaactttaatacaatccaaaatccatcagaaaacgagacaaacaaccttaaagattcagcgaggcttggtttgtttctaaagtgatcgcttaggcaatagtgcctataatatcgtcaccaccaagtactgccttgaggtgtcacagaatgtcatacgtgacagtgatagcattctacattacaccctcttgcttaacatatttgtttttaacaatttttttatttctttgtaaacttgactgrttaaaataaactagtattacctagaagtaggaggtcaatcaaagactaatctacagatatatgaaattcagctggagtcatttatatgtaatagttgtatgacatctgagaaatatcacaggactagg

SEQ ID NO: 482234 - DNA, 491 bp, Homo sapiens
gctgctaccctggttttctccctggtgattaaggaggattagtggaaagtgtataaaatgtccgagcccctggttacatttgcagaaataaaaccctcccaaacccaaagctccgtgcagcccttgcatcyggtcgtggtgactctgcattgcctgggaacttggcagggtggcatacatgctcttgaagggctacaaggggaacggcagtcacttaaaaggaaaagccaggtctttggaggtgagcctgcgtgcaaaaagaacgcctccctttcacagtcatgtcttttccaaagaggagaggtgatagaacccctcagcatctggggtcctgagctggacaagggacaagcaggctcccagcttcacaaagcggcctcgttcccaaatagggtcgttgggaacttgggtcacaatttctcacggagacagtgctgacaatgatgattacagatctagggaggtccacagatagtcatttggttcataac

SEQ ID NO: 482235 - DNA, 515 bp, Homo sapiens
ggagatatcataacttgacttggggttgaattcaaatgctgccacaaaatagctgtgcatgacacctcatctttttttcatctttaagatgaagtcctgaaatttcaggacacttccaacttcaaaacgttcattccatgcaacagaaaggcaacacgttgatgactcctgtcccgaatcatattctatcttgtaccttkctatcagtcggtaaaactgcagatgctgacttagacaacaagctttatatcattgactaccaaacaatgtcaggttgaactttgtacgaaggggtaggttggtaaacacctggccagtgtggtgaagtgtggctggtgttggagggaaaggaagaggagatgacagtcacattaggaagctgctctgccctgagatgagctcagtgattcacaaaacgccatcgccaaacctggcacctactgccagtccccagtgactccctgggtaataaagaaattccggggctcttaagagtcgtcgtctgtttgaggggt

SEQ ID NO: 482236 - DNA, 626 bp, Homo sapiens
tacacccatgcatatctatatccatgcatgcatgcacatgctttatcaggccttccactccttaacagcctacagatagaaaacttagaggagcagcagggacgtactttcatgtactaagctacctagcatacaacttttaatggtttttkattttaaatggaaagaatctttcagcgggagacatcaaagggcctaagaaaaaaatggttttggtattaagtggctagtatgcttgtcaaaaaatgacaagaaataattaaaactaaactgaaacaaccaccacccctacaaaatccagaacaatgcacctcatttaaatgtttgtgaggaagtagaattgagtatctttctcacaagtaagttcttcttgaggcagaacagacaagaaacaagaactagaagtatttacaaatctatgtcagtggtagaaatttctccagcaggaaaacagagcctcaggctgtgtaatgaaagttgtactgtgagagctaacatttatttagtggatattatgtaaagtcagcattcccctatgcaaagcatattttggggccatgttgcaaacagcaatttctgcattgagttggccaaatgtgttcactaaggtgcccacaagcattgga

SEQ ID NO: 482237 - DNA, 637 bp, Homo sapiens
acccatgcatatctatatccatgcatgcatgcacatgctttatcaggccttccactccttaacagcctacagatagaaaacttagaggagcagcagggacgtactttcatgtactaagctacctagcatacaacttttaatggtttttgattttaaatggaaagaatctttcagcgggagacatcaaagggcctaagaaaaaaatggttttggtattaagtggctagtatgcttgtcaaaaaatgacaagaaataattaaaactaaactgaaacaaccaccacccctacaaaatccagaacaatgcacctyatttaaatgtttgtgaggaagtagaattgagtatctttctcacaagtaagttcttcttgaggcagaacagacaagaaacaagaactagaagtatttacaaatctatgtcagtggtagaaatttctccagcaggaaaacagagcctcaggctgtgtaatgaaagttgtactgtgagagctaacatttatttagtggatattatgtaaagtcagcattcccctatgcaaagcatattttggggccatgttgcaaacagcaatttctgcattgagttggccaaatgtgttcactaaggtgcccacaagcattggattgctccagatcgg

SEQ ID NO: 482238 - DNA, 615 bp, Homo sapiens
ctgtacacccatgcatatctatatccatgcatgcatgcacatgctttatcaggccttccactccttaacagcctacagatagaaaacttagaggagcagcagggacgtactttcatgtactaagctacctagcatacaacttttaatggtttttgattttaaatggaaagaatctttcagcgggagacatcaaagggcctaagaaaaaaatggttttggtattaagtggctagtatgcttgtcaaaaaatgacaagaaataattaaaactaaactgaaacaaccaccacccctacaaaatccagaacaatgcacctcatttaaatgtttgtgaggaagtagaattgagtatctttctcacaagtaagttcttcttgaggcagaacagacaagaaacaagaactagaagtatttacaaatctatgtcagtggtagaaatttctccagcaggaaaacagagcctcaggctgtgtaatgaaagttgtactgtgagagctaacatttatttagtggatattatgtaaagtcagcmttcccctatgcaaagcatattttggggccatgttgcaaacagcaatttctgcattgagttggccaaatgtgttcactaaggtgc

SEQ ID NO: 482239 - DNA, 471 bp, Homo sapiens
tagagaagatctcaaataaagatttgagaaatgtgttccttatctatgcttcctcacccaacagctcacaggataatgacctcagaaatctatttgtcatcctgcatataccccttttcctcacctctcactctcagagaatgactttcataaatacttcactgaaaaaatagaaacaatccaacaggaattttcctatttttctaccataataaatacaacatgcactcatctgctcaatatttcctgtttctttttctgttccaattattatgtttaaaagtcataacttgacttttgacaaatgttataaagttactttttcataggatcttttytttcttttctatttatttatttatttgagacagtcttgctctgtcacccaggctggagtgtagtggtgttatattggcccactgcaacctctacctcccgggatcaagagattctctcgcctcagcctcttga

SEQ ID NO: 482240 - DNA, 471 bp, Homo sapiens
tagagaagatctcaaataaagatttgagaaatgtgttccttatctatgcttcctcacccaacagctcacaggataatgacctcagaaatctatttgtcatcctgcatataccccttttcctcacctctcactctcagagaatgactttcataaatacttcactgaaaaaatagaaacaatccaacaggaattttcctatttttctaccataataaatacaacatgcactcatctgctcaatatttcctgtttctttttctgttccaattattatgtttaaaagtcataacttgacttttgacaaatgttataaagttactttttcataggatcttttttttcttttctatttatttatttatttgagacagtcttgctctgtcacccagrctggagtgtagtggtgttatattggcccactgcaacctctacctcccgggatcaagagattctctcgcctcagcctcttga

SEQ ID NO: 482241 - DNA, 574 bp, Homo sapiens
ctgacgttctactgggatttagctaagggcagtcaccagcaagacactggaggatgtgaaaagtgagcttatggtatttctttcctgcctcttcccactttggtaccttttttagccccactggtctatactacagctccagtgaatagccctgttgcactgcttcagctcttatgagactatggctacgaatcaggaagtatgcaatgcttcttgtcatgggaggagacattttctcatcccctagcattgctcacttcaaacacaaggctgaagaatggcccgtgtggaaagcagtcagagatttgagctcctgctgtatccaccaagacacgaagacgcatgaaagaccagatggagggatgaatatggctcacaacagtgaccccaggacagtcctctccattccccatttttcttccctttgtatgataacattggtgcaggttagcaaatcctcactttgattcagtggcattccaggtgggarcggagatgtcagttttctcttgatgtcagaggaactaattgaaatttcctctctttcctttcctatgaggggcttaagtgtgag

SEQ ID NO: 482242 - DNA, 574 bp, Homo sapiens
ctgacgttctactgggatttagctaagggcagtcaccagcaagacactggaggatgtgaaaagtgagcttatggtatttctttcctgcctcttcccactttggtaccttttttagccccactggtctatactacagctccagtgaatagccctgttgcactgcttcagctcttatgagactatggctacgaatcaggaagtatgcaatgcttcttgtcatgggaggagacattttctcatcccctagcattgctcacttcaaacacaaggctgaagaatggcccgtgtggaaagcagtcagagatttgagctcctgctgtatccaccaagacacgaagacgcatgaaagaccagatggagggatgaatatggctcacaacagtgaccccaggacagtcctctccattccccatttttcttccctttgtatgataacattggtgcaggttagcaaatcctcactttgattcagtggcattccaggtgggaacrgagatgtcagttttctcttgatgtcagaggaactaattgaaatttcctctctttcctttcctatgaggggcttaagtgtgag

SEQ ID NO: 482243 - DNA, 577 bp, Homo sapiens
gtttaaatatctgtctttaaacaacaactacaaagcccatttaaaactcactttagttatgaacatactagcaatttaactagagaatacccaaatcgccaatgtattatttgtaggatatagttctgatccaatctacacagattattactgatatctaaaaatagttcaaagagatgtgaaattcagtcagtagaaggttaaataaccaaaagacaattatcaagtgaagaatcaaacactgtaattcagtaagacscttacacatcaggaaaaatatagatgaaactatttgccttgtatactacagttacaacaattgtaaacagtataaaaatagttccttgcactctaaaataaaggttttaagttgaaatccattacaaaggttcaaaaagttcatgaagtgaaatataagaaataaacacttgtgctttttctaaatgtttgttttgttttctgctggagggaatctagagctttaatcaaatctcgaaggtaactataactctgaaatgtttatattcatgaatataaatggagaacgtcctcgtgacaatcattacaatttgctaga

SEQ ID NO: 482244 - DNA, 534 bp, Homo sapiens
actgtcttaggaaagacaggcctcatactaacgacagggttcaattatctttaggtaatttttcactccaaggttcttcacatacatatataatatattattgtgtgtgtgaatttaaacaataataaaacattttcagtattttttttcttatatatcagactatgttaataagtatcctcattttcaataatccaaaaaattgttttgataataagatatttggaaatcagcaaaagtacataaccaaatgtattttttattcattcatcaaacagcatttaatttctactatgtgctcagtactgtccaagatgttagtgcacataatgatgaaaaaaacaaaacaccatgtataaatattctgaatttgatgaataagtaacgctgaaattttatgkttttttttttctgcaaaataacgtttttacaaagaaaaaaacccaaaatttcagagagagtttaaagtagtccctgaaaggtaagtgtagtaagcctgatggttggtgcctaaatattgcactcactttcccc

SEQ ID NO: 482245 - DNA, 623 bp, Homo sapiens
acagatgtttttcaagatccatctgccaattacataagtgatcacataccacataaaaaatgtcaatactttgcaaaaattgaaattatatggcgtgtattctcagaataaacagaaataacaatagaaaataatacaagaattgcttgataatttgagcactccggaattagactccaactactaaacattatgtcaaagaggaaatcaaaattgaggttagagttctttatagaaaggtaggtccatgtgcacactatataaacaattcatggcatataaccaaagagtgctgaggagaaaattgatgggctatatgtttacaatagaaggaaatagattctaaaattatatactaaaaaagaatataacagttacatatatatcagtattcatgttttatataaatatatacatgcttctatgcaaactttatgccaattcytttgaaactataaattaatgaatttctacgttcccaaaaaattgaagaagtattaaaaataaatttgaaaaaaatttatctaaatattgaaacacaatagaaactagaaaagaagtacaaaccaactatgaatagcagatattaaaaacatatgtatttcatatatgtatatatcaaa

SEQ ID NO: 482246 - DNA, 443 bp, Homo sapiens
ggcgtcaaagacaggagggaaggaacaatgcagaggtcagagcgagagaaaaacagaggctggcagggaacagagcaagcagaagagaggcgagcaggaagggaggacaggctccagacctcccccactgtgcaccttcctcctgcctgagctgccctcccctggccaaattctggctgcagccaggacttcctgccccaggaaaccagcagcccagtgggccccttcaaggccccagcggctgctccagggtcctgygggcccttcctgctggggatgatgtcctcttcctccccagaaagtggggccccttctcccagctcccccagcagcacctccccactcagcatccccctcactaccccaaggccccagatggttcccagggccctcctgcctgcccaggcctgctatcctctggctctcttcttcccaccttaccc

SEQ ID NO: 482247 - DNA, 518 bp, Homo sapiens
tctgttccaggttcttgtttgtacttttgtctctagatccagaataacaaaacaacagagatgaacatgaacctttacctactagcaccatccattcactatactacactttattgaagacacttcattagaattggaaacttcctgcgttaattcatctggtaagattctcagtcactggacaatcaaagccatgttagttacgtgcttcattaagactgccttgcttttgtaaaacaagttcataacaccattccaagcatcaaataaatctgtttgtttcacacaatgatactggagcttatattttcttaccatatacagttgatccttgaacaacttgggtttgaactgtacaggtccacttatatgcagattttttttcaaccaaatacagatctaaaatacagtatttgrcctgggaaacatagactctttctctacaaaaaagtcaaaaattagctaggcacagtggtgcatagctgtagtcccagctacttgagaggcttaagcctagg

SEQ ID NO: 482248 - DNA, 398 bp, Homo sapiens
gtgtgatcacaccactgcactcagcctaagtgacagagcaagaccctgtcccccaaaaataaaagaaaatacagtattcatgggttgtgaaccccgtgtgtatgcaggacagactttttgttttttkgggggttttttggtttttttttttagcagagacagagtttcaccatgttggccaggctggtcttgaactcctggcctcaggtgatctgcctgcttcggcctcccaaaatgctgggattacaggaatgagccaccatgcctggccaatgaagggatttttttaaaggcataaacctataaggacaaagaaaacaggagagaagatgatacaatttggggaattggaaaatcaatggatgaatggttaaaaaaaaaaattccaaatggatgga

SEQ ID NO: 482249 - DNA, 620 bp, Homo sapiens
gtttactgtctgattcattaccttattccctattgctttccaaagaytcttccttcttacctttcctaggaaaacgggaattattttattgtcttttagcatagtaacatttctgctttctttcttgtgggactactagaaatgatagatttatagttttcatcaacctgattgcattctcataataatattggtccaggaagtatcatttttattgaatagcttctgttttcttttcttttttttttgagatggcatgatctcggctcactgcaacctccgcctcccgggttcaagcgattctcctgcctcagcctcccatgtaactgggattacaggcacgtgccaccatgcctggctattttttttttattgtattttttgtattttttgtatttttgtatttttagcagaaatggggtttcgccatgttggccaggctggtcttgaactcctgaccttcagtgatccacctgccttggcctcccaaagtgctgggattataggtatgagccactgtgcccggtcagcttctgtgttttctgcattgtcttaacaggctttctcccactccaaatttataaaaagtatctagaaattttcttccatttaaaaaaccc

SEQ ID NO: 482250 - DNA, 620 bp, Homo sapiens
gtttactgtctgattcattaccttattccctattgctttccaaagattcttccttcttacctttcctaggaaaacgggaattattttattgtcttttagcatagtaacatttctgctttctttcttgtgggactactagaaatgatagatttatagttttcatcaacctgattgcattctcataataatattggtccaggaagtatcatttttattgaatagcttctgttttcttttcttttttttttgagatggcatgatctcggctcactgcaacctccgcctcccgggttcaagcgattctcctgcctcagcctcccatgtaactgggattacaggcacgtgccaccatgcctggctattttttttttattgtattttttgtattttttgtatttttgtatttttagcagaaatggggtttcgccatrttggccaggctggtcttgaactcctgaccttcagtgatccacctgccttggcctcccaaagtgctgggattataggtatgagccactgtgcccggtcagcttctgtgttttctgcattgtcttaacaggctttctcccactccaaatttataaaaagtatctagaaattttcttccatttaaaaaaccc

SEQ ID NO: 482251 - DNA, 436 bp, Homo sapiens
ctggagggcacaggagtttgtatatcaaaggctataaaacttatttggagacctggttcaggatggatttggcctaatttttatattatgcaagcagatcaccccgataaactttcatgggtttatgccataggtcaaggtgcttccttctgcttcagattcattgtcttgctttggttagtgttcaaaacagtacctcttatgaatacagcctgacgataccctcccctgtttctctgctaaacaattggagcttatcattttyggcaagacagacctaggggctaacttctgcctatggaatcaacagggtctctatgtaagatgagcttactgtgtcttctacatttttagttacacgaatcttgttgcaatcaccatgaaaggactctcccatggatttttggtccattcatgtctagtaaaactgggttat

SEQ ID NO: 482252 - DNA, 562 bp, Homo sapiens
tgttggttgatctagcctggctcggtttggcccctgacatctctcattctcctcttattccaggcctgctctcatggtgatagcacagcaacaagagagagaggtcaagctcagccgtgcaagtactttacatgcctctgcttgtgttatgctgggtgggtggttcagggaatgactcagaatgaccaaccacagatggaggtgactgcaaagttacagggtaaaggatgtgacttcaggggggctgaagaattgaggcccttttatgtgatccaccacaatcttagaagagagttatttcccgttgtcgtttaatttttcctactgaaagaataaggttggaaaaagggaagaagctctttttatgagtgaatataaaattctggacaggataaaagccaggaccccatttttattacatttaaaaagtaatagggattatgtaacaactgtgtaagaaaaacagaaaactctataggatgtactctttggaataaaatggaaagaaatacaagttcttgggcatmtataacttgcccaattatttgaacaaattaattct

SEQ ID NO: 482253 - DNA, 459 bp, Homo sapiens
ggcccagctttgtctgttgggtcagggaacagggaaggcttcttagaggaagtgacaactgagctaagatctgaaggatgggtaggaaccaaccagaccaacaagggraaggggggtatccaccccctgcaatatggtttgtaatagccacggtgcgggtgggggtggcggggaaaggggagtgcaattactccccatattgcggggagtgtccacccctgtgatatggttcataatagccagggagggagagtgggagagcttcccttctccactgaggaggggctgagtgtcaaagggatcactgggtcttgcgggaactaggtggatattgtttggctggagggccttgggtgtttgaaaactgaggtaaatgctgccagtgcatgggtagtgagagtcgaggtagagagagggtgtgttgtggtgagtcagagacctcagctatttggagaaagc

SEQ ID NO: 482254 - DNA, 585 bp, Homo sapiens
ctggaatcatccagcagttcctcctttatgctggtttgtggccattctcgttccaagagaagacaaacttgcatttcaaaattaaactctgaaatttaaaaataaaagcaggaaaaaaaaaaaaaccaaaactttcctaggccagaaggaatgatttaaattttcggagagctccttggcgtttcaagggtagtgataaaccattggaatttactttgatgtttcagctctagcacagcaccccctcagcctccccaggcctcctcctccatcccctgtgtctgactgggtagttactgctctggggcctggaacccttccagtctcattcccctgtttgtgtatctgaatatctctatgtctttagatcttcttcatgctgcctctgttgtcctgtctccctctcccaaagtctgtttgtctgtcttgttgccccccyggccccgtgctttttaaatttggctcctgctttgtggcactgtcttgaatacacaggtttgactgctggttgacatttatttatttgtttgtttgtttattttgagatggagtcttgctctgttacccaggctggagtgcaatggc

SEQ ID NO: 482255 - DNA, 572 bp, Homo sapiens
taacatgctccctacccagggtgcttttggagaatatcttttttaaatttttaaaatcttaaaagtttagracatttgtgtgcactaaagtgttctataacttcactcctttccactggagacaactctgaaaaaaccacaggccctgctcttaagaaactcagtctgcggagcaagagagatgcaaataattgctttaataggtgactgaagtgtaaaggggacacttcttgcctaaagacctaacagtgaacttgacagatactggtctaaactgggtatctttccccatgttacagagaccagagctggaatgggtaagactagctgcatggtgatggtaggaagcctattgcaccagtatccttcccaaacattcctacccttccaagtagcctaagtccccaagatgctaaccccgtccaatcccgcctcgctgtggactgtggacactcatcatgctgctcaccttccccagtaacctcattagcaccttattcttacagctttccctgctagtctttgctgaactcaacaaagggaggacgttgctggtctgtctctgcagcaca

SEQ ID NO: 482256 - DNA, 485 bp, Homo sapiens
ctgtagaaataacatcaaacatcacttacctggtataggggacactggaatggccccacagtgatcctccaaattaatattttctggctccaattactctgatttttccctaatctttaccgaattccaactgttacagtagaggctcagtgactgtctgtgatggggggaggatattgtactaattcctgcacaggaattagctgcaattccatycctgtcgtgatattttatgttatttttagattcctttcaatgctcttttttttattttatgttaacagttactaaactgtttatctctctcgaacaggggctttgtctattttcttttctctatgctccataataaaatttgtgcaagaaacacactcagagtgtgttggatgactgcatcaccacagttgggtgacccctgtgcatgcagatgtgcttgactggccttggcgaactagttgagaatagaattatgaatctttcttgct

SEQ ID NO: 482257 - DNA, 502 bp, Homo sapiens
tcaaagcacttgccgaaatgatgtgtaaccattgttctcccatctgtagtagaagggtaccattgtgtctgcatgctcaatatgattaatattattatgctttaatttgtttacctatgcctataagtatgaaattacatctcattgtttgcattatttctctgattatgggtgaagtcttactgtgtatttatcagcaatatggattgcttttctgtgaactgagtgtactaattctttgtcaatttttaatatttttccgtattgatttgtgggattagtctatttattttatatacatgtaggagyactaattctttatcagttatatccatagggataaacagttttatgcctctgaaagctcccttgtagtattacatagaactataacatcactgatggtcatacttatggcaacgtagacaccgtggagtggcattaatataactcagtttaagaaagagggaacttgtaattatatttaagaagatacttattc

SEQ ID NO: 482258 - DNA, 497 bp, Homo sapiens
atcctgattttttcccccccccacatgccactttggacaggggaagctgcattctggactcgtaccacagatcagaatgtaggaaccattggttaacaccataacattggttaacatctgctagaaggtgaacatttgtcttgccaaattaagggtgaagctcaactgtatttttgagggcaccatttatccattgtgtattccaaattactgtctacaataagttacactaagtttacaagctattgtttaatttattaaataaacawgtacaaaacaccaattctgtgtcatgcactgagtcaggcacttggattgtaaaatgaaccagaatatagaatacagatgtaacaaagatgaataaaaatgtggagagaagacattatgatataacaaagaaattgaagttaagagacctgcatcgttggttcctgccccacatctaagaaccttcctgcccatggcatgcagtatctgtgaatggtcctaatgaggca

SEQ ID NO: 482259 - DNA, 609 bp, Homo sapiens
tgccacttactagcccgctgaacaatggctaagttaattaacttgtctgtgcctcagattcttcacctgtggtatgagatttgtactagtaccttcctcatgtgtttaaataaactaatgcttataaagtccttaaaacagtgtctggaatataggaaatttacataaacaaggtctcgtcccaaagtgatataggaacattgtgcatgccagagtgggtatgcaagttgggggaggcattagagaaaaagaaaaaaacttaatgacaaagygaaacttcctagctaatattgaattttcagccattattacagacaccattaggacagaatttcctgatactactcattctacctatttttaagtccagatctgcttgttccctttttactgtgagaaaacctcactgaagcacaaagaactttggtagaaatgattcaaccatcagggcaggaggaactctaagtaaaagagagctaattaaaacatctgaccacaactcaaatttgtccatttcattgcatgaatcagttttaacccaatgtctgataccccatagaaaacctggtaccatgatgaaaagctcaagaacccgtaaattatttggaa

SEQ ID NO: 482260 - DNA, 613 bp, Homo sapiens
tgggtggttcttactaaactgacttaacaggattctttgttaaaactggattttacaaggaaatgcacaaatgggagtaggaaaagatttaggagcctggctaaagttaggtaaagcaaagaatctttgtcagaatcagtagtggaatgacagaaaaattcatgctgtatctctatcattaaagattatgtagctatctaaaagaagyggttagaaagtcttctcccaaattgtgttcctggaacggtagagtcaacattgcctgggaatgtgttataaatgtgatattgacaaaaaattattgggctccaccccagatatactgaatcagaaacttgggggatgagatccaacaatctgtattttggcaagtcctccaggtgattctgatgcatgctaaagtttgagaaccattgagttagaaggatatcctccatttatctagaatgggaatgtacaagatattttaaataagaaaagcaagttgcaaaccaatagggaagacttacagttgaattaaattgtgtgcatgtgtgtgactgtgtgtgttgtgtaaaatacaagatgtggtagggtatttgtaagattcataaaatgaatacaactaatgaca

SEQ ID NO: 482261 - DNA, 522 bp, Homo sapiens
tgctcacaaatgataataaagatctgggagggtgaaggggccaaggagaatctgtccttccagcggctctctgggaacttgccagagaaggctggagcaggggagggccttcaccagacgtggcctggttctcacctagatgctgggcagagaccaaggagcacgtgcgagggccttccacttggaaagcaccatgccagcatcaggagtggtcctcctgttcaggtatggtggtcacaaagaaaatggaagacagcaccatggcacgtgtatacctatgtaacaaacctgcacatgtatcccaggacttaaagtattaaaamaaaaaaaaaatggaagaggggctgggaagctttgggctgtcagagaaagtcaatttccaggcattagccactcaaacggacttacacttcagacttaggaggcagcttcagactcgctaaaatactatccatgtcagaattcaaatccttcctcttcacaccctcctgatagatgtaaaagcccttcccagatttacga

SEQ ID NO: 482262 - DNA, 602 bp, Homo sapiens
atgccgcaaacactctggagagcaataccaacctggaggattcggatgacttcagacatcatgggcgcaagacacctggtagtatagaagccaggtccatcctgccaaggaagagaacatgagctcmctggccctgctgctgggactgagtctgaaacactctacctttcccagggtcacttcaaagtcatttgaaagtcactgtaaaacttaaggtgacttaaaatctcaatcagaatccttaaaaatgaaattgcaggggaagccgtactaggggtagcctggcttgaatcaaacagtacagcagatagtttcatggtcaccttcaaggtctgggatggctgggagaaccctgccacatcctagatactccccactcccaccttgactcagtgggacagtcaataccaccgtccatcctggagacaacccaggggaaaatcatatcaaagtctggtcatttgccccagaatatttataaacaagcctggaggtaaaaggagtcttattagaacttttcaaaaactctgcagctctgttatacagccccttaccttaaccacaatgatgaccttcccctgcttgagaccaactgctacagc

SEQ ID NO: 482263 - DNA, 630 bp, Homo sapiens
tcgggtaaagggtgtatgggaacttcccatagtatttttgtatctttcctgcaaatctaaaattattccaaaataaaacatttaaaagaaagatactggtgaagaaatgccaaaatgtrtactgaatcaagtacagtgttgcttagatttacaaagatgaagaagccacacttccacagaaaggggttttggggagagtggtgggtgggagaacccgtgatctgaattctctttccattttggacttttgtcccattgcttattttcaaactagacaaaaaataatctaaaatgcttcattttaatttcttaaacttcagcaatccaatacaacctacaaatagagttagtttacgtttttgcttttctttgtgcccaactaatttttaaaaaatttttatgattaatttttgtgggtatgtagtaggtgtatatatttatggggcacatgagatgttttgatataggcatgcaatgtgtaatcacatcgtggaagatggggtatttatccctcaatcatgtatcctttgtgttacaatccaattatactctttcagttatttttacatgtacaattaaattatattgtctatagtctccctgttatgcaattaaatactaggccctatt

SEQ ID NO: 482264 - DNA, 630 bp, Homo sapiens
tcgggtaaagggtgtatgggaacttcccatagtatttttgtatctttcctgcaaatctaaaattattccaaaataaaacatttaaaagaaagatactggtgaagaaatgccaaaatgtgtactgaatcaagtacagtgttgcttagatttacaaagatgaagaagccacacttccacagaaaggggttttggggagagtggtgggtgggagaacccgtgatctgaattctctttccattttggacttttgtcccattgcttattttcaaactagacaaaaaataatctaaaatgcttcattttaatttcttaaacttcagcaatccaatacaacctacaaatagagttagtttacgtttttgcttttctttgtgcccaactaatttttaaaaaatttttatgattaatttttgtgggtatgtagtaggtgtatatatttatggggcacatgagatgttttgatataggcatgcaatgtgtaatcacatcgtggaagayggggtatttatccctcaatcatgtatcctttgtgttacaatccaattatactctttcagttatttttacatgtacaattaaattatattgtctatagtctccctgttatgcaattaaatactaggccctatt

SEQ ID NO: 482265 - DNA, 261 bp, Homo sapiens
gtttaacaatcagctcttaaaaacaaaacaaaacaaaacaaaaagcccagatttgaagcattcacatggcatagatactcccaccatrgtctatttcaaggtcccaggggaatgtctttgaagccctaaactggggagagatgcacatagctcctgagctagtgcaagccagctccagctcaccactagatacgtgccaaggttaccacactccaattaaatgagttcacaaggctgcagaacctgggacctggcagtgga

SEQ ID NO: 482266 - DNA, 615 bp, Homo sapiens
ctgaggggcatatgctgcttccagtataaagccaggggtctcaggagcatgagcgtgaaaatccgctacgattctgccagtcttcagagggctttatttagaagaacattttaatggctttccctggacccttctcatgtcatggatcggtcgaacactcagttgacgttaattggtcttccaaatcattattctgaaagtatcgtgaatcagaaagatcaaaatattggtcaagtaaacattcaaatgtcatcttgtaaacatataaaatacattcttgtccccctaagtgttgcaatgattccttcagatgtatttaatgatggaggcttagagttagaagtcaagctttactaagaaaaacaagaaaatgcatttgtttcttgcttgcctgcttgcttgcttttatttgcttgtaggtgaaacagagaatggtaaataaagatctcgggtcgggcttcaggtgagattagaaataattatgaagagaaattttacaacagttattcatttgttcattcccttattcattgtattccattcgggtgactatatgctaggtattgtgcaaggtacagaacaccaaggtwaaagtagccctggccatgttcccag

SEQ ID NO: 482267 - DNA, 528 bp, Homo sapiens
ttctaatttttcctctccaaccaccattctactctttaggttattttgtttttatttattaatttaatttaattttagagacagggtcttgctctgttgcccagggtggagtgcagtggtgccatcacagatcactgcagccttgaattcagctcaagtgatccacctgcctcagtctccctagcaggtaggactacaggcccacatcaccatgcccagcttctacygtctgtttttgtgcattcgattagaaacgtttttctaaataccacatataagtgagattatgcagtatttttctttctgtgtctgccttattccactgagcacaatgtcctccagatttgcccatgttgttgcaaatggcaggctctgccctcatttttttctaacgaagaagttggagctcagagaagacaagtgacttgctcagagtcactgcggagacacaatgattattttcttcctgacaagtcacctggaagaccatgaacttgttctagtgatactgccattgctggaaatatt

SEQ ID NO: 482268 - DNA, 493 bp, Homo sapiens
tgtgtgacttcaggcaaattacttaacttctctgggccgtgtgggtcttacttgcaaggtggggacaatcacagtacctatttcataggctcattgtagagattaaaggcacagatgtatgaaaagcacttggcagagggctaggtgtgcagcaaattcttggtcaaggctgaccaccacctaggggcttgggcttcacctcgagggcagtggggagccactgaaggctttaggcagaagaatgactgggacagatgtgaattttcaaaatatccctcttagttggtgggttggagatcctagctttctaatttaaggcattttattggccaggcaagtcaatgaattaatcattctatacctgttggacacttaccatgtgcttttgctacattwgatgactggagaatggaaaaaagtatatatatgtgtatatatatataacaattaggcactgttctaaaaaacagagtatttattttaaaattgtggc

SEQ ID NO: 482269 - DNA, 630 bp, Homo sapiens
ttgtgagaacttgctttcacttcttttggatatatatatatatatatacccagaagtggtattgctggaccgtatggtaattctaaaaaaaaaagcaaaaagcatttatttaaaaaatataatgtaacattactgagaaaaaatgggaaagataataaaaatgcacctgtaaggaaatcaactgaaaccagcatttgctattgtttttatgtatttcctccattccttgtacttaaagtgtacagtcttctcaaagtktgtgggtgtagaattttctattacaagtttttcactaaaaaaagttttcaatgttggtaggtagtttttataaaaagcatcaattaaatggctgtctaatttcaaatcactgataattgctaatttagttaactgtttccctattattgggctgaatgctttaacaaggagtcactgactgctgtctgtttttattattggttgtttcaagacagttaatgccctgaatgtgtattcctgagtaagacagtaaatcttaggtaaaagaatgtgaaagaggtgatatgtgtaagtgtattttattttttactctctgattttatttttataactagagaataaagattaaatgagacaaatttataaaatgcc

SEQ ID NO: 482270 - DNA, 630 bp, Homo sapiens
ttgtgagaacttgctttcacttcttttggatatatatatatatatatacccagaagtggtattgctggaccgtatggtaattctaaaaaaaaaagcaaaaagcatttatttaaaaaatataatgtaacattactgagaaaaaatgggaaagataataaaaatgcacctgtaaggaaatcaactgaaaccagcatttgctattgtttttatgtatttcctccattccttgtacttaaagtgtacagtcttctcaaagtgtgtgggtgtagaattttctattacaagtttttcactaaaaaaagttttcaatgttggtaggtagtttttataaaaagcatcaattaaatggctgtctaatttcaaatcactgataattgctaatttagttaactgtttccctattattgggctgaatgctttaacaaggagtcactgactgctgtctgtttttattattggttgtttcaagacagttaatgccctgaatgtgtattcctgagtaagacagtraatcttaggtaaaagaatgtgaaagaggtgatatgtgtaagtgtattttattttttactctctgattttatttttataactagagaataaagattaaatgagacaaatttataaaatgcc

SEQ ID NO: 482271 - DNA, 630 bp, Homo sapiens
ttgtgagaacttgctttcacttcttttggatatatatatatatatatacccagaagtggtattgctggaccgtatggtaattctaaaaaaaaaagcaaaaagcatttatttaaaaaatataatgtaacattactgagaaaaaatgggaaagataataaaaatgcacctgtaaggaaatcaactgaaaccagcatttgctattgtttttatgtatttcctccattccttgtacttaaagtgtacagtcttctcaaagtgtgtgggtgtagaattttctattacaagtttttcactaaaaaaagttttcaatgttggtaggtagtttttataaaaagcatcaattaaatggctgtctaatttcaaatcactgataattgctaatttagttaactgtttccctattattgggctgaatgctttaacaaggagtcactgactgctgtctgtttttattattggttgtttcaagacagttaatgccctgaatgtgtattcctgagtaagacagtaaatcttaggtaaaagaatgtgaaagaggtgatatgtgtaagtgtattttattttttactstctgattttatttttataactagagaataaagattaaatgagacaaatttataaaatgcc

SEQ ID NO: 482272 - DNA, 545 bp, Homo sapiens
ggcttctccatgggacaggtccagaagtagcatggggtgggcttgaattttgaagccgaatctgcatcttagacacttttctgttatgaccctcagttgcctcatctataaaatggagatgaagggaagaaaatgtaatttctttttttaaccgtcataagttctcagttgaggtgctgtcctgaaaacaaaggtcagattaacaagagaaaaactagcaggagtttattgacacttgctgtgtgcccatgatgtgggagggacttmagttctaacatatttctcttaaggcagtggtttaggggccttgcttcgacagtattttaacaaagagccataaatcctataaagacaaaacaaagctaagtttgctcccagattttcttatctctgctggcctcctttctgagctggtaagagcccagagctgtccccagtaagaacaaaactcacatctctttctgtatgcaggaaaggaaggggaggtagcaagatcttttgtttttgtgaatcgccatcctgccttcaggcaggcgcagggagag

SEQ ID NO: 482273 - DNA, 545 bp, Homo sapiens
ggcttctccatgggacaggtccagaagtagcatggggtgggcttgaattttgaagccgaatctgcatcttagacacttttctgttatgaccctcagttgcctcatctataaaatggagatgaagggaagaaaatgtaatttctttttttaaccgtcataagttctcagttgaggtgctgtcctgaaaacaaaggtcagattaacaagagaaaaactagcaggagtttattgacacttgctgtgtgcccatgatgtgggagggacttaagttctaacatatttctcttaaggcagtggtttaggggccttgcttmgacagtattttaacaaagagccataaatcctataaagacaaaacaaagctaagtttgctcccagattttcttatctctgctggcctcctttctgagctggtaagagcccagagctgtccccagtaagaacaaaactcacatctctttctgtatgcaggaaaggaaggggaggtagcaagatcttttgtttttgtgaatcgccatcctgccttcaggcaggcgcagggagag

SEQ ID NO: 482274 - DNA, 257 bp, Homo sapiens
caggctaaggaaaaaggacaccaaaacgaagaagacacagaggtgaggattcacgatgactgggtagtgcagaggrcgacagatggctacaaagcagtcataggccatcacagtcaggagcatgccttctatacatgcaaaaaggaccaagaaagacatctgcgtcaggcagcccgcatgagagatgactctgctatgcgactgcattccacaatcatcttggcaaccgtggccgaggtgaaaccgatgtcagccca

SEQ ID NO: 482275 - DNA, 257 bp, Homo sapiens
caggctaaggaaaaaggacaccaaaacgaagaagacacagaggtgaggattcacgatgactgggtagtgcagaggacgacagatggctacaaagcagtcataggccatcacagtcaggagcatgccttctatacatgcaaaaaggamcaagaaagacatctgcgtcaggcagcccgcatgagagatgactctgctatgcgactgcattccacaatcatcttggcaaccgtggccgaggtgaaaccgatgtcagccca

SEQ ID NO: 482276 - DNA, 257 bp, Homo sapiens
caggctaaggaaaaaggacaccaaaacgaagaagacacagaggtgaggattcacgatgactgggtagtgcagaggacgacagatggctacaaagcagtcataggccatcacagtcaggagcatgccttctatacatgcaaaaaggaccaagaaagacatctgcgtcaggcagcccgcatgagagatgactctgctatgcgactgcattccacaatcatcttggsaaccgtggccgaggtgaaaccgatgtcagccca

SEQ ID NO: 482277 - DNA, 443 bp, Homo sapiens
gtcttctcattgcatcctcatatgacagaaaagaagtgcacaagctctctggccccctcttacaggtgctaatcccattcacaagggtcctaccatcatgacctcattacctcccaaagaccccacctccaaataccaccacattgccattaagcttcaatatatgaatttaagggggaaacaaacatccagtccattgcaggttgtcctgataatatgtgtgcccggggcattgtccccacagcaaakagcgacattggaaggcaaaccaatgtcaggtttcctaatgtgcacagaggcgtccgtggaagagtgagtccggtgatcttaccagctaattgcattgagctaccccaccttggggatttacctgccaaggagaacagaacaccactggctttgacacccatctctcaacaatgatggatgaatgctggaaattt

SEQ ID NO: 482278 - DNA, 443 bp, Homo sapiens
gtcttctcattgcatcctcatatgacagaaaagaagtgcacaagctctctggccccctcttacaggtgctaatcccattcacaagggtcctaccatcatgacctcattacctcccaaagaccccacctccaaataccaccacattgccattaagcttcaatatatgaatttaagggggaaacaaacatccagtccattgcaggttgtcctgataatatgtgtgcccggggcattgtccccacagcaaatagcgacattggaaggcaaaccaatgtcaggtttcctaatgtgcacagaggcgtccstggaagagtgagtccggtgatcttaccagctaattgcattgagctaccccaccttggggatttacctgccaaggagaacagaacaccactggctttgacacccatctctcaacaatgatggatgaatgctggaaattt

SEQ ID NO: 482279 - DNA, 568 bp, Homo sapiens
ctggacaatggggatagtaaaggttgtgagtgaatgaactaattcacgtaaaggacacagcatgttcccttattagacacaatagatcccctcagtgggtgctgtcactactcttaccgttaccagtaacaatttttgggccatgagaagctttagacattctggaaagcaaaagaaaactgagaaagtgaaacaacccagaccacatacctaattagggacaaaagcagaacagagctgtgactccscagtccagtcccgaagtcttcctatgccagcactccagggagcagagggaggtgtgctctgcagttatcacccgggcacaggtgagatgcagggccaccccgtgagagtcacatgatgtctacagcgcatggaatttcagtctgtgattgtattagtttgtcttcactctgctgataaagatatacctgagatggggtaatttataaagaagaagaagtttaatggactcacagttccacgtggctggggaggcctcacaatcatggcggaaggcaaaaggcatgtcttccatggcggcagacgagagacgagagagaat

SEQ ID NO: 482280 - DNA, 568 bp, Homo sapiens
ctggacaatggggatagtaaaggttgtgagtgaatgaactaattcacgtaaaggacacagcatgttcccttattagacacaatagatcccctcagtgggtgctgtcactactcttaccgttaccagtaacaatttttgggccatgagaagctttagacattctggaaagcaaaagaaaactgagaaagtgaaacaacccagaccacatacctaattagggacaaaagcagaacagagctgtgactccgcagtccagtcccgaagtcttcctatgccagcactccagggagcagagggaggtgtgctctgcagttatcacccgggcacaggtgagatgcagggccaccccgtgagagtcacatgatgtctacagcgcatggaatttcagtctgtgattgtattagtttgtcttcactctgctgataaagatatacctgagatggggtaatttataaagaaraagaagtttaatggactcacagttccacgtggctggggaggcctcacaatcatggcggaaggcaaaaggcatgtcttccatggcggcagacgagagacgagagagaat

SEQ ID NO: 482281 - DNA, 399 bp, Homo sapiens
ctctgcactacccagtcatcgtgaatcctcacctctgtgtcttcttcrttttggtgtcctttttccttagcctgttggattcccagctgcatagctggattgtgttacaattcaccatcatcaagaatgtggaagtctctaattttgtctgtgacccctctcaacttctcaaacttgcctgttctgacagcgtcatcaatagcatattcatatatttcgataatactatgtttggttttcttcccatttcagggatcctttggtcttactataaaatcgtcccctacattctcaggatttcatcgtcagatgggaagtataaagccttcgccacctgtggctctcacctggcagttgcttgctgattttatggaacaggcattggcatgtacctgactt

SEQ ID NO: 482282 - DNA, 653 bp, Homo sapiens
tgcctcttcagtctactgcctatgcctgattgtccaggtaatcccacagacaagctttgcattaaggaactgcacaattcaggactaagatgtgctacacaaggtgttatagcgtgasagaaggagcagaaggttctcttccatctttgcgactaactcacctagtgacaagcagtaaaaattttctgtggtgaagacatggactccatctgtcttattgaacaatgtatctctggtgcctagcagagtgtctttgacataataggcactcaatacatatttctggatggatgagactctgggcctcagtttttcatctataaaaatggagaggtcccctattggactagatgatctcttttagaggttttttcctagttctaaaagctacaaatctatacaaggaatgtgatggtggaaagatggtatgaatggcgtcaaaaaatgaaaatatggggggaaaagaaacaagaaaaagtttagatcaatgtgaatgaagaaatgcttctaaagaaaacaacagccagaatggaatttcaacctgcagagaggactcctagagcaaaggcccctcaattctaccaacaggtcaaatactactggatagaatttgtggatgttttttcagcagtgccattaatagattacttctc

SEQ ID NO: 482283 - DNA, 653 bp, Homo sapiens
tgcctcttcagtctactgcctatgcctgattgtccaggtaatcccacagacaagctttgcattaaggaactgcacaattcaggactaagatgtgctacacaaggtgttatagcgtgagagaaggagcagaaggttctcttccatctttgcgactaactcacctagtgacaagcagtaaaaattttctgtggtgaagacatggactccatctgycttattgaacaatgtatctctggtgcctagcagagtgtctttgacataataggcactcaatacatatttctggatggatgagactctgggcctcagtttttcatctataaaaatggagaggtcccctattggactagatgatctcttttagaggttttttcctagttctaaaagctacaaatctatacaaggaatgtgatggtggaaagatggtatgaatggcgtcaaaaaatgaaaatatggggggaaaagaaacaagaaaaagtttagatcaatgtgaatgaagaaatgcttctaaagaaaacaacagccagaatggaatttcaacctgcagagaggactcctagagcaaaggcccctcaattctaccaacaggtcaaatactactggatagaatttgtggatgttttttcagcagtgccattaatagattacttctc

SEQ ID NO: 482284 - DNA, 494 bp, Homo sapiens
agtgatgcatactgcccagagaaaaygctcaacttcttgatcaatcatgaacttgctctgaaaacgctgattttcattaggtgataaatcagaaatttcagggcatcctaggagcactccccaggaacaaacttcaaggagtgacattcaaactaatgaaaatgtgtttctccctcccttttgaaatggcagcgataatactgaaaattaagaacggcaatgataggagatttccaaaagcaaagtacctttgggcaatacaaccgcaaaagataatctatagaagctcagccattccaacaattcacacagtaccttcgtgcctggcaggttgcaattctgtcttgctttggcaaatgagtcagtcagaagccagaaagaaaagctgacttctacaccctgcagtcttacaaagccaaccaactaaatcaacaaggactagctaatgtttgtacttttctctccctgcttttttgagcaccacaaattcaaag

SEQ ID NO: 482285 - DNA, 604 bp, Homo sapiens
cttctcctgctcttccagccaagggggaggccccctgcttgggagctccygggggctgtggcttgatagcagcaatctcagaggtatctggtgttacttgggtgttgctgtgggaacctcaccactcatgggttaccctttacactggtgaccttttctttcgtgtctgagcaggatgacatctcaaatgtcaagaactttaattttcacttagcaacgtccctgtgaggtgatttccagccaacttggaagcggaaagttcaggcatttctgagtgggtcgaataataacaatttaaaaaggatcctcaaacaaaatgaaaaaggccccagaaaacccagactctcaccgatccccaaaccccgtcatgcttctgtttcctcaggaaggtgacgcggtttcaagctcttgttgcatgtcaggtgcactggctatagtgggagctggtggcactagtgagtgggacgtttcagttctaaatggatcagggaagttgcatcctcccccatctccaccactcgcttgcctaccgcagcctctttccccaccccccacctgcaggtgtagctgctgctgtttctcccgaggcggccactgagagcca

SEQ ID NO: 482286 - DNA, 604 bp, Homo sapiens
cttctcctgctcttccagccaagggggaggccccctgcttgggagctcctgggggctgtggcttgatagcagcaatctcagaggtatctggtgttacttgggtgttgctgtgggaacctcaccrctcatgggttaccctttacactggtgaccttttctttcgtgtctgagcaggatgacatctcaaatgtcaagaactttaattttcacttagcaacgtccctgtgaggtgatttccagccaacttggaagcggaaagttcaggcatttctgagtgggtcgaataataacaatttaaaaaggatcctcaaacaaaatgaaaaaggccccagaaaacccagactctcaccgatccccaaaccccgtcatgcttctgtttcctcaggaaggtgacgcggtttcaagctcttgttgcatgtcaggtgcactggctatagtgggagctggtggcactagtgagtgggacgtttcagttctaaatggatcagggaagttgcatcctcccccatctccaccactcgcttgcctaccgcagcctctttccccaccccccacctgcaggtgtagctgctgctgtttctcccgaggcggccactgagagcca

SEQ ID NO: 482287 - DNA, 613 bp, Homo sapiens
atgggcccatctcctgagtttagtgcctggagtttgctttagtgctaaagcaagaagtaaaaatgggatttaaagaaaccaaatggaatcacagtcatggagtgtcagacctggacgatgccttggtgacgaggtgactcccttcccttggcagagcagtggaagaaactgaagctctgagaaattcagggatgtgctagaggttccagaactaggcctggaactttcttcggggttcagtgctatgcccgaaacagtggaaggagcccgcagtgtggcacagagccccttcagagctccagcaatcttgagcttagcgtatgagtagaccctggaagccagaggactgcctgccatctccccagagttctcaggaccagtgctgctgaggtgatgcacttgaagtgtgtgtccacagtggtcaaaagttagcgctggggccctgtgccctggctcccacatctccaggtctggyctccatcggcccctccctttcctttgtggccttggccttggcttatcagtgtctctgccaggatgtcctcatcctagagggtgagctgataaggcagtctcataggatgcagggttggaaggtgcctcagggacactt

SEQ ID NO: 482288 - DNA, 517 bp, Homo sapiens
tgctctgccaaggagtggctgttctttattcctttacttttcctaataaacttgctttcattttactttatggacttgccctgaattctttcttgcgcaaggtccatgaaccctctcttgggatctggattgggacccctttccggtaacatcttcctggtgaaccatgaagggatgatactgaggaaacttccartccttcctgcaacacacacacacacacactcacacacacacacacacacacacacaaacacacacacaaataaaaaagataaaacccaacattttaaatccttcagacccgcatttcactggtaagtagaaagtcaagggacacagggcttggttttcatggttttctcttatttgggtggagcaaatttcctgatcattcctgtgacgtgggaggcaaatatttggacaccttgaatgtctgacatcatctccattgtaccctcacacttagttgataatgggtttggtacagcattcagggttggaaatcattttcccc

SEQ ID NO: 482289 - DNA, 669 bp, Homo sapiens
tgcaagtatgggttttatgggtttgctcgtgtgagtgggagacacaatctatggcttcctctcgtaaggacttgtaatctactcttatagagaaggaaaccacaaatggctcagaaaagaagaaagattaaaaacaccaaagggataaataatgatggtatcagttttctaggactgtgataacaaaataccacagggccagggagcttaaacaacaaatctactttctcacggttctggagtctggaaatccaagattaaggtgtctgcagggttggtttctccccagtcatctcttcttggcttgcaaatggccctcttgtgggtgtgtcctcacatggtcaccrctccatctgtgtgtctcaagtgattctcctgcttcagcctcctgagtagctgggattacaggcatacgccaccatgcccagctcatttttgtatttttagtagagatgggatttcaccatgttggccaggctggtctcgaactcctgacctcaagagatccacctgccttggcctcccaaagtgctggcgttacagacgtgagccaccatgcctggctccggtgggcatttttgacacctgcacaaggtgagaggggaccaggtgtcctggttgttccaatggggaggaccctggaagggaggctggtggctgtccacagct

SEQ ID NO: 482290 - DNA, 669 bp, Homo sapiens
tgcaagtatgggttttatgggtttgctcgtgtgagtgggagacacaatctatggcttcctctcgtaaggacttgtaatctactcttatagagaaggaaaccacaaatggctcagaaaagaagaaagattaaaaacaccaaagggataaataatgatggtatcagttttctaggactgtgataacaaaataccacagggccagggagcttaaacaacaaatctactttctcacggttctggagtctggaaatccaagattaaggtgtctgcagggttggtttctccccagtcatctcttcttggcttgcaaatggccctcttgtgggtgtgtcctcacatggtcaccgctccatctgtgtgtctcaagtgattctcctgcttcagcctcctgagtagctgggattacaggcatacgccaccatgcccagctcatttttgtatttttagtagagatgggatttcaccatgttggccaggctggtctcgaactcctgacctcaagagatccacctgccttggcctcccaaagtgctggcgttacagacgtgagccaccatgcctggctccsgtgggcatttttgacacctgcacaaggtgagaggggaccaggtgtcctggttgttccaatggggaggaccctggaagggaggctggtggctgtccacagct

SEQ ID NO: 482291 - DNA, 338 bp, Homo sapiens
gctgctccctgtcgtgcgcctggcgtgctgggtccccgcggctgctgtgctggggagccctctgcagggcggcctcctccgggccaccctccttacatcagcggaggccactgaggatccactgcaggcattttctgacactcagggcggaatgacacttagaatgtcctttggtgattctggcgcttgagattctgttgaggcagggagtgtggccgaggggagaccctagagtaagacctggggtagcatccctttttttctgctctctagggggtrgcgttgaggctgctcttgctaaaatgctccctttcttttgcttgtctgtgaagtcccac

SEQ ID NO: 482292 - DNA, 620 bp, Homo sapiens
gctactagagggagaaggtactgagtgaggtcaaggtgtaagatgcctgtggacatggatgtcacccagggtgatactaaaagataaggcatgagagagggagaaaatattaattaaaatgatggagcaagaggaagtgctgaaggaccaacttggagactctcaggtgtggacaatgaaaagggaatagtaaagcagcatggggcagcttccagaggaggaaacaggaaattcttatctagaaacagctccaggatgagagtgggcagcatgaagaaaatgatcatgtctcacttcatagggttgccraggaagtggtttctttggggaaagtttattgtcatttacatcaaggtagcagagacaatacttaaggaagttcttgagcttatgaaagagtttcagggcatcctaggaacagaggaggagaagggtttggaggtacttgggaggtgatgcaccaatgaaggctaaggaaatgccgaaagaagaaagagcaatggaagaggacagttgccccaagagttgtttctaccttgacccacgattaagtctaaagaaaagagatagctggaagaggagaggaatatcgagcaagaggttcaaaacagattttctga

SEQ ID NO: 482293 - DNA, 593 bp, Homo sapiens
tagctcttaatttgacatctagtttcaggtcattttcatgtaaatagggaacaatggagaccggcttacaatttccataacgtggatgtttccttcaactttattattttcttatgacaattatattttctctgtgggattaacggagccagtaattgttcacagttattatttwtaatctttatgaaaacttggtagttctactctttagtactcaaaagctcccagtgccttctatatttcagtcatacacacaatccattaatgtttctagctgatcctttccttaatcaggggtaggttaggcaggtcaggctttctatttctttctataatacattttcttcaggctttgcaacctctttttctacctttacaaaagtataggaggtgaaaatttggaattgttctgttgaatagaactgatgccctattgaaaagcaagtttgagttttgatttatattgctttgaacatgcccatatgtattaccaactgtggcttcacagccattataacacgtaattctgtgctttttctaataaatattttatttcatttttcctctgttccagagaagaagcctactttatg

SEQ ID NO: 482294 - DNA, 675 bp, Homo sapiens
gcctcatgggagggagagttgattactcctccaccgtggctcctgtcttgcagaagcyggcttctgagaggcactgccttagtctgtggagctgcctgttttgtggctcttatcttctcagagaggctctgcaccgaggaagggaaatctctttaaagggtcacaccctgaaggctgtgacttgggaatagtgtgggaatgtaagggccacaggggaatcattcctgctcaaaacagctctgcattttacccagagagatgctttgcattaaattctggggaggcttaagctcagaaaagcacccaccttagaattatgagaatcatcttgcttaggtgagtttccttcaagaaaaccatttagatgaacactaaagagtgaggaaagcaagtcctctggggaagaggcagccggggcagagctgcaggggagtcagaagacagagctggtcctgctgctcctagaggtgccagggggtcacaggaggggagacaggctggtgatggatggcgatagtgctggcttccccttagaatgctgtctgagtgccagctttacccaaagaggtatttagagagatggtgggatacgatggattaaacacactgaccctggggtcagataaaatgggacccagtcacgttctgacaattacttccttaggaacgtcagca

SEQ ID NO: 482295 - DNA, 675 bp, Homo sapiens
gcctcatgggagggagagttgattactcctccaccgtggctcctgtcttgcagaagccggcttctgagaggcactgccttagtctgtggagctgcctgttttgtggctcttatcttctcagagaggctctgcaccgaggaagggaaatctctttaaagggtcacaccctgaaggctgtgacttgggaatagtgtgggaatgtaagggccacaggggaatcattcctgctcaaaacagctctgcattttacccagagagatgctttgcattaaattctggggaggcttaagctcagaaaagcacccaccttagaattatgagaatcatcttgcttaggtgartttccttcaagaaaaccatttagatgaacactaaagagtgaggaaagcaagtcctctggggaagaggcagccggggcagagctgcaggggagtcagaagacagagctggtcctgctgctcctagaggtgccagggggtcacaggaggggagacaggctggtgatggatggcgatagtgctggcttccccttagaatgctgtctgagtgccagctttacccaaagaggtatttagagagatggtgggatacgatggattaaacacactgaccctggggtcagataaaatgggacccagtcacgttctgacaattacttccttaggaacgtcagca

SEQ ID NO: 482296 - DNA, 589 bp, Homo sapiens
ctcctaatcctctgcatatctatagagtaattctctccaggggcttcccatgaaggggttttcctcctattcagcatgagccttcttgctattaacccggttgatctataaatgttactgccatgcctagaaaatcataggacacatttatggcattataacatgtgaatgcctggaagaaaggcaacagaaagaatctcagacaccatttttgaaatagggtttctctcagcaggggtgtcatgttagggccctgtgagttctaacaggattggttcatgagacagatgaaactacctagagagaactgagacttaaagaaatttataaagtgcataaaagctttctagaattcagtcctagcccctttaatttacccatagatgtcacaacacccctcttgcagcaacatcatacttggccttcttatgtaatctcccactttatcccaaaccaggcatccacagttagttctctttattattccactccctctgtatcaaaagttgtctgtttcatgtcccatctttttatgttrtactcaaaagctgagttaactaattcaggaatataagtgatcaggtgtttc

SEQ ID NO: 482297 - DNA, 524 bp, Homo sapiens
gacattgtcttatttttcttttcaaagatttcacttcacgttgtaaatcaggcagcgtggcgcagcactctttctcttcctcaactgaagttagaatcaagatatctggatttaagccatgtccctggatctgtgagctgtgtgacatttgacacatcccttaaactttctgggccacagtttcatcatctgtaaagtggacgtcatatgtgggtgaacttgcgggcttattgaatcaggtatgataacttacattgtaaaaatcatttgaaaactgcaaagaaccataataatataaagactcacyattttaagaattcactttgacttttggctggatgtgagtagactttggtagtgtcgcttgccttcccttaatatgtatatcaggcacttatggtgacaataccctgtaattgactgaccctgtgatgttacttcttgctagggcacctaatgggactcttttagtcctcatgtctcttaatctcttggcagcactcaacactccttttcactcccct

SEQ ID NO: 482298 - DNA, 595 bp, Homo sapiens
gctccatgggatgaaactttgtgttctagggaagttttctgtcaacttgtcaaaacagtcgctccggccactcacacttacatttatgttatagggcccaagtgtttggacagtgascctaccttgggtggtgctcagaatcctctcttcccctaaggatagtttacacaattggagtttttttttttttttcttgaatatgtttcaagctggtgttaattctacaaaacagatgggcagctaaatcttttgaagttgctaaatatattttgagagcatataatttttatacaactaacgttcagtttatatttctatcagctaaactgttattaatatttgcaaaagccaaatgtcaaaagcatttaaaaatgtcaaaccatgtgaacacgattagggaagggtttcttgtaagaattggaaaatttcacctaacggtattgtctctcttatacccaggcacaaaatgccaagctccaggtcctgagcttcagggggcttcactccgagcctcctctagccatccccttccaccaggtgtgggtttccctgcatcatggggttatgcccatgcagagtctgtgcctcccctctg

SEQ ID NO: 482299 - DNA, 665 bp, Homo sapiens
agtgacatattaagtaggatttgagagtctaatatcaaataactttcacaaaatatctaaaacattattttatactgtcctacagcacaaaactgataggtttataagagaccaaagtaacgaaaccatttttaaaaacttaattcaactacataaatgtggaaaaccacaataaaaatattttaattatataatattatgggataatcctatatgaacgtgggtggcgcaaaaaaagcaagctaatgtcttgaattcctctacaaatactagttgctacttctacgttcttttttcagagcataaacatttttaaagttttcgagatacattctggaaataacacttaagcccagaaattaccacaaaataaaccagatatttgaaaagaaaatttatataaaaacaaagcatgacagaaaaatattctccactgagttacaggagataaagtccaacgtgcrtaataaagctttgggttattctagaaggcttaagcatgtagtgcctatttaccaagtcttaaaaatcactaacattttaaaaacaatatggaaggtttaccttctcatgttttactgctaatgaattaaaatgagaactacaagaaacattatttgaggaaaaaaccataatcccatatcaaattttctttataaaatacc

SEQ ID NO: 482300 - DNA, 387 bp, Homo sapiens
aaagccttaattaaaaagatatgtggtaagggcccacaatgaggaaccaggtccagagattttttttttttttttagatggagtctcgctctgtcccccaggctggagtgcagtggcgctatctcggctcactgcaagctctgcctcccgggttcacgccattctcctgtctcagcctcctgagtagctgggactacaggcacccaccaccatgcatggctaatttttttgtatttttagtagagacgggggtttcaccatgttagccaggatggtctcgatctcctgayctcgtgatccaacagccttggcctcctaaagtgctgggattacaggcgtgagccaccgcacctggcccaagtccagagatgttaagtaacacgtcac

SEQ ID NO: 482301 - DNA, 611 bp, Homo sapiens
tgataatcatctttgattgtttttttccaaattaattttagttttattctgtttaaaagaaaaggtcttactgggattccaagttgaagacaggctttttatccagaacaccatctgacatggttcctacagtgagtaacacctgcagatgtggagcagtgaacatttctggtgaagtgacttaatcatcaaagtgcatgagaacagttctaaggaaattaactgagcaaaacattttagtatatgtgcattcaatgtgccacgtgccaagatcaccaggtcaggttgtttatctgcctgattatctttcagggggacgggtcacagaagctggaggagtgtttcccaaagtgagaacactcttgccctcccagcgcctcagagccatccgaaacacaaagggacaccaagccacacatgatagcagtgtatgtgttcacgagaaaaatgtgccacacacacattctcaaggcgtcgcatgtgaaaaacatggtatttaggtcacagaaccttaatgcctacgtgactctaaggtgtaaacttcaatacayccatcatggacacacttctctgcaaggatttgggcatctgtctggaatacagcagaaaac

SEQ ID NO: 482302 - DNA, 624 bp, Homo sapiens
gaattcactgaatgtctttcctgggggaaatgctgcttttctcctctgtcagggtctctagaaaggtgagggttctgccaggtttaagaaagatgaatttccagttaccttgtgaaggttgatttcaggactctgttctgggtcatactaggaagcctgccatgggcacatggcacgtggttgttgtggccaagtaatgcccatcagataggtaaagacctcctcttcctgggctgcctggggaagtccagtctgaggaaatctgtggccagaatctgagccagagatcrgaaaatgagccaggccacagagtgtgcagggatcatagagaaaggagcaagaagagccaaggactgaaaaatgtacaacccaagccacctggagaatgattctgtgctttgtgacacttctgtccaagaaggcagcatggggtggaagcacagagcatggacactggaattggacaatctggctggagttgtgctgccattactagcagttaactgagtaatgagcagttacttggcctctctaaacctgttttcttatctgtagaatgcttacttcatgttgctgtgagaaattaatgagttaatatatgtaaggtacttaaaaccgtgccta

SEQ ID NO: 482303 - DNA, 589 bp, Homo sapiens
ctgtgcagttagcagctttaggcatggatgccctggcagtgtgatctgatgatcatcgggctggtacactggagggaaatctttctgctgagagggaggtgagcaaagagtctctgattgtcacattcaacttgttccgtctttggcttctccttccwtccatcctttgatgctgctgtgatcctaggaagtttacaaagcatttagttttatgcacaatggtttcgtaagtgttccggtggggatgagccttcttgttgatcagggcctttttgtctggcggcattctccccaactcaggcatattactgctcttctgttgctgcctggattttttttttttttgaagccttcattcttgatgtcatgggactgtcaggacaatttgcctgtcttctgaaatcctcatcatgtgagagtcaccatttatgtaagttttacactccttgcctttggtacaacaatactgtctgggaaagcagaagatgctatctgtgttatctgggcccctcctcacagcagagcctgctgggaaggaaatttggttgttaattagactttaacctgggattagaattttaattggaat

SEQ ID NO: 482304 - DNA, 610 bp, Homo sapiens
ggtgattgaaaacatggccccagctctcaaggaatttactatctaatgacctttatccatttaatggattatcagttgcaaatttaaaatctcaattttgtttccctaacatgactttacaatgcctcattcctcctaggygttatttggcttagaaacacattatataattatatcagcccaatcaaaacatcattagaaaggccaatttattactaaaattcagacttttcttttaaatactaatgttttatagactttggagtataactctcccgtagccaagaggacatcactaatggatacaccactgttgcctgcaagaccagatatcactttagaatctttttcagtatggcggtagatgagatctggcattcaaatggaaatgttgccattcctaatatgtccagtgctttgacttgttcacagccaagctcattcaagatactttggagatgatttagtttatatgtcacttcccatcttttttttttttttttttttttaaaaagagagtttctctctgtgacccaggctggagtgcagtgaggcaatcatagctcagtgcagcctccaactcctgggctcaagtgatcctcctgtctcc

SEQ ID NO: 482305 - DNA, 651 bp, Homo sapiens
atctatgtgcacaagagactgaaaggaagcatgccaaaatgtttactgtggatattctatggcttatagagttataagggtgatttttcttttcttcttgattcctttcaggatattccaagttttctataaagaatatgctttacttttacaactagggaaagaaagacagaaaaatatatataacatttaaagggcaaaacaatatagctgtttattttacaggctaaaatatcaagatgaaaagctctgatcccaaatcatccattttacctatattctgtcacttttactaaaagcagagttctactcatcccagtgaaaaaaacaatgaattaaaagtaatttctggygttaacccaagtaccgagttaagactccttaagaatatagaattatgtaatcaacttagataattcaaagcccaatgatataactaagttctttgacgattgagcacacattgtttccttacttatctttaaacattcctagtccaattactccctagcataataccatttataaatgaggatgagtttacaatggtttctgtaaccaaaaagtatttctaatatctgtcctctgccacatatttttaaattatcttttccattagcagaaatgggcaacataagcaataaatcatgt

SEQ ID NO: 482306 - DNA, 479 bp, Homo sapiens
tgtgtgggattttcaaagactggccttttcctatcctgtatgttctgcattgggaattatggagaagacattcatttattgaacacacatttcttgggcaccattcatgcaccaataaataaaacagacacaatttcctgctcttaggagcttacatttgacacaacacataggagcttcccctccatatastttgctaaggtggctgtaacaaaataccacaatctgggtggcttgaacaacagcaatgtatcctctcacagttctggaggctggaagtccaaggtcaaggtgtcagcagggctggttcctcttgagggctgtaatagaggacctgctccctgcctctctcttctggtggtttgccaccatctttggcatttgtgtgttgtagaaacatcacgctgatgctgacttcatctttacatggggttctccctgtgtgaggtttgcctctgtgttcaatttcccctttttat

SEQ ID NO: 482307 - DNA, 479 bp, Homo sapiens
tgtgtgggattttcaaagactggccttttcctatcctgtatgttctgcattgggaattatggagaagacattcatttattgaacacacatttcttgggcaccattcatgcaccaataaataaaacagacacaatttcctgctcttaggagcttacatttgacacaacacataggagcttcccctccatatagtttgctaaggtggctgtaacaaaataccacaatctgggtggcttgaacaacagcaatgtatcctctcacagttctggaggctggaagtccaaggtcaaggtgtcagcagggctggttcctcttgagggctgtaatagaggacctgctccctgcctctctcttctggtggtttgccrccatctttggcatttgtgtgttgtagaaacatcacgctgatgctgacttcatctttacatggggttctccctgtgtgaggtttgcctctgtgttcaatttcccctttttat

SEQ ID NO: 482308 - DNA, 605 bp, Homo sapiens
ccggctctcagctttgcagcctattgaaatcacctggctgttttgaatgtctttccccagygctcagctacctgtaccgatcaaatagggatccctggtggtggggagctcattcccagcattcctttagctccccaggtgattcctccagcttttcttgttctgcctttacccagctcccttatttattctgcttctgagtctctacctcctcttttccactcccatcatcttctggatcctcacagctctcctccaaatcacctctgtccctccacacacccagactgatccatgtaaataaaaatcaaagtcactggttctcaaccctggctgcatatttagaatcaccaggggaattttaaaaaacacagtgcctgggccccaccctcaaagtttctgatgccattgggctgggggtgggacccaggcgttgatatttataaaatgtttcccaggggattttactgggcagccaggattgagaaacacagctttaggtattttaactccccagcccagcagggagtaagtcaaggagctaaccctgtaaactgaagcctaggagtttttttgtttttcagatagggtcttgctatgttgca

SEQ ID NO: 482309 - DNA, 605 bp, Homo sapiens
ccggctctcagctttgcagcctattgaaatcacctggctgttttgaatgtctttccccagtgctcagctacctgtaccgatcaaatagggatccctggtggtggggagctcattcccagcattcctttagctccccaggtgattcctccagcttttcttgttctgcctttacccagctcccttatttattctgcttctgagtctctacctcctcttttccactcccatcatcttctggatcctcacagctctcctccaaatcacctctgtccctccacacacccagactgatccatgtaaataaaaatcaaagtcactggttctcaaccctggctgcatatttagaatcaccaggggaattttaaaaaacacagtgcctgggccccaccctcaaagtttctgatgccattgggctgggggtgggacccaggcgttgatatttataaaatgtttcccaggggattttactgggcagccaggattgagaaacacagctttaggtattttaactccccagcccagcagggagtaagtcaaggagctaaccctgkaaactgaagcctaggagtttttttgtttttcagatagggtcttgctatgttgca

SEQ ID NO: 482310 - DNA, 605 bp, Homo sapiens
ccggctctcagctttgcagcctattgaaatcacctggctgttttgaatgtctttccccagtgctcagctacctgtaccgatcaaatagggatccctggtggtggggagctcattcccagcattcctttagctccccaggtgattcctccagcttttcttgttctgcctttacccagctcccttatttattctgcttctgagtctctacctcctcttttccactcccatcatcttctggatcctcacagctctcctccaaatcacctctgtccctccacacacccagactgatccatgtaaataaaaatcaaagtcactggttctcaaccctggctgcatatttagaatcaccaggggaattttaaaaaacacagtgcctgggccccaccctcaaagtttctgatgccattgggctgggggtgggacccaggcgttgatatttataaaatgtttcccaggggattttactgggcagccaggattgagaaacacagctttaggtattttaactccccagcccagcagggagtaagtcaaggagctaaccctgtaaactgaagcctaggagtttttttgtttttcagayagggtcttgctatgttgca

SEQ ID NO: 482311 - DNA, 494 bp, Homo sapiens
tatggaacatttgcaggctcaaaggacatggaaacagaaaatctgatcgtatcactccccygcttaaaattcatcagtgactcccggctgcccaggggatggcttctgagctcttcatcatgatttgagtgcttttttgttatctggcctgaccaccactgtgggtacccactcttctcccttgctctccaggtaatcaaaactctctgcagttttccatcctcccaccctccctgaggctgtctcctacccctgcctacacaagcgcttgatgttcctggagagccctcccctcttcctcactgggtcactcgcatcccctcatcattgaaatcatctgtctacttgttctcttctagctggtacattcagtgaggcccagggccaggtctggtcatctgctcccccagggcccagcacagtggtcagcccctaatgaatcttgtaggataaatgaataaatgaatgggaagggtgcagtctttgaagtgcct

SEQ ID NO: 482312 - DNA, 295 bp, Homo sapiens
ggatttcccaaaaaaaaaaggagtcctgtgttttatagggatggggtgctggggaagcaaggttttcatattgttttaaatgtagtttgatcattagtatctctagagctaacctacttaattattctattcctcagtatatmaatggagataataccgtcattgtggttttaagggttaagagaattaatattgaatagatgaaacacttaggctgggagactgctataaacatgtttactgttagatttaagctagcttagcaggcagtcagagttgaacctatgaaattata

SEQ ID NO: 482313 - DNA, 454 bp, Homo sapiens
ctttgacagtaactattacaaacttagtatctcaaaattatcagtacgtctctgaaaacacaatgcctttaccaatgatttttaaaatcgttctgtggtattctttgtaaaaactccaaaccccagtctaatcatgagaaaaacatcaggtaaaccccargtttaggggaggggagtattctaccagatatctggcagcacttttctagactgtgatggtaatgaaaaacaaaggaagactgagaaactgtcacaaaccaaagaaaactgggaagacatgacaactaaatacaatgtggtaacttggattctggaacagaaaaaagacattaaagaaaaattggcgaaatccaaataaaagtctcgaacgtttcatagtgccaaagtcagtttcttagttttaacaaatgtactgtaataacgtaagatgttactaataactgggtgggaagta

SEQ ID NO: 482314 - DNA, 644 bp, Homo sapiens
tgtcctagctcatttcattaggtgagtgcagggcttcgagagacccttcacctgccccatcccagctcagaccactctaccaggcaaggggatttggtaccatggtcagaggagtccccagtccatcacttttctgataggtgatgtggcaacctgtgagctccatggctggcaccacgagatagagggcctggctgtggcctgtggagtgaargcaggatgtgagcatcaccgggaaggctgggtcccctgcaggagaagcaggtcaaccttggctcttaccccaccccacccgctttctccattctttgcagtccatcgaccctggacagcagttcacgtgggagaattcaaacctggaggtgaacaagcccaagaaccgctatgcgaatgtcatcgcctacgaccactctcgagtcatccttacctctatcgatggtgagccaagggggtgcccctcccatccccttgctctcccccttgctagctagggcaacatgtcattctacagaggatgtccacgagtctcaggggtgcactgaggcatggtgggctgggctggggaccctgtagtaatgccctcccacctcctttcttatccataggcgtccccgggagtgactacatcaatgccaactacatcg

SEQ ID NO: 482315 - DNA, 644 bp, Homo sapiens
tgtcctagctcatttcattaggtgagtgcagggcttcgagagacccttcacctgccccatcccagctcagaccactctaccaggcaaggggatttggtaccatggtcagaggagtccccagtccatcacttttctgataggtgatgtggcaacctgtgagctccatggctggcaccacgagatagagggcctggctgtggcctgtggagtgaaagcaggatgtgagcatcaccgggaaggctgggtcccctgcaggagaagcaggtcaaccttggctcttaccccaccccacccgctttctccattctytgcagtccatcgaccctggacagcagttcacgtgggagaattcaaacctggaggtgaacaagcccaagaaccgctatgcgaatgtcatcgcctacgaccactctcgagtcatccttacctctatcgatggtgagccaagggggtgcccctcccatccccttgctctcccccttgctagctagggcaacatgtcattctacagaggatgtccacgagtctcaggggtgcactgaggcatggtgggctgggctggggaccctgtagtaatgccctcccacctcctttcttatccataggcgtccccgggagtgactacatcaatgccaactacatcg

SEQ ID NO: 482316 - DNA, 445 bp, Homo sapiens
cttcctcacttgaaaatgggaataaaacagcacctattgcataggtttgtygcgaggattagatgagttaattacatgaaaggcgcttagagtaagggctgagtaaatattagctatccttattattaaacacagctggggcataggaatacatgtggaggagaagggatgtgaaacagaacagagaagacagcaaaagtaatctgctgtgtaatgatgagaatggagcactttccacaaattatcacagacctcaggaaaacctttcagtgcaggttaacccgtccaagccacatagccagtaaatagccgtgctggacttgaacccaaacagtttgtctccagagatcccatcctgaaccaccaagaaacactgtctcccatgatcacactttcccctttagggaaaggaattcctgggttgtgaagtgaagcaaaaggacgt

SEQ ID NO: 482317 - DNA, 563 bp, Homo sapiens
tttcactaaagagacacccctcaagcctgggctggcctctttatttatttgtttgtttgtttgtttatttatttattttagacagtcttgctctgttgcccaggctggagtgcagtggcgtgatctaggctcactgatgcaacctccacctcccgggttcaaacaattcttctatcccagcctcctgagtagctggaattacaggcacatgccaccatgcctggctaatttttgtatttttagtagagacggggtttcgccacgttggccaggctggtctcgcactcctgacctcaggtgatctgcccatctcggcctcccaaagtcctgggattacaggcatgagccaccgcgcctggcttgggctggcctcttgacattggctttggccaacaggatgcagtagtagtgatggagggtatgccagctccaagcccaggtcttaagagactgcatgatcctgcttgctctcttgcacatacaccattgtcttgcagatgttctcagagcagagctgaattaccctaaamttcccagccaaagacttcctaaatcagcaaaga

SEQ ID NO: 482318 - DNA, 652 bp, Homo sapiens
taaaaaattgataataaatccttgatacagccaaataacccgtttgtgctccacttttcctgattacctcacaaaaatgtttaaggctggtttaatttgtcaggcactgtgtattatctcagttaatcctgacaataacactatatgggggctgtaggtagcctgggggagcaagacacatgatcaggttagagatgtaggtgggagcctcactcccccaggctctagacacacttgacttattttctttctccttcaaaagccaagcaggtgcctacttcagggcattttcatgtttatttttcttcctggtctttccatagctgtgaactcctcagagatcacccctgacygcccagtcactctctattaaaataccctggctatgttcctcaaaacatttggtactatctacaattctcttgtttgtttatctgcttgtgtttctttccaacagaagagacgctccatgacaatcggctcctcatctgtggagctgaggcttctgtacctacagccctcagcacagcctctggcaatggtaagtgctccatggttgtgtgatgcgtggattaacatatgcctgcaaacacaacaggtatttgttgaatgaaataatgcacacacgcacacatgagaaaaagaacagcct

SEQ ID NO: 482319 - DNA, 489 bp, Homo sapiens
actggggacaaacagctcagtctaccactaataaccataatcttcagcaggtcatttacccttcctgaccttcacttttataatctgtaaaatggaaataacaataacatatcagaaaactagtatgaagattaaatgctattacttgtatgaaacctcttcattaactatataattctataaaacattattataatgtagctgagacaacagacctttcagaaaatatttactgrgtaataccagtaaacaaaatttgaagattaaataccaaagtttgaatctgagtctttactgtgttggaatcaggcattgttctagtctccttacatttattaactcttttaatgttttaagcatcactatagcataggtactgttattatgttcattttacagatgagaaaatgaggcaaagcacataaaatgacctgctcaaggtctcacagcttacaaggggagagcctgaggtattaactcaagcacttg

SEQ ID NO: 482320 - DNA, 590 bp, Homo sapiens
ctgactggggacaaacagctcagtctaccactaataaccataatcttcagcaggtcatttacccttcctgaccttcacttttataatctgtaaaatggaaataacaataacatatcagaaaactagtatgaagattaaatgctattacttgtatgaaacctcttcattaactatataattctataaaacattattataatgtagctgagacaacagacctttcagaaaatatttactgggtaataccagtaaacaaaatttgaagattaaataccaaagtttgaatctgagtctttactgtgttggaatcaggcattgttctagtctcctwacatttattaactcttttaatgttttaagcatcactatagcataggtactgttattatgttcattttacagatgagaaaatgaggcaaagcacataaaatgacctgctcaaggtctcacagcttacaaggggagagcctgaggtattaactcaagcacttgggttccacagtccaaactcttaagtgttttgttttaccccttttctacagcttgcttagtataaatttgcaaagattattttgaactctagcacttga

SEQ ID NO: 482321 - DNA, 646 bp, Homo sapiens
ttggagcactggcccttgaaatgctaattcactggctgaactactgttcacctgctctttagccttaacaggtctgtggcttcacattgggtagccacagcagtccctaagagaaaaaaggagctccagcaaccaagctatttaattgygaaaaccgcaattacctttgcaccaacctaataacctaataacttgactccagaggatggatgaaaccaggagaagagagggggagcctctctccccacccttgggctaggagacacctaaggtctgtaaacctggcattgttagaacctacaaggagaaccaaaggatttaaatgaataattcatcatcccaaattcacattcactagaagtatctatgtaattgtggttaaagtacttcaaatgtgtccttctgcttcatattttagtgtaagatactaggtaatagaatccattctctaattcactttacacaaacagaatcagcccaaatgtttgctgccaattcttacatttcctattgttaagcacagaaatagctggaaactgctggtattgagaaattttattcatttcagttctacaaatttctagaggccctacacagagattgaaagcctatagtcgcagacgagatccatcccaaagatgtactt

SEQ ID NO: 482322 - DNA, 347 bp, Homo sapiens
acagctgaatacctgaagcacccccaaaagacatgaagagcaataacatgcaaagctttttctgcatacattttaaaggttaagcgccattagacatctatgtttatcaagagatgtgctccttgaacatatttcttctaattaatctgctcccaataaacattactaacaaagcaaagtgataaaggaggctaatcaaactaatctcttccctttaactaacttcatcaggttaaacaaggtcctttgctgatattctccactttctcctgtctgatgaggagttgcaggtgagtaaggtcaaaagcaggrgtgatcaaactaggactcttgaacaatctggccca

SEQ ID NO: 482323 - DNA, 434 bp, Homo sapiens
ggcctcatccaggctgccaaatgtacaacaggtgccttrgttttatacttgccaatctgttgttattcaaatgaccgccctaacagagactaatggtatctaataaaattgatctcggttctggcaagccagactcacaagagcaagagccgtaggaactgcagtgggaaaatatgctggtggtaaatgtgcctggtgaagcacacactttttttgggggaaagtgacgtatgtctcacacatgggcctcttgtttatgttgagctgtggacattttctgaaacccagtgttacttagacactaggatttgcagtatctaatcttgtttttgatgtacttgctgggtggcatgggacaggattggctgtgccagcttatcagtgaatggctgtgccatgcctgtaaggcacagccaggctgtctttcatgccaa

SEQ ID NO: 482324 - DNA, 434 bp, Homo sapiens
ggcctcatccaggctgccaaatgtacaacaggtgccttggttttatacttgccaatctgttgttattcaaatgaccgccctaacagagactaatggtatctaataaaattgatctcggttctggcaagccagactcacaagagcaagagccgtaggaactgcagtgggaaaatatgctggtggtaaatgtgcctggtgaagcacacactttttttgggggaaagtgacrtatgtctcacacatgggcctcttgtttatgttgagctgtggacattttctgaaacccagtgttacttagacactaggatttgcagtatctaatcttgtttttgatgtacttgctgggtggcatgggacaggattggctgtgccagcttatcagtgaatggctgtgccatgcctgtaaggcacagccaggctgtctttcatgccaa

SEQ ID NO: 482325 - DNA, 434 bp, Homo sapiens
ggcctcatccaggctgccaaatgtacaacaggtgccttggttttatacttgccaatctgttgttattcaaatgaccgccctaacagagactaatggtatctaataaaattgatctcggttctggcaagccagactcacaagagcaagagccgtaggaactgcagtgggaaaatatgctggtggtaaatgtgcctggtgaagcacacactttttttgggggaaagtgacgtatgtctcacacatgggcctcttgtttatgttgagctgtggacattttctgaaacccagtgttacttagacactaggatttgcagtatctaatcttgtttttgatgtacttgctgggtggcaygggacaggattggctgtgccagcttatcagtgaatggctgtgccatgcctgtaaggcacagccaggctgtctttcatgccaa

SEQ ID NO: 482326 - DNA, 304 bp, Homo sapiens
tacctgacccatttcaagtaaccttgacttggttgggagccccatcccctcctgcctacgtagatgtgtttcttgttaattcagaaactccaagccagcctctatcatgaagtgaakaattaaagagaaaggtcctgtgattggatggagataccattgtagaaccaattctttaacctaaaatttagtatattcttttttcttcagcttgctttagcttcacttatttcttcactaaactgtgtgtgtgtgtgtgtgtgtgtgtgtgtgtgtgtgtgtctgtctgtctgtctgtctgctatgt

SEQ ID NO: 482327 - DNA, 551 bp, Homo sapiens
cacaggtcactgcagcctggaaatcctgggctcaagctatcctcccgcctctacccccagagtatccgggaatactggcaagtgccaccacatttggtttttcaatttttattgggaaggggtcttgctatgttgcccagactggtcttgaactcctggactcaaaacaatcctcccaaactggcctcccaaggtggtggaattacaggcatgagccaccatgcccaatcgattttttttttttctctgtaaaatttaaatgtcagcaaggacatatgttgagtaattgtgacaaggtgggaacgggttagattctgaattcacagagttatacagtctggttatctyagtggagagacaacagcttgagtgcactttattacgaagttgctgagggcaacatggccatattgaaagaagaaatgaagatacacaatggttatttttcaaaagaagttggcgttacaaagtgatttgataataaagtacgaaaatttcctgcagcaataaaagcactatgcatttcccataccaagatgtatcagagtggc

SEQ ID NO: 482328 - DNA, 622 bp, Homo sapiens
ttattcaagttcagaattgcaggaggctggatcctaccctggcagctcagggtgcaaattggggacctgaccctgcagaatatgccgtcccatctcagggtacactcacacatacttactcactgacactgggacactttagatacactgactcacctacagtgcacatgtttaggatgtgggaggaaaccaagtacccagaggaaacycatgcatacttggggagtatgcacacactccacaaagacagtggcctcggctggggattgattttttttttttttttcatcagtggtaaaacgaaatggggttgaaccaaatgatgttacctgaggacctgctgttaggttttcagcctacatttcccacctagtgtaaggaaactcttggtatggacactaccaatgactatccaccaagagggccttaaagacagtccctgatgctgggctattccaattgtcattttttcctacatcaggtttagaactacctgtttatagctttagagtactatattttgttgaccagaggagtcttagaaatcattttggttaaaatatttgttgtatagatgaagaaatgaggcccagaagctgtggatacactgtccaatatcaaa

SEQ ID NO: 482329 - DNA, 574 bp, Homo sapiens
ctaggcaccttgttttctttttctttttctttttaaacaagtataattgtttaaaagtttttccttgtgccaagattttttccacccaccccaccaatcccagttctgctattggggaattactaccccaaacaaatagaattccttttctttcttctttctttttatagacaagggcttactctgttgcccaggctggagcctagtggctcaagcacagctcacagcaaccttaaactcttgggcttaagagatcctcccgagtagctaggactgcaagtgcacaccatcacacctggcyaattttttttacttttgtaaagaagagatctcattatgtggcccaggctggtttcgaactcctggcctcaagagatcctcccatccctgcctcccaaagcgttgggattaccggcatgagccactgcgtctggcccggaattccttttccatggagatattcttcatggagcggaaggcactgtcacctgaactgtggcgagatgctctgtgctgtgggtatacacctctgaatcacttgttcagcaggctgtaaacctagaaccagagattt

SEQ ID NO: 482330 - DNA, 477 bp, Homo sapiens
attagactcacacgaagggacttagtgagcctagtgtatgtgtcttgatcagatttcttccctgcccccttaaaaatgcaatgaagagaattcaaatgccatgagactctttaagagtctggaaggtggaataaatggtccttccagcactagcaaagaataatgggaacaagaaaaaggcaatcttcagcttctcgtctcctttttctatatccygcatgtaacaacttcttagttgttctccctccctaaaattgcacaggcctcttcacggctcaactttcagtttggcaaaattgttaagcctgtgctacgtgtcagggactgtgctagatgctggtgatgtagcagtgagctagacccacagggtgcttttcctcatgaagttttacagtcaggggaaaaaagacatgaagtaaagggtaataatgattattatgacagtggaaatgtcaaggtaaaagggcagggaaggcc

SEQ ID NO: 482331 - DNA, 504 bp, Homo sapiens
tcatttcactgactgccaaggttgacttgtctgatgtggctggttgtgcagtagctccacccctcgtcaccttggttgttcctcctgaagtgaaaaacaactttccaaatagaggagggctgcccttcggtcaagactttaggtaagtattcaaattcgcattcttttaatttttttcctggtatcatttcctctccctctttggaatctgccacgacagcccccttctagaatcaccaagagaggagccaaagaatcagcatggttagagttttagagtccagtccaatttctggtaggctgaatctgtaccaaaacgtagggactgcatttttctgttccacgcaatgcctaggacacactaaactgtcaaggaagattaacctgcccattaggtgaatatacttttagcctaagatggctaccatttacaacatgaaaatactgataataaaattctgtgaaagtgagctgctgcccmccattttttaaaacccaatccaa

SEQ ID NO: 482332 - DNA, 509 bp, Homo sapiens
tagtttgtatggcctattgcatatgtaagccgatatgtattagcaatgatttcaggtttttaggtattagtaagactttatttggaaagggaaaagtccattctcagttctgtagcgtgaggaccaaacatgcgcaactaaagaactgagacccactttctgaaaattgaccattgccatggtgaccacttagttgtccactaaaactatttttgcttttataccgakcccatggctggactacatttcctagtcctccttgcaattaggtgcatccacatgactaagatctcgcagtggaatgtgagtgcaagtgaaggtgcctccttcacctgggcccaaacacagtgggtgattcttctctagtgttctcctctatgcattcctccatgttcctttctcctctgtgatggtcggttctatgtgccaacttggctaggctatagtccctagttaattcaataaaatgagcattgaggtattgatgtgaaggtattttacttatttat

SEQ ID NO: 482333 - DNA, 514 bp, Homo sapiens
tgcatttttcttttaatatactgctgagttcagtctgatgtcgcctttatacacattcttctcttcttagtgctstttccaggcagtcccctcaggctttggtcttccctaaatgcagagattaagaaatgggtgccacagcccacccctctccactgaggtgggaaatgtttcccatctcaaaaatgaccccccatccacgggttcaggctagaaatcctcaagtcatccttggcatctctctcagaaagacccactgagtttaacctcaagcactcctgctctccttcctggccaccttcctggtccagccactttcgttgcccatagccttcactgcccaatagtctcccacatctccttcaggtcccctggatctattcagagcagtctctgcaaaacccagaactggttaggccagaactcccttcaaggacttctggttgcccccagaataaagacgacattccaggatgtgacctatagggccctggagtggtctcgcctgccaccc

SEQ ID NO: 482334 - DNA, 612 bp, Homo sapiens
taaaaaaaaaaaaaaagaaagaaaaagaaaaaggggaatattcctttctgattccacacacaccctatgcccgtttgtttacaggtacctaaggcagtaaacccccaactccctggaagggcccactgggcgctcacttcgctccagagcctcgcctggtttccgcttcgggatccggtcacccaacccagctctccagttgctgctgtttctcgtgagactgtcagagtgaaggggtccaaagctccgacttccagcctcagaaatcccaactcaggcaggatcagcgaagcgtccctcgcagtggctggagggagagccaggcggggcccaggctgccacttatcagggctgtaaatgccaccctgaggcccacgcctgccaacactgctccccacaagactaagtcctgcagcctcagcccagaaggacccgcgcctacccccacacggaggtcatgttcagccacaccccagtgaaccctggcgacccaccccacagtgccctgccctcccgtgctcctcyctcctgacctctgtgcacgctgctcccttgacagaagcgtcccccctcccttgctatgcaggattcagaggacagcgtctgtcccca

SEQ ID NO: 482335 - DNA, 343 bp, Homo sapiens
tggaccttggtccccttggcccaggtgcccttaatrccaagagtgctcaaggctgggcgggggctggggccatcactgcctggccagaagccctggggtcctcggcgcagatgctggcacagacgctagactcaccccagccgtgtcctgtgaggggaggtccaggcccccggccttggcaggcaccgaggtccttgtggagaagaagtgggtacctgtcttgggcggggcccctagcccagccggacgccaggcctgccttgttgggccccaccgctgggccccaggggacccagtgcccacctcatgccaggtgcccccgcagctcccaccttacttgagc

SEQ ID NO: 482336 - DNA, 611 bp, Homo sapiens
gtctagtccctgaagtgagaggggaattaatgtaaaatttgtcaaaagtggaatttaaggaagtcaaaacagcatagctgcattagtgaatgattggatttgggcagatggggagaaatgaaatgagcccactccttgtcttttgattgagagggagtggtatcatcgttgaggaaggagatagaggcgaggaagccagttgtggagaagggtgtggagagaatgarttcagctgcagtgaagctgagctgagacatcattgcagcaggttgttttgatggaggtgataagaccagacccaggctgggtagggtagggagggcattcctcaggcacaaagctgacatcatccacgatagctacagaaactaggcttgagggcatgtgtacgaaggaggagaaaggtacactgaggccagattgacaagacaagagaagagacagtaacaattaaagatttttaaaaagtatactatatctaccgtgggcaataatgaaaggtttttaagccctacacttttaatagggaaattctggtaaattagccaggcaacggtatgcaaaatcacatgatatgttaagaaaatagttatttttcccctactatgttt

SEQ ID NO: 482337 - DNA, 448 bp, Homo sapiens
agtttaaaaaaagcttccctattgaaaccacrcacaaataccggaatccaagtatttttgaagagctttcttttgttgttatttttttgttcctttttacttaagagaacaagaaattagaggattgccaaaaatagaaatggagaaaaacgaagatgaatgtaacaatgaatacgtgagatattttaaatgtctaaactggtacaattcaaattataaatgacattatggtctgtgttgcatttggcaggagttgttgcatggagattgtatggcaggagcccattttccttccctgaagccaagctgggtgtgtggagggtgtcaatcgaattaggagagattgtgttgcttttggtgggggtgtaggtggggcaatttgtgagtcctcaagcctgccttctatgcctcactcactaactagaaaggttattcagtgcaagaacca

SEQ ID NO: 482338 - DNA, 645 bp, Homo sapiens
gtgtgcatgtttaaagctacatgttattacaaaagagtcaaaagctaaaaaagtttttaaagcaaaaatgttacagtaagctagttaatttattatttaagaaagaaaatttaaaaaataatgtgtagtctaagtatacggtgtttatagcatctacaatagtgtacaataatgtcctaggccttcacattctctcaccactcactgattcatccagagcaacttccaggctcacaaactattttcatggtatgcaccttatacagatgtatcayttttttttattcctttgactgtattttaactttaccttttctatatttatatatgcttgatacacaaatactcatcactgtcttataattacctgcaatattcagtacagtaacatgctgtacaggtttgtagcctagaagcaataagctatatcaatgccctaagtgtgtagtaggctatcccatctaggtttgtgtgagtctactccacgatgttcacataagaatgaaattgcctaaagatgtatttctcaggacatatccttatccttaagtgactcatgactatatatattatggtcctgcccataaaatatattcttcaaatttccttcttcgccttgatgtttttgtacaaccttgccccacc

SEQ ID NO: 482339 - DNA, 338 bp, Homo sapiens
agacaataccagtctaacctgagggtgcttaagaacctcctcagaacctcctagtaattctaggtcagaagtcccttcgagtaaagactaagctgacagtgaaatcmgacatggagatgaagtcattgagcaattagcctcaaagtgagtggtcaaaatatgagaacagaagttctccaattggacaaggtggagaaagaatattggagggccaacaactaaatatgcttaagtactcatagcaccattccctctgagaagggaactatgaaatgcacaagagcagaataggtatctgcatcttgggaactgccataaggacagtgatgatgataaac

SEQ ID NO: 482340 - DNA, 640 bp, Homo sapiens
aattaaaccattgccaaggattcagtgcataggttggccagcctttctgtccagacctaaatatcactttggcaaggagaatgggattactcttaacaaccacaacatttaattttttaaaaaattctcaattaaaccacctttatacctccgatcacacagtcaaattgggtgacgtttgaaragaaaacatctttgcattagtacatatctagctgaacacttttagaaaccataaaaaacaggaacgtaaattctaaatgcattttactgaaatgcttatctaactcattataaaatagatttcagagtgtttaaatcacacactatattggttgattggtttatattcactcatcgaaatattattttaaaatataaaaaagtgctatgggtggaaatgtttccaatagtcttttcttcaacctgggagctcatatatttgccaaaaaatagattgcattctgtccttgaaagcgttgaatccatttgacatataaaatgcattaggtttgagtggaggccaaacttagcagaatgttttcactcctccttgctgtttaagccggtgaacacatgacctaatatacaatacatggttttagaattgctgtgaaatgtgttataaaacaacaaataa

SEQ ID NO: 482341 - DNA, 640 bp, Homo sapiens
aattaaaccattgccaaggattcagtgcataggttggccagcctttctgtccagacctaaatatcactttggcaaggagaatgggattactcttaacaaccacaacatttaattttttaaaaaattctcaattaaaccacctttatacctccgatcacacagtcaaattgggtgacgtttgaaaagaaaacatctttgcattagtacatatctagctgaacrcttttagaaaccataaaaaacaggaacgtaaattctaaatgcattttactgaaatgcttatctaactcattataaaatagatttcagagtgtttaaatcacacactatattggttgattggtttatattcactcatcgaaatattattttaaaatataaaaaagtgctatgggtggaaatgtttccaatagtcttttcttcaacctgggagctcatatatttgccaaaaaatagattgcattctgtccttgaaagcgttgaatccatttgacatataaaatgcattaggtttgagtggaggccaaacttagcagaatgttttcactcctccttgctgtttaagccggtgaacacatgacctaatatacaatacatggttttagaattgctgtgaaatgtgttataaaacaacaaataa

SEQ ID NO: 482342 - DNA, 610 bp, Homo sapiens
ttctcaacactggttttcttcagttcagttgactttggctaccctgttatttcccacaggtttctgccagggaatcaaaaatcaaaagagcagccacaggcgtatgagatatcatagtctgttcgtacagctgaaacaaaatacctgagattgggtaatttgtaaacaacaggaacttgttttttacaggtcttcaggctgggcagtccaagaccawggggccaacaggtttggtgtttggtgaagctccagtctttttattcaagatggaaccataaatgctgctttttcttgagaggacaagtgctgtatccttacactgtagaagagcagaaaagaccaaactcattccctcaagcccttttatcagggcacaaatcctatgcctgagagttctaacctcatgatgtaatcatctcctaaagcctcctcctctaaatacaatcacattgggcactaagtttcaacatacaaattctgagggactcaatcagaccagagcatgaggcaaccccaagcttaataactcctctaagttgctactaaacaaaagaaacagataacattactgaagaccagaagctatagtcaccaagcacaagatgaaaga

SEQ ID NO: 482343 - DNA, 549 bp, Homo sapiens
agttagtaagactttcaccccttccctctattgcctttctccttttccaactctggagatgctataaggaaaaggagagggactgtggggataagaggaatgggaatgtccaccccacagcatgtccttctcacttgatatctagcaggcactgtccatggggaaaaggtgagtaccgaattatctacgagacagaatcagctaggtttttaatatattatatttaatattaatgaatgcatagctatacattctgcccaagatatcttaagagacagaaaaggaaaagtaaacaaggcaattattgaagaaaaatcaaacattttcttatttgtactctatagaaaacagagctgcaattaacagctttttgttttgtaactgggaataattctttcctaattggaccttctttctttttttttgcttgcttttkctttgcaagaaaaatgttttatttttctttttatgattctaatgaagtattgaaagaatatatatgttatgaaacatattattaataaaattgatgacacaaacttacccttg

SEQ ID NO: 482344 - DNA, 629 bp, Homo sapiens
aactctgaaatatcacatgccataatatggtcctacttactgcaagcaactggactcagttcatgtaagttactgcaaattgtataacacctgaattgttctataactgtaattcattgagtgagatagatatgctaattacatgctatgctgttctataagtttctaagtgcttaatattaatttatgtacttaacttgttatggctcagtaacaagtattttatgcaaagcattggtccatgaactacactttagattgcagtacataagaaaatgcrgacattgtacacaggaataataaaaccaaaaaatttatttgaaatagagaaccattctttttgtgtacatgcaattcaaacatggtggttatatgaactaagactttcttttttcagctttattatctaaaaacacaatgaaatgatatacaactatgaaggactctatgacaataaaagtggtttgaaatttaaattttgtgttggaatgtgtttggatggtataatagtgaagacagggaaaccttctggagtcattacccagattaaggagctcgtacttccttaattaagaaattattgctataaaaataaaatcagctaaactaaacagtgagctaagtggcat

SEQ ID NO: 482345 - DNA, 612 bp, Homo sapiens
aaaaaagcaaataagtgaatctgtttatattgataagaatcaagattttcaacacaggggagatgagatataaatatgcgacattaatttgaaaaaactcaaagtcttcatttggattrgaattgttgctaaatctcaaggatgataaaattattaatttcttagtttaaagcaagctaaacgtccaacttatatttcatagttaagtctcttctaaaaactcctcagaaattgatttcttgcctctttttgaattacatcagtgccaaggaaatcattgtatcatagatttggtattagttctgtgactaagtccttactccatctttcctagatatgacttagagaattaacttaatctctctaattccctgttgtataaaatggagataatgaaaaaaaaaatctgcctgacaggactgattcctgaagggattgaccaggctgtggaaacaatgatttcttaccagcaagctcttcatgacgttgtccagacaaaaatcctcccataagaatcaaatttataagtagtattgtgatttgagggtattctggcacatcatccatttagaaaacatcgacaccctcaggagtaagagactatgtttcatt

SEQ ID NO: 482346 - DNA, 619 bp, Homo sapiens
gcaaataagtgaatctgtttatattgataagaatcaagattttcaacacaggggagatgagatataaatatgcgacattaatttgaaaaaactcaaagtcttcatttggattggaattgttgctaaatctcaaggatgataaaattattaatttcttagtttaaagcaagctaaacgtccaacttayatttcatagttaagtctcttctaaaaactcctcagaaattgatttcttgcctctttttgaattacatcagtgccaaggaaatcattgtatcatagatttggtattagttctgtgactaagtccttactccatctttcctagatatgacttagagaattaacttaatctctctaattccctgttgtataaaatggagataatgaaaaaaaaaatctgcctgacaggactgattcctgaagggattgaccaggctgtggaaacaatgatttcttaccagcaagctcttcatgacgttgtccagacaaaaatcctcccataagaatcaaatttataagtagtattgtgatttgagggtattctggcacatcatccatttagaaaacatcgacaccctcaggagtaagagactatgtttcattaacatttgcacag

SEQ ID NO: 482347 - DNA, 634 bp, Homo sapiens
tcatctcatctgatcagtgagacgccagacctctcacccatcatgattgcctgagcagcagcctgcttcctgttgaccagctctcctcttccttagccctcccacattcctgtttacctgcatgtatttacatttcttccctgctatataaayacctgattttagctggtcagggagatgaatttgagactaatctcccatctcctcagctatggcacccaaataaagccttcttccctggtgatagtcattgtctcagtaattggcttgctgtgcatcaagcaacaggatctagaccaaacccctgtcatttcagtaacaaatctatgtctgtgtctaaatctgtatcttaatatatcaggaaccaccgatattcgtgagatatgccatatatttttattttcccatcgcacaaggcataatgtgtattgtatgtagtaaacgcttgattgatgttttattatttatttatttatttatttagaaatggagtttcactcttgtcacccaggctggagtgcaatggtgcgatctcagctcactgcaacctccacctcccaggttcaagtgattatcctgtctcagcctcctgagtagctgggattacagatgtgtgactccatgcccagctaat

SEQ ID NO: 482348 - DNA, 634 bp, Homo sapiens
tcatctcatctgatcagtgagacgccagacctctcacccatcatgattgcctgagcagcagcctgcttcctgttgaccagctctcctcttccttagccctcccacattcctgtttacctgcatgtatttacatttcttccctgctatataaacacctgattttagctggtcagggagatgaatttgagactaatctcccatctcctcagctatrgcacccaaataaagccttcttccctggtgatagtcattgtctcagtaattggcttgctgtgcatcaagcaacaggatctagaccaaacccctgtcatttcagtaacaaatctatgtctgtgtctaaatctgtatcttaatatatcaggaaccaccgatattcgtgagatatgccatatatttttattttcccatcgcacaaggcataatgtgtattgtatgtagtaaacgcttgattgatgttttattatttatttatttatttatttagaaatggagtttcactcttgtcacccaggctggagtgcaatggtgcgatctcagctcactgcaacctccacctcccaggttcaagtgattatcctgtctcagcctcctgagtagctgggattacagatgtgtgactccatgcccagctaat

SEQ ID NO: 482349 - DNA, 463 bp, Homo sapiens
tcggctttacataaatgtgacaggatggagattaatgtgaaatattttccacatgaagtgattrggttgaatttacactgaaaaagattatagaagaagcaagcttttctttttagagttttgctgtagttttgctgaagttcattctgatcttagaaattactaacttctgcttaacataatatcacttaatttgtaatactaattattacaaatattaaaataactactgtagtaaaagacatttgagaaatctttatttggaaatgtgaggattttttaataatgatattgtagatatccaaacatttatgaaattaatcgattagttattattattttaaaacatctaaatctgaaatgacattctccaaaagaatgaatatgtacagttatatgaaatcttttttagagatgatatgatttatttaagtggcccttctttaggcacatagcttattct

SEQ ID NO: 482350 - DNA, 463 bp, Homo sapiens
tcggctttacataaatgtgacaggatggagattaatgtgaaatattttccacatgaagtgattgggttgaatttacactgaaaaagattatagaagaagcaagcttttctttttagagttttgctgtagttttgctgaagttcattctgatcttagaaattactaacttctgcttaacataatatcacttaatttgtaatactaattattacaaatattaaaataactactgtagtmaaagacatttgagaaatctttatttggaaatgtgaggattttttaataatgatattgtagatatccaaacatttatgaaattaatcgattagttattattattttaaaacatctaaatctgaaatgacattctccaaaagaatgaatatgtacagttatatgaaatcttttttagagatgatatgatttatttaagtggcccttctttaggcacatagcttattct

SEQ ID NO: 482351 - DNA, 485 bp, Homo sapiens
ctgggattccactggcattctggagctggatgttcagaaccacctgccttcagacagagaagtcctgggccagagcattcctccctgggcaaccacgtgcccactggagagttttaaagctgatagaaagggtgagtcgatgggccatgcacaccagccaagttcaaaggcacctccacagtggaataaagacattgtgaaaaagtcacaaagagacgctaattctctcttacctcatacctaaagctgatgcagcctatggagccgtggcaggaagccccacaagccactgagccaaggcctgtagctggagaaggcatgcagagaacatgaagtggtggctgcaatgctctcaaaggaatggggagatgggaccagggtctggacctggctcgttgatggcactgactctgcgtttccctggggtaatgccragagagccatcgcagggcagtctcactgctgctttcttcttctcccttggc

SEQ ID NO: 482352 - DNA, 586 bp, Homo sapiens
aaactgtatataaatcatacaaaaaggacacagaattagatcaaattatatgaaaggtggctataacgtgtgaagagctgaacgtcagtaagcaatatggaaggaaaatttaataaatcatgttgaaatactgaggattgaatttgaaaaaggaattagattcaccgaatctaattctgctcaccgaaattaaagataaataaagatgataaatcatagggaaaaaaggttacatagtacacaatttaccatttgccatacttctttggaagtgtaggagaagtgaaagagagckcttggggagtgactcccagacgtcaaaaacgttagtatctttctcatttcatccctacagcagccctgtgagacagccattactctctactctcagatatggaaactgtggcttgaaaaatcaagttattttctcaaattcaaatagggagcaatcagaagagcctcaatctgtctgactctcatcctgggctgcccaatgactgccaacgagtcagggtgcaggggaggcgtggctgcccagttcagaagatgaagccccagtgccagtccagtcctagaggggcctggg

SEQ ID NO: 482353 - DNA, 627 bp, Homo sapiens
ttcccaagccctgccgaaatttcagctttgtgaacaaaataaatgagtattggcatttaagccactaaattttacaacagttagttacacagaaacagcgagaacaatgaagaaacaaaactcagctaaaataggtcagagaaggataaattagcaatacttatgaaaagctctcaaagatatacatgcccttatacccaactattccacttttgggaattgaatcctaaagaataaattaaagatatgcatccaagatttccctacaaaagtatacttcaaaacagcaaaaagctgaaaaacaacctaaatgttcaatagagaattgagtaattyaattatggtacacctaattctgttggtctaaaacctgaccatcagaatcacttgaggatctttctaaagaaaaggaaaatgaatagtccctcctcgagttactttattgatgaatattaagactgtttccagtttggggctattacagtcttgtaatgtattatacttctattcttaagtactgttgcttttattctcattcctagaagtgggctagctgcatcaaaggtaggcacaacttcaattgtaataattttccactaaatctatagcaatttatattcaattcat

SEQ ID NO: 482354 - DNA, 487 bp, Homo sapiens
tgttctcaccacaaactctgtaagtttattcartgtcatatgatttcaacatagacctttatatatccttcccatgtctccagcctcttgctgaatgagatatttccttctaattcaatacagtctctgtttacctgacaaaatgggacatcaaaagactcctaaacttgttaaacccatgcagaatctcatgcaaagtatatttcttatgcactttaatacagtgagcaaccaggaaaatcggaacaacgtgccacatggcattagcagtagcagacgttgtcaaagccccacccatatcctctgcacatgctgtgcatgcccactgcaaacatcagcaatgctccacccaagagcttttccttggcttgtgcaaggcggggccggggggtggttagcaccccttgggggatagatacgccagcgatctcatcctcaggtggacaactctgaggtgtttttccagaagccttcagcaggattgcag

SEQ ID NO: 482355 - DNA, 499 bp, Homo sapiens
ttcccagccaaggaggttagaccacaactggattaagaggccagcacagtgttcccagattacagacattgcttcccttcctcttcacttcctgaggttcctccaaacacacacacactttttctttccctcgtaacagtttttgtttgtgtgttttacgttctaatcaaacgtccaaggagggaggtcgaggaggacttgagggtagctgctatttgatagcagaattttwgaaatgtgcagagtccgatgtcatctcaatctcaagtgacttcacctctccctgtctttagccactgtgcccatcccccccttggacagttttgttctcaaccgcaatggctccaagagcgagaagcagagaatgtgctggctgcacagagcgatgcctcgtaacccgtggtaggtgctttacgggaggccacctttggctcattttgctgtggatttcacatccctgtgaggcggctggggcagttactattattcctattttaca

SEQ ID NO: 482356 - DNA, 559 bp, Homo sapiens
aagaagttaaaataatttagtattgggaatgagaacagagtctcttagaggaagaagagaagcttgaaaaaaggaaaggagggggraaaagagagaaacaccaaggtggcaggatttaggatggtttttggtggtagttgagagtgaagtgttatgagcactttggggaagctgcagggaatgggaggtggcaagagaatgagaacgggcaaaaaaaatctgtaagtgtttctatagattataaattgtattcccttggattttctttgagaatctccagtgaagagctcaattgcttttgatcacttttggagacagattttttttttttctaaactgttcccggactggaccacagggattcctgtcttttttaggggagaaataaatatatagcaatatttaaaatggtttgttcagagcagtggttttatgtgatattttaattttcttctatttttttcctatacttttcccatttttttcattatgaatgtattacttttaaaataaaggagaacatgctttaacagttttcattccctttagttgtttaagg

SEQ ID NO: 482357 - DNA, 559 bp, Homo sapiens
aagaagttaaaataatttagtattgggaatgagaacagagtctcttagaggaagaagagaagcttgaaaaaaggaaaggaggggggaaaagagagaaacaccaaggtggcaggatttaggatggtttttggtggtagttgagagtgaagtgttatgagcactttggggaagctgcagggaatgggaggtggcaagagaatgagaacgggcaaaaaaaatctgtaagtgtttctatagattataaattgtatycccttggattttctttgagaatctccagtgaagagctcaattgcttttgatcacttttggagacagattttttttttttctaaactgttcccggactggaccacagggattcctgtcttttttaggggagaaataaatatatagcaatatttaaaatggtttgttcagagcagtggttttatgtgatattttaattttcttctatttttttcctatacttttcccatttttttcattatgaatgtattacttttaaaataaaggagaacatgctttaacagttttcattccctttagttgtttaagg

SEQ ID NO: 482358 - DNA, 591 bp, Homo sapiens
cagtgtatctttctattgtataattgtttataaataacactgcaattataaataatgtcttcacacataaagttttgtcacgttttgagagacatccattggaaaaaatatccagaaatagtatttgaaaacgaattaacaataaatatgaaagatcatcaacgtgaccatatcctttgacccagttatcctgcttctggaagtgttttccaattcaacagagcataaaaaggctttattctaggaataaacatgcattaatacatgcaaagtacctaaagagagggtaagagaaaggatctagtactgctaggggcatattccatgcctggtaatttatcagcaatttatatatttcctcctacttaatccttacaaaatcttttagaataggtattgctatgcccaattctcatataagagacygaaagataagagagcttgggaaatttgcccatgattacacagccagcaagtagcagatccacgattcaaacttaacctacctgtctccaaaaacaagtactcttttcagtacggtttttaaagatgtacatggaagtgtctaaaatagcgtcaagtggaccgtta

SEQ ID NO: 482359 - DNA, 591 bp, Homo sapiens
cagtgtatctttctattgtataattgtttataaataacactgcaattataaataatgtcttcacacataaagttttgtcacgttttgagagacatccattggaaaaaatatccagaaatagtatttgaaaacgaattaacaataaatatgaaagatcatcaacgtgaccatatcctttgacccagttatcctgcttctggaagtgttttccaattcaacagagcataaaaaggctttattctaggaataaacatgcattaatacatgcaaagtacctaaagagagggtaagagaaaggatctagtactgctaggggcatattccatgcctggtaatttatcagcaatttatatatttcctcctacttaatccttacaaaatcttttagaataggtattgctatgcccaattctcatataagagaccgaaagataagagagcttgggaaatttgcccatgattacacagccagcaagtagcagatccacgattcaaacttaacctacctgtctccaaaaacaagtactcttttcagtacggtttttaaagatrtacatggaagtgtctaaaatagcgtcaagtggaccgtta

SEQ ID NO: 482360 - DNA, 617 bp, Homo sapiens
agtaagaccctgtctccataaaaraaaagaaaaagaaagatccctgtttggtctcatggttttattcattaatacttttccattcattcaaaatattcttgtgtgtctatgccaaactctgtgctgagcactgtgggttatggtgaacaagccaaaggatctcatcaggcgggatgcagatgcatggacagataataataggaagtcatggtaagtatgtcgagcgtcatttgctggggaatttttcacggaggaagaggcaggtagacaacctagacttgaagtcaggtgtaaacttaaaagcttccttaggagttacttcctaagtaacccctaagctgagtttttgaaaaataagtttaaagggcaagcaagtgaattagtcagggtcaagtcaacataaacagaaaccattctaaatattttatacagaggaaaattataatagagaattcgttactccaatgctgaaagagctgagccaccaaactaagcaagataaggcaatcttgatactagcaaaagcagggaagccaccagctcccctagggcttaaaggacaaagggaaaaggtctattaccacccacaagttagggccactagcaaagctggaatg

SEQ ID NO: 482361 - DNA, 562 bp, Homo sapiens
ctggaagtgtagctactgagatttgatatttgtcttcctgcacttgactaccaagctaaataattttatttgtaatcaacagaatgtaccttcacaaattagcataaatatataccactgaaagactgaatctacaagcctgaccttctagtagatatatgttcttttttttgagagacaaggattttcttagcctctcagactgtatatttgaaattaaacaaaaatactcagagaaacattttcctttttttyattgtttaaagtaagcctcctgccttctccctggcaacaggtgacttattcttccagctatacaaaccatttttgattctaaagaccagcatgaagtctattcaccaaacttgtgctgcttaaacaactgaaatatgtgttcctatttgatatagttaagaataccaggtacagagaaatgtacatttaattaccatggttcgtatttgttgaaatttgttatgcagcaggaacttttcatgtatgatctcatggcatgttctctccattttacagatgaaacgaatgaggcttagggagtcacact

SEQ ID NO: 482362 - DNA, 592 bp, Homo sapiens
atgactcaggtatcaagggagtttttttgtgacttgcctcaggtcagtcacacaactagcaagagacggaatggggaccagatgcccatcttccatttataagaaatggaggtgatagatctaggctcaaattatattcctctagttattttttaggtaaataatattctagttattacttagcctttgccattatcaagtataaaatcgtgactattaatgcttattttacttagctgttgagaagataggatgagatggcataatactttaacaaatgatcattcttttcctttagtgccttccttggtgamccccttctctctccactgctctacactttgcatgctctgcaggaggaatgcatcctgtgataagggggagttcttgcaaatcatccctatattctatgtgtgtattagttctatgaactctatgtggatacatgtgcttaaagtaaatacatcctttctaatatatcaggacaggacattgcacatttattattacatacctaaaaatggaatctggagaaagttaaccctccaacgtagctgttgtatgctgactcactcataggaccagtccagta

SEQ ID NO: 482363 - DNA, 454 bp, Homo sapiens
gggtagtggaatgaagagagcatgtyctgccctgacccagtggtgggcacggcatcccccgcagagcctcccacttactctctaggcctgctggtctctgagcaggttggggagggtgtgttggaactgcctctgccagcttacaagagctgatggttaactatacaatgaactatgcgacaaacagtggtgtttgtttacaacaaacaaacatttaaacattagtagcttgaaactggccatggtgggagtattcacaccatgggaaccagcaaacgctctctatcaggcccctggagagtcatttactaacatgctgctaagagcaggggtgggtccagggatttggggtccagccaaggaagggtgagtgtctggcaggttgcacccttggaagttgtgctgctggagaatcacacttgggtctgtgagctgttgggtgaggtcgagaggc

SEQ ID NO: 482364 - DNA, 604 bp, Homo sapiens
agaaggctggaatatttatctactggctcccatcattgattgagtgtcatctcagagataacacccctgcatktctgtgatgcactttttaattgattgagaaaattcctgctggagaaggcccaggggtggaaaccattgtgtgcttgaggtgtgtattagtctgttctcagctgctaataaagacatacccgagactggatactttataaaggaaagaggtttaatggactcacagttccacatgtctggggaggcctcacaatcatggcagaaggcaaaggagaaacaaaggcacgtcttacatggtagcaggcaaaagagcttgtatagggaaactaccccttataaaagcatcagacatcataagacttattcactatcacggggcagcacaggaaagacccatctccatgattcaattacctcccactaggtccctcccatgacatgtgggaattatgggagctacaactcacgatgggattagggtggggacataggaaaaccatatcaagatggaactaggccagcacgtgtctgagctcacctggaactgcctcttcaaagtagcatctgtattggaaataagccaacaggatct

SEQ ID NO: 482365 - DNA, 657 bp, Homo sapiens
ttcttgtgcccctgccaggtcactctctgacacctcagggcrtttgcatgtgctgtttgccctgctgagattccctttccctggctctttgcccagcaccttctcatccattagggctctgaccacgtgtcctgacatcttgcccccaaaccttctataacatcttctgtgtatgtccttttggaacaatgaacacaagagaatgagatgagcctgttctcctacaacagtaggagagatgagcatccatctcctacttcctttctggaatacagatgtgatggctggaggtccagcagttatcatggaccctaaagtgctctggaggctagatatcacaccctaagaatggcagaactgaaaagcagaggaatgacaatgtgaaactaactatctttttctgtttgcttattttcctatttattgtctgtcttccccctctggtctgtaagttccaggagaacaggcccaacttactctcttgtgtctccctagtaccaggcccacaggaggtagcacctgatgtaccctgaatgaatgaatggctcctcagctcctaagttcactcacgtttgggtcagagtccctccccattttcccacggtgccctaggctggccccattttgtcccttagtggttgatggcattggcacgca

SEQ ID NO: 482366 - DNA, 329 bp, Homo sapiens
gagttttaagctcctgactggtgggaggcagactcagacacatacaggttggagcccgaggagaaaacctygccactgaacaaggtggaactgaagtaagccagtttggactgcctgagctgaaggcagacaggaaggcagggcccaggggccaactccgagagtcacggaagggatgtggtctcatcctcatgtagaaaatttaagagattgtttctggggtgggagggtggggaatggggtgaaaaggggatggattttaccatcatatcagctacactgctagatttttttaaccatgtacacgtattgccttaaaattaaacaat

SEQ ID NO: 482367 - DNA, 529 bp, Homo sapiens
gccctctgccggcctggggggctcctcgagggaggaggtagcagctccaggtccctgatcagcagttcctcttccagcatctaaggcctggcygggtgtgtgctggtgggtgcctgtgggttctgtgtgagtatgtgctgtatgtgagcaggtctatgtgtgtctgtgtctgctgatgtgtcccaggaatgcctgtgtctgatgtgcgcagggtgtgcccgtgagtgtgtgtgtgaatctgtgagcatgcatctgtgtgtgtctgtctgcacatctgtgtctgtttttgtccatgtatacatgcccgtgtgtcagcatgtgcaggtgtgttatgaatgcatgtctgcatctgtgcttgtaggagtgtgcccgtgcctgagtccttttttcactgtgtgtttatgcgggtgcatgtctgtatgaatgtgggtgtccacctgggcttggccctgtgggatgtgatggagccaggctgaggccaggggaggttgcagggcctcacttacctgagcctgactttggggacaac

SEQ ID NO: 482368 - DNA, 529 bp, Homo sapiens
gccctctgccggcctggggggctcctcgagggaggaggtagcagctccaggtccctgatcagcagttcctcttccagcatctaaggcctggccgggtgtgtgctggtgggtgcctgtgggttctgtgtgagtatgtgctgtatgtgagcaggtctatgtgtgtctgtgtctgctgatgtgtcccaggaatgcctgtgtctgatgtgcgcagggtgtgcccgtgagtgtgtgtgtgaatctgtgagcatgcatctgtgtgtgtctgtctgcacatctgtgtctgtttttgtccatgtatacatgcccgtgtgtcagcatgtgcaggtgtgttatgaatgcatgtctgcatctgtgcttgtaggagtgtgcccgtgcctgagtccttttttcactgtgtgtttatgcgggtgcatgtctgtatgaatgtgrgtgtccacctgggcttggccctgtgggatgtgatggagccaggctgaggccaggggaggttgcagggcctcacttacctgagcctgactttggggacaac

SEQ ID NO: 482369 - DNA, 485 bp, Homo sapiens
gggaccaaaggcaggtgcactgagggtgtgtgatggaggagcgggcaccagcatgggcacagttggcctaaagctaagagaaggccaggtatgtgaagactgaaagacagggtgccagaagatcctcctgttgaattgtttttttgtttgtttgtttgtttttgtttgtttttttgagacagggtctcactctgtcacccaggctggtgcagtggtgcgatctcggctcactgcagcctcaacctgcctggctcaatcgatcctcccacctcagcycctcaagtagctggaactacaggcatgcaccaccatgcctggctaatttttgtatttcttgtagagacggggttacactatgttgtctaggctggtcttgaactcccggccttaagtgatccacccacctcggtctcccaaagtgttgggattacaggtgtaagctactgcaacaggtaaggatcttggttttcaaaaatcaaaactgg

SEQ ID NO: 482370 - DNA, 615 bp, Homo sapiens
tttgttaacaataatcagaacttcttccggacattttgctctatttcctgccaggctttcccccaataaacagcctttcttgcacatgtctgtcattatcatttagtggagtttatgtttccagcccagcatccagttcacagttcaccttcttttggtaacagcaccccagttttcctcctgggaatgattccactaccttccacaggccttrtgttagggtggggccgcaccccccccgcaaccacatcaggagtggttgcatgacccaggcctgagcaatcaggatgctgtagtaattgcttctgagacacgccaggagcccacgatcctgtcccgagatttgccgaaaccgcaggggaccagcatctctttgaactggcctgagctgttaggaaggatgcctggagcgctagcagcctccgcatggaggaaatccccctgaaaatctagccatcaatgacaaagggagcaaagagaagagaaagaaccgaatccctgacagcgtcatgagcacctgctgtgtagaccctttcctccaggctttacaggttcctgtgagccaagaaatttcttgatttttgttatttttgcagaagtcaatttgatttgggt

SEQ ID NO: 482371 - DNA, 615 bp, Homo sapiens
tttgttaacaataatcagaacttcttccggacattttgctctatttcctgccaggctttcccccaataaacagcctttcttgcacatgtctgtcattatcatttagtggagtttatgtttccagcccagcatccagttcacagttcaccttcttttggtaacagcaccccagttttcctcctgggaatgattccactaccttccacaggccttatgttagggtggggccgcaccccccccgcaaccacatcaggagtggttgcatgacccaggcctgagcaatcaggatgctgtagtaattgcttctgagacacgccaggagcccacgakcctgtcccgagatttgccgaaaccgcaggggaccagcatctctttgaactggcctgagctgttaggaaggatgcctggagcgctagcagcctccgcatggaggaaatccccctgaaaatctagccatcaatgacaaagggagcaaagagaagagaaagaaccgaatccctgacagcgtcatgagcacctgctgtgtagaccctttcctccaggctttacaggttcctgtgagccaagaaatttcttgatttttgttatttttgcagaagtcaatttgatttgggt

SEQ ID NO: 482372 - DNA, 550 bp, Homo sapiens
ctgtcacctgctggtgtggtggaaccggttctaatgggaggcctctgtctgcatctgccagcatcattaccatgccagtcattagatatatcttttttcttttttaaggcacaggatctcgctccgtcacccgggctgggatgcaatgatgtgatcacagctcactgcagcctggaactcctgagctcaagaaatcctcctcctgggcctcagcctccccagtagctggggctacaggtgcacaccaccatgcccagctaatttttgttttattttttgtagagacagggtcatactacgttgcccaggctggtcttgaactcctgggctcaagcgatcctcccaccttggccttttaaagttctgggattacaggcatgagccaccatgcccagtccctcattcaacrtttttaatatccctcctgggtatgagagagtgctggaaagcttagtattgaagccagacagggttcaaatcccagattcagctcttattaatagtgtggctttgagtaagtcgcttattctctgtgaggctcagcatgcct

SEQ ID NO: 482373 - DNA, 467 bp, Homo sapiens
ggaggaggcagaatcccaactaacccctggggctggagccctggtctgaaccasgatcctctctccgtctagcgccgcagcgcacctcaggacaagtaatgtgcgtcgaagggctttggaaactgcaaggcacagtataaataacaggttccttcattcctcctgggcaggaactttggcctcaacagttccttctttgttgaggccaaagaagctgggccatgagaaggcagaggaaacgctgctgtggggaaccagcattctctctgcttactcaacggggaaagtgagtcagaagggaagcctccctgagtggagccccatggtcagcccctgggaggttctcacgtgccagacgccatccggcactaaccaggttagcctggacttgtccccagggcccgtccaggctctcctgcaactggccaccagggggcgccgctcccccagccttcctcttactgaac

SEQ ID NO: 482374 - DNA, 579 bp, Homo sapiens
aggataactcagatgccctttgcccttgtagaattggtgggagattccaggagcagaggcacagcccctggctggggcccagccctgccataaggggaactttaaccgagatacctrcttccctcctccatcagtcccctcaacgccatagcaacagaggccttcaaggtgcacaactcctcacctagtatgctaactgatattgactagaccgatcagacaagcaggccctccttagactcacctaaaaatattggggtgagcaggatgccatccagttcccaaaatgatagcactctggcatctcctttcttcttccctcaccttgcacagaggagtaagtcatgtttaagatctagtcaattccggtggtgccaatagtaatggtgccaattcaagtggtgtcagatggtttctacctgtcctccctgaccagggccggccttggggcagcaggagagaaaaagagcccgttggcaggtgcttgatcccagttgtgactcccataagggggcaaacatcaaaagttctgtcactcagagatgaggtgattgcaccactaaatcctatttgctgttc

SEQ ID NO: 482375 - DNA, 572 bp, Homo sapiens
gtaattaatcagtagggtcagccgcctttgaaggttactcgttgttcctcatagcggcatctccgcagtatggatggagatgcggaacatcccgtggcagtcatcagaaatttatgcgtctaattgatctgaaaactgaaggaatttagcaacaagttaagasggaaggcgaccaaggtgtggccctattagctttgttgctcagcacatagccccaggcatttacaggaggggccacacaagtcctttgtcactagtcctttgtcactagcggcagcctcacctgagaagacctccaagggtgctgcctgtaccgtcaggaggtggggagtgtccgagggccctggagtgcacagatccgccctggagggtagccatggggacagcccactccatcctcccacccctaccccgacttcctggccttcccaggcaaatgtaggccaccttgtgttcagtttcctggagagtctcctttccccagcatccgggtccccaggggaggggtgacagctacccctgtccccgatctgtggggcctggccgccttccgcagggctgcgcgccattcc

SEQ ID NO: 482376 - DNA, 572 bp, Homo sapiens
gtaattaatcagtagggtcagccgcctttgaaggttactcgttgttcctcatagcggcatctccgcagtatggatggagatgcggaacatcccgtggcagtcatcagaaatttatgcgtctaattgatctgaaaactgaaggaatttagcaacaagttaagacggaaggcgaccaaggtgtggccctattagctttgttgctcagcacatagccccaggcrtttacaggaggggccacacaagtcctttgtcactagtcctttgtcactagcggcagcctcacctgagaagacctccaagggtgctgcctgtaccgtcaggaggtggggagtgtccgagggccctggagtgcacagatccgccctggagggtagccatggggacagcccactccatcctcccacccctaccccgacttcctggccttcccaggcaaatgtaggccaccttgtgttcagtttcctggagagtctcctttccccagcatccgggtccccaggggaggggtgacagctacccctgtccccgatctgtggggcctggccgccttccgcagggctgcgcgccattcc

SEQ ID NO: 482377 - DNA, 459 bp, Homo sapiens
ctcctagagtgctgggattacaggcgtgagacactgcgcccagcaaaaaaaaatttatttccaattgagtaattaggagttcagtgagtccttaattcaagacaagagataaactgttctgccaagaaagaaagaaaaaaaaagctttgcctagctctttttaaaacttcagatgattgatcaaatgtctcagccaaagataattcaggaatctacaaaacctggagagaggagcctaatggagatggtgcatgagcgagcatggccgtgggctctctttgtcctcatgagaagccaccgatggcccggcccagacacctgccaagagaacatggcttagtggctgcccaggactcgccccragctccattaggaaacacttgttttttgaaacaagcacttgagatgaggacttcaattcctttggtttctgggtgacttcctctctggctggcttgt

SEQ ID NO: 482378 - DNA, 451 bp, Homo sapiens
tattgggaactttcacataagtccaggagaaaatgaacaaccatacctcaagagagctggaacaatgctagctctgtggactagactgctttcatttccagcccccttctgtcccatgaagcagttttggtctcctcttttttttttttttttttttttttycccaaaacggccttccttagtcctgtaaaacctggaatgcacatagtcctgtaatggccatcccagaagtgaatctacatgattattcaaattcaaatacctaagaaaaaaaatcacttgaagttctgcaacttcccaaatgcaaattcctgagaaagaaacttgactgagccagttcaactttctgtattggattataaatcctatcttgctggctggtctgtagattggttgctcttgagtcagatgacctctctttagagtttagtcagctatggccattgagggg

SEQ ID NO: 482379 - DNA, 465 bp, Homo sapiens
tgtctagctgccaatgctagcaaggatgtagtgaaatttaaatctctcaaaattctgaaaagatgtgagttggtttctttctgcaaatcagtaagatggtgcaagagctttaaatgtgttcatgatcttaggacctaataatcttcctcctaagaatctccatgcaagaatcaaatgtcatgcaaagctgctcatttcagagttctatctctcctgcgtcctcattcactagtgcagaatccagtgcctaagagggcctgttactgggggcatccatgaggagcatctgccattggcttgtgaacacaccaatcaattattggtgcatatcctcatttattcctcttctctttgtccttcctcaaggtatttccaggaatgarggttgtcccagcatgactcccttgagtactgaggttcctccaggcatcatcatcaccttgaccagggactgtgccctagtgg

SEQ ID NO: 482380 - DNA, 621 bp, Homo sapiens
ctgatttcatatttttatatggatttactggttgtccttaagggaagtgtgatccacattactcactgtaccaataatggaagctgagttctgtgactttaattttcccctaaaagatagtatcttttgaagaataataagtttttaattttaatgtagtccaattgaaatttcctttttatatatattgggctttactgtcttttttaaagatttccttccctactctgaagtcataaatatactttcacatattttcttctacaaattttacaaaaagtttgcttttctcccatgtatttaatatacttgctatttgctttgtgtgcagttatgaggcagagatctacaataagtatttctagatgaataactaattatccattaatcacttactgaattgtccttcttwtctatgctggttttcatgccagctcattcaactacattattcatctttgatcccacatatagtgttatgatggagatggctataggctattccatccatctataaagttagcatcataagaatgattaagaatacatgaacactacaggtcactcagtattgcttatcaatcttatgtttttctagtaagctcacctttgcacgaagtt

SEQ ID NO: 482381 - DNA, 608 bp, Homo sapiens
atgtccaaaatgcatgtttgtttttaatgttttttaatactgtacttaatgcatgagcaccaacagtagaaagaatagaaaaccaccatagccagtgggagatatatccagaatctgcaaatcaaaggataaaaactgcaatactcaaaagattccaagaaaatagtattttatctttaatgtctatttttcacagtattaaattaaatagcactcttacattgatcttaatactagtgttctttaattcatttactaaaaaacaaacaaaacagggtttctgttcctattttgatcttagaagtagataaggacaccaattatattaaatgaactccaattcaaaccactgtcaaatactttttggtattacaaatttggtaaatatgggccgggcatggtggctgacacctgtaatcccaacactttgggagaccaagccagacagactgctgagcccagaagctcgataacagccagggcaacatggtgagaccccatctctacaaaaaaaaaraaaattacaaaaattagccaggctcggagatgggcacctgtcatcccagctactcaggagttgagacaggaggatcaaatgagcagattga

SEQ ID NO: 482382 - DNA, 545 bp, Homo sapiens
tttctgttatgaaccagatgcatttttattgtaaaacacaatggcaagaatgtgctttaggatatagtcataaaacaaagcatccctgcccttcatccagcaaactcttaatttcatttacttctcactacgttctgcaagctgtgatgagctccactttaaagatgaagaaactgaggcacaggggaattgggttccaaagccaaggtttcagttagtaccttagcaaggcagaattcagactcaggcttttctgatcacaaagcactttctgcttcctaatgtgccatcctcctccattgcaccaatgcacaaaccaaacctctgcctatgtattacggtgcatttttggatacactttctattgctcactaaagatcctttctatccacacatgatacaagacagaacttctttggaagaagactctgtgaggacatcaggagctgtgatgttactatgcattcgtaggaaaattctgagcatttttctccattttccttctctctgattmcttttattgcatcccaaactgggtatgtttc

SEQ ID NO: 482383 - DNA, 452 bp, Homo sapiens
gccagcccctctctctgcctctcactgcctgcgycccttcccattctcctgtggcactggagaattttgcctcacaaccttcctctcccaagactgccaccttcaaaatccacgaagacaacaaatctaaaggccaggatttgggttcctctttcatcaccaacaatgttgcctatgaattaaattcaccccctcctgcgatcacactctcagctgctccccctctgaaatctgaccacagcctctctctcagtaactgtggagataccacctccgcccccgccccatcaggattccctgtcctgggacctgggtttttgttttgttttgttttgttttttgtttttttttttttggtctgttagctcctctaattaattccttccctcctctggtccatcagccccttgatagtaataattcttaccttccatgacctgttgctgcgtttg

SEQ ID NO: 482384 - DNA, 452 bp, Homo sapiens
gccagcccctctctctgcctctcactgcctgcgtcccttcccattctcctgtggcactggagaattttgcctcacaaccttcctctcccaagactgccaccttcaaaatccacgaagacaacaaatctaaaggccaggatttgggttcctctttcatcaccaacaatgttgcctatgaattaaattcaccccctcctgcgatcacactctcagcygctccccctctgaaatctgaccacagcctctctctcagtaactgtggagataccacctccgcccccgccccatcaggattccctgtcctgggacctgggtttttgttttgttttgttttgttttttgtttttttttttttggtctgttagctcctctaattaattccttccctcctctggtccatcagccccttgatagtaataattcttaccttccatgacctgttgctgcgtttg

SEQ ID NO: 482385 - DNA, 444 bp, Homo sapiens
cacagctccagacattggggcagtctttttgcaatagctctcctggactcattccctgagaataagtactccactgggcttctatctctgccctagtccagcatttctgtggatttttctgcaatttgtaaagaatccccagcacatagcagttactatacgaaaatatcaaatgctggtaaatgcagcctcaggcatcatttgctatgctgaagatggaggtggtcaggaattggattaaagcacaaacaaggaagcagagatccttttcatcagagtcagatgaagtgagaagaggctgaagtaaaaggtttggagrgtagaggaccgcagctgggggagctttcattgagtggttaggtcactgctaggcaagatgcgggctttaaaacagccagggacttcctgagagcagaagatacatggaagaactgccgtgggaat

SEQ ID NO: 482386 - DNA, 444 bp, Homo sapiens
cacagctccagacattggggcagtctttttgcaatagctctcctggactcattccctgagaataagtactccactgggcttctatctctgccctagtccagcatttctgtggatttttctgcaatttgtaaagaatccccagcacatagcagttactatacgaaaatatcaaatgctggtaaatgcagcctcaggcatcatttgctatgctgaagatggaggtggtcaggaattggattaaagcacaaacaaggaagcagagatccttttcatcagagtcagatgaagtgagaagaggctgaagtaaaaggtttggagggtagaggaccgcagctgggggagctttcattgagtggttaggtcactgctaggcaagatgygggctttaaaacagccagggacttcctgagagcagaagatacatggaagaactgccgtgggaat

SEQ ID NO: 482387 - DNA, 565 bp, Homo sapiens
agttctagcctaatttgaaataaaattccacagaagaatttcattcattgtctcctccatctagtaaaagttttgcmaaatagattttaaagacaagtggcatattattttcaaatatatccatcacactggtcttaaaacaaaaagcaactgtttgccatcctagtatacatcctttaaaaggtttaaaataacagtgataattcataattaagatacttctgtaaaatacaaaccacaaagattttcaaattttaacataagctagagaaccaatagttttaatataaaggtattaaaagaagtcatatcagggatatataacacactggaataaatatctgtaacatatactctatgcattttttaaaaagcaagccacatttcatgatttataaatgtaaacttctttttctatctccgcgttatacaagagaacatggcaatcacattctcttacttgatgggagagttgttttcatcatatcttaaaattatatttcattattaagctttgtcaagacgcctacctctgtagtggaagtctttggacatgtctatggga

SEQ ID NO: 482388 - DNA, 612 bp, Homo sapiens
tcctgaggggtggtcattcacaaattttgaaacagattattcttctgaattttcttttttatttttgctggatttatataaaatattagttaggatacctgtgcggtaaagaattaacataacartcctgaggctgttatcctcggaaaggcctccttgcaaggttggtcattggctggcatattaaaaactggaatttagaagggttcgcattcccagaactgataagggtggcttgctgtgccaaaactgtacaaacagtgtgggtgatactgaacacctaattttttctgggaatctggaattttggtttgtgctaggccgaggatggctacgtgaccagcccccaacaaaatctcaggcactgagtctttaatgagatttcctagtagacaacatttcacatgttttatccaactcattgctagaggaattaggtgtgttctgtgtgacaccactgggagagaactcttggaagcttgtgctggccttcctctgaacttcaccctgtgtgacttttccctttgcaggtttttctttgtatgctttcactgtaatgaatcctaaccatgaacaggactatatgctgagtcctgtgaatcctcctaagga

SEQ ID NO: 482389 - DNA, 612 bp, Homo sapiens
tcctgaggggtggtcattcacaaattttgaaacagattattcttctgaattttcttttttatttttgctggatttatataaaatattagttaggatacctgtgcggtaaagaattaacataacagtcctgaggctgttatcctcggaaaggcctccttgcaaggttggtcattggctggcatattaaaaactggaatttagaagggttcgcattcccagaactgataagggtggcttgctgtgccaaaactgtacaaacagtgtgggtgatactgaacacctaattttttctgggaatctggaattttggtttgtgctaggccgaggatggctacgtgaccagcccccaacaaaatctcaggcactgagtctttaatgagatttcctagtagacaacatttcacatgttttatcmaactcattgctagaggaattaggtgtgttctgtgtgacaccactgggagagaactcttggaagcttgtgctggccttcctctgaacttcaccctgtgtgacttttccctttgcaggtttttctttgtatgctttcactgtaatgaatcctaaccatgaacaggactatatgctgagtcctgtgaatcctcctaagga

SEQ ID NO: 482390 - DNA, 560 bp, Homo sapiens
acgggcattttagcttgtttatttatgatacaattaaaagaaagttttgaagagaaaagataatttgatgacatattagcagaaataaartagattatcagagaatactccatttcccacttgccagtagtgtctcctcttgacaccacatttatacacatacctttctccataaagtaccctaaattataatattcacgaggccagagccacatctatgttgtttgctattttttaatctttagaatgttgctcactaactagtacataacaagctcccattaaatacttactaaaattgaaacaaataattgaggttaggtcaaatatttagaacatcttaacacaatatagcattattacttaacttggatttatatctttagcatcacatcttatcatagactaaaaactgctaaaattaccataaatttaatagttaacaaaactttgtttacactgctaaacattaaagtaatattgaaaatggaagaaaaagagttgtgttttgtcattggttaggaccaactcttggccactttggtgttgtctaatgaatg

SEQ ID NO: 482391 - DNA, 560 bp, Homo sapiens
acgggcattttagcttgtttatttatgatacaattaaaagaaagttttgaagagaaaagataatttgatgacatattagcagaaataaagtagattatcagagaatactccatttcccacttgccagtagtgtctcctcttgacaccacatttatacacatacctttctccataaagtaccctaaattataatattcacgaggccagagccacatctatgttgtttgctattttttaatctttagaatgttgctcactaactagtacataacaagctcmcattaaatacttactaaaattgaaacaaataattgaggttaggtcaaatatttagaacatcttaacacaatatagcattattacttaacttggatttatatctttagcatcacatcttatcatagactaaaaactgctaaaattaccataaatttaatagttaacaaaactttgtttacactgctaaacattaaagtaatattgaaaatggaagaaaaagagttgtgttttgtcattggttaggaccaactcttggccactttggtgttgtctaatgaatg

SEQ ID NO: 482392 - DNA, 560 bp, Homo sapiens
acgggcattttagcttgtttatttatgatacaattaaaagaaagttttgaagagaaaagataatttgatgacatattagcagaaataaagtagattatcagagaatactccatttcccacttgccagtagtgtctcctcttgacaccacatttatacacatacctttctccataaagtaccctaaattataatattcacgaggccagagccacatctatgttgtttgctattttttaatctttagaatgttgctcactaactagtacataacaagctcccattaaatacttaytaaaattgaaacaaataattgaggttaggtcaaatatttagaacatcttaacacaatatagcattattacttaacttggatttatatctttagcatcacatcttatcatagactaaaaactgctaaaattaccataaatttaatagttaacaaaactttgtttacactgctaaacattaaagtaatattgaaaatggaagaaaaagagttgtgttttgtcattggttaggaccaactcttggccactttggtgttgtctaatgaatg

SEQ ID NO: 482393 - DNA, 649 bp, Homo sapiens
gataaagaaacagatgtttgattttgatgtaaagaggcgagcatctgtttgtatattcacagcagtttcttcatagttgcatgtgcatttttctttgtcagttgaggctaccttttactgatttggaagaagtcttaatagtatagattcttattgatcatgtggcaccttttgctaracttttttttttttttttttttttttgagatggagtcttgctctgttgcctaggctggagtacagtggcatgatcttggatcactgcaacctccacctcctgtgttcaagtgattctcctgcctcagcctcccaagtagctgggactacaggtgcgtgtcaccatgcccggccagtttttgtatatttagtagagacggggtttcaccatgttggccaggctggtctcaaactcctgacctcaagtgaactgcctgcctcagccttccaaagtattgggattacaggtgtaagccaccgcacccggcctgctaaacatcttatgaaattaatttgttgatctttttctttatgattctggcattggttatgctgtattccattttatttgcttataattttgtgacccaggaattttggcaggtcccgctggacagttcttagcgtcttagtgctccttagtgtcttggat

SEQ ID NO: 482394 - DNA, 649 bp, Homo sapiens
gataaagaaacagatgtttgattttgatgtaaagaggcgagcatctgtttgtatattcacagcagtttcttcatagttgcatgtgcatttttctttgtcagttgaggctaccttttactgatttggaagaagtcttaatagtatagattcttattgatcatgtggcaccttttgctagacttttttttttttttttttttttttgagatggagtcttgctctgttgcctaggctggagtacagtggcatgatcttggatcactgcaacctccacctcctgtgttcaagtgattctcctgcctcagcctcccaagtagctgggactacaggtgcgtgtcaccatgcccggccagtttttgtatatttagtagagacggggtttcaccatgttggccaggctggtctcaaactcctgacctcaagtgaactgcctgcctcagccttccaaagtattgggattacaggtgtaagccaccgcacccggcctgctaaacatcttatgaaattaatttgttgatctttttctttatgattctggcattggtyatgctgtattccattttatttgcttataattttgtgacccaggaattttggcaggtcccgctggacagttcttagcgtcttagtgctccttagtgtcttggat

SEQ ID NO: 482395 - DNA, 664 bp, Homo sapiens
gtgcagcgggaccctcctgcctgccgatgtggctgccggcgcctgtgccagcgcgaacccccagcctgtcatgctgacctcatcgatggcagcgtccctgtcttttgctcccccagccctcccaaaggctgagtwagcctctatcatctggaatacagtgtggcttctgttttcctaattgaaccctgacttactacctttataatgtttctctctgcttatgtagtttttgatgagtcagaaggtccttgccacgctcacaatgtgtgtactgtgtctcatctatatgcactctctgatgggcaaggaggtatgaattacgactgaagcccttaccacatgccttacacttatagggcctctctcctgtgtggactctgagatgaacacgaagatctgaattccgactgaagtctttaccacactcatcacatttatatggtttctctctggtgtgatctctttgatgtaagtgaaaatatgaactgtaactaaagcactttccacacactttgcatttatatggtttttctcgagtgtgaactcagatgagtgtgaagaacagagctatacacaaaatcctttccacacacattgcatttgtatggtttctcccctgtgtggactctctggtgaatgtgaaggtgtgtactttggctgaagc

SEQ ID NO: 482396 - DNA, 278 bp, Homo sapiens
gcatgtacaaagcccagttaagataatctagcatgtcccacaccagaactgcccagctaagcccarttgaacttgccagctcacacatcatgagctaaataaatatgtatttagagctactcagttcttgtgtgtgttatgaggcagaagctgataagcatatttaggataaattatacatgagcgagtctgttacgcttttatcaaatcattggatttgacatgctcatatttatttaggatctctgcatcttcatttgtaaatgagattggctccc

SEQ ID NO: 482397 - DNA, 278 bp, Homo sapiens
gcatgtacaaagcccagttaagataatctagcatgtcccacaccagaactgcccagctaagcccagytgaacttgccagctcacacatcatgagctaaataaatatgtatttagagctactcagttcttgtgtgtgttatgaggcagaagctgataagcatatttaggataaattatacatgagcgagtctgttacgcttttatcaaatcattggatttgacatgctcatatttatttaggatctctgcatcttcatttgtaaatgagattggctccc

SEQ ID NO: 482398 - DNA, 278 bp, Homo sapiens
gcatgtacaaagcccagttaagataatctagcatgtcccacaccagaactgcccagctaagcccagttgaacttgccagctcacacatcatgagctaaataaatwtgtatttagagctactcagttcttgtgtgtgttatgaggcagaagctgataagcatatttaggataaattatacatgagcgagtctgttacgcttttatcaaatcattggatttgacatgctcatatttatttaggatctctgcatcttcatttgtaaatgagattggctccc

SEQ ID NO: 482399 - DNA, 481 bp, Homo sapiens
attgtgaacctacgctatgctgcgtgagaatatggtgggagcaggggagagagtaagtgggagagatggagtgcagagggtggggtgcctagggtaggatttgccctctagtcttggatcccaaaacacctagttggtacagaggcayctgagcttctgagacatgtatttagagcctgggtagggctgcttttgtctggcttgtgctggtgtctgttggaggcccccagccctatgcaggccttcttgtagtttcaggcctgagtatacccaagttggtggagggactggtttagagctacaaattcagggcctgggagggtgttagggtgggaatctggctggtgctgttcgagtaggagccagtggaccccagaagtgtggagggaacaggatgtgggtatagctgagctctgtgcataaatgcttggctatttgagcaggatgtgggtggccctctgtgctgagttgctggagggac

SEQ ID NO: 482400 - DNA, 481 bp, Homo sapiens
attgtgaacctacgctatgctgcgtgagaatatggtgggagcaggggagagagtaagtgggagagatggagtgcagagggtggggtgcctagggtaggatttgccctctagtcttggatcccaaaacacctagttggtacagaggcatctgagcttctgagacatgtatttagagcctgggtagggctgcttttgtctggcttgtgctggtgtctgttggaggcccccagccctatgcaggccttsttgtagtttcaggcctgagtatacccaagttggtggagggactggtttagagctacaaattcagggcctgggagggtgttagggtgggaatctggctggtgctgttcgagtaggagccagtggaccccagaagtgtggagggaacaggatgtgggtatagctgagctctgtgcataaatgcttggctatttgagcaggatgtgggtggccctctgtgctgagttgctggagggac

SEQ ID NO: 482401 - DNA, 540 bp, Homo sapiens
tcccatatatttgtggggtctctctgcccttctgaggggccctgtgccttactgagaatttagctgcaggaccctcctcacagactcttctgtgactgtccttacccatctgcaacactcttggctttgtggactatgagccccttcagagtaggggactaaacctaacaagtactcagtaaatgtcctgtaaactactgaatgaatagtatccaggggatgtgaaccacagccttggggcccagaagaaaggactaagtaaagttccctcccgaacctacaggtcccctgaccrtgggaagcagtcacgctctggacagtaaaggtggagacaggaacttgtcagagcttggagagtttccggaatgaaaaaggcctggatcttctgcgtctccagcttaggaaaaccagagaataaatacagttgctgctgctcgcagaaaacctagcagaagagaccatggagactttgacctcaaggcatgagaaaagaggtgacagctaatagagggggtgggtggggggagaatccaaactgag

SEQ ID NO: 482402 - DNA, 540 bp, Homo sapiens
tcccatatatttgtggggtctctctgcccttctgaggggccctgtgccttactgagaatttagctgcaggaccctcctcacagactcttctgtgactgtccttacccatctgcaacactcttggctttgtggactatgagccccttcagagtaggggactaaacctaacaagtactcagtaaatgtcctgtaaactactgaatgaatagtatccaggggatgtgaaccacagccttggggcccagaagaaaggactaagtaaagttccctcccgaacctacaggtcccctgaccgtgggaagcagtcrcgctctggacagtaaaggtggagacaggaacttgtcagagcttggagagtttccggaatgaaaaaggcctggatcttctgcgtctccagcttaggaaaaccagagaataaatacagttgctgctgctcgcagaaaacctagcagaagagaccatggagactttgacctcaaggcatgagaaaagaggtgacagctaatagagggggtgggtggggggagaatccaaactgag

SEQ ID NO: 482403 - DNA, 540 bp, Homo sapiens
tcccatatatttgtggggtctctctgcccttctgaggggccctgtgccttactgagaatttagctgcaggaccctcctcacagactcttctgtgactgtccttacccatctgcaacactcttggctttgtggactatgagccccttcagagtaggggactaaacctaacaagtactcagtaaatgtcctgtaaactactgaatgaatagtatccaggggatgtgaaccacagccttggggcccagaagaaaggactaagtaaagttccctcccgaacctacaggtcccctgaccgtgggaagcagtcacgctctggacagtaaaggtggagacaggaacttgtcagagcttggagagtttccggaatgaaaaaggcctggatcttctgcgtctccagcttaggaaaaccagagaataaatacagttgctgctgctcgcagaraacctagcagaagagaccatggagactttgacctcaaggcatgagaaaagaggtgacagctaatagagggggtgggtggggggagaatccaaactgag

SEQ ID NO: 482404 - DNA, 626 bp, Homo sapiens
ataatgaaataaattaggttcccccaactgtcctcgctaatatgcccaacattaacaaagaggtgtgaatccatcaatatctttgtcatgtgaaaatatatgttaccttctttttaaaaaggaaatggggctgggcatggtggctcacacctctaatcccagcactttgggaggccaaggcgggcagatcacctgaggccagaagttcaagaccaccctggccaacatggtgaaaccctgtctctaccaaaagtaaaaaaattagccgggcatggtggcgcacacctgtaatctcaggtactcgggaggctaaggcagaagaatygcttgaacctgggaggcggaggttgcagtgagctgagatcatgccactgcactccagcctgggcgacagagtgagactccatctcaaaaaaaaggaaatggaaacatgtatgctttccatgtagtgtgtattttactaccataagatattcagttctgattactaccagttttagcactacaaacagtacaaacacatgtgatttttgcatcctgttctttaatctttaaattctatgatgtaaatgtcggaatattgctggcccaaaggggtatacttagtgtggaaaaagctactgaaa

SEQ ID NO: 482405 - DNA, 626 bp, Homo sapiens
ataatgaaataaattaggttcccccaactgtcctcgctaatatgcccaacattaacaaagaggtgtgaatccatcaatatctttgtcatgtgaaaatatatgttaccttctttttaaaaaggaaatggggctgggcatggtggctcacacctctaatcccagcactttgggaggccaaggcgggcagatcacctgaggccagaagttcaagaccaccctggccaacatggtgaaaccctgtctctaccaaaagtaaaaaaattagccgggcatggtggcgcacacctgtaatctcaggtactcgggaggctaaggcagaagaattgcttgaacctgggaggcggaggttgcagtgagctgagatcatgccactgcactccagcctgggcgacagagtgagactccatctcaaaaaaaaggaaatggaaacatgtatgctttccatgtagtgtgtattttactaccataagatattcagttctgattactaccagttttagcactacaaacagtacaaacacatgtgatttttgcatcctgttctttaatctttaaattctatgatgtaaatgtckgaatattgctggcccaaaggggtatacttagtgtggaaaaagctactgaaa

SEQ ID NO: 482406 - DNA, 626 bp, Homo sapiens
aaatacagatgaagctttgcttgctcgtcygcccgccactcacctctggctgtgcagcccggttcctaacaggccacaggccagtaccagtccatggcccgggtgttggggaaccccgctttagataacaaaacaagcagccagggcctggcatagactcatgtagagcctcaccctcttcccactccatttttgaggccatcctaaccaaaagacagcagagagaaggaagaggccctgcatgaacagtcggtccctaaagaggatctcacctcaaggccaggcgaactgtggttttgggctcctgccatttgcctgggaagcctgagtgagtctttgccgttgttaacatccacaggcctctgtccgactggctttcatcccagcccacttaactttcctgcccaacaaatacctgtggtttccaccagccacatgctactccccttcctgaaatgctcctactccttcctgccttcagggaccaaccagacccagtgtgaaggcccagctcagtccctcctgcctccctgcacaacccttctccctggccctgtttgactcctgcctctgtgctatcccacagacctgacatttgcacagcattcatggttgccagggcatgt

SEQ ID NO: 482407 - DNA, 550 bp, Homo sapiens
tggtgcacagtagagctgggatccaaatgcacaactgcctgatctcaaagcactaatttttacactctgtcattagcacctgaatacttttgttttcaaatccccagctcaccgggggtttggaccccaaattttaaagaaacactgtcacccaactcaattcttctgaccatgaacaaacatcccaagcagtatgagaaattttagcagccatggtgcagagctctctgaagcctgatatagattaggaacagaaagaagattagatgtgtgtatattatggattgtgggcataaracttggataaggaaaagattgcattgtactgagaaataaccttatttgagggaaggaagagatgttccactgattggccagatcccaagatgctagcatgggagtgaaggtgggcttggaaggggaaaagaaggaatccacagccctctttctgccctgggtggtataagaaagttgaaggaattaggggaagacgagtgtgctcttggggatcacatcccttggagggagaagagagacttagagacagtga

SEQ ID NO: 482408 - DNA, 550 bp, Homo sapiens
tggtgcacagtagagctgggatccaaatgcacaactgcctgatctcaaagcactaatttttacactctgtcattagcacctgaatacttttgttttcaaatccccagctcaccgggggtttggaccccaaattttaaagaaacactgtcacccaactcaattcttctgaccatgaacaaacatcccaagcagtatgagaaattttagcagccatggtgcagagctctctgaagcctgatatagattaggaacagaaagaagattagatgtgtgtatattatggattgtgggcataagacttggataaggaaaagattgcattgtactgagaaataaccttatttgagggaaggaagagatgytccactgattggccagatcccaagatgctagcatgggagtgaaggtgggcttggaaggggaaaagaaggaatccacagccctctttctgccctgggtggtataagaaagttgaaggaattaggggaagacgagtgtgctcttggggatcacatcccttggagggagaagagagacttagagacagtga

SEQ ID NO: 482409 - DNA, 610 bp, Homo sapiens
taacaagcttattttccatggggccaaaaccctagacaaattctcttttcaataaccccgagtgttgctgaaatcaaaaggctatgaagargcagaagtcttgtgaaggtgttgttgggaaagagaattgttcagatatgggtaagccactgaaaagtgtcttgatggttcatctgaacatgggctgagaacctgaagcagatacagaaagcaagatgaccatgctggaacaatgaggacagggaggatgggcagagtggctagggagaaggaggtcttggatgaacatctgagatagaaaatgcccctctggcggctcatgtgtgctctcctgatcacatgctctgacatggcaggccccagcccattctccttacgaacgacacttgctgggaatccctactgggcacacacaacccagtctacaagatagagtggtccaaaccccccatcctgggctgtggtgcttggaagatgcaacacaccgactggctacgctgcagttactgcatctttctggctggctggcaagcaaacttcccactgcctttctccccaggcctgaccccattatgacaatggagccattgttctgaacaggggccatgag

SEQ ID NO: 482410 - DNA, 607 bp, Homo sapiens
caagcttattttccatggggccaaaaccctagacaaattctcttttcaataaccccgagtgttgctgaaatcaaaaggctatgaagaagcagaagtcttgtgaaggtgttgttgggaaagagaattgttcagatatgggtaagccactgaaargtgtcttgatggttcatctgaacatgggctgagaacctgaagcagatacagaaagcaagatgaccatgctggaacaatgaggacagggaggatgggcagagtggctagggagaaggaggtcttggatgaacatctgagatagaaaatgcccctctggcggctcatgtgtgctctcctgatcacatgctctgacatggcaggccccagcccattctccttacgaacgacacttgctgggaatccctactgggcacacacaacccagtctacaagatagagtggtccaaaccccccatcctgggctgtggtgcttggaagatgcaacacaccgactggctacgctgcagttactgcatctttctggctggctggcaagcaaacttcccactgcctttctccccaggcctgaccccattatgacaatggagccattgttctgaacaggggccatgag

SEQ ID NO: 482411 - DNA, 603 bp, Homo sapiens
tagacagtgcctagggagcccagcagctcccttgggaatgtgattccagggcacaggaaaggccaaaggtccttgtgaccctcaaagtctatcttcattatacctacaatatgaatcccagtctcttctgttcccccatcaccgatacctgtgtcattcctgtctctgtgctcttattcttgacgttccctctacttgggctgccttcccctcactgagtcctgtagtcagcctcagtcatgtgcatggaasaggagggcatgctggctgagttgtgtgcctacatggctagactgcgcaacacttcctagcattccctgccaccaggtctttctgagtagggcggacacgagagagtcatgtgggaggtgtggagggcagagtgaagcagcccctttgtagctcacatatcttgtcgcttagctgctggctgtttgtgtgaggctaccactccaccaccccttggaaatatctacagcttctctgcctcctggccagatgagtgagctttgttctgtgatgaaggaccctatcttctgcaggaaaccctcaccgtcaaggtcagagcaataaaactgacaggggtcttagtccaacctggtg

SEQ ID NO: 482412 - DNA, 650 bp, Homo sapiens
ttggaaaaactgaatcaaaaacaacaaactctgacaaagagggtcatcgtgaacaatgggaatatcaggaatatccctttaaagagaaccccctgacacatgcatggtatctgtgggcttaccagagttgcatttacacactcattttagggacatgtgcctaaaatgaagtacatctgttaatcagggtacagagaggctgtgtggtgagggggaaagaactggatagggggtcatggagcctggttctgccactttctcactgagagacctggagcaaatcactgtcccaatccaggcctctgactcccattggacagagggtaggactggattagatgatctttaaggccactttcgctttgacattttctgtaggaagaggaggaagaagayggaacttcatggaggccctactgtattgcagatgctcatttgacccaatgccttggtaaccccaagaagaagtcatgctcaaacaattaagcaatgcatccaaggtgagaaggtgtcagggccagtaagtgtcattaccacgccctcgtaggaggtggcagggaggattcaaacctgggcctggctgacccgtgtatgtggtaggtgtgtgtgtgtgtgtgtggtttccagctgtgatcctataggacaggtga

SEQ ID NO: 482413 - DNA, 478 bp, Homo sapiens
cactgagaaataagtgggtgtccagtcctaaggagatagcttccctctggcacagagggccccccagkgggcagcgttctttgttccctgcgtggacagcaccctggtagggcagggaggccacaggctcactggagcacggtcacagaaggacgtgatgcaaagaaaaagagccggatgtggtggaaggaagggaacatgcagagagttaggcagggcatggggaggcagcatggggcccactctcccatgtcccagcagagaggaggaacgtctaggagggggagcgggggcagagcctgccaacctggactgctgtcagagcaaacctgtgccagagcaaacctggtggacactggtttagaggcattgaacatcccatttcccgggcaactctgactttccgaaggtgtgagtgggacccagaaaacctcacggctgcagttggggggtgagagtctgggaggtaacagctggg

SEQ ID NO: 482414 - DNA, 455 bp, Homo sapiens
gctgttgaactatataactgcacttgtttagaaaagttcagtgattatatctcaatatctagaaattcttttatttccaaatgtaactatttatttcaaatagttccttgttgtgtgctcatctatatgactgtgttgataatttctttaaatgtttcatacactaatgttctagattccaagacatgttgtcccaggagggtatcaaagtttgccctttgttgtctcattgtgatttgctttctttgatgcttgagcgcttggaagtgtttgactgtgcatgcattgcttgctgttcatcagtgaacttctgtggagccaagttggaaaacttttccctagagargcatagttctgccagtaacaggaatgcacccaggatttggaaacactgtgatgctcaagggcctcagctcacagcacagtagaaatcccaggccaagcccctaccttgc

SEQ ID NO: 482415 - DNA, 455 bp, Homo sapiens
gctgttgaactatataactgcacttgtttagaaaagttcagtgattatatctcaatatctagaaattcttttatttccaaatgtaactatttatttcaaatagttccttgttgtgtgctcatctatatgactgtgttgataatttctttaaatgtttcatacactaatgttctagattccaagacatgttgtcccaggagggtatcaaagtttgccctttgttgtctcattgtgatttgctttctttgatgcttgagcgcttggaagtgtttgactgtgcatgcattgcttgctgttcatcagtgaacttctgtggagccaagttggaaaacttttccctagagaggyatagttctgccagtaacaggaatgcacccaggatttggaaacactgtgatgctcaagggcctcagctcacagcacagtagaaatcccaggccaagcccctaccttgc

SEQ ID NO: 482416 - DNA, 538 bp, Homo sapiens
  misc_feature (1)...(538): n = A,T,C or G
gacagcctggccaacatggtgaaacctgtctccactaaaaatacaaamaattagccagacatggtggtatgtgcctgtagtcccagctactcaggaggctgaggtaggagaatgtcttgaacccaggaggcagaggttgccgtgagccgagattgtgccactgcactccagcctgggcgacagagtgagactccatcttaaaaaaaggaaaaaaaaatttactcagaaaaacaccttataagtaagtaatcaataaaatgcaaagtggaataagaggtcccttgctgcctgtcaagctagcagtggttagaaagaacagtggtcctcacttacagggctgtagagaatgtacatcattaagaggtgcgatgctgtcaactggcaaaaagtataataaacaaagcatgggctctatgcaaataaattcaaaacccaggatgacaaagataacttgctaaattactacaattgattccccaaaagaccaaaacactaactgttcccataannnnnnnnnnnnnnnnnnnnnnnnnnnnnn

SEQ ID NO: 482417 - DNA, 639 bp, Homo sapiens
tacattatctattagttgacaacttagatctccctggctctgaggaaagtgacaactgtgggagtgaagtaagccattgagataagaggttatctaagatctaactgaagagtgggcctttttcagatgtactttatttgtaaaggtggtttacatgtaggtggtatcatatgcatttttaaaaaagaataccattttcttcttccttctcttcctcttttacacctttctgtcccttatcatcttgtctcccttccatagggttttgacctaatacttcctgtaggctattctatggctttccttggcatcaaaccttaatgaaaatttccttggtgactgtctacctatgaacttgagttactcacaatgcagcctatctttctttgatattcttctctgggggaactgaatgagaaggtctctattctctagttccttggcctctgtataattttgagatttgaaaatttgaactgatgtttacctgatcacattcaggaagctgcactaagagctctggttcttttaagaaagcttccrgagattattagataaatgagcagaatatgtccctgaacactgatgctcttataataatgtgactaaaaaagcaaaaagcagcagtcccctcagtgg

SEQ ID NO: 482418 - DNA, 555 bp, Homo sapiens
ttgctttcatgacctcattcaccatctgtatgctgagaaatcacaaatttatatctctagtcagatctctcttcagagcttccacactaatgtttccaactccataaacaataccagcatccacccaatacctctgactttttcactctaatacacaccarttgcaaattctggcagttctacattctgaatatctcccatttctgtccatttttctccattccaggtgtctctactttggtccagtattgaacttctgcaacagattgagcaactgaggcagccataacaataccctcctaactagtcactttgtacccatgttttctcacttttaattcattttctttccacatatattacattttgtcaactttaacatgcattttttgttttccactttaacttttctaaaattggaatatgtcttacaatttattttgcatcctggtttaattaacagtgtttgctttaaattaatcacacataaaataatggtacattttataatcaatggcatcttagatttgatgaaatacaataatagaaaaaaca

SEQ ID NO: 482419 - DNA, 466 bp, Homo sapiens
ctcttggggcccgagtttccttgtctgtggaaaaagggttggactagcttagggtcactcagagtgatctctggggagcactagtctttcaagaagcttcctgtagctcccatcccccttgtagatttcacaaggcaatgactaaggctctgataagtcctgcatcatagaaaccagcttagtttggtttgacccagtatttcccatattaacttgaccttgaaaactttttttggaataaactagcattccttagaatatactttggggaatggtggcctcaaagatctctcaggtaccttcctgctctgtcattcagagatttagtaagtctaacgtgtggaatttcaccccctcagtaacttttccaaaatgtctttcctttatttctggccgagatatgaggcccctctgcctcttccagctctcaggacaggtgytatgtctgggtctccatcacaagaat

SEQ ID NO: 482420 - DNA, 372 bp, Homo sapiens
cggcagctttggtatttcaaatgtccttcygaaatctgaatccaaaatggaacaatttttcgagtaaataataccattgatgtcagtgttgctgcaggaggttcagcaggccccagaaactcagaggtgaggacgtggtattctggctacacaaggtctctggctgcacgaggccacctgccttgcaggggaatgaacggtctgtgggtacttaaggcattggcctagctaagagacacattttctttttcctgattatacttgatagtgccccagggacattcaaaaatgccataccttgggaccctatgctgtcatgggcttcgggggcctgggtcaagagtgagaaggtgaggggtggtggagccaggg

SEQ ID NO: 482421 - DNA, 630 bp, Homo sapiens
agcgacagtttgacttcctctttatcattttgcatgccctttaatattgaattttaaaataatttaaattagaataaaaagagaaaggatcttaacagtgtctgttaataatttacaaactattcttagcaaagaatgtaatatataactctaagttacagccagtcataagtaaaagttaaagaatataatttgtccctgggttttataaatgcagcaggaaaactggctgcacacattctatagttagtccacataatgaagatgtattcttgagtttctcttcaagattttcaagtaaattagaacctagaggcctgtctatttgagaaaaaaaagacataaaaaaatcagtggataaagaaggtaggctctttagaatctcagctagcaggttgtcatagcaaaaaggtctgctaaaatgaactgaccagttatagaaatagatctcattcaatccacctcttcatcattctaacttaacagaattgtccataattgcacagttagtctttcagtctgagacctatttttgtgtttggagaatatctaacaaaaaatgcaaatgtatatcaaagtgaaattttaaactcccaaagtgygaggatcacaggcgtgagccacggtgcc

SEQ ID NO: 482422 - DNA, 611 bp, Homo sapiens
aagtgcctatacagccgttgtctacacctttcttacactgaagtacaacagatatgagaaaaattagcctctgattaaattcattaaaattactgaacgaataattttaaggggaagccagatttttctaaagtcagtatggtgaagaatatatttgtataagtaattgaggacaaaagagttttctgattgagcaggatttcccgaagacacaatgatgggtttaggttggagaatcatgggtttggggccaaactggaaactgtgcagagcaatatggggaaccatcgatttcactgggtcacagaaataaaccacggtatgaaatacaaatgcatttttgtccagagtgttacttagaggagcataggcaactatttctggcatcgtggtcctgcatatttggttcacagtgtcagatgaggggaggcacagcaggcttcacttggtagaatggyggcctcagtttgtcagcagcaaacagaggacttgaaatggtactaacaacatgaaaaatctgcttcttagccctttccccatttgataaaataacactcatagaatttaagtgagcaaagtcattcccttgtgattctgaatttagataagca

SEQ ID NO: 482423 - DNA, 575 bp, Homo sapiens
ccaatgactccaaagaagatgatttattccctatcaccgtacgccatttgtttctttacaagtttgctgaagttgatgctccttttgcttgtttaccagttgatctccccactagactataggcttcacaagagcaagttcattcactgccatgttgtcactgtgtagcacagaatttggcatggtacttggtaagaatgaattattcaagcgctgtcaaggagtaaagtgagatgtggatgtttctctacatggtttcagaatgaaaagaaaagccatgaatgggaaatatgaggcagcctattgcacgtcagtgaaaggaagctgtcrtgctctctaaagagctgtgtgccctgtgggtagtgagtttcctaggcctgagaatgttcaagcagggacaagtcaacagtttacaggaaatgaataattggactacacaacctggtaggtggctttcaccctatgactccatgagatgaaaaaggctctgctcttggcagtgatgaattgtctgagtcgggtggcaggaaaggagacagtggaactatgcacttgggatgcagtggctctcccag

SEQ ID NO: 482424 - DNA, 577 bp, Homo sapiens
tctaaggtggagctgcaaaatttgcatgtctaatactgctggtacagggatcacattttgaggacaactgtgccaaagaaaggagaaagacaagccaacttcaagaactgagaaaggaatatgtggaaacaaaagccttttgtgagaagctcagaaccaaaagaagtctagccctcaaggacactaggtctccccccagagagcaccagaaatggtgcgggcagccttcttcccacttggagcmcgcctcaccaggctcctggatcttggactgttgggctgacccaaggccacagctcaacagggacatccagacccaacctaaatcctgaaaagagatggggtttttgacacaagactatcagtgggctgcacaccatcctgctcaattatcatctcttcctcctctgtgttaaagcaattctgcagcacagtgattcttcacagggagattgatgggcatctttcatgctaattcattcctggagttgggaagcctttattttcctcatgacatgaagaaaacgatggcagacatttccagtagaaatgccactgcattctttataatgtcatt

SEQ ID NO: 482425 - DNA, 577 bp, Homo sapiens
tctaaggtggagctgcaaaatttgcatgtctaatactgctggtacagggatcacattttgaggacaactgtgccaaagaaaggagaaagacaagccaacttcaagaactgagaaaggaatatgtggaaacaaaagccttttgtgagaagctcagaaccaaaagaagtctagccctcaaggacactaggtctccccccagagagcaccagaaatggtgcgggcagccttcttcccacttggagcacgcctcaccaggctcctggatcttggactgttgggctgacccaaggccacagctcaacagggacatccagacccaacctaaatcctgaaaagagatggggtttttgamacaagactatcagtgggctgcacaccatcctgctcaattatcatctcttcctcctctgtgttaaagcaattctgcagcacagtgattcttcacagggagattgatgggcatctttcatgctaattcattcctggagttgggaagcctttattttcctcatgacatgaagaaaacgatggcagacatttccagtagaaatgccactgcattctttataatgtcatt

SEQ ID NO: 482426 - DNA, 506 bp, Homo sapiens
tttctaataaggtggcaatggccctctttcccaacagtggtggcagtctcagtaaatattccagagaagagtgttgcagcttargttattattgatgaaagatataactctaataaaaattcagtgagtataaaaaatgtcagagatggttttgtatcatgtgtaataaagaaaggcacataaaaataacatgttgcctataaagagactatattacattcaatagaggtactcaaaaacacaaagtcagggacttaaagagtctgctagtggcacagggatccacaaaaaacaaacctccaaaattcaacgtgtagaaaattcagatttatgctgggacttggagagactgctctgggaaacccactgtctttaaggtaactgtgagcctgttgcttccactatgcgattttcaaaatgaagatatttaggaagaaaaacacataacagaatttgaagggggaaaaaaccatttttgaggcaactaaaaagaaactgtatatatt

SEQ ID NO: 482427 - DNA, 639 bp, Homo sapiens
accatcctgtcctcgaaacccacagtctggcagaaacacctgtttctatgtctagctgtgaagcagaaggcagaagcaacagctacttctgtggctccctcagaaccattcattgatctctatcatgcagtaaattaatacttacaaaattttgagatgactggtgatcaaaaacagagttttgaagtcaactctgtgttcaaagcctagccctaccatttcctcgttctctgaccctgggcctctctgaacctcagtttccgcatccgcacagatagagatgagtgagaatagtcccagtcttacatgttcatcatgcatattcaaagagatgattcatataaagggcttagtaaagaagctggaatatagccagtggtcaaaatcagtagacatcaattaatgtataagctattaacaattctcccttaggctttgaggaacatttacagagattatggttttcacaaagcattgttcctttcccatctgagaatcttggccaaggaggcccagaaaacatttcttatgttatcaaagataagttgacttttcctttaaacagatgtcaaagatcatgatgagatctggagccyaaaaccttagtgtcaccgtgtattaattctctgcaaactattt

SEQ ID NO: 482428 - DNA, 580 bp, Homo sapiens
tagatagcctcaactccacagagcagttatgaagcttgaaagtaatgatgtatgaaatgctcagcacrtactagttttttaatattacttctcacattttaacattgaaatcaggattttttttaacagtcaatggcatgtctgagtccgttcatagaagtgggggaagccccactgcacagcctccctgaatgctccctcagctacatcctccccactgcctgccaacacgagctgcttgcccctgtgtgcagaggcttgggaagctgaatctttccaagagagcctcaagaggacacacggaatggcttcagtattcaggaacaggctgtattatgctacggagaaaggaagtaaatgaaagtagcctcaaaggcacatcataagagggagtaccagggatatttactagtccatgaagatcagagcaaacaaatgttccaagctggattacttgggctaaaactgtacaaatcacacttgcctgtcttagctcactgattcttccaccaattcagcaagttaggtagcaacactcctattctacagacccagagaagtctgggacataccctacaca

SEQ ID NO: 482429 - DNA, 580 bp, Homo sapiens
tagatagcctcaactccacagagcagttatgaagcttgaaagtaatgatgtatgaaatgctcagcacatactagttttttaatattacttctcacattttaacattgaaatcaggattttttttaacagtcaatggcatgtctgagtccgttcatagaagtgggggaagccccactgcacagcctccctgaatgctccctcagctacatcctccccactgcctgccaacacgagctgcttgcccctgtgtgcagaggcttgggaagctgaatctttccaagagagcctcaagaggacacacggaatggcttcagtattcaggaacaggctgtattatgctacggagaaaggaagtaaatgaaagtagcctcaaaggcacatcataagagggagtaccagggatatttactagtccatgaagatcagagcaaacaaatgttccaagctggattacttgggctaaaactgtacaaatcacacttgcctgtmttagctcactgattcttccaccaattcagcaagttaggtagcaacactcctattctacagacccagagaagtctgggacataccctacaca

SEQ ID NO: 482430 - DNA, 609 bp, Homo sapiens
caactgtctgagggccacgcactgcaaaccaatgaattatatcactaagccactgaaaacgtaaagtcctcacccctcctcatctttcacacctcctattcctcaaagtgaatcccaaccaacctcacccacacaataaactattttcttgttgtgttgcctgtttgttttcaggaaagcaatcatacttgtcttcccattgttgtcttgatgggactcactgcaagactaggagccaggagactgcagactagtcctgatcggccagtaactagctggggggtttttggcaagtgacttctctctagccttggttccccctgtgtgaagtgagaaagccacatcagattatttccaagagcttccttatagaacacaaggctgatgctccgatttgacagagcagcctccctgcctgagtggtcaccttcaatccatgaaactcatagatgggttcccctcagtaatgaatgaactaaagaaaactactgggtgagacctrtttatgtaggcaccagcaaaatggtgccacagatgggcttttagatggctgcatgagagagctcacagtaaaatgtttagatagacagcataaaaaaattatgaagc

SEQ ID NO: 482431 - DNA, 491 bp, Homo sapiens
acgtactgatgtcatgtggacaagacggatggtccagagaacctacaagagaattgtctttagaacaagagcaatgcacatgagtccccagatagtagtcctaaccccactattgaggaccmatgtactagtctatgccatgaacaactggctgtcctacttccccccagggggaatgctattatctggtcccgcttatttagggcctgggcacccacagagacagagtgaggctaagactaggaaagaaatggagatcaaaggctctaggacctcaatgcccgatgacacatccagatctaacctataagcactggggagcccctggagggcttatttggagggtgactccaccaaactggtattttctaaagcatactgcactctctctgtgtgggacaaattagatggagcccaactgaaaccaaggacaccagcgaagactaacaactacccttaccctcttgaaacccatggtctagccagaggag

SEQ ID NO: 482432 - DNA, 544 bp, Homo sapiens
ctgcctatagttcttccagagctccttggaccaagggcatttacaaaagggttgcattcatgcatgacaggaaaaggaaccattttcctacctagctctttctgatcatatactgcaaggctccacatcctgggggaaatgaagaacccctttataaatgcttcccacagaagagagcagcagcagaactgacatacgctcacaacagggagataaggagactctggctagagcctgctttttgtgttcccagatggtcctgcaccacacccacctgcagacatccaagctctcctcccatcgtcctctcagagctccttgtctctagatcatctcaattcagtttggcctcaagctctgagctctacccctyaggctttcctgcccaggggctttatcccagttaaccctccatttctccccagcccctccccagcctgacagtctctgaggacaagcagtgcccatctcatttccttttcttggctcattttaattaacaaggcaaccaggcacatcactgctcatcagtgaataaggacca

SEQ ID NO: 482433 - DNA, 585 bp, Homo sapiens
ccctctcatttgctgtatttgaattaaacattaaacagagctggaaacagggtccccacgggcgctagaaactttggagcattagctgacaaacaggcttactgctgtgtaaactcccagggcaaatgcaaagtgtaagctaatcttgccaccatcaccagttctctgagctgaggataatgtatgataatctaaatcgggctgggcagatgcctgcctgggaaatctgattaggatttgcttgatgattccctttcatcccccaggagactgcagggcatggtagacaggacctggccatgaagttgacatgctcccagtggtccaggccccaaggcactcctctgctgaacctccactggtagcaaaaagggacatgaagacaacaatctgcaaatagttttgcagcagtgggcctaaaggagcagatccccaggttgatcaatgcacagctaaagagatcarggcctctttcttatagagactgtgtaaagtgtgtaggctcaatcgtgccacttttttgccctgcatccttcaatggataccatcaattctggaataaagtttaaattgctcagtaggacc

SEQ ID NO: 482434 - DNA, 587 bp, Homo sapiens
agttagtatgataatgagacttcaactgcacaccaaataattgtatttattaaaatgtatgattgtgcattagtgagttcagtactattcaggaggtcttgaagccataacttacagcctcaacttcaccttcttctatacattttacttttagaaactgtaatttaaatgcagatagctatataaatttcaactcctgacctgaaatattttcaccaatgtatgctatgattaattggcacttcagagctctgtttgttccctggggatcctctgttttgtagccggtgagacagaatgatagcctcttctctaccaatacacactctctgcagcattcaaaaagtaacatctcacagcaatggtgggcatttaatcttgattctctatcacagcttgtttttaagttatatccaacagccagygaagctctcgctttgtgaaggccactctctctgagtttcgagtttctcagtcactttcctttttatttttaaaggtgaaactcagaatccctatgtccatcactgctgagtgttgacaagccacaaacactgacagtgacactgacagtagttaaaatgcag

SEQ ID NO: 482435 - DNA, 590 bp, Homo sapiens
gtagaatataggagaatgacaagtcaggaagtgggaggaattttatgttgtagacttgaacttaaccatagtcattgccaaaaagcttcctcttggctaatcaaagtcagctttatctctaaggcattcattccttttccactccatctggagaccatcattctgggtccttttagcctgtgcatcaattatgaatggcctcaaatgtagatttgcagtgttattgccacatgtgattatgcagtcagagaaactgacatatcgaaagacaaaggtctttcgaaagacaaagtcagtctgaatttttatctttattgaggtataattgacaaatatatatattcaaggtgaacatgttttgatatacattacgaaataaatcaagctaatatatccatcaccttacataattaycttgtggtgtgtgtgtgtggtgagggggagaatacttatgatctttcttagcaaatactcttagcaaatttcaagtattctttattaggtatagtcaccatattgtatattcgatctccagaacttattcattttataattgcaagtttgtatcctttgactaacatatccccatc

SEQ ID NO: 482436 - DNA, 570 bp, Homo sapiens
ctgtgtgcttgcatgtgtggatgatgactgtttccaaatgtcttgatatggtttggctgtgtccccacctaaatctcatcttgaattgtagttcccataatccccacattttgtgagagggacctgrtgggaggtaattgaatcataagagctgttacccccatgctgttctcatgacaatgagtgagttctcatgagatctgatgttttcacaagggtcttttccccctttgctcagcacttctcctcccgcccctatgtgaagaaggacatgttttatatgtttttggacatagtggtagtagaactgcagagactaaagcaaggcttttaatgatttctcaacagttccattcctatgcaaccaagacgttctagggtcctgatatttgagatccatgccttccctgagcactcaaactagaaaagtgataaaattaggacagaacatttcttaattgatcattgccttaagatcacagatgtggcaaagccatgacaactcatttctcaaacaggattgggaagtggatgctcacacacaagccttgtatgatcccccataaattc

SEQ ID NO: 482437 - DNA, 570 bp, Homo sapiens
ctgtgtgcttgcatgtgtggatgatgactgtttccaaatgtcttgatatggtttggctgtgtccccacctaaatctcatcttgaattgtagttcccataatccccacattttgtgagagggacctggtgggaggtaattgaatcatragagctgttacccccatgctgttctcatgacaatgagtgagttctcatgagatctgatgttttcacaagggtcttttccccctttgctcagcacttctcctcccgcccctatgtgaagaaggacatgttttatatgtttttggacatagtggtagtagaactgcagagactaaagcaaggcttttaatgatttctcaacagttccattcctatgcaaccaagacgttctagggtcctgatatttgagatccatgccttccctgagcactcaaactagaaaagtgataaaattaggacagaacatttcttaattgatcattgccttaagatcacagatgtggcaaagccatgacaactcatttctcaaacaggattgggaagtggatgctcacacacaagccttgtatgatcccccataaattc

SEQ ID NO: 482438 - DNA, 614 bp, Homo sapiens
gaactcaccaagagaggaaaaaggtgggtgattttaaagcctccttaaagtctaagcccaaggaaggagcagcattctcaaacatctaattttgttgagagataaatgtgtccttggcagttcctcaaggagttcaagctyctcctataagctggtctgtgtgactatggaaaaattgattcattggctctattttctagggaagatgcttagcccacggtagctgaaactgctttttaataaagggcgttcattattcctcctggaattttcttacaaaactggaaatttgtaggtagcttaatgtggtatgaagttatactaaagtgggaatcaatggacatttttagccctgaattgccttctttaaagggaatttcctgagcctttcctttagacactaggacatggaaacagtgtgggcttggattcagtcttgtctcctctggccttggctacctccttttccttccatttgcccttacaggtatttccatccatttgccctgaaaggtacctcctgtcactaacgtgtcagagatcagtggttcttcactagttataactatctgtctcttagcacactactacggacagatctccagggagcagat

SEQ ID NO: 482439 - DNA, 614 bp, Homo sapiens
gaactcaccaagagaggaaaaaggtgggtgattttaaagcctccttaaagtctaagcccaaggaaggagcagcattctcaaacatctaattttgttgagagataaatgtgtccttggcagttcctcaaggagttcaagctcctcctataagctggtctgtgtgactatggaaaaattgattcattggctctattttctagggaagatgcttagcccacggtagctgaaactgctttttaataaagggcgttcattattcctcctggaattttcttacaaaactggaaatttgtaggtagcttaatgtggtatgaagttatactaaagtgrgaatcaatggacatttttagccctgaattgccttctttaaagggaatttcctgagcctttcctttagacactaggacatggaaacagtgtgggcttggattcagtcttgtctcctctggccttggctacctccttttccttccatttgcccttacaggtatttccatccatttgccctgaaaggtacctcctgtcactaacgtgtcagagatcagtggttcttcactagttataactatctgtctcttagcacactactacggacagatctccagggagcagat

SEQ ID NO: 482440 - DNA, 614 bp, Homo sapiens
gaactcaccaagagaggaaaaaggtgggtgattttaaagcctccttaaagtctaagcccaaggaaggagcagcattctcaaacatctaattttgttgagagataaatgtgtccttggcagttcctcaaggagttcaagctcctcctataagctggtctgtgtgactatggaaaaattgattcattggctctattttctagggaagatgcttagcccacggtagctgaaactgctttttaataaagggcgttcattattcctcctggaattttcttacaaaactggaaatttgtaggtagcttaatgtggtatgaagttatactaaagtgggaatcaatggacatttttagccctgaattgccttctttaaagggaatttcctgagcctttcctttagacactaggacatggaaacagtgtgggcttggattcagtcttgtctcctctggccttggctacctccttttccttccatttgcccttacaggtatttccatccatttgccctgaaaggtacctcctgtcactaacgtgtcagagatcagtggttcttcactagttataactatctgtctcttagcacactactayggacagatctccagggagcagat

SEQ ID NO: 482441 - DNA, 666 bp, Homo sapiens
tgaaactaacacaacattaagttgttagaagttcataggcttcaaaagtaaaagtggcaaaatctttttccaacagtctatgtaatctttcaaaatcatactaactgaaaggacaggaaatgggcacacttcctatggcaccaaatcaatttttatcttggcagaaaaactgattattacagctactgtgagccattgttattataattgagtggatcatttgtccagtatgtttttcctagtaaaagaaaaacatttgtggtttctgtggtgaataagaattctaacaccaggaaaaaaatgcaggccctctttttgttgttgttttgcatatatttgtttgtttgtttcagcaccaaatgtggctccttcagatgtaggaggtggaggtggaagaaacagagagctgaccataacatgggcggtaagtattgatgagttgcacatattataggttrctgtatctatatttaacttccaccccattttgtttcctgaaataaattgagatgaaagtgactgcctactgcacaagcaagaatatattactatttttttttcttaaatgcaaatcagattttatctggcttactgtggcttagtgtgtagctcctatgcaagaatgaatcctggatgctaagagatctgttagcctagatgattaaa

SEQ ID NO: 482442 - DNA, 626 bp, Homo sapiens
ttgcagaacagctgtctttatccatttatccactaattattttctataacttatttacttaaagttatacaaactgctggtaatttgttaaattccatagaggtttatcaaagtaattcttagtcaatctcctctggtagtgtttgaggctcaatttaaaattatttttgaaatatacacaccaacattccacaatatatctataactcttataaaatggttttccattttctatctttttgttttgtgtgtgtgtgtgtgtgtgtgtgtttgtgtgtgttcatttgtttttactgtgakcttcttccatttccctaattctgcaaactatttctgaagtatttaaaacaatactttttaacttgccacaaaataactttggtatagctaacgggggaatgtcaatataaatttgataggtagaagatcaaaggcagagtagattttttaaaaaaggacagacatgtgtgatatacacatagtaaaatcccgtggtttggaatcctgtgatctgagtttagttagattcgcggtcttttgtttttccctcttggaactcttatatccactacatgagtctattcttctctgtgttaatacttttataagaatactgatggccattt

SEQ ID NO: 482443 - DNA, 605 bp, Homo sapiens
aaagaagaaacatcaagtacgaaaagcataaggcgggaacatacctggtatagttgggaaggccggtgtgcctggagtgaaatagtaggagatgggatgaaatgagtaacagggcaaaattgcattgggctttctaggccaacgttagggctttgaagtgttttgctcaaagggttaaaatcactgtattgtctttgtaagagcatcattctgtctgctgtgttgagatgtgactgaggggccagggccagagcagagcaggaaggccaggtggcagactgtgcaaggatctgagggcgagggatggtgacctggaccaagttatggcagtgaaggtgctggaaggtgggcaggttctggagacatttaggaggtagagccagcagaatatggtctggaattggagtgagggagatggagaggactcaagaatgttgaatgacttcaagttttatggactgagcaagtggaagcctgaagctgcttatgacccaaatggccaagacattaggaagagcaagttttaatctactggagagctgaaagctggtcatattgtgcttgarttatcattaagaatccaaatattacagaatagagtgtaa

SEQ ID NO: 482444 - DNA, 601 bp, Homo sapiens
ggcctggagttccggtccaaccacagacccatcaccctcagaactgaaaatggtcttcaaggtcaccaaaggctatcaataccccaaccggagagggcaaaagccttatccaggttaagcagcacaaaagtgagagagcagagactcgagccagctctaactcccaagccaggattcacaccaactctcgaagtggagtctctgagaactcttcactctctgcccccatcgtgtgtgcrtgcacacacacccctttctcattggctcactgccccccgccaagttccccattccaggagatgtctgggcgggattatacacaagcccagcactgcagaactgaggatatgcatgggctgagaagctgcaggaagttgctgaccaacgcaccaaactgctcagccaacaccacagatcacgcacctgctgtgtgcacagctctcgggggctgggggtgaagagggagatgatgacacagcctcagaccttataagaacttatcatttgaccctggagggaaaactaatgctggaaaatacagaacctggctagaaagcctggggtgctgggcttgcctgccacgcccacatcacaggaggca

SEQ ID NO: 482445 - DNA, 284 bp, Homo sapiens
atgccccccggagacccctcccaccagcagaccctaccttgttctgcagctcctcrattgtcctgtagtactggctgtagtcacgggcgggccccggggcctgcctctggtaccagtcacggatcttcacctccagctcagtgttggcctcctccagggcgcgcatcttgtccaggtaggaggccaggcggtcattgaggttctgcatggtggccttctcacctccggccagcagcccatcaacgcccccaaagctgctgccatagccaccgccagagccaaag

SEQ ID NO: 482446 - DNA, 576 bp, Homo sapiens
tgggcagcagcagggccaggactgtacccagagctgatgccacagcctgtgctccgaccacagcactccctgctttgcagatgattgtcattgaggcttgctcccttaacgaaattaccagcgatcatctctgactgttcatatctccttttgctgctttatttctattcttatccctaacatactatgcrtaactttaatttttaatgattctatatatgctctttcttctctattagaatctaaattctgagagggcggggatttttgttacttttgtatacccacgtattcccaatgcctagagagtgcctggtacatagcagttgtatactttttgaataaatgaataaacactcattaattctaaggcttgggtgtcccaggacatgaggatttatttttatatcccctctggggctgcagactgtaaacttggctcattcttctcctaggtttccctgtctccttccagtctcgagctcagctctgccgtttcctcgccatgtgaatcttcacatgcaccccccaccatgcagccatcaaccagggccagccgtggataaacaaaagcct

SEQ ID NO: 482447 - DNA, 576 bp, Homo sapiens
tgggcagcagcagggccaggactgtacccagagctgatgccacagcctgtgctccgaccacagcactccctgctttgcagatgattgtcattgaggcttgctcccttaacgaaattaccagcgatcatctctgactgttcatatctccttttgctgctttatttctattcttatccctaacatactatgcgtaactttaatttttaatgattctatatatgctctttcttctctattagaatctaaattctgagagggcggggatttttgttacttttgtatacccacgtattcccaatgcctagagagtgcctggtacatagcagttgtatactttttgaataaatgaataaacactcattaattctaaggcttgggtgtcccaggacatgaggatttatttttatatcccctctggggctgcagaytgtaaacttggctcattcttctcctaggtttccctgtctccttccagtctcgagctcagctctgccgtttcctcgccatgtgaatcttcacatgcaccccccaccatgcagccatcaaccagggccagccgtggataaacaaaagcct

SEQ ID NO: 482448 - DNA, 264 bp, Homo sapiens
ggtctttccattggaacataaatgggaattcctttttcaacaggttttctgtgtgtgtgtttgtttctatagaattcttgtgtatataatgtaaaaaatactgttagtcttygtaatgggattttagcccagatgcatatgctaaacaaactcgcataagagctaaagaaattaataaacagaaaaggagtaaatttagcattgaatgttaaatatattaagagattgtctcttttaatgtagtatgataccacagcataggta

SEQ ID NO: 482449 - DNA, 264 bp, Homo sapiens
ggtctttccattggaacataaatgggaattcctttttcaacaggttttctgtgtgtgtgtttgtttctatagaattcttgtgtatataatgtaaaaaatactgttagtcttcgtaatgggattttagcccagatgcatatgctaaacaaactcrcataagagctaaagaaattaataaacagaaaaggagtaaatttagcattgaatgttaaatatattaagagattgtctcttttaatgtagtatgataccacagcataggta

SEQ ID NO: 482450 - DNA, 609 bp, Homo sapiens
ctttgtacatgaatatactcttaatatgttatgcctcttcttaagtacagtagtgactctgctatgccctgttactatggtaaagaaggaattaggcttcttccatgaacatgatgaagtgtagaaaactttagaattctaatattactcctaaagggaaaaatctatgggaaaagaaattataaattttagtagaaaccaaagaggtcattctaaagtattaaaataagctaagccagatgttttctaaagatagaaatttttgattatagtaattctttctagttgtatgaatcttagtaatatttctatcatttaatagtaagtcttcagtccagggaccaaatcggcacaggaggacaagttgtggactgcagtcatttatttgataatgatttaccagacaagtaagctaacatcactgaaatcattagagaaatatatagataatatctatatagaaatatatatakataatatatagataatatatataatatatatctatatatataatatatagatattatatagataatatatatatctatatataaggctcccgctgtcttcatcctcagtgtgcctgtgttcttgctaccatcgcag

SEQ ID NO: 482451 - DNA, 522 bp, Homo sapiens
tgacacattaacttataagcagtaagcaagcaccatccatgccgggaaattctctcagcatcccatttaccaactgggattccctgcacctcctcacacacagccaatgattcaaaatgcactaacttagattgcctattttcacaaacgycagctcccttggaccactgaatggccaaggggaagaactaagggagttcccatctgaagatatggaaagtccccgagctcccagtctggtccctgcaccaaaaaatggcatgcttttgctttcggatcctgttcgtgaagccaaaaatgttctgcgcaggaaatgctcaaggagagaaggaaacacacacacacacacacacacacacacacacacacacacacaatacctttaagggtaaacaaactgtatcccacgtaaatggcaatgcagatataataagcaaatgatataataagcaagttgcaatgggacggagagaagggaaaagagatatatatatttacactcatcagactatggaggattca

SEQ ID NO: 482452 - DNA, 630 bp, Homo sapiens
ctccgacattgttggaattacaggcatgatccaccgtgcctggccaaacaaaggcatttctatgctaggtcgttcttgttcctttatctgagtgagctggaggtttctacaagtttttatccaaatgggccagaggtttttctatctgtgcagccacgggcatgtccccaagcacaacaacatatgctagttcccttgttagtgtctgcagcttgattttttccaggcttctttatatgttatgcagggatgaggcactgaccagggactttccagggactcttctcttgctatctacctaaggcaagctaactaacttctttcataagtaatgagtattcacttttacttttgtaagacacaaattatctaaaacctactgcaaamcaatagaactatactaaccacttctaaaccatatacttaaaatgtcagaaatgacaatggcatgtttttaactacaattagaaatttaagactaactaaaaggcacagttagaaaatctttcaaacatcaccttcaaataacaaagggttcttctcacacaattatatggatttaaactatatgttgattgtaaatttaagattatttccctgatgactcaccaagatagaataaaataatca

SEQ ID NO: 482453 - DNA, 630 bp, Homo sapiens
ctccgacattgttggaattacaggcatgatccaccgtgcctggccaaacaaaggcatttctatgctaggtcgttcttgttcctttatctgagtgagctggaggtttctacaagtttttatccaaatgggccagaggtttttctatctgtgcagccacgggcatgtccccaagcacaacaacatatgctagttcccttgttagtgtctgcagcttgattttttccaggcttctttatatgttatgcagggatgaggcactgaccagggactttccagggactcttctcttgctatctacctaaggcaagctaactaacttctttcataagtaatgagtattcacttttacttttgtaagacacaaattatctaaaacctactgcaaaacaatagaactatactaaccacttctaaaccatatacttaaaatgtcagaaatgrcaatggcatgtttttaactacaattagaaatttaagactaactaaaaggcacagttagaaaatctttcaaacatcaccttcaaataacaaagggttcttctcacacaattatatggatttaaactatatgttgattgtaaatttaagattatttccctgatgactcaccaagatagaataaaataatca

SEQ ID NO: 482454 - DNA, 630 bp, Homo sapiens
ctccgacattgttggaattacaggcatgatccaccgtgcctggccaaacaaaggcatttctatgctaggtcgttcttgttcctttatctgagtgagctggaggtttctacaagtttttatccaaatgggccagaggtttttctatctgtgcagccacgggcatgtccccaagcacaacaacatatgctagttcccttgttagtgtctgcagcttgattttttccaggcttctttatatgttatgcagggatgaggcactgaccagggactttccagggactcttctcttgctatctacctaaggcaagctaactaacttctttcataagtaatgagtattcacttttacttttgtaagacacaaattatctaaaacctactgcaaaacaatagaactatactaaccacttctaaaccatatacttaaaatgtcagaaatgacaatggcatgtttttaactacaattagaaattyaagactaactaaaaggcacagttagaaaatctttcaaacatcaccttcaaataacaaagggttcttctcacacaattatatggatttaaactatatgttgattgtaaatttaagattatttccctgatgactcaccaagatagaataaaataatca

SEQ ID NO: 482455 - DNA, 630 bp, Homo sapiens
ctccgacattgttggaattacaggcatgatccaccgtgcctggccaaacaaaggcatttctatgctaggtcgttcttgttcctttatctgagtgagctggaggtttctacaagtttttatccaaatgggccagaggtttttctatctgtgcagccacgggcatgtccccaagcacaacaacatatgctagttcccttgttagtgtctgcagcttgattttttccaggcttctttatatgttatgcagggatgaggcactgaccagggactttccagggactcttctcttgctatctacctaaggcaagctaactaacttctttcataagtaatgagtattcacttttacttttgtaagacacaaattatctaaaacctactgcaaaacaatagaactatactaaccacttctaaaccatatacttaaaatgtcagaaatgacaatggcatgtttttaactacaattagaaatttaagactaactaaaaggcacagttagaaaatctttcaaacatcaccttcaaataacaaagggttctyctcacacaattatatggatttaaactatatgttgattgtaaatttaagattatttccctgatgactcaccaagatagaataaaataatca

SEQ ID NO: 482456 - DNA, 460 bp, Homo sapiens
agcagaagcagatcaatgagaacacatggacacatcaggaagaacaacacacactggacacctgtttcatggcatgggggaggggaaggagagcatcaggaagaatagctgcggatgctgggcttggtacctgggtgatgagatgatctgtgcagtaaaccacagtggtacgcatttatgtatgtaagagacctgcatastctgcacatggacccctaaacttaaaatagaagttgaaaaataaactttatcacatatggacccctgaacttaaaataaaacttgaaaaaaaaatgtgtttctagtggattctctatgttagacccaaactgaggatcttgaagctctcgctgggggaatcggggatgggggcacactggggagctgctgccaaggccaaccaccctccctacaagccacctcccttcccgaccagtatggaaaggagaaggggtatgtg

SEQ ID NO: 482457 - DNA, 460 bp, Homo sapiens
agcagaagcagatcaatgagaacacatggacacatcaggaagaacaacacacactggacacctgtttcatggcatgggggaggggaaggagagcatcaggaagaatagctgcggatgctgggcttggtacctgggtgatgagatgatctgtgcagtaaaccacagtggtacgcatttatgtatgtaagagacctgcatagtctgcacatggacccctaaacttaaaataraagttgaaaaataaactttatcacatatggacccctgaacttaaaataaaacttgaaaaaaaaatgtgtttctagtggattctctatgttagacccaaactgaggatcttgaagctctcgctgggggaatcggggatgggggcacactggggagctgctgccaaggccaaccaccctccctacaagccacctcccttcccgaccagtatggaaaggagaaggggtatgtg

SEQ ID NO: 482458 - DNA, 460 bp, Homo sapiens
agcagaagcagatcaatgagaacacatggacacatcaggaagaacaacacacactggacacctgtttcatggcatgggggaggggaaggagagcatcaggaagaatagctgcggatgctgggcttggtacctgggtgatgagatgatctgtgcagtaaaccacagtggtacgcatttatgtatgtaagagacctgcatagtctgcacatggacccctaaacttaaaatagaagttgaaaaataaactttatcacatatggacccctgaacttaaaataaaacttgaaaaaaaaatgtgtttctrgtggattctctatgttagacccaaactgaggatcttgaagctctcgctgggggaatcggggatgggggcacactggggagctgctgccaaggccaaccaccctccctacaagccacctcccttcccgaccagtatggaaaggagaaggggtatgtg

SEQ ID NO: 482459 - DNA, 460 bp, Homo sapiens
agcagaagcagatcaatgagaacacatggacacatcaggaagaacaacacacactggacacctgtttcatggcatgggggaggggaaggagagcatcaggaagaatagctgcggatgctgggcttggtacctgggtgatgagatgatctgtgcagtaaaccacagtggtacgcatttatgtatgtaagagacctgcatagtctgcacatggacccctaaacttaaaatagaagttgaaaaataaactttatcacatatggacccctgaacttaaaataaaacttgaaaaaaaaatgtgtttctagtggattctctatgttagacccaaactgaggatcttgaagctctcgctgggggaatcggggatgggggcacactggggagcygctgccaaggccaaccaccctccctacaagccacctcccttcccgaccagtatggaaaggagaaggggtatgtg

SEQ ID NO: 482460 - DNA, 389 bp, Homo sapiens
gttcctgggtcccccacggacgaaagttccttcccatcagcccctgtgctggaccgcggggamcctggcgtccctgcttagaacccacgcagcgtctcgggccggctaggggtacaccaaagcggacaaaagccactgaggggaaggtaagctttgagggaagggaggtgaggcacccgtggcaggaaataaaaaaaaaaagcgccccggagaaccggggcctgggtcccccacggacaaaagtgccttcccatcagtccctgggttgggctccggttaccatggatcgccggttccaactcagggccctctcgggcccgctaggggtaccacaaagcgggcagaaggcccctgaggggaagttaaggtgtgagggaggggtggtgagg

SEQ ID NO: 482461 - DNA, 389 bp, Homo sapiens
gttcctgggtcccccacggacgaaagttccttcccatcagcccctgtgctggaccgcggggaccctggcgtccctgcttagaacmcacgcagcgtctcgggccggctaggggtacaccaaagcggacaaaagccactgaggggaaggtaagctttgagggaagggaggtgaggcacccgtggcaggaaataaaaaaaaaaagcgccccggagaaccggggcctgggtcccccacggacaaaagtgccttcccatcagtccctgggttgggctccggttaccatggatcgccggttccaactcagggccctctcgggcccgctaggggtaccacaaagcgggcagaaggcccctgaggggaagttaaggtgtgagggaggggtggtgagg

SEQ ID NO: 482462 - DNA, 312 bp, Homo sapiens
tccctgcttagaacccacgcagcgtctcgggccggctaggggtacaccaaagcggacaaaagccactgaggggaaggtaagctttgagggargggaggtgaggcacccgtggcaggaaataaaaaaaaaaagcgccccggagaaccggggcctgggtcccccacggacaaaagtgccttcccatcagtccctgggttgggctccggttaccatggatcgccggttccaactcagggccctctcgggcccgctaggggtaccacaaagcgggcagaaggcccctgaggggaagttaaggtgtgagggaggggt

SEQ ID NO: 482463 - DNA, 416 bp, Homo sapiens
ccattcccaacaagggacaaatggagaaataaatggtgagagggaggagcttgattctgcccatgctaattggacacctattgtgtgctaggaagacacacagaggtcaatccaaattccagctccagccacagcaggacagccatggtgtagaaggcctagcccagaggagggagccttagcaagcggagcacccctccatggagtattgacactctgttacttcagttatactgaaaactagtagaaggtatgagatgttgcactcaaccattatgascaagaaaatccattcaatcttctttaatttggttaaaactaacctttactaaaaggcagcaaagaataatgcttgtctgtgagaatttaaaaacatcatagcaaaccactccgttctcagtttaagaggaaaggca

SEQ ID NO: 482464 - DNA, 651 bp, Homo sapiens
tcatcctccagtaacgcgcactatccttgatcttggtgcatactgggattgtagttctgcggccctgtaatgaaaggtctggtgactttatgaaactacatctcccagcaagccaaaggaggcacacaaagctttgcctcttcatccaggcacacgcactatccctgwtcccggtgcatgatggaaatgtagtccttcagccctgtgaccaaagggctgggagtgtttatgagaccgcatctctcagcaactaaagcaaggcctgcacagccccgccttttcctccagtgacgctcactgttcactaaggagtgttcatgagattacattttccagcaagcccagcgagttatgcacagctctacctcttcttctagcgacgcgcactgtccctgattccgttgtatgctgggattgtggtgctgcagccctgtgacaaaggggctgggagtctttataagactacatctcccagcaagcccaagaggctctcacagccatgcaccaccccctcccgccccacttttccttcagtgacgcgcactgttccctgaacatggtgcatactggaattctcctgttgcgggattcaggaggacgagacagacctcaggttgaaacaggagaatctttattgagtgcactcaggac

SEQ ID NO: 482465 - DNA, 504 bp, Homo sapiens
gtcaaatgcacataacatggtgagttcccacgagtctcagttgcaatggcgcggcccctccatccagcaattacagcaagttagagatggaaaggaccaaagaggggcctgtgtagaaccttttgtyagaaaagaaaattttatttatgtgattaaaaaaattataaattcttttgctgacattatttggttatggataaagccttttgagtgagtgggctggcattagggtccatttggaagatggatatgggagagtccagaagttaagtgacgtgcccaaggcctcgcaacccaagtctagccttaaaccctcaaggacatgtgtaaggcctatatttgcattttaaaattatgttgaattcaaggccctttgtttacacatccaggtttagaaaccattgctcttactggaactctgaggtgaggcttcaaaacccacagaggagcggaggaaactgtggtttcctgatgaaagaggctgaatttgctcaccttagggtg

SEQ ID NO: 482466 - DNA, 504 bp, Homo sapiens
gtcaaatgcacataacatggtgagttcccacgagtctcagttgcaatggcgcggcccctccatccagcaattacagcaagttagagatggaaaggaccaaagaggggcctgtgtagaaccttttgtcagaaaagaaaattttatttatgtgattaaaaaaattataaattcttttgctgacattatttggttmtggataaagccttttgagtgagtgggctggcattagggtccatttggaagatggatatgggagagtccagaagttaagtgacgtgcccaaggcctcgcaacccaagtctagccttaaaccctcaaggacatgtgtaaggcctatatttgcattttaaaattatgttgaattcaaggccctttgtttacacatccaggtttagaaaccattgctcttactggaactctgaggtgaggcttcaaaacccacagaggagcggaggaaactgtggtttcctgatgaaagaggctgaatttgctcaccttagggtg

SEQ ID NO: 482467 - DNA, 497 bp, Homo sapiens
tggcatcttcttccatgttggctagctctagacaaatataaaaggcaaaattatcacagaaagctatcttttcataggtacaaagcaaaatgattcagtttatttggaaaggtggctggaatacagtggtaaactctggagctgaacggactgagttcaaatctggggtccataatgtctgactttgggcaaatcatccaatctcattccactgcagtatcccatttgtaaatgagaaaaggctaccttgtgaggttgatatgaagattaaattaattaattcacataaagcacttagaacaaagcctggaccacagtacatgctccaaataaatgttattattttcccaattagcaggatcatggaaaaaagattacaagaaaaggagcacagtataggggacatrtaactctcttacacagagaagtatattttagacctagagtgaatcttataggtcatataattcgaccattcttctttcatctcattcagt

SEQ ID NO: 482468 - DNA, 551 bp, Homo sapiens
cagctgttctactaccaatggcagtagaaagattaggttggtagttagtaaatctgttttggaaatcctagcgattttttcatgcccttttttttttttttttcaatttttttgagacagggtctcctattggctcactgcagtcttcacggggctgcagcaatcctcccacctcagcacccctgaatagctgagacaacaggtgtgtgccaccacgcctacctaatttttaattttttttgtagagatgaggtctcccagcactttgggaggccaaggtgggaagagctcttgagcccaggagttcaagaccagcctgggcaatgtagggagaccctgtctctacaaaaaaataaaaaataataaaaattacccagacatggtgtcatgcacccgtttctcagttactctgggagccgaggtrggaggatcacttgagcatggatagtcaggctctgttgcaccactgcactccagccttggagtgactgtatttgcaccactgcactccagacttggagtgagctataattgcaccactgcactcccgc

SEQ ID NO: 482469 - DNA, 651 bp, Homo sapiens
ctgcaggctgagggcctcagctcttggctaagacttctcacgcaggcttaggctgagtgccggggccaagggggcttccttgtttgctttgttcttaaaggatttgcccatttgtagcagacaccgtgcccacttctaaagagagagcccagagcagygatgaggagagatgcagcccctgagcctcaatacccagccaagcctgactttgctaacacacacagtaggctttgctggcctctgtatctttgcctaggctgtcccttatcatatttttccctcccctctgcccaaggctcacctgtgtacaatctgccagttcccctcctcactccaatccccagcatcactgtgaggaatggggacaacaaggacagggaggtccccaggttccccctgcaggtgacacactgctctttcaggaagtgatattgtcagtgaatgtacaaaatcaatacacacagatttcagcacatcccatgaagttcacctctcagcagattctgaaaagctgggtcgaaagggagccacatcaggtgttgtgctgacctctgccttttaaaggaggacttaggaggcaaacaccctccccacagatgagggattcagtgaggtcctctccaaatgcctgctgtgtagaacaggcattta

SEQ ID NO: 482470 - DNA, 651 bp, Homo sapiens
ctgcaggctgagggcctcagctcttggctaagacttctcacgcaggcttaggctgagtgccggggccaagggggcttccttgtttgctttgttcttaaaggatttgcccatttgtagcagacaccgtgcccacttctaaagagagagcccagagcagtgatgaggagagatgcagcccctgagcctcaatacccagccaagcctgactttgctaacacacacagtaggctttgctggcctctgtatctttgcctaggctgtcccttatcatatttttccctcccctctgcccaaggctcacctgtgtacaatctgccagttcccctcctcactccaatccccagcatcactgtgaggaatggggacaacaaggacagggaggtccccaggttccccctgcaggtgacacactgctctttcaggaagtgatattgtcagtgaatgtacaaaatcaatacayacagatttcagcacatcccatgaagttcacctctcagcagattctgaaaagctgggtcgaaagggagccacatcaggtgttgtgctgacctctgccttttaaaggaggacttaggaggcaaacaccctccccacagatgagggattcagtgaggtcctctccaaatgcctgctgtgtagaacaggcattta

SEQ ID NO: 482471 - DNA, 622 bp, Homo sapiens
agggcagggctcactgttgttatatcagttttgtacttgggggaaggggagtaattgaggcttttttcagggtcaacattggctttgagacctgaatttaggcccatgaggttacaaatcttaccctcctttcccacagtggtttttcccagacatgagacctgggctgcttcaggctacatcagaatcacctatagtacctgttaaaatacagattctggggcccacagaatcagaatgtgtgtgtgtgtgcaagtgcagggggcgaagttagataaattcaggtcatccatacctgctgtttctcctcctttcccagccttttctgccacctctggcccagggccygtggcagctcatgtgggtgctcacacccaaagacaaagctaatcttacaagaagaattcaatttctttgcacacgagagaccacaggctcagagaggtgagtaacttgcttcagaccacacagcacttagagatggcagacctgggattcaaagctgtgtccatggcaccactggcagcgtttagtgatgccctatggcgataaataggagggagggtattcagagtgggagaagaattcagcttttttttttttttttttttttttgggagac

SEQ ID NO: 482472 - DNA, 622 bp, Homo sapiens
agggcagggctcactgttgttatatcagttttgtacttgggggaaggggagtaattgaggcttttttcagggtcaacattggctttgagacctgaatttaggcccatgaggttacaaatcttaccctcctttcccacagtggtttttcccagacatgagacctgggctgcttcaggctacatcagaatcacctatagtacctgttaaaatacagattctggggcccacagaatcagaatgtgtgtgtgtgtgcaagtgcagggggcgaagttagataaattcaggtcatccatacctgctgtttctcctcctttcccagccttttctgccacctctggcccagggcctgtggcagctcatgtgggtgctcacacccaaagacaaagctaatcttacaagaagaattcaatttctttgcacacgagagaccacaggctcagagaggtgagtaacttgcttcagrccacacagcacttagagatggcagacctgggattcaaagctgtgtccatggcaccactggcagcgtttagtgatgccctatggcgataaataggagggagggtattcagagtgggagaagaattcagcttttttttttttttttttttttttgggagac

SEQ ID NO: 482473 - DNA, 554 bp, Homo sapiens
tgcccagctatgggacttggactaaatcacttcctcccttcagacctcagtgtcttcatctataaaaacgacactgggacaagaaaaagcgagatgcggaaagctgtgtgtggccacccacttgtgaacatcgagaagtcagaggcagaacaacctcggacttgagagccctcatcttcccacaccccaacttcagcaagcytccagtgaccccagacaagtcactcgggcaagtcgcgtaactcctctgagtgttcccttccccatctgaagtggatcctaatagcacctgcttcggagggttgtcatgaggatcagaaaaaacgatgcatgtagcgcccacagtgcaagcagtgagaatggacccccagggaatttagctattattattattattattattattattaaacaacttaaatggccaacaatggggaactggttaggcagattatggtatatccagagaatactatgcagccattcaaaaagataattttgtgcaaataaaggaacagttatgccatgatgttgagagaaaaaagaacacaata

SEQ ID NO: 482474 - DNA, 657 bp, Homo sapiens
gcaagcttaacatcaccgtgccagagaagtatccttcatccacacgggacatgacagtgggtggataagtgcatcctcatctaggaaaggggtcagcaaatgcttggagacaataaaacagtctaccacattttcttgtttctgatgaggaaattatgacctggagatgactgtataacttactcattgccaaccaactaggcagtgccagaaataagaaggaaactcaggtttatcttactccaaatccacgtttttccattacacattttgcagggttcccarggtattttggctgataggagaaaagtgtgctgaacatcctctatttgtcctgtgaatacccactctccttcttcatctctcccttgccttgggaggctgatatatactgacttcatcaatagcttctctcgctccctagtttccaggtgggtttggcatagggaagccccagcaacagattggagggaagcagaggagtgaggctgtatgttttattactccatctccctcccagtagagtcaccaagggctggctgtgtctcttcacaaaaagtcttagcttctagcaggcagctctctatataacccctccctgtgggttctggaagcaccttctcttcacttcacctcttcaggtctaagagtataaga

SEQ ID NO: 482475 - DNA, 486 bp, Homo sapiens
gtcatgaggtggccctgtggaaaggcccaagtggtgaagggctaatacttgcccacaaccatatcagtaagagtagaaacagatttcctccccactccacactgattgggtcttcagataagaccacagcccctgctaacagcatgactacaatctcttcagagatcttgagccggaggtatacagctaagccatgcccagattcctgacacatacaaactttgagatrgcagatgtttgatgatttaagctgcaaatttgtggagtaaacagtctttcttctgtgctcccaagataccttgtattcttcctctattaaaatctttaacagaaattattgtgctgaccatatggcaggcattgttctaagcactttacatatgttaatttactcaactgtctcaccacatctgtacagatatcacattcattcttctggctgctctgacaaagtaccacaaactgggtgtcttaaaacaacagata

SEQ ID NO: 482476 - DNA, 486 bp, Homo sapiens
gtcatgaggtggccctgtggaaaggcccaagtggtgaagggctaatacttgcccacaaccatatcagtaagagtagaaacagatttcctccccactccacactgattgggtcttcagataagaccacagcccctgctaacagcatgactacaatctcttcagagatcttgagccggaggtatacagctaagccatgcccagattcctgacacatacaaactttgagatagcagatgtttgatgatttaagctgcaaatttgtggagtaaacagtctttcttctgtgctcccaagataccttgtattcttcctctattaaaatctttaacagaaattattgtgctgaccatatggcaggcattgttctaagcactttacatatgttaatttactcaacwgtctcaccacatctgtacagatatcacattcattcttctggctgctctgacaaagtaccacaaactgggtgtcttaaaacaacagata

SEQ ID NO: 482477 - DNA, 612 bp, Homo sapiens
tgattttaagtgaaagtcatttccagttgtttctaatgtctagaaattaggtttgttttgattttaattgtcaaaggaagggactgtgggtgaggaagagcccttgccgccgcctcccctgacgtgcccctgcttgggcagacgcctccctggtgaggtgtgggctgcgctggacagcacccaggaccacggcctcgttcttttccttctcactgtgttttcctcttgggtaggggtgagggtggttatttyactcagatctctgagccttaaagtggatcttctgcagatcatctccagagtcatctgacggcgccgggcagaagtctgtatgttgggagctgtccccagctcctctccttaggacttctgaatctgcttcaaccaagcatattcctgcctcatccggaacattcctcaccctctgccccagtgcaggcggtgtccacatctcagggatgcagcgtggtggaatttttaaggttttggttggcgtggatgagagcatctctgctgaggctgccgtgcgggtgtgggctgggtgcatctgtgtctctgggcaccatataccaagtggcactcatccctgtgagaacatggcctgggcattag

SEQ ID NO: 482478 - DNA, 524 bp, Homo sapiens
tcaacctgccccggcacgcrgggattttgtgtttgctgccctggctcctctagaagtaggactgtaccaccctcagattcctcgttggcctccgcaccccaacaaatgccaggaggtccagtacccgcagcacggcagcctgctgggtgcatgctcagtgggacagcttgggtaccctcaagctaagtcacaggggcaaagtgtgtttccgccacccacgtcccaccggagtccgcggtggggctggagccccaggtcgccagggcggcgtgggaaaccgaagacggggcacctccacttccgaagctcgcgaccccagaggcctccgcgtcaagcacatatgcaagccatccaggcgcctcccaacccctccaggagccggggcgctcgtctacactcacccccagacagttagatgagctcctgtcaaccccagagtttcagcaaaaggcacaacctttcctagatcgagcgccactgcggggagctgaaggacgtggaagagctcgctctgctggaaccac

SEQ ID NO: 482479 - DNA, 655 bp, Homo sapiens
aggcatctctcaacctgccccggcacgcagggattttgtgtttgctgccctggctcctctagaagtaggactgtaccaccctcagattcctcgttggcctccgcaccccaacaaatgccaggaggtccagtacccgcagcacggcagcctgctgggtgcatgctcagtgggacagcttgggtaccctcaagctaagtcacaggggcaaagtgtgtttccgccacccacgtcccaccggagtccgcggtggggctggagccccaggtcgccagggcggcgtgggaaaccgaagacggggcacctccacttccgaagctcgcgaccccagaggcctccgcgtcaagcacatatgcaagccatccaggcgcctcccaacccctccaggagccggggcgctcgtctacactcacccccagmcagttagatgagctcctgtcaaccccagagtttcagcaaaaggcacaacctttcctagatcgagcgccactgcggggagctgaaggacgtggaagagctcgctctgctggaaccactccttagccaggaagaacaccgggctctgctggaggagctttaggacgcggggttggggcggggtaggggcagggcggcggcctctctttcgcggtgaacctctgactcggtatggagaggc

SEQ ID NO: 482480 - DNA, 491 bp, Homo sapiens
agtttttatgtacacattttaataagtctgtgtatccactgttggtatcttgaatggcttcttcaccttcctttgctaagggatagatgttagtcttagtatttgaaacatttcttctctatcgaaccaggtggactaattttatttcctccttttttggattgctgaaagtgctgaaaggaaaaataacagccccaattatttcaatcaggtgagaggaratttatcatttccaactaaaatgacattgattaaaaacaaacatcatatatgtcagcaaagaaagggtcccaaggacttcgccaaacattctttcattgctaatgttatacagttcacaaaagtttggccgccttctgcaaggaaaattattttgttcatttattcactcacttattcaacaaattgtttattgaatattgaggcagatttatcacaaagcgaatgaggcttaatttttattattttattatatccttttcaaaggcctg

SEQ ID NO: 482481 - DNA, 267 bp, Homo sapiens
tgagattttttgatggattatactagtacatcactttatatttcctcaactaaattcacacttatgatcaaattcacatctaaaattaactattgcaytgggagttttggaatcaaacctttattatctccattatcaaaagtaacattttacccccctttgtaggagaaaaattatctgagctaacgtttaagagattaagatgtgaggaattattagtcaccttatatagatataataggatgttaaacattattttttttctgt

SEQ ID NO: 482482 - DNA, 608 bp, Homo sapiens
agataccctgcaaaataacttttaacaatgttatctttctgtgtcagagtagttaaggagcttatctaagttatccacctacaaactgactacttgaagattcaaggctacgtttaagcaggtatggtggctcacacctgyaatcccagcactttgggagactgaggtaggaggatcacttgagttcagtaatttaagatgagcttgagcaatgtaggaaaccctgtgtttatgaaaaaaataaggtaaaataaccaagcatggtgtcaccttgtgcctgtagtcccagccacttgggaggctgagatgtgaggatcactgggacagagagattgaggctgcagtgagcagtaatcaagccactacactccaatgttcctttttcaggctttactgtgtaacgactgtgttcagtttagaaacactgtattgcatgaggttggggaccatgttcgtctccaaggatttctagcccaacatctttcacactgtagatcctcaatatgtatttattgagaggtgtaaagctgtacacgacgattatttcaaccagttttgattcttacgcttcatcttaccttattttctgattgatttaggacagtgaa

SEQ ID NO: 482483 - DNA, 582 bp, Homo sapiens
acctcatataatgtgtagtgattttggagctaacgaaaaagactatggaaaccagattttgggagaatgagtgccargcacatctgtttctactcaaaaacttaataaaatagatcatctgagaaaaaaaagaacaaaacaagcaaagtgccacaaagtcattttctaaaccacctttaactttcttgtggcttacctcctcaacactggcctttgctgctgaatgactttcaggagagacacatgaaaagggtcactttaattggtacaggtgctgactcaggcctctgtcgtgatgtttttccatcttgggatctttgctttgcagggactgtcatgccagtaaaggtcgtttgcaagttatgtcactattctctacccgctgttaggcagacagctactgtatagggtttgctgttgacattttcaaacccagcatgacagtttacctaaaattatagtgaggtatcaaaaaagacaattaaatgtcaatttatcttcaaaaatttttttataagtttctatttatgtgacttaaatggaatgaagtggctttaaagagtgtatgtcttgacaatctac

SEQ ID NO: 482484 - DNA, 622 bp, Homo sapiens
tgatgtattagagtaaaattccagtttctgctgtgtgactttggtcaaggtaattaatatctgagattctcaggttctgcatttttgacttgcaacataaaagtacctactaattatggttaatgagaaagaatttaattaaatactagtattaagacagctcatgagtattcttacttattgaatgagttttatttactaggcaacatgccaaatgctgtacaggtattacctaatttaattccaawgagatactgattatgcagagtgtgcttagccaaacacaaagtttgtaggactaagagaagggtccatgcaaaaacactttgatttgtgacttaaaaccagaaagacaggaaggagaacagtgggatggcacagcagtggaactgtgaggggagagggcttgggggaaaccacctgggaactaatttttgtaaagatcttgatggttcaactttggccagaatggccagtcctgtcccaaattttatataagaacaagtatgtaaacataatttaatataattttaatgaatacttctacaatctcataaatttccattttcattacatttttgacaatattattccaaattaacaaggcagttaaaattcacaa

SEQ ID NO: 482485 - DNA, 622 bp, Homo sapiens
tgatgtattagagtaaaattccagtttctgctgtgtgactttggtcaaggtaattaatatctgagattctcaggttctgcatttttgacttgcaacataaaagtacctactaattatggttaatgagaaagaatttaattaaatactagtattaagacagctcatgagtattcttacttattgaatgagttttatttactaggcaacatgccaaatgctgtacaggtattacctaatttaattccaaagagatactgattatgcagagtgtgcttagccaaacacaaagtttgtaggactaagagaagggtccatgcaaaaacactttgatttgtgacttaaaaccagaaagacaggaaggagaacagtgggatggcacagcagtggaactgtgaggggagagggcttgggggaaaccacctgggaactaatttttgtaaagatcttgatggttcractttggccagaatggccagtcctgtcccaaattttatataagaacaagtatgtaaacataatttaatataattttaatgaatacttctacaatctcataaatttccattttcattacatttttgacaatattattccaaattaacaaggcagttaaaattcacaa

SEQ ID NO: 482486 - DNA, 606 bp, Homo sapiens
agaggtaaaaaaaaaaaaggtaacaaatgaagatgaggttgagggtagggaaagtatctcaaagtgtcaaaacaaaggtaggaaggaggaagataatctaagcattctatgcatacattaattatttttggaggctgcataagagaatgaagacattgaataataaagtcagataagctaaaagtagctagcagtaggtagagaggcatgtaagaatattataaaaatgtttataattgtttatattatctgtctatctagtacagaggaagttctggttcaggaaattctacagataatgcttatgctgtttctcatacgtatgaggctgtacattagttttacctactgccttctacatcagaattgcatgaggtcctgttgacaaggcagatttcataggctgtagcctaatgccagacataagaagaatttttaaaatgggaccaccccccatgccagttcttacccccaggtgattctgaagccactaacatttgagaataattagataaaarcctgtgacaatttccttccctacatttcctaaaatttacatacacaaatgtatgcatacatataaaccttaaaaaattgttttaatgg

SEQ ID NO: 482487 - DNA, 446 bp, Homo sapiens
aaagtaacacctaagttcctgcctacagagaaagtatgtgaaaaagtgggtgaactttgtaacggtcattcacaaaacaggaatgaatcaaaaaatatgtactttctttgcaaaagaatgcagaaagactcctgagaccacctaaaaaattgcaagaaatcaattcgtaaatatttagagtccttttgttaagaaatttgtaaagagtggtaattatataattaggtctgtgcagaaggggaagaagcaggcctttggtcacaaatttaagttgcattaaaaacattatyaaagtattcattacaggcacaatgataggcaaattaaagacaatctcgggtaagagatgaacacttgtgttttctctgtatgtggaggggggtgtatttgtggcatttaaggcaggatagagatgtgtaagggaggtatttgtctataaaaaatca

SEQ ID NO: 482488 - DNA, 528 bp, Homo sapiens
tggtaatgctcactcccactgctgctcacctcctgctctgtggcccagttcctaacaggccacaaacctataccggtccatggcctggggggtggggacccctgatttagatcatttatattaaatataattattgatgtgttatattaaaatctaatatctttactagcatttttagatgcttcattacttgggcagagaactttcatgtgggacaaagcttgtggtgtttgtcccagatcttttaaagatgaaggaaattgtctagaaagtcccagaagtaataagtgcatttttaatttaatggtctctgaatggggcattggatatcactaatatcagagyttagaataagagtgagtccacctgtcataaacatataaaaattgacaaagtgctaatcattagggatgggatacatattatttattctaataaagaagataagtaagccaaacacctcaacatctaattatagggaaaaaaaactaaagagaagtttagattcagagagtgattagagaagac

SEQ ID NO: 482489 - DNA, 601 bp, Homo sapiens
cttcttagttaatgactagtcacctaaagaaatagtgccccactagggcayatcatgggcctaaaatgctgatgagttggacattcagaggtggcagcagctggatctgccttggtagggggaagtcagtgctgctggcactcatgcctgccactgtggttgctccattcatgcactcatcctaccaggcctgggctgacccatggtgaaggctggctaactgccatttgtctgtttggttgttcagtgccacatcagacttgggtgttttctgtgggtgtaaacgtgggattcaagctcaatccaggtggaccattttcacttcatgatgaatgctgttgggcctgtgcaatttatgatgttgtgggtcacaaaggcacttggaaccacatagttgcctggtgtcctgtggtcaagctttctatcaaatcagtacaaggaacactaaaagttgcttctaacagggggcatatgtctctgctgtggatgacatgatcttactccagaatcccaggcccttcactgtgactctcccactggtgcttggttctgctccatcctgcatctttccccaccactggcaccaccagccccagggggt

SEQ ID NO: 482490 - DNA, 601 bp, Homo sapiens
cttcttagttaatgactagtcacctaaagaaatagtgccccactagggcatatcatgggcctaaaatgctgatgagttggacattcagaggtggcagcagctggatctgccttggtagggggaagtcagtgctgctggcactcatgcctgccactgtggttgctccattcatgcactcatcctaccaggcctgggctgacccatggtgaaggctggctaactgccatttgtctgtttggttgttcagtgccacatcagacttgggtgttttctgtgggtgtaaacgtgggattcaagctcaatccaggtggaccattttcacttcatgatgaatgctgttgggcctgtgcaatktatgatgttgtgggtcacaaaggcacttggaaccacatagttgcctggtgtcctgtggtcaagctttctatcaaatcagtacaaggaacactaaaagttgcttctaacagggggcatatgtctctgctgtggatgacatgatcttactccagaatcccaggcccttcactgtgactctcccactggtgcttggttctgctccatcctgcatctttccccaccactggcaccaccagccccagggggt

SEQ ID NO: 482491 - DNA, 601 bp, Homo sapiens
cttcttagttaatgactagtcacctaaagaaatagtgccccactagggcatatcatgggcctaaaatgctgatgagttggacattcagaggtggcagcagctggatctgccttggtagggggaagtcagtgctgctggcactcatgcctgccactgtggttgctccattcatgcactcatcctaccaggcctgggctgacccatggtgaaggctggctaactgccatttgtctgtttggttgttcagtgccacatcagacttgggtgttttctgtgggtgtaaacgtgggattcaagctcaatccaggtggaccattttcacttcatgatgaatgctgttgggcctgtgcaatttatgatgttgtgggtcacaaaggcacttggaaccacatagttgcctggtgtcctgtggtcaagcwttctatcaaatcagtacaaggaacactaaaagttgcttctaacagggggcatatgtctctgctgtggatgacatgatcttactccagaatcccaggcccttcactgtgactctcccactggtgcttggttctgctccatcctgcatctttccccaccactggcaccaccagccccagggggt

SEQ ID NO: 482492 - DNA, 430 bp, Homo sapiens
gaaccccagcccttccatactctcaatttcacacttcccactctctggccatctttccactcatcccatgcaaggtggccacaggctctgaggacacagactctatcattttatcatatgctgtgaggtaatatcagtgactactcattgcrtatgtgcctgcattccaggcttgaagtccaccctttagcacatcaattccaacaatccttcgacccccaccctgggaataccaatccagtgattccaccatctactcactgtccctcatcgttggtgtcttctctaacttcatgacccaaaccacatggggagcccccaccagggccagcaatcaccctctccctgcatggctcaccctcagcctcctcctggcctgggtgacccttacacaccttctctctgtgctcacacatccaaccctccttcc

SEQ ID NO: 482493 - DNA, 610 bp, Homo sapiens
ctgcaccagccacattttaaatgcctcaacagccacgtgtagcaagggctactgtactgaggagcacagacacagaacatttgtatcagtggctgacctagcagtatccagggtaaagggtgttctgctagtaaagcaaggtgggcatcagaattatcacaacttaagcataatattcctgagggcatctatttccatttatttgcttctctgcttaccaactctgaacccctgctttcccaactttctggtatctgggaagaaaataaactgactagaaaacacaaatttcattctgcttgacaactgtaattctcactaaatttataaatttgctttctgatttatcaatgagygccaaaaacatgagtttgagaaaggctgagtttgattatccctgagtggatccaagcattaggaaggtcttgcttaagtgggtgataggaagtgacaaaaaaagctggaagaaacatgacagactataatactcccttccctaaccttcctccttttcaccctgctcacctgggccaggttagaatccgtcctttgtaaagcaccctgtacctttctattgtaacctttatttactacattatctgtttataga

SEQ ID NO: 482494 - DNA, 585 bp, Homo sapiens
cctcaagtcaactcagagcacctgatgaaaatttcctcccaaggaccaaaaacaatcgattacatgtaatgaatctttgggacagttcctgaatgttaaaaaccagaaatctaaactacaagaatgtcaagggtctagtgaaagcctgttggcccataaaacaatgcaaaaggcctgtggttctgagaackgattattttacagggagctgtaggccatctaatctttatttttacttttacctttctcactaatttatggaaaagccttggtaaactggcttaccactcttcatctaagttattaataataccatctcatccttttcttagactactagcaataaattcatacaaatatacccacagagcatatatgcatgtgtgtacacatacttatatttataaatatatatacacacaatttatttcttttaaatataattataaaattacaagagtcataactgctcaggaaacatatggattagaaagatacaatggcactttacctaggtgaggttgaactattcagccataaaagctttctgtgacttctgatgaaaaggacaaaaatccaaaaaca

SEQ ID NO: 482495 - DNA, 561 bp, Homo sapiens
aaaatatgggaaatgtgagttctggttttaattgcttccttggcaattaaacgtctctactgggaaaatataaagttaaatacatagttactgcaggtatcatcattttggaacttgacaatattgtgcacactgaagtgatcacagttgaactcacatctcttatttgcgtttcggtaccttttcacacaacttttcgtctcgtaaaaaggtggtcgttgaaaattttgaagcatgacttgaaagctttacaaattattgttatgactttgagaagaaaaaaaagtggaaaatatttttaaattaggaaacccatggctttaaattaaaattttgggattctcgtccttatagcactgctcttgactaatctaaatacctataataatactgggtttaaatgtgagcccttctctggygcacagggggaattgattagaacgattaactagaggcattttccttggattttattcttggctccaacatagattttattggatcctcttcctaagccaccatccattgtgttagaaacatatatcactcactgtagctagg

SEQ ID NO: 482496 - DNA, 611 bp, Homo sapiens
cccgcaatagctcggtgtggtagagtctatctaaatgcagaatactttgatggaggttactggctgggtcactgccactgagtctctatcaggagctgggacagggtggctcccatgcctggttccacagccagagaccttgctgagtgacatgcagatttgagggacatggctcatcttcctgcctgctactctctagggctcactgatgaatttctagtgacagtgtgttctagaagttagctcyaactataaaacattttttcaggtcttccactttctgaacaatctgatcctaaagccactgtgtgtatccaaacaagggggatatccgcaccgatggaagggaccacagaggaacatagtgagcaaggatgggattgggggaggtttgcaagagcccgagctgggcattggtaggggacggtggcggtccacatggctgggtcatggtgtcagagccccagtgcaatgaggaccgggctcctgcaggagtaggaccatgggactttcagcctgagtagggtagagagagtgtccaagcaggggaagggactgaatggaagggtggcaggcacccagaaaaatgaatggggtttaagggggaagca

SEQ ID NO: 482497 - DNA, 483 bp, Homo sapiens
gggagacgtagggtctaggccggcaaaaccagagagaaggataggcttttagatgctcatcccacccaaaaccatgaaataatctcccctgtctcctgattagtatttgtcagcctcatttacccttaagatttgtgcaaatgaaaaacgttaaatgcagtwcctggatcagtaattaaacataattatttcagtggaagagatttttgttttcataatctcctctttgtctgcatagagccagctcttggttacatctgccactgatagcctttgctctgtttactttaaagaataagccactgtttgatttggtttcttgttttcaatatgtaaaccctggtctcttgattccccattccaggaaggaaaaaataaaagaacaaggctctttaaatatcagagccatgatgacttaacagatacacgcaggctcaatattttatgtaacagccacttaggaaaatgcgtaagaatttccca

SEQ ID NO: 482498 - DNA, 671 bp, Homo sapiens
actctaggaagctggctgttccatatttttatactagatttaaggttyaaaatttcatgttggtgttcataaatgcaaacacacaagccagcaaagaaaaaggagagttatttagtttatattttcttctcccatcctttctctctctctttctatgcaaatgtttcaatcacataggtttgaccaaatagctgcgtcttacaccattctcctctatgtaaagatgtaaagcaactctgcactttttttttttttttttttaaaacaaagtctaactctgtggctcaagttggagtgcagtggcacaatttcggctcactgaaacctctgcgtcttgggttcaagcgattctcctgcctcaccctcccgagtagctgggattacaggtgtgtgccaccacacctaatttttgtatttttattagtcagggggttcaccatgttggccaggctggtcttgaactcctgacctcaggtgacctgcctgcctcagcctcccaaagtgctgggattacaggcctgagccaccccgaccggccatgcacttggttttgagagcagcacagtggcggtctgttctccctgcccgcctgctccagggagaggagttgcttgctcccttacagccctcacctcccatgggaccctgcaggtgctgagggctcaggcgca

SEQ ID NO: 482499 - DNA, 558 bp, Homo sapiens
atcaccaggatgtcacatgtcagagartatcattaaaagaagacgctcagcactgtttcagcccgaagctgcttgcagttttcttttggatctgagcaatgactgtgtttggaaacatctgtggactctgttagatgaggcaccaacaaggcaaggtcacctgcctctttcccttgttcccggatggggcattcatcattgtgctgtttgcgttttgttttgttttgttttaacaaaattagctgaagaagttattctcaagaaaattggatgttttcattggccttcttaaattgtggccagtgtcttttaatttcttcttcttttccttttggcaaagcagatataaccctcagcatgctaggagagtgcacccgtacctatggaagtggtaaaatctggtatttactggcttacactcaaaacgaccacagtcctacctcagttcaaggtaaagccggatttccgtggcgggggtcccacaggacctcctgtagtagcccctgcgctgtgtgtctggagcgcggtcctcggccttattgaaatggtccaagtaga

SEQ ID NO: 482500 - DNA, 479 bp, Homo sapiens
ggcatctctgtccttttgctctcttttttactgtaagkggcagaggggcagaatacatctaaagctagacagacttgcattgaaacttatggtctacattcccagttattggatataagttgttaattttcatccttcttcccttggctcagggttctcaaattcagttcaacattagtatcacttggatgctttaaaaatacagaccacagaattacaactcctgatgtttcagtttaattggtctagaaaacggactggacatggggacttttaaattttacaaggtttttgtaatgttcctttgaggttaagtacacttatttaaagtgaagtgcaactttcttttcccaattattttgcagtatttagtataataattctcacgtgctatttgcttaataattatttcttgaaggaaagactgtgttgctgcaagttggtaattcacagatgtgcctgaaagaaggaaaaataaa

SEQ ID NO: 482501 - DNA, 537 bp, Homo sapiens
agtaccagctggaaggaccaggagctggattgggtatcatttattctttatttttcaggatctttcttttccctctggagatatctgagctcacaatctgggacaatatggcagaatcctttttttttttttttttgtcagattttggcttgttttggtagctgaagcagctcagaaacgaagagtttttggagatttaaggagctcctcaaayaagaacctttgaaattggaactcaagtgaatcacctggactgagcttccaaagaagatgtagcaaagctgttggacaaacattatccatgaaaacaggcatgggaggtgacactgaacctatttcttcagatcaataggaaagatctctggatgaagcctcaggaagagataagaaataagctaaacccatatagaaagcatatgaaagaaaaatttcaacttgtatgggaaaaggaaacctgtcttcatgtccctgagcatttctacaaagaaaccatgaaaaatgagtcaaagtattgaatgatgcatatactgctgaggc

SEQ ID NO: 482502 - DNA, 572 bp, Homo sapiens
ctactacctgtctgcaagaggcaggattttctttatagacctcaaccaaaacaacatattgcaacaaattaaatgaaacagcaaacgtgggaacccaactgtgttggttaagacagacattaaagaaataattgccaggcgcagtggctcaacctgtaatcccagcactttgggaggctgaggcgggcagatcacctgaggtcaagagttcaagaccagcctggccaacatgacgaaaccctgtctctactgaaaatrcaaaaaattagccgggcatggtggtgtgcacctgtagtcccagctactcaggaggctgaggcaagagaattgcttgaacccaggaggccgaggttgaagtgaacagagatggtgccactgcaagactccgtctcaaaaaaaaaaaaaaagaaagaaatattttacctgtggaagcatgctccttttccatgaattcattgcccttttctctaacttgtcagccttcaatatcatcctccaccataaatccttccttgaccctccagaattggcatagatgagttcccttcctctgtcagttaccttttgctgct

SEQ ID NO: 482503 - DNA, 569 bp, Homo sapiens
tttggaatagttgtgtgtcttgagaaaaccatggagcctggtagagggaggakccaaaagtgctaaaagtagactccttcctttggatcaggaaggctctcctgttactgtttcagcagccagacaggcattttaaatcaaaactgaggcatatgacctagattacttcaactaatatttatttgacataatttgaatatgtcttactcatgttgtcacacagaaataaatccattcaacaaccatatatttctagtattttatttattgtccatatgagtctgggtccaacagataatgacatgctcaaagaagaaaattaataattgtttaatcgaaggatcaattacataagtagggctagatttaagaaaacccacatgagatagcaaaggaatccagagcatttataccaataggcctgaaaattaccagcatcccacaagacctagacctgcaaagggtacatcctagagaaaacagcagcagcatcagtcttcagtctggcacagagaaaaacaattactctcctgctggtgcctcctattcactgaactcaactgaaagtc

SEQ ID NO: 482504 - DNA, 569 bp, Homo sapiens
tttggaatagttgtgtgtcttgagaaaaccatggagcctggtagagggaggatccaaaagtgctaaaagtagactccttcctttggatcaggaaggctctcctgttactgtttcagcagccagacaggcattttaaatcaaaactgaggcatatgacctagattacttcaactaatatttatttgacataatttgaatatgtcttactcatgttgtcacacagaaataaatccattcaacaaccatatatttctagtattttatttattgtccatatgagtctgggtccaacagataatgacatgctcaaagaagaaaattaataattgtttaatygaaggatcaattacataagtagggctagatttaagaaaacccacatgagatagcaaaggaatccagagcatttataccaataggcctgaaaattaccagcatcccacaagacctagacctgcaaagggtacatcctagagaaaacagcagcagcatcagtcttcagtctggcacagagaaaaacaattactctcctgctggtgcctcctattcactgaactcaactgaaagtc

SEQ ID NO: 482505 - DNA, 646 bp, Homo sapiens
tcaacaattgtaaaatatgagttcacttttaagaatacagtatacatgagattaaattaatgcacttcataactatctcagaaataatttagaagggattcctggccttaaagcatttcatccctgtatgcatcttcatttaagttcttggtataaatatcaactcctcagagagggcttctcagactacctttttgaatatttatttttgtcaatcacttgtcgacatgcccggctttattattctttattagatttataacttgtaacaagtatattatgcatttgtctgttgtctatgttctctatcattatgtaagctccatgaaggcataaacttttccattctccatcttgttctctatggtatctccagggattataaccactcttggtattgaataattcaatagttattttctatgtattatttcaagcataataagaaccttggtctccacaaccccttattttaactgagatactcctttctattcattctagatatttagatatgactcttttaaccagttgataacctgaaaatctttgaatctacctaggacctgtaagttctcagcttcaagytgtcctgcctttctggactgaaccaatgtacagctcacgtgtactgcctgatgtctta

SEQ ID NO: 482506 - DNA, 431 bp, Homo sapiens
ctggggtcccagcccagctgcagcctttcccaagctgaagtggtcattgaggtcaatgatgctcttaagccaaacatggctgacagtacctatgatgtgcacaggtgggtggacaagactcattacttttagttacagaagagcctgacaaagttggctgggcaccacagtaaggattcaattcacatgataattctacaggagactaaatgactgagcaaacagagcatttgtcctcttttgcctgtgtttcttcatctgtgaagtggatatgacattgtttttccttatcattcaaggtccaattcagatatctaggatactttcttggcccccaacccaaagaactctttttccctttgcctgttaagatgcaatacaattaggaagacttctaatrcaaatcctgtgttctttaaacattacttgga

SEQ ID NO: 482507 - DNA, 553 bp, Homo sapiens
agaaatattccttaattaaatatttcaaataatgagatgataggaccatgtaattgataaagctttagttacatggcatttgcaacataataaaagtttataagaaaagtcytaaataagctatggatatagcctatgttctgtgttttattgaaattctttgaaatattttgaggagtgtttattatgtaaagctaactatatgctagtaactgtgatttctcacttgcaaatggggataactaaatgtcaaaaatataatgaccttgagtctgcttaaataactgtagcctaacagttcaaatcactccaaagttggtcattatatatatatatatacacacacatatatatacaccatgggtattcttaaaacatatcatcccttggtaattttagcacaaatttccttcaaagagtttacagtattgtttgttgtacttatattttagtggcttttataatgaagttttcaaggatttccttttctgtttgcttttgagaaagaaagataatgaatggagattgtagcagaaagataactctgcatttc

SEQ ID NO: 482508 - DNA, 610 bp, Homo sapiens
tccctgttaggggagactttaatcctccagtttgcatgtaaatagagacagaaattgaagcttatagaggtcatcatcaaggtctatcctttcttactraaattcattttgcctgtttccaatccacattttgcaaaagaaagttaatgcatgtaggatgtctttcataatcggtacctattttctatcaggtaatgtcttaggtatttttcccatagcttattgaatctccagtacagccttagaaggaaatattattacctatatattaaacagaaagaaataaaaattgtaggtgtgtatgttccaataccggcaagtactggaacaagcattagatccctagtgtccctgaccccagaacctctgttcttttcattgtgctaaaatgccactcaagtgtcatttaagagacacataagtgtcacttacacataagtgtctcatatctctgggctactgatatccattttttctctaataactctaataaagatattcaatggaggtaatcagaatgatctttgagtacttccatcaggataaaacctattttgtcctacctcatgttgaaataccagaagcaccgtaggaaaaaggacaagaatgc

SEQ ID NO: 482509 - DNA, 610 bp, Homo sapiens
tccctgttaggggagactttaatcctccagtttgcatgtaaatagagacagaaattgaagcttatagaggtcatcatcaaggtctatcctttcttactaaaattcattttgcctgtttccaatccacattttgcaaaagaaagttaatgcatgtaggatgtctttcataatcggtacctattwtctatcaggtaatgtcttaggtatttttcccatagcttattgaatctccagtacagccttagaaggaaatattattacctatatattaaacagaaagaaataaaaattgtaggtgtgtatgttccaataccggcaagtactggaacaagcattagatccctagtgtccctgaccccagaacctctgttcttttcattgtgctaaaatgccactcaagtgtcatttaagagacacataagtgtcacttacacataagtgtctcatatctctgggctactgatatccattttttctctaataactctaataaagatattcaatggaggtaatcagaatgatctttgagtacttccatcaggataaaacctattttgtcctacctcatgttgaaataccagaagcaccgtaggaaaaaggacaagaatgc

SEQ ID NO: 482510 - DNA, 610 bp, Homo sapiens
tccctgttaggggagactttaatcctccagtttgcatgtaaatagagacagaaattgaagcttatagaggtcatcatcaaggtctatcctttcttactaaaattcattttgcctgtttccaatccacattttgcaaaagaaagttaatgcatgtaggatgtctttcataatcggtacctattttctatcaggtaatgtcttaggtatttttcccatagcttattgaatctccagtacagccttagaargaaatattattacctatatattaaacagaaagaaataaaaattgtaggtgtgtatgttccaataccggcaagtactggaacaagcattagatccctagtgtccctgaccccagaacctctgttcttttcattgtgctaaaatgccactcaagtgtcatttaagagacacataagtgtcacttacacataagtgtctcatatctctgggctactgatatccattttttctctaataactctaataaagatattcaatggaggtaatcagaatgatctttgagtacttccatcaggataaaacctattttgtcctacctcatgttgaaataccagaagcaccgtaggaaaaaggacaagaatgc

SEQ ID NO: 482511 - DNA, 606 bp, Homo sapiens
aaaaggaatcatttgacactagccaatgttgaatttcagcttttcagttttctgtgacttgagactgtataaaatatacaatgaagagttattaaaaataaatcaaacatcttgatctggaaaacagtttttctctttacatcccaagaatgtgaataatatatttagacatctacagtctgttttgatagttactttggcagaatgaaaagtaccgtgcagttgatttgagaagtccgaagtgtgggttctggctctgtaagcattggctatggattttggtggactgattsattcattcatttattcaaagcagttcatgcattaattcattcagcacatgtcaactgagttcctacaatgaatcgaacactgtgatgtgctgccagtgtgcaaagaacttagaagcaaagaaaataaaaagaaaaaagtttttttctgttaaagtaagcacctcaaaatctatagacatgtgatagaccagagtagagctatgtatagatatctgaagcaaatgtgttctcaggcatattgattagcagaaagaatgaagtgcatacataaggaaaaggtataatatgaaattttatataactattcttatct

SEQ ID NO: 482512 - DNA, 469 bp, Homo sapiens
gagcaaattaagtccaaaacaagtagaagaaaggaaataaaacagaaattagaaatcaatgagacagaaaacagaaacaggagaaaatcaacatggccaaaagttagttctgtgagaaagaaagaaaacgcaaattataaatatcagggattaatgagattgtacagttgtagacacaagagacattaacaagataatggaatattgtgaaacattttatacwaattttcattacttggatgaaagggtgaattccttgaaaaaaaacttataaaaaaattcacaagattaaatggaacatatgaagtaattgacatttattaaagtaattaaattaattgtaaaatacctgcacataaaaacataaaattaaagaaataaaaataagcaaaccccagatccaaagaatttcactggtgaattctttcaaacgtttaaaaaaaataaaatttttaaattatttcagaaa

SEQ ID NO: 482513 - DNA, 469 bp, Homo sapiens
gagcaaattaagtccaaaacaagtagaagaaaggaaataaaacagaaattagaaatcaatgagacagaaaacagaaacaggagaaaatcaacatggccaaaagttagttctgtgagaaagaaagaaaacgcaaattataaatatcagggattaatgagattgtacagttgtagacacaagagacattaacaagataatggaatattgtgaaacattttatacaaattttcattacttggatgaaagggtgaattccttgaaaaaaaacttataaaaaaattcacaagattaaatggaayatatgaagtaattgacatttattaaagtaattaaattaattgtaaaatacctgcacataaaaacataaaattaaagaaataaaaataagcaaaccccagatccaaagaatttcactggtgaattctttcaaacgtttaaaaaaaataaaatttttaaattatttcagaaa

SEQ ID NO: 482514 - DNA, 469 bp, Homo sapiens
gagcaaattaagtccaaaacaagtagaagaaaggaaataaaacagaaattagaaatcaatgagacagaaaacagaaacaggagaaaatcaacatggccaaaagttagttctgtgagaaagaaagaaaacgcaaattataaatatcagggattaatgagattgtacagttgtagacacaagagacattaacaagataatggaatattgtgaaacattttatacaaattttcattacttggatgaaagggtgaattccttgaaaaaaaacttataaaaaaattcacaagattaaatggaacatatgaagtaattgacatttattaaagtaattaaattaattgtaaaatacctgcacataaaaacataaaaytaaagaaataaaaataagcaaaccccagatccaaagaatttcactggtgaattctttcaaacgtttaaaaaaaataaaatttttaaattatttcagaaa

SEQ ID NO: 482515 - DNA, 469 bp, Homo sapiens
gagcaaattaagtccaaaacaagtagaagaaaggaaataaaacagaaattagaaatcaatgagacagaaaacagaaacaggagaaaatcaacatggccaaaagttagttctgtgagaaagaaagaaaacgcaaattataaatatcagggattaatgagattgtacagttgtagacacaagagacattaacaagataatggaatattgtgaaacattttatacaaattttcattacttggatgaaagggtgaattccttgaaaaaaaacttataaaaaaattcacaagattaaatggaacatatgaagtaattgacatttattaaagtaattaaattaattgtaaaatacctgcacataaaaacataaaattaaagaaataaaaataagcaaacyccagatccaaagaatttcactggtgaattctttcaaacgtttaaaaaaaataaaatttttaaattatttcagaaa

SEQ ID NO: 482516 - DNA, 594 bp, Homo sapiens
tggagtatgttgtctgtttcataaattatgtgattatttgtgtgtagctctgtttctctattctgttccattggattatttgcctgtaattgcaccagtatcacactcttactattttagctttataataggtcttgatatctagtagtaaaattcctctagcactttgttcttcaagattgtctttactattctgaccctttgcttttttgtatatattttaggatcacctttccaatactcaaaaaataacattactggggttttgcttggagkgcactggatctaaagatcggtttgaggagaattaagatgtttacaatattaagttttaaaatctatgaacatggtatatcaatttatttacttctataactttttagtattagcttttaaaagtatataaatcttcatgtgttagatttatttctagatactattttttgttgccttttgtaatttacttgctattcatttttttttttttttttgctggtaacatacttgatttttacatattgactttgttctaaaattttttgttgttgttaaaaaatagagatgagtttgctgtgttggccagactagtctcca

SEQ ID NO: 482517 - DNA, 590 bp, Homo sapiens
gattaatgtatttcacgtgaacttaaaagttttactctaaatacttgctttgagatttgctgaattcttttttasgttagagagcaatttttggcttagaaaggagtacatcttcaatgagactaagtgaaaagaccaggatttaatcagaggtttctacagtatagacaagtttttggtaattttgtttctgcatgtctctgtaatctacttttgaacaccggtatatagaatgacttgaaattctagtatctaggcaccatgtcttagaatttttggctgtgacaacaggcatttggccacatttctagtcattagtccagtgattaatgttaaacagttttacttataggatgatcttaatagattttcctttcaaagataatatggggagaattattttaccgtgtgtcttttgttcagaattgtatctgacacatttattttatcttatttttacttttgtcttaaaaatgcatacttagtcttcatttttacaataaagttatttttattaaatggaagagtggacatgaagggataagagcatgaactaggggtaatggctataggcttagagaagagatcag

SEQ ID NO: 482518 - DNA, 356 bp, Homo sapiens
gctggtgactggtcagagattgtacttaggcatcttgttttggtaagactttcatcctttgtcaaagtctctgttttgtttgaggaacacactgaaaatttatgcagtttacgagtcttccctggggrtatgtatatagttagagccttctctggtctctcagcatgttcataccctaatatgcccattacctttcaaaatgtaagcttatcaaggactatgattgtctcacttcctgattgtttctgttaaatctccaggcagaaaatttttttcttctgatctcttggttggcccagctatagtatttcagcttcaggtcatctatgatgtatgtggacctctcctatgtttgg

SEQ ID NO: 482519 - DNA, 568 bp, Homo sapiens
tgggtctggagctaaatcttggtgaatttgacacacagcctgattattgtctggaaagttctggagaggaactcagtcacctgtcacctgtcttcccaggcaggtatttccttcgagctctttgaacctcagcaccctgctggggagtgacccctgcctgggtttaggttctgcagttggcatgcaggtcaaaatgtatcggaggtgtgcctgcaacacaggccagggcctgactggtgctgtgtgtgccattatcctggaattgaagggaggagcaggcactagaattttgaagacgcttctcaggcgagggctgtgcatagccagggttgacaggctcaggagctgggcgggggtcctgggaagagggtgagaattggactctgatctcaccagccaggtgcttyaggctggaccccagaaacacctgtcaggtaggtcacagagatgaaggacaactcaggtcccaagaagtcgagaagagagccagccagtgagcaggtttaaaagttagagctgggccaggtgcggtggctcacgcctgtaatcccaacactttgggaggcca

SEQ ID NO: 482520 - DNA, 623 bp, Homo sapiens
cacgcggttcgcatcaagcgcactcccctgggggcggggcctgcgcgagctgggcgtgtcgggggcggggcctgcgcgcttgcttccggcgtgccgcgagaggcggggcgtgtggggaggcgcggccgccacgcgacgcctggctgggcccgcaccggagaggcgtctcggtacctggcaggcggcctgctactcggagcccgctgcggggcggcggcggcggggacatgcacgtgtgagatgcggcagcgggcggcgcggacgcgaacagcagcggcggcggcgggcgcggcctcctgggcgcggggcgcgcggtgcctgagggcgggcgcgcgggcgctgggcaactgccggccgcgccgcctgcgcaggcgctggttcaggactcacacgccgcgctgaggcccgcgggcccgtcatggaggcgcccaccgtggagacgccccccgacccctcgcccccttcggccccggcccctgcccyggttccgttgcgcgccccggatgtggcgcggctgcgcgaggagcaggaaaaggtaactagcagccccgcgccgcttccgcctccgcccgccgggctgcccctgcctgtgctctgggccgccgccccgcgtggcctaggcc

SEQ ID NO: 482521 - DNA, 650 bp, Homo sapiens
tgtaacaaatatttaatgagtatctactacatgccaggcatgttctgctgagtgtgcagtaatgaacaaaatacagcaagttctttctttcatggttacactctaggggtgaaggcatgcagttacatagccttaccttgggtgtttggtaggtaaggctaagtagaaaaacaggaaggtaagaggcgtgtagagaatgagggatgtgagtggagggatggtgtcttctgtaagccatcagagagggcttctctgttaggttccatttgagcagaaacttgaaataagtggggagtgagctgtgtggatatatggaggatattttagagaagagctttctagccagtatgagagcagtaccagatcattgtaagagttttggttttcayatttgtgagatgggaaacgattggaatgtgttttgaggctgatcttaaattatatccatttgtcatgcatatgtgaagaaatggacggatggaattacattatagggagcaactctgtgtgccacgcattgtgatagatgtttacagatccgatcttagaattttcattaatactgtttatttttcagatgaacagtttgtttctagtttttgcctggaactttctcatggcgtgtttgtgtcttcagttccacttagaat

SEQ ID NO: 482522 - DNA, 594 bp, Homo sapiens
cctgaggttggatcaaggctgttcattagttgggttacacatgtgaatctctattaatctcttccaggtgacaagtaattggctcatcctcctatgaaggctgttgaattcaaatttagaattacatagattctaattagtagattataataatagggtttttttgtgagaaagrgacactagcaaaatcgcaggttgatttatccatgtaagttcaagtggaaatgctttggctttaattccctgtggtctcatttgatgagaccgaaattttccaagggtttttgattatggtagtctcatgagggatagcatatccagcaatcaatgagcttgaaggttactatttaggataatccaagattagtgttagaaagtgattatgctctgatctgaaattttaataagaataaaatgaaagagaaaaagagtcattgtgggtaggtaactaccaggggtctttagaaaatgagaatggctgtaattaagtagataaaaaacataatagcagttacaccagggatcttgatccaatatggtgggcagaagctgtctactctctgaggtcattatctccctctgaaagtctccagt

SEQ ID NO: 482523 - DNA, 524 bp, Homo sapiens
tttatttcacccaggacactctgggatttccagtataatactagattttatattggagacctgaaagtcccagccagcagatagcttgcttgggtttctggttgatgattatttctgtgtcattgagccatccctgggttttatagatatacagtatttttwtctcttttccagccttgatttaatattggagcacttaattttggctcatctcacacagtgagcctggtttcaagaacagggtatttcctactctttccagcctcttttgcctccttctgatgctgggaacttaataggttgtggtgtttttaatctcctgtttgtcaatccattttgagtctatttcagttcataagactgttttttcttgaattgatcatagttatgtcttttaaagtacattttacagtgtattttatatcatactcacaaatagtttccaaattctggagaagccaggcagagagaaacaaatatgctccaaattttgttcacaggagtataccttactccactgctaa

SEQ ID NO: 482524 - DNA, 621 bp, Homo sapiens
ctgtctttcccctgctgctcgtaacctttgagttccttagaccttgtctatgccatggatactagcatgaccyctacccacgtaatggggggagggctaattggcagaaattagtcatgctcacctgtgctgtgccccttttcttccattgttgcctgcctctggatccctcagatctaatttttctttttagggcttcaagccaaaggtaggagttgtgtttgggacaaaaatgtgcttcaggagggttcatggactcattaagtcccaagtggccctcctcaaacaacggagagaaaagggagtcctatgaatcggggtcctggccttgcaagacaccttccaaaaggaaaagaaaagtcactcacatagaaaaattccctgtattcacagggctatgtgttaactcctgacatagctacaaaaaggggggggaaaaacaacagctacagtgcagggtggggaagctgcctgggggagaaaatatatagcattatgcaaatagtttcttccaacagggagagaaactcttaactgttgtaccctccttttggcttggctgggggaggaaagactctgggcatgtggtgcgaggagacagtgagcgagaattgctagcca

SEQ ID NO: 482525 - DNA, 551 bp, Homo sapiens
cccctacccacgtaatggggggagggctaattggmagaaattagtcatgctcacctgtgctgtgccccttttcttccattgttgcctgcctctggatccctcagatctaatttttctttttagggcttcaagccaaaggtaggagttgtgtttgggacaaaaatgtgcttcaggagggttcatggactcattaagtcccaagtggccctcctcaaacaacggagagaaaagggagtcctatgaatcggggtcctggccttgcaagacaccttccaaaaggaaaagaaaagtcactcacatagaaaaattccctgtattcacagggctatgtgttaactcctgacatagctacaaaaaggggggggaaaaacaacagctacagtgcagggtggggaagctgcctgggggagaaaatatatagcattatgcaaatagtttcttccaacagggagagaaactcttaactgttgtaccctccttttggcttggctgggggaggaaagactctgggcatgtggtgcgaggagacagtgagcgagaattgctagcca

SEQ ID NO: 482526 - DNA, 490 bp, Homo sapiens
accagggcttttatatataagctgatgggactaggttccctatttgtataaagtttgaattcctggtcactctaccccattcccctagggctcatgtgagcccttagtctgctgcaggcatgtttaggtaagcccgttgtgcaagaacccttatctgcaaaaaatatctggtgtaagcacttgtggggtagttggaggttctcgggggaccctttccttactgtctgcctaaagcaagctggctaattcctttcaatgtgaagggctcaggacataccacccaaaaatatgactgtaggagaacaaaaactattataggagagaaggaagactttytctctaccctctgaaggcttaatagttgagtctataaaataaattgacagtgaaagattaacaggagaaaaaccatgttaattatatgcaaatacctgggagtcccgcaaaatatgaaactcaaagaagagccagacgattgaagtttttacaa

SEQ ID NO: 482527 - DNA, 490 bp, Homo sapiens
accagggcttttatatataagctgatgggactaggttccctatttgtataaagtttgaattcctggtcactctaccccattcccctagggctcatgtgagcccttagtctgctgcaggcatgtttaggtaagcccgttgtgcaagaacccttatctgcaaaaaatatctggtgtaagcacttgtggggtagttggaggttctcgggggaccctttccttactgtctgcctaaagcaagctggctaattcctttcaatgtgaagggctcaggacataccacccaaaaatatgactgtaggagaacaaaaactattataggagagaaggaagactttctctctaccctctgaaggcttaatagttgagtctataaaataaattgacagtgaaagattaacaggagaaaaaccatgttaattatatgcaaatacctgggagtcccrcaaaatatgaaactcaaagaagagccagacgattgaagtttttacaa

SEQ ID NO: 482528 - DNA, 611 bp, Homo sapiens
tgttcacagatacctagtttctagataagaggaaagtagagacccactgtactctgttctgggaagacttcatattaatagctgtttgagggaaaagcgctacatttattaggacttagttacagacagtagacacattttgccgtgtttaagaaagggttgtattaccacagtttaagtggcatagaagctagtcagaagggctgaatgaataggctgcaggtgaggcttctagtaacaacccccagccaccagacctctgccatgctcaaggaagctgccactgcaatacgagaaccctccatccccaggagttacaatcacagaactatgcttcctctaccctgggcctgcctctctcccctccatgccaaattcaagtgragctgaaatccagaatactacctgcaaagggattgaaagtagtgtttcactttccagtctctgcaataaaggatgaccctgaagacggaggttgaaaaagatgagtcaattcagatcatttcccagaaatcgaagagggtggcacataataggattacacgacccaaaccatggcatgtgaggaatagcataaggcagggatgacaaatagactttatcttgccagc

SEQ ID NO: 482529 - DNA, 636 bp, Homo sapiens
gatttttccttgataatattttttcatctatatatcgcttataaatatttcacttayatttactgcgtacccactctgtgctaggcaccatgttattggaagaggtgtagcagtaagcaaagcgtatattattattgttgttggagaaaggccaactttgccttttaacaaatttactttatatctaaaacaagaaacaaagaaaagaaaagaaaggaagccagccatcctgggccctttagaatacatggtttttgactggtcattttgaaaatctattgtgctatcttcaactacttaagtaaacccagatttttcttccctcattttcttgctttcttccataagaaaagtaaattcattaactcagtaaaacagagtagtccagatccaacactcaaacacttagaatatattgttagttaggtctcaattgtacagaaacatttctacctttaaacagacttagatggcacctattcaaaaaagatatatgagtgtgcacatgggagtgtgtggggagggggaatagcatttagtcttttattaagaaggaaactacatgaccagaagctgctggttctcatttaagacttaaaaaatatcttttacttaatcatttctagaggatcaaac

SEQ ID NO: 482530 - DNA, 621 bp, Homo sapiens
gctcgtgaatgtacattgatattgagtagctatttacaggattaagggatttagctactttatggatgacttaatgtcaagaaattcctagctactatactttatgtaagcacaaacacttttttaaagaaagaataaatgctgtcaagtctctggctataactccttattgaataactctgagtaaytcactttatctctctatgccccagttcttttaccaaagaataaagtagtcattttccttactcattcaatggacattatttgacaaaaaggcacttactagataatggtcaggaaataatacaaaagataaaacattcaacacttgattatctgtatatttgtatgtgttcacatttttatctaaatttaactcataacaacatctacccagcactatctcagtgccctcattcaatcaaaataattgattcactaaattagagcttcattccaggggtttttgttttttatttgagcagaaatgggagcatgaatatgacaaggttatggtgagactagaccactcatcaataaaccaccatcagtacattgccttgcataactgcaaaacataatttcctaactgtgtttcaggtttttggcatgaaatat

SEQ ID NO: 482531 - DNA, 621 bp, Homo sapiens
gctcgtgaatgtacattgatattgagtagctatttacaggattaagggatttagctactttatggatgacttaatgtcaagaaattcctagctactatactttatgtaagcacaaacacttttttaaagaaagaataaatgctgtcaagtctctggctataactccttattgaataactctgagtaactcactttatctctctatgccccagttcttttaccaaagaataaagtagtcattttccttactcattcaatggacattatttgacaaaaaggcacttactagataatggtcaggaaataatacaaaagataaaacattcaacacttgattatctgtatatttgtatgtgttcacatttttatctaaatttaactcataacaacatctacccagcactatctcagtgccctcattcaatcaaaataatkgattcactaaattagagcttcattccaggggtttttgttttttatttgagcagaaatgggagcatgaatatgacaaggttatggtgagactagaccactcatcaataaaccaccatcagtacattgccttgcataactgcaaaacataatttcctaactgtgtttcaggtttttggcatgaaatat

SEQ ID NO: 482532 - DNA, 599 bp, Homo sapiens
tggcgctcccactgcctccgtccatgcccgatggctttcatggagcactccaagatcctgtggtctcatccrttcctggagtcaagaacacctgaatcactaaaataaaatgaggtttgaaatgtggtgtttactatttagagtgatcttaaatatttacaagtagcataactttgtaaaaaaaacaaaaacaaaacaaaaacaaaaaaaaattgttattcagggaccttctcgaacaaatgaggaaatctttaaaaatcaaattaaacttctgaaattagtacaaataaacgcttgtgaatctttaggattttcagtggaaatacacagtgaatttttgtatgtgtatatgtgtttgaacggttatagttaagcatttatatttttacagaaggctttatgcctgctttttttggtttcttgtttgtttggtttggttttggttctttgttttgttttattttagttctcacaacatttccaaccctaaatggctcagcaaataaagttgccgtgttttatgttatttgcctcaggtcatgcagaggtttttagccagggtgtttttaatctgctgttttaacctgtcagcgcatcat

SEQ ID NO: 482533 - DNA, 619 bp, Homo sapiens
ctggcatgcttagtgtggaaaagtggagattagtatttactgcttatttctttgtacagcatgctgggaagacatcttcttaggggccaaaattttattatactcacagtatttgtttttttcaatactgaactgtgatcagaaggcatgttgctgatcattgttaatcaagtcgtgagtggcttcacatasgggtgcaacctcttttatttgctacatatttctgggcggcagtcatggctaatgctcttcagaattggccgcagtgccccttttccaatctacttcatgactcattaaaaaaaaccacttgttaactaaattaaaaacctttccttttatgaagagaaactagatctctcctatattgctggtggcaatgtacaatggtacagctactctggaaaagagttgaacagtttctaatgaaaccaaacatgcaacaaccatacaacccagcaattacactcatgggcatttatcccagagatttaaaaacttatgttcatacaagaacctgtacacaaatgttcaccgcagtgtattcctgatagcccccaattggaaacaacccaaatgtccttcaacatgtgaatggttaagcaaactgtggtatatc

SEQ ID NO: 482534 - DNA, 578 bp, Homo sapiens
ccaagaacctcgatcttggattttctagtctccagaagtgtgagcaataagtgtctacggtttaagccacccaatctatggtatttttgttatagcagcccaaagtgaccaaaacaaaggccatctaatgaaccttcctccccttttcaatttcaaaatagcctgtgcaatcttttaattaatatcctcttgcctgagcttgaacttctcttgtgaggagacagaaaacattttgcttctgaccagaaactgccatcacacatgtttctttgttctttgatgttgacacaagtatacagcctttgaagaacttttactactgcggcaaactagacataaggccacttgtgtgccctcacctttgcactgtctttttctcatctttttaaacttagctgttgtggagagaaggacaaaaaagtacacaggtgatgttggtgtgytggagtatatacaggattgaagtttgatttacgtacttcactctgagggaaacacaaaccaggcacagaaagttggatccagtaagaaatccttagtattgggagggaaggggaaattctgaatgcagatgtgta

SEQ ID NO: 482535 - DNA, 596 bp, Homo sapiens
gtatatagggtaaattaaagtctactgcttttgacattctccattcataagttttcttggctctttcttcaaatttggctttataaaattcctatcaatttttaaaaatttacactcttggatttcctatgcagctaggaccttggacccatcatgtctctgaaaccatgggtaaaggtcacttaacttacgtgctctctgctggtgtgtcagaggaagatatcagacataaacatagagtacgagatgactgaccaccaactctaggaggatgttttcttacattattatgcaggagaaccatgtgcttagcacatacctaactgaatccaacatagcaggctattgtaatacagaattcaagaggcttgaagaatcataggttgcttacaaaagagctataagagctgagatckggctgtctccacttagtcagatgatcctagctctgctacatgttcacccttgatagaaaaaaaaaacacacagaacaacaacaacaacaacaacaacaaaaacccaaaaaaacctaaccctttaaagagtgaagactatactaagaagataaggcagcatgacaggcaactgtggggggc

SEQ ID NO: 482536 - DNA, 410 bp, Homo sapiens
gagagagtacctacttccctgtaaggacatgcggtggatattgcatgtatcactgcctctcatatcgctttagccagaaatgarttacccggtcatacttagctgtaaggaaacctgggaaatgtagttttcagcagaacaacaatgtactgtagctggaaaataggttcttattactgaggaaaaggatcagaaataggcaacttgcatgctctgccacatgagctagagatctagataaggtgaaagtccacatgtgtttttccttagaaagactaatttcagtttgtcttcatgccagaatgacattttccaggcaccactttcaggctaagatttcccttatgcttcaaccattagtctctcgaggcagtagtaaaatcttattcattattgtgctccccagcacg

SEQ ID NO: 482537 - DNA, 473 bp, Homo sapiens
tgtaacctctgctccctgcccccrggagtttccccactcaccccacttatgtttcctgtgatgcagggtgcaattagtgtttccagagcagagttaacctaggcccttatcagagctgctgtgtgagactaagttcattatagtctttacccaaaccagaactttattggagacataaattacttttattttcattgaaaatatttgagatgaactatgttagaatcctcgctgagaaaatataccctggacctataatcagtggagaggtgctacctataaaaaaaagaaaaaagaaccgtagggtagacttttgcactgacacctattttatattttattatttgccctgtactatttcgtcaacttccatcccctctcctggtatttattagcagatgggcatagctttctccccctcagagaaccttcaaaagagtgaagcacatggcagattctctcccagtgagcga

SEQ ID NO: 482538 - DNA, 473 bp, Homo sapiens
tgtaacctctgctccctgcccccgggagtttccccactcaccccacttatgtttcctgtgatgcagggtgcaattagtgtttccagagcagagttaacctaggcccttatcagagctgctgtgtgagactaagttcattatagtctttacccaaaccagaactttattggagacataaattacttttattttcattgaaaatatttgagatgaactatrttagaatcctcgctgagaaaatataccctggacctataatcagtggagaggtgctacctataaaaaaaagaaaaaagaaccgtagggtagacttttgcactgacacctattttatattttattatttgccctgtactatttcgtcaacttccatcccctctcctggtatttattagcagatgggcatagctttctccccctcagagaaccttcaaaagagtgaagcacatggcagattctctcccagtgagcga

SEQ ID NO: 482539 - DNA, 583 bp, Homo sapiens
ctttctaataattacataataatgtaacttactgaaatggacaccgctgttaagcactctatgaggccttttataggcattataacaaatcttcatgccagtcctatgtgataagtaatagaaattcttttttctctgccctcagtatggagaagccctagtcatgtgtttatggattccataggtaatgacatataagtattgtgattgggctgctttgtcctttatcttatttcataactgttaggcaggaagaccagttacctactaagtacgttactgtagtgaggacagagggaagctcaaacaaggctgaatcttaaaactcttactgagcaatgggtgggagcatttaatactgaattactgtaatataggagagytcgttgtatggatttttaaaacttttttcaggctgggtgtggtacctcatacttgtaatcccagctctttgggaagctgaggtgcaaggatcacttgaggccagaagtttgagaccagcctgggcaacatagtgaggctccatctctacaaaaaaaacttttagtgagctgtgtgtgatagcgtgtgcctatagtttcag

SEQ ID NO: 482540 - DNA, 583 bp, Homo sapiens
ctttctaataattacataataatgtaacttactgaaatggacaccgctgttaagcactctatgaggccttttataggcattataacaaatcttcatgccagtcctatgtgataagtaatagaaattcttttttctctgccctcagtatggagaagccctagtcatgtgtttatggattccataggtaatgacatataagtattgtgattgggctgctttgtcctttatcttatttcataactgttaggcaggaagaccagttacctactaagtacgttactgtagtgaggacagagggaagctcaaacaaggctgaatcttaaaactcttactgagcaatgggtgggagcatttaatactgaattactgtaatataggagagctcgttgtatggatttttaaaacttttttcaggctgggtgtggtacctcatacttgtaatcccagctctttgggaagctgaggygcaaggatcacttgaggccagaagtttgagaccagcctgggcaacatagtgaggctccatctctacaaaaaaaacttttagtgagctgtgtgtgatagcgtgtgcctatagtttcag

SEQ ID NO: 482541 - DNA, 562 bp, Homo sapiens
tctgttcctcatctctgagctctttccccccaaactaatggtagagaacaaaggaagaatcattagtatagaagcagtcaaaagagcataaaggagaagaaacttcattacaaacacaacatagcrtgggaagtcaacctcacaatttattgactgtaaaggtttaaaaaaaaacaactccccaaactagtaagccctcagttaacaaagacacttaagggtatgtcatttgtccagtgagttaaatagaaaaaaagctacctgaatgctcaagagataagcgatagcagaatgttaatcactgacataaagatgcaaataaaataagagaatattatgttcactccctttttccaatactgaactattttccaaactcccatttatgacacagaatcaagttaactgaatgatactgccaggggttcatcattctcagaagtttacttcccagattactaaatctttttatttgtatttcctccagaagaataacagaggaactatgaaactttaaaacaaaaaacagcgtggataatttgtaccactgcacttaaaagca

SEQ ID NO: 482542 - DNA, 605 bp, Homo sapiens
tgtggagactcgggaggggtgatttgggcaagaggccaccatgactgctgccaccgcctcctyagcccgcttctgctccagtgccagagccgggttgacgtcaggccctgcggagacagagaaccacagtcagagaggtgggcaggggacacaggtgagaagctattcctggttctgtacaacaaacccagggcaggaagggtcccaggggggatctgtgccatgtgccttccagggtcactatgttcacagcccaagcttcagggatgtcctggtccctccatcccccaagcattttgggaacctccaaggaatagccaccacctgcagctccaaggccctggatatccttcgtccaagcacaccccacgactgctcctccttgcccctctcttatgtctcatccaccacccccagcgcacacactctactccttccaagagggtcagggagtccccacaagagacatggttaggaaccacagagctgtgtgggctccaacccctactacctttgaccaagtctgtaacctggggcaggtgtctcagttccctcatctgtaaaatgggaaggataataatacctgcctcgggggtagtaagaga

SEQ ID NO: 482543 - DNA, 605 bp, Homo sapiens
tgtggagactcgggaggggtgatttgggcaagaggccaccatgactgctgccaccgcctccttagcccgcttctgctccagtgccagagccgggttracgtcaggccctgcggagacagagaaccacagtcagagaggtgggcaggggacacaggtgagaagctattcctggttctgtacaacaaacccagggcaggaagggtcccaggggggatctgtgccatgtgccttccagggtcactatgttcacagcccaagcttcagggatgtcctggtccctccatcccccaagcattttgggaacctccaaggaatagccaccacctgcagctccaaggccctggatatccttcgtccaagcacaccccacgactgctcctccttgcccctctcttatgtctcatccaccacccccagcgcacacactctactccttccaagagggtcagggagtccccacaagagacatggttaggaaccacagagctgtgtgggctccaacccctactacctttgaccaagtctgtaacctggggcaggtgtctcagttccctcatctgtaaaatgggaaggataataatacctgcctcgggggtagtaagaga

SEQ ID NO: 482544 - DNA, 605 bp, Homo sapiens
tgtggagactcgggaggggtgatttgggcaagaggccaccatgactgctgccaccgcctccttagcccgcttctgctccagtgccagagccgggttgacgtcaggccctgcggagacagagaaccacagtcagagaggtgggcaggggacacaggtgagaagctattcctggttctgtacaacaaacccagggcaggaagggtcccaggggggatctgtgccatgtgccttccagggtcactatgttcacagcccaagcttcagggatgtcctggtccctccatcccccaagcattttgggaacctccaaggaatagccaccacctgcagctccaaggccctggatatccttygtccaagcacaccccacgactgctcctccttgcccctctcttatgtctcatccaccacccccagcgcacacactctactccttccaagagggtcagggagtccccacaagagacatggttaggaaccacagagctgtgtgggctccaacccctactacctttgaccaagtctgtaacctggggcaggtgtctcagttccctcatctgtaaaatgggaaggataataatacctgcctcgggggtagtaagaga

SEQ ID NO: 482545 - DNA, 404 bp, Homo sapiens
gtaatttctgagttatatgggaattctgtctagctttttcaggaagtgataaattcccacagtgaccgcaccttttttgtttgtttgtttttgagacaaggtgtcaggttggagtgcagtagtgygatcacagctcactgcagcctcaacctccggggctcaagtgatcctctcagctcacgctcctgagtagctgggacaatgggcatgcacaaccaggctaggctaattttttctgttttttgtagagacaggatcttgctgtgttgcccaggctggtctcgaagtcctggcctcaagcgatcctgctgcctcagcctcccatagtgttgagattacaggtctgtctctattttttttttttactgtctctatttttaaaaaaattactatcggtcagtcat

SEQ ID NO: 482546 - DNA, 568 bp, Homo sapiens
ctgcagccacgctttgatctgtcagttcgcatgtctctcacctatctctcctccactctctgtccacctccgtttctctttctgacagtcactatctctccttcgctttcggcctccacttctcgctgttcctcgcggcacagggccttggataaactacttaaccttaactaagccccagcctcctcatctgaaaaatgggggcaataatagcaccacccttagcgttgctggatgggtgaaattaayatttgtaaggcgctcagcacaggcctggtgcttggaaacactcaggtaataggtgtcacaatcaccatttcctctttgcgtctttccttctcaccacacctcgtcctcgtggtttttccacccctttggccttcctcttcccctcgttcatggtttttgttcccccttctccgttctctgagctgggcaagcctcccctcactcccaaccccacacctagcctttgatccccagcccagggcagtcctgcccagccagggggagagggtttttctaacgccgctgaatccttccctttgggagtccctcatagcctacc

SEQ ID NO: 482547 - DNA, 595 bp, Homo sapiens
gttgacaagttccttgagaacagggatcatgcctcctccttccctggcatatcctcaatgcaaggcatcatcctgggcacagagccaggggactcagagcctcagtgaccaaatgcaaggccactctgtttgcaagcccagcgttctcactttagaagtgagtgctatcctcctcccttmctctggaggacagaaagcagaacagggatgagagctatgactgtgaagcatcagcaatcaaatagaaactgcgagaccacgcctgaaatatgatctctcttcatcttgctaggctgcaagcttctcttgagagtttcttcaagttttaatcttaaaaatatatatttgccaatctcctatgtatattagacaatctgctaggtacatttgcatacattattttatttaactctcacaaccctctggagagataggtagaaatattcctgtctcgtagacatgaaataaaggctcaaagagatcaagtgacctgcctaatgtcacaccttgggaagggctgatggggattcaagctaggtttttatgccttgctgtgacattcaatgcatttcatttgtgaaaatttcctgcctgc

SEQ ID NO: 482548 - DNA, 639 bp, Homo sapiens
tggtgggacttgtttgtcagaaagaatactaaatgccttagtagacattttaaaatgaagagcagtttctttttgcctttgtktcctcatagctgagctcccacatatcagtaagaacacacaatgtttggttttccattcctgagttacctcacttagaataatagtctccaatctcatctaggtcattgcaaattctgttaatctattcctttttatggctgagtggtattccatcatatatacataccacagtttctttatccactcagtcattgattgatgggcatttgttgttaactagcaacccaggaagccataagttttcaaagtacattcaaattctttgaaattagaaatactactgtctttaccaaactttggaaactgggtgctgagaacaaagtggtacgtttgctttttcgtacatgacattatgtagtaggatggtacacaagcattttttttttcttggtaaccagaggaatgtcaacgaagtctattttaatgagtgaacaatctcatcttgactgactgactcatctgctggttgcaacatgtccacacatcccacaagacctctgaaaacactgagtgagtcagggaggatgcagaagctccaatgtgagggtgtctgca

SEQ ID NO: 482549 - DNA, 613 bp, Homo sapiens
ctttggacaaaataaagttcagaactcatgttcatattaagaactggattataaaagccaagaggcatagcaattattttaatatataaatgagtaatgtgtatttagaaaaacacccatgaccaaactccatcaaatctaattttcccagagttaagtgtacatctagtaaatctattcccatataccaaagaaaatttttagcaagagctacaataagcttccttctgaaggaataatcttgtgatttcatgcgagaaaaatctctccttgaggtgaatgagagatgaagttgtgaaagttacagttggaactattttgcttttcccttcgcttttccctttctgaccaaatgacaagagaacattttctacttttcctggattcttttattgttttctctgctaaaagcaaatcaaatattacaaatacccttcaactcaaattagccttaagccccataagttatatttccaagagccttttgtggtggaaagamcctgccaattttggttagagaaatttctttaggctcgcctttgcaggcaaggcaagtgacgggctttctggttttcctggtaaccaagaatcagtgagaagcacttgtactaga

SEQ ID NO: 482550 - DNA, 495 bp, Homo sapiens
gctggtataccgtggctgcctcaggaatagactgggttttgctctttgtcgagaacaccagggacatcatcttttgtgttctttgtgcatcagctcaagggcacgtgtgcggatccatcttgccrctggtgacgttcactggtatcacttgttaagcgctgcctgcctggtttctgcaccgtgaatgctgttttcttctgatcctatcttgtggtgagagctattctgtggttctccagaatatcggccgctcattttagcatcaatgattcttatctgaatcaagtagtactaagaattgatttgactttaacataaagaatttccaatgtgagaagatttcagtattcatggctacagatgccaagtgtgggcaacttatcttttatgcgccttcaacaaagccatgggagcagagagagggaaagaaaatctgaaccagtatgagtcaactggcacatcggctcacctcgatagcatttgcacatttgactg

SEQ ID NO: 482551 - DNA, 641 bp, Homo sapiens
ggagcagagagagggaaagaaaatctgaaccagtatgagtcaactggcacatcggctcacctcgatagcatttgcacatttgactggaagcctctggcttgtagaattttttcccactatagtatagaacactccacttcaatttttacttgtttaaaagaatcacatttgtttmatttccactctgacctgatctttgctctgccacagggactcttcacttggcgatgatgagcaaagcatccggccttggacctcctgcttcccagagcctgcagggctgtctcacttcctccagaagctctcagtctgctgccatttcttgggttcttcatccttcctgtggacctgggtctccaactgctgtgatttcccatcagtcagaagaggtccgcagcattttgtacagtgcaggtctaacatggcagattctctcgggatgggctggcacgaaagcaggtttctttcacccttatgctgaaacatgtttttgctggagatagaactctgggcttttgttttctcccttgcagaaccttaaagagttgtcaaattgtctcctggtttctgctgtttctagtgaagaatgaagtcagtcctcatgcatatcattgctcctgggaatgtaacgtctctcctcc

SEQ ID NO: 482552 - DNA, 496 bp, Homo sapiens
ctggattttttctgagtaagattgttctttttctctttttaaaaacaaaactcatctcgcatatatctgctctcactttctctgtgggtccgagggaactcctctgtgagacagaaaattagatgacagttttttcaaaccccttgtccccgattattagtttgtaggataagttcccaaaaaccacagaggggacaaaatataaagtgtagtttcctactttcattttcactttcagtgttatataattttatatcytcctttgcttatagctccttaagaacctaagcatcatgatatgttcttaatttgtaccattttctaccacttaatatggtgatcgtcggtgacgatggtctgacggtttgggggtttcttttaaacatgtgctccctcttctggttgaatggatgcttcaaactggaatgaaatcaaacacctgtgcatcttttgtgcatctttgattcaggccattggtatttgttaaaatcataag

SEQ ID NO: 482553 - DNA, 545 bp, Homo sapiens
ttttctgagtaagattgttctttttctctttttaaaaacaaaactcatctcgcatatatctgctctcactttctctgtgggtccgagggaactcctctgtgagacagaaaattagatgacagttttttcaaaccccttgtccccgattattagtttgtaggataagttcccaaaaaccacagaggggacaaaatataaagtgtagtttcctactttcattttcactttcagtgttatataattttatatcttcctttgcttatagctccttaagaacctaagcatcatgatatgttcttaatttgtaccattttctaycacttaatatggtgatcgtcggtgacgatggtctgacggtttgggggtttcttttaaacatgtgctccctcttctggttgaatggatgcttcaaactggaatgaaatcaaacacctgtgcatcttttgtgcatctttgattcaggccattggtatttgttaaaatcataagggattttgaaacaaagatgatagagaagaggcctctaccaacttttaacaatcacc

SEQ ID NO: 482554 - DNA, 545 bp, Homo sapiens
ttttctgagtaagattgttctttttctctttttaaaaacaaaactcatctcgcatatatctgctctcactttctctgtgggtccgagggaactcctctgtgagacagaaaattagatgacagttttttcaaaccccttgtccccgattattagtttgtaggataagttcccaaaaaccacagaggggacaaaatataaagtgtagtttcctactttcattttcactttcagtgttatataattttatatcttcctttgcttatagctccttaagaacctaagcatcatgatatgttcttaatttgtaccattttctaccacttaatatggtgatcgtcggtgacgatggtctgacggtttgggggtttcttttaaacatgtgctccctcttctggttgaatggatgcttcaaactggaatgaaatcaaacacctgtkcatcttttgtgcatctttgattcaggccattggtatttgttaaaatcataagggattttgaaacaaagatgatagagaagaggcctctaccaacttttaacaatcacc

SEQ ID NO: 482555 - DNA, 545 bp, Homo sapiens
ttttctgagtaagattgttctttttctctttttaaaaacaaaactcatctcgcatatatctgctctcactttctctgtgggtccgagggaactcctctgtgagacagaaaattagatgacagttttttcaaaccccttgtccccgattattagtttgtaggataagttcccaaaaaccacagaggggacaaaatataaagtgtagtttcctactttcattttcactttcagtgttatataattttatatcttcctttgcttatagctccttaagaacctaagcatcatgatatgttcttaatttgtaccattttctaccacttaatatggtgatcgtcggtgacgatggtctgacggtttgggggtttcttttaaacatgtgctccctcttctggttgaatggatgcttcaaactggaatgaaatcaaacacctgtgyatcttttgtgcatctttgattcaggccattggtatttgttaaaatcataagggattttgaaacaaagatgatagagaagaggcctctaccaacttttaacaatcacc

SEQ ID NO: 482556 - DNA, 621 bp, Homo sapiens
aaaaatgcatggcagatactygatggcctttctgtcctccctgcaccacccagaggacatacacagagtgatccgccctcttttccctggtgaatcacgcagcctaactcaccatgttcccggccacgccacagtgaatcacgcagcctaactcaccaggttactggcctaactcaccatgttcccggccataccccagtgaaccacacagcctaactcaccatgttcccgaccacaccctggtgaaccacgcagcctaactcagcatgttcccggccacatcccggtgaaccatgcagcctaactcaccacgttcccggccacacagggccaagaacagcccaggcaatgttaaggagcattgcatggaggagccacttgcagatgcggtaacccactgtgcggcacagaacctccccgcggggcaggtgggtgcacaggaaagaaaccaacatggagctgaggccccagagaggtccctgtgctcatgactcacagagacggggacggcagcaaggacacagcagggccatgggcagaggaaggacaagcaacgtggggccatggggagggacggaagacagaagtggatcccggctctccacaaaacacaaaaattaa

SEQ ID NO: 482557 - DNA, 470 bp, Homo sapiens
cctctacacccaggtccttctcagttcccaccggccgggctgacgctggtctccagggtgatggagctgattcttcgggtttccctcagctcagatcaaatttaacacagcaagaggacacccactgttcccaccgaagaggcagaaagctggagttcgcrgtgcctttctcccccaggctgggatggaggaggcagcatgaggccaccgtcattcccagtgtgtgagctggggccatccggaagttgcgattcatgtcagacactacggggccgaggctcatgtgggtgtgcgtcctctcagggtcacacctcagcaaggaagctcagcagaaggtctcccaggtccctgagccaccgttcctctgactgcttgtacccttcccgagatgctgctgcagccccacgccactcagagtgaccagcctgggccaacccctgggttctgacaagatgtgctgtttaggacta

SEQ ID NO: 482558 - DNA, 470 bp, Homo sapiens
cctctacacccaggtccttctcagttcccaccggccgggctgacgctggtctccagggtgatggagctgattcttcgggtttccctcagctcagatcaaatttaacacagcaagaggacacccactgttcccaccgaagaggcagaaagctggagttcgcggtgcctttctcccccaggctgggatggaggaggcagcatgaggccaccgtcattcccagtgtgtgagctggggccatccggaagttgcgattcatgtcagacackacggggccgaggctcatgtgggtgtgcgtcctctcagggtcacacctcagcaaggaagctcagcagaaggtctcccaggtccctgagccaccgttcctctgactgcttgtacccttcccgagatgctgctgcagccccacgccactcagagtgaccagcctgggccaacccctgggttctgacaagatgtgctgtttaggacta

SEQ ID NO: 482559 - DNA, 656 bp, Homo sapiens
gacgtgtgttccccaagttcacctgggaagcgccaacacccggggccgcataaggcgactgtatttggagaaagtgtctttcaggaggcgattgaggttatgtgaggtcgtggggtgggcctggctccagcaggactggtgtccttgaaagaagagacactggagaagaagccacgtgaggacacaggaggagacggccgcccgccagcctgcgcagtctcaggagaaaccgaagcccggacctcagacttcagcccccagaacygtgacggagtacatttctgttgtttgagccgctcaggctgtgaggcttgttagggcagccctagggagactagcaggcttcccgccagaggaccacacaggaggccctcctggtccaaaatgtcatgaccgcatgatggagctggggtgtccatggggtttcctgtctttgagacatgatgcgttacaggtttacttttggaaatgtgggtacagccagggtggccccagtcagacccaaacaagtctcttggcctaagggaccctgggcctaccttcctctgagtgacaaggacactcagcgtgcacagccacaccaggtggctcccaagccctggcatctatctccataggggtgggatggcccttaaggaagccattgccgtccacag

SEQ ID NO: 482560 - DNA, 443 bp, Homo sapiens
tgcgcagtctcaggagaaaccgaagcccggacctcagacttcagcccccagaactgtgacggagtacatttctgttgtttgagccgctcaggctgtgaggcttgttagggcagccctagggagactagcaggcttcccgccagaggaccacacaggaggccctcctggtccaaaatgtcatgaccgcatgatggagctggggtgtccatggggtttcctgtctttgagacatgatgcgttacaggtttacttttggaaatgtgggtacagccagggtggccccagtcagacccaaacaagtctcttggcctaagggaccctgggcctaycttcctctgagtgacaaggacactcagcgtgcacagccacaccaggtggctcccaagccctggcatctatctccataggggtgggatggcccttaaggaagccattgccgtcca

SEQ ID NO: 482561 - DNA, 614 bp, Homo sapiens
gatatatcttagtgatgttttcaggtaagtacacaaaagtatatctcattcttttttaagggctgcattgtattttactgcatgattgtgtcatttatgcaacacattctctactgaagcatttgtagggattttttcctaatcatttactaccactacaaaaagtgatgcactgaataacagcgtgccagccagtgctagggtagttgtacaatcaatatctagaaacagaatccttgagttctaagggtaggggcagaaaatattattaaagataacaacccagtgccctamgttttgtgacaatgtccaaacacaacttttagactctgcaaaatcgtttttatttaccctcttatattttcctaattgaactaattttttctcaagcatggagacacacagcccccatgtctaaccttatgtaaagttagttacgtgtaaaatgtgttagagttccaaacaatcgactcaacaacttttaggatagaatgtacttataagtatgagatttcttgcagtagacattattttgactggtttctaaacaaaaattactcaattcgaaaagtatactgtttagagtatgatttgatcccttttaaggttggaac

SEQ ID NO: 482562 - DNA, 663 bp, Homo sapiens
tgttgtctaaaacattgatgtatggttaaattaaaagtgtrgttttaggggataaactaaaaaataccagaatgttacattatatataaaggacaaggagatttaaattagtaataagccaatctaaattgggttttcttgatatccttaattattgtacaaaggactaatggtgagtgtatatatatatttaaagcttcagcatctattaaaatttgtgtaaaattaacttatttggcatgttttgttaaatgttcttattaaaaatatgaaacactagtgaaatatggagactttataacaaagtaaatgagactgatttttttcttttaatgaacggactggaacatataatgtatatttaatgaactgactagaacactgaatatatatttacttcaaattggtcatttattccaattatccagtcatgttcagacttcgtgtttgggattttcatatagaaataggaaaatagaagaaaaccatcacaattattttatgattatgcttcactcttgaacttacttatatacctaatcacttacattatgtgtcacagttggctgcaaatgatatttagagcataaaaaaatcaaatctagctttaagtgattagaatttgctgtcatttagtacattaaaataggaatgccaggcttt

SEQ ID NO: 482563 - DNA, 630 bp, Homo sapiens
taactagggcaaacaaatacggcaagttttgctccttgcttaatctatgaacccaatagtttcatggtgtctcagttagaggtcattctgtccaacccctgtacttctcaaatgatgaagctatcgttgtattaatagcttgcccaagtaagattgccagatttagcaaataaaaayacaggattaccaattagatttgaatttcagataatcaatgaatcattaaaaaatataagtatataccatgtaatatttgggacatacttaccctaaaacataatttgatattgatttgaaatttgaatttaactggtgtcctgtattttatatggcaaccttatgcccaaggtcaggcaaccaattagtaacagaatctgcattagcagccaggtgtctggtttccaggccagtattcttcctcccacatgacactgtgatgctgatgaaagtgttgctttagaaactcatcttgtggttgtgcatgtttgaagttttaatgtagtaaccattactgaactgattttgaaaggagctcatgggtcattaaaggacaaaagcgatgtcttttatacaatcaatgggtctgattctgcaaatgacagtccagtctgagagcgttaatggaaggca

SEQ ID NO: 482564 - DNA, 568 bp, Homo sapiens
ctgcactgctctgcctccgtggacacggtcccctccttccaaaaccccttccccatgtcagaatgtcaataccctaccatcatccaaggccttgttcaaatgccataytctccacaaagcctttaaatcaggcagagttcttagaggaaagggacagaaatctaacgtatgtaaaagaaaatgtattagtttcagtggttggaaagaatactggggtggcctacatgttccgagggatggctgcgggaaccctagggattaatgcaactagaattttctctctaactctttcattttacattatctcccccagcccaacaggctcagaagtataagacaccctcccccttctctgtcattgttcatttatcatcccaggaaagactctgatgagccctgtttgggtcatgtgcttatccctgccctaaccacagagcccaagggaatagagtattatcattagccaggccaaggaggctggattgttacacgagaaagcaggtgggaggaaaacattccaggcagttcacagcacttgctcccacagttcattacattgtccatgaac

SEQ ID NO: 482565 - DNA, 568 bp, Homo sapiens
ctgcactgctctgcctccgtggacacggtcccctccttccaaaaccccttccccatgtcagaatgtcaataccctaccatcatccaaggccttgttcaaatgccatattctccacaaagcctttaaatcaggcagagttcttagaggaaagggacagaaatctaacgtatgtaaaagaaaatgtattagtttcagtggttggaaagaatactggggtggcstacatgttccgagggatggctgcgggaaccctagggattaatgcaactagaattttctctctaactctttcattttacattatctcccccagcccaacaggctcagaagtataagacaccctcccccttctctgtcattgttcatttatcatcccaggaaagactctgatgagccctgtttgggtcatgtgcttatccctgccctaaccacagagcccaagggaatagagtattatcattagccaggccaaggaggctggattgttacacgagaaagcaggtgggaggaaaacattccaggcagttcacagcacttgctcccacagttcattacattgtccatgaac

SEQ ID NO: 482566 - DNA, 629 bp, Homo sapiens
acatttcaattcttcctgtgaatacattgggggtaatctattctcttccccttctttatcaagcccttwccattctaataatacagtcctaagactctgttataatatgccaagtctctctaagacatttaataaaatacaaattaaaaataccagcaggattgttttaactagtcaagatgattctaatgtttagatggaagaagcaacaaacagaaatagtgacgaaataaagaaggggggagctgtcaccaccagacgtcaaaacatattataaaaatataagaactaaaactgcatagtactgtcacatggccaaatcaacagctcagtgggatagaatatggatccaatgtccagaaatggatccaatatatacaggcacctggagtcaggggggaaaatatgagtcatgtaaatgcatagaactgggatatgagttagccactgagacaaaaataaagttagatccatacttaacagcatccatttttaggcttgacatattatttgaaactactcatacccaattacctttggcctggttaaaacttccccttcctgtatggttgtttgcgaaatagcccacttgttcctcatctcaccgacctaaaactcaacacacccca

SEQ ID NO: 482567 - DNA, 472 bp, Homo sapiens
cctgtttgttttcaccgccccagaagttctgctccaagcaacttgatctaaacctactgcagcatggttctaagacctttcatgggaagctgacggctgctggtgcaaactaatgagtaytttcagacacaaagcctccaattgagattatgaagtaatttattaggctcctactgcagtgagcacacaccgttcctgctcagaatggactaattaaaaacttccctaccacgtacaatttcaactgtgctggaaaaaaaggaacaatacctcagtggtaatttttcataaaaaggaattgataacaatttctaaaaaaaattagtaggagccttatattgcttaaatagacaaaactatcatctgtgtgttttggtgtgtaatgcggagtgctattgtcggtgcagaatagatctaatttcccacctctaactctgatgtgatgctttccctgagtttaactgaaacaaaa

SEQ ID NO: 482568 - DNA, 472 bp, Homo sapiens
cctgtttgttttcaccgccccagaagttctgctccaagcaacttgatctaaacctactgcagcatggttctaagacctttcatgggaagctgacggctgctggtgcaaactaatgagtattttcagacacaaagcctccaattgagattatgaagtaatttattaggctcctactgcagtgagcacacaccrttcctgctcagaatggactaattaaaaacttccctaccacgtacaatttcaactgtgctggaaaaaaaggaacaatacctcagtggtaatttttcataaaaaggaattgataacaatttctaaaaaaaattagtaggagccttatattgcttaaatagacaaaactatcatctgtgtgttttggtgtgtaatgcggagtgctattgtcggtgcagaatagatctaatttcccacctctaactctgatgtgatgctttccctgagtttaactgaaacaaaa

SEQ ID NO: 482569 - DNA, 372 bp, Homo sapiens
ctgggacagaaatgatgtttggcaataccagcctctagcaatgaagccaactttaaatcagaaatgctgtgagagtgtgggatgccagattgtgttttacagaggctggaaagctccaatcttgcctggcaaggctgtcagaaggatctctccaactctttggttttcacagcctctggagctgagctagctgctcactacacattttcatgaccatcgagtccctgtgaatggaagtgttctatttcatactgtgggttttggtgtgaattctagatcrcagcttaggttaaactacaaaacatgggtgtttctgtgggacaccagaggcactggagataatttgggtgaatacacagaaatctgtggaag

SEQ ID NO: 482570 - DNA, 372 bp, Homo sapiens
ctgggacagaaatgatgtttggcaataccagcctctagcaatgaagccaactttaaatcagaaatgctgtgagagtgtgggatgccagattgtgttttacagaggctggaaagctccaatcttgcctggcaaggctgtcagaaggatctctccaactctttggttttcacagcctctggagctgagctagctgctcactacacattttcatgaccatcgagtccctgtgaatggaagtgttctatttcatactgtgggttttggtgtgaattctagatcgcagcttaggttaaaytacaaaacatgggtgtttctgtgggacaccagaggcactggagataatttgggtgaatacacagaaatctgtggaag

SEQ ID NO: 482571 - DNA, 588 bp, Homo sapiens
ttagaaaagttattccaaggccaggtgtggtggcttatgcctataatcctggcactttgggaggctgaggcaggaggattgcttgagtccgggagttcaagaccagcctaggcaactgtgagatcccatctctacaaaaaatacaaaaattagctggatgtagtgatgcacatctgtagtcccagctattcgggaggccgagactagaggatcacttgcactcaggagttcgaggctgcagtgagctatgatcgtgccactgtggctgcgttgtggatattgtatgagagaaggacatgactgtaagtagggagggcagtcgggaggttattgtagttgtcagacaaaagatgatggtggcttcaactagcggtggcagtggggtttggcatgtaggtagatttgaggtatatttccaaagtacacctaccagcttggatcaattgcagaagttacagtgactgaaattcatagaactcaagagctgggatggtatttaagagacatttggtccagttgtcttcattttatagwtaaggaagccttgatccaggaaataagcaaggctgacttgctcacagatgcaca

SEQ ID NO: 482572 - DNA, 546 bp, Homo sapiens
ctgggtgacagagctacactccatctcaaaaaaaaaaaaaaaaaaaaaaaaaaaaaaaattcaagaggatgtattgttcccattttaaccatagaaagagtgctattgttccttttctccacatggtggtgctaatgtagcaccaccatggagccgtattgccaaagacgaaaaaattcagcactgctcatcgttattaccagtctgtaagtggccacttaaaggccatttggagtacatgsagaccattaattataatgcatttccaaaaatagattaatcacaaattttaaaataaaaaatttaagtaaacagattcaaatcaatgagaggggcataagcatttgcagtttttcaccaagatcttgcttgtggcgtaggtcagcatcctgatttcttttccattatttattctcacaaaactaaaagatcctaaatctcagttagaggttgccaggaataacagcaagtatgtttggtggttctgtcaaatggctgtagatatttggctcacatgtagatctagaaattatgaacaaacgtctc

SEQ ID NO: 482573 - DNA, 631 bp, Homo sapiens
cctgccccgggttggccgaagctttgtcaggctggcatcacagtttaacctctccttctgcccaatcctgcttcctcttcccttcataggtgttgagccctaataattcatctgttaccccaaactctgctggaagcatctgcttccagaaaaccctacctatgacattttatatgagtccaaagggtgagtttctaaattatttggaataaataaatggcctcccaagaggactatttcaaagaacaagtttcaatgggagaggtgagctctgttacgttgttttgcagggggaaactgattsaacacttaacacattttagtcctttaaggaagagattgtgatcctctgttatcggcaaatacagaatttgtggctgagaggaaaggttttgattcagagacctatgggctaaatttgccttgaatttgatgtccatttgatgctggaaagcgacggtatgtgatgggagcaaagaacaagaaaagccaatgcaagtccaacgactcatgcagtttgaaggtggatctgtttgtgtcacgtctaggaaaaaggtgaagctgccactgctaatgggatggaagctcaaggaaacggaaaggctgtttccaaggcaatctgaagagccag

SEQ ID NO: 482574 - DNA, 631 bp, Homo sapiens
cctgccccgggttggccgaagctttgtcaggctggcatcacagtttaacctctccttctgcccaatcctgcttcctcttcccttcataggtgttgagccctaataattcatctgttaccccaaactctgctggaagcatctgcttccagaaaaccctacctatgacattttatatgagtccaaagggtgagtttctaaattatttggaataaataaatggcctcccaagaggactatttcaaagaacaagtttcaatgggagaggtgagctctgttacgttgttttgcagggggaaactgattcaacacttaacacattttagtcctttaaggaagagattgtgatcctctgttatcggcaaatacagaatttgtggctgagaggaaaggttttgattcagagacctatgggctaaatttgccttgaatttgatgtccatttgatgctggaaagcgacggtatgtgrtgggagcaaagaacaagaaaagccaatgcaagtccaacgactcatgcagtttgaaggtggatctgtttgtgtcacgtctaggaaaaaggtgaagctgccactgctaatgggatggaagctcaaggaaacggaaaggctgtttccaaggcaatctgaagagccag

SEQ ID NO: 482575 - DNA, 559 bp, Homo sapiens
tttcaaataagtccatctttctgaacattttaagcttctctcataaacataacacaatatgacatcaaaattcatatcctaagtcacatgtttgacaaagatgcaaaaggaataaacatggaaaaggaataaaagtgtgaagcttgggcgggcacagtggctcacacctgtaatcccagcactttgggaggctgaggcagrtggatcacttgaggtcacgagttcgagaccagcctggctgatatggtgaaaccccatctctgctaaaaatacaaaaatacaaaaatacaaatggctaggcgtggtgatgggtgcctgtaatcccagctactcagcggggttgaggcaggagaatcacttgaacctgggaggtggaggttgcagtgagcagagatagcaccactgcattccggcctgggagacagagggagactccatctcaaaaaaacaaacaaacaaacaaaacaaaacaaaaaaacacataaagctcagtagagaagaaagagacagcctcaacctcctgggctcatgtgatcctccagtctcagcctcccaagca

SEQ ID NO: 482576 - DNA, 582 bp, Homo sapiens
ctaacaaaaataagggtaagtttggaagagatagaaatgagaatatttctgactatatttttatacggtttttacttttgaaacatgtaaatgttttacatattcaaaaaaataaaattaaaaaagaaaaatgcactcccttaaacaaaatacaagtagaaacaaatgatccaaattatatttcagtttgataaaatatccacccagaggaaatagttactttgaataacatataaatgcaatcagtaggtttattattgctagtagaaatactggaattgtaattttaaaactgttttaaatacattttaggtaaagaaaataagtgtgtattaatgttattagaaaccgagattttcaacattaagacaatacatgataataaaagaaataaataaaaatgccataattttaattacaaacactatraattcattactctttttaaaaaaatcttacctctgtccaccaaaaagagtcaaagagcaataacagtcctgaaggaacaagacatctagtccccagatcttggtttctaattctccactaatatatataatggggttccctggaaaaaaacag

SEQ ID NO: 482577 - DNA, 595 bp, Homo sapiens
tgaacacttctgtgagagttcactctgtggaagttcacttctgtgggagttcaaggtcaccttatgctaacagctctccacctmaagcattcactgcctgtcccttccatccattccccctccctcttcatcttcttcatctgaagggaaaaggaggggctctcagaagtcaagcaagagctggtcacttacctccttgaggtttattataaaatgaagaaattctaaagcaagttacaaaaatgatcatacataaagagtttatattaaacaaattagtgacaaaaatgcagttcataacatatttacagaatttattttttaaggtcatttcatagtatacaatacaaagtgtggtcctggggataaacaactcatttcaattctgtccaagggtaactaagtgaataatttatttgaaaataacatcagaggtctaaatgtgaagccctttgggcatgtgaggttgaggctgcaaattccacctcactcaaagatctgagaccagggttctgttaaggaacattgaaactggaatgactccaacgtctgtagactagtggatgataatttttggaacatcatacaatagaat

SEQ ID NO: 482578 - DNA, 582 bp, Homo sapiens
ccacagaaagcctcaggcaaaaagtcactggttgggtgggagtcgggctggagtgcatggaaacaagagatgccaatggatctgggcaggcccttatcgagtcagcttccagccacctgctccaatttaggcctgagaggaatcatcctcccaaacgaatgatgccatgggcccagaaggaaggggggaccagaaatgagagagtctaagaaatacctaccacagtagaagagatctgggcttggaacacaaagattggtcacacagcaagcatttattgagtgaataatacctgccagacactctactaagctattctccctcatgaactcatttaatcacaattctaattctatgggttatttctatgtaacagaagagaaactgaaccttaaatggggraaccttctgccagttagtaacttaatcccaaatccaacaccaaaaccatatcccaaaaaaagggattttttttaagtaaattttttttcttcaacttttaagttcaggggtacatgtgcaggatgtgcaggtttgttacataggtcaacatgtgccatggtggttttatgcacagatcaa

SEQ ID NO: 482579 - DNA, 598 bp, Homo sapiens
aaaaatgatcttgagactacagttttgcaataaataaaacatatatatgtattcacatacatatacatatatatagtaaaagcttagaaaattatctgaaaatacccacaagaaggacattttatagatcagcagaaatagtttctattttaatgtatgaaaggctttgtttctctgtatataattctatgtttaacttccaagccttagaataatgctaagattcaactgtatctataagctgatggtcacaccttgcattacagatactgcacaagatcagactacaatttacttgcactgtaattccagatggacttcagaaccttaagatattaacaacagacatcatctttggctagagaataaagaattttggcaagaataaagaattttggcaagaaaaaaatcaaatagttacagcctcstgttataagagctgaaaatgaggcatacatacatggtacagttagaactaagaaggatgttaaaatctctgattgagcagagaggaaaaggcatcttcatagagtagaaattatcaagccaagttcaaaatatttcatatctattgattcctgtccctccctatcctcat

SEQ ID NO: 482580 - DNA, 598 bp, Homo sapiens
aaaaatgatcttgagactacagttttgcaataaataaaacatatatatgtattcacatacatatacatatatatagtaaaagcttagaaaattatctgaaaatacccacaagaaggacattttatagatcagcagaaatagtttctattttaatgtatgaaaggctttgtttctctgtatataattctatgtttaacttccaagccttagaataatgctaagattcaactgtatctataagctgatggtcacaccttgcattacagatactgcacaagatcagactacaatttacttgcactgtaattccagatggacttcagaaccttaagatattaacaacagacatcatctttggctagagaataaagaattttggcaagaataaagaattttggcaagaaaaaaatcaaatagttacagcctcgtgttataagagctgaaaatgagscatacatacatggtacagttagaactaagaaggatgttaaaatctctgattgagcagagaggaaaaggcatcttcatagagtagaaattatcaagccaagttcaaaatatttcatatctattgattcctgtccctccctatcctcat

SEQ ID NO: 482581 - DNA, 629 bp, Homo sapiens
aacgtatgcattggcctaggcctacacagggtcaggaccctcaatatcactgtcttccacttctgcatctcrtcccactggaaggtcttcaggggccataacacttatggagctgtcacctcctggaataacaatgccttcttctggaatcctcctgaaggacttgcctgaggctgttttacagttaacttttttttttaataagtaggagtgcaatctaaaataaccataaaaagtatagtgtagtaaatacataaaccagtaacataatcatttattatcattatcaaatattatgtaccatacataattgtatgtgctagaattttatacgactggccgtggaggtttgttgacaccagcatcaccacaattttgtattttgttgtgctatgacctcactaggtggtaggaatttttcagctcattataatcttatgggaaccctgttatatatgtggttcattgttgaccagaatgttatggggcacatgaccgtatatatatttgtatatacatgtgtacctaaccatatattaatatatgtatgtatgaatataccatttaggtacaaatacatgctctagtcaatgcttatttacatttcctctgagagcctatatttgaat

SEQ ID NO: 482582 - DNA, 486 bp, Homo sapiens
ctggcgcagagacaagaatcatcaaggggtgctgaatctagggcgggttgatgaggaacaggacatttccatggtcatagaatgattgcccacagattgcttctttcttacagaggagggaaggaaattgtaattcacagtgatgttatcagccagcaccatkcctgggagatcaccagtgcaggagaggtataaaatgctccaggggcaaggttctgagaagatgccctgccactgtatgaggccacaacctgctgtgtataacctcatctaagcacagagaagcaccaggtgaacccaagtggaaagtagtctattaaaaaggggttaggggccctctgcatccctccaaaatgtcaatgtcatcaaaaattttaaaagactctggaaacgttccagatttaagaaagctaaagaaacatcacagccctaggctgggtccagtctgggagtggaaaaaatgctgtgaggatattactgactcaa

SEQ ID NO: 482583 - DNA, 476 bp, Homo sapiens
tgcctgccttctgctgagctaggaggtccctgactacagaccgcctttttcactgacaagcaataccctgacttccgagactgctctagagatgatcacaccaactggaatggctgaaaaacaacttttgtaattgagccctctcctgatttgtcatatatttttttgtttccaaagcctcagcctctcttttgttctctggaacacttcccaagttaacttggaagtatttcccaggcgatagcatttaaatktggctcaaatgaattattcattgtataagccctgcctcagtttttttccaggctacagtgtgatgctggactggcacacgtaaggtgctgccgtcaagacggtgcctcatgatgaggtttctcttcaaataatctgatcaatcttttattctttaattcatagtacccctcccccaaccttttttcctttttgcctttgttagatgcccaggcacgccacag

SEQ ID NO: 482584 - DNA, 596 bp, Homo sapiens
  misc_feature (1)...(596): n = A,T,C or G
aatttcctaagtgctttttaaacaacagaactggactccctccctcctccattcccagtcgaatacgtcccacccagatccagctcaagggtgcagcacttgttccggccagctcacaatcgccctttggaagggaggtttcccgccatttcgcttaggaggagggtgaactcttctcccttcattctccactcgctgggggcccgagcccacaccaccttcctagcaaagcaagcagcgggacgccaaggccagcaggccgcattaagaacgctggactgagccaaaagcctacacagaccaagccgctcgggaaaggatcaacaactgccgacaacccggagggcgaaaacgcccgcggcgtaggggaagcaaactaggagatgcgcgggcccagcgccagcggcgggaggaggsagcgcggccgtcgcaggcgggagcgaaggcggggacggagggcgggctcgctccactcgactccggattggtcgagcttagagagccgagtgacgtcagcgggggagaacgcctgatttggttgngtggggcgcgggcggtgggggggaaaaccccaatggcgcaggcgcaactgccct

SEQ ID NO: 482585 - DNA, 614 bp, Homo sapiens
  misc_feature (1)...(614): n = A,T,C or G
acatgagataaaatcaaatagattgacattcaaaaatagtctaccaattaatatttaccaaaatactttacattaggtactatttcacacagtttacatataagaaacctggaactgaaatgcgtaaggttcctactaaagggctccctatattaaacaaaagagatgtgtttcaatcttaaaactattttaacttaaatcctacattgtttctactccagaatctctaaaataatacaaatgaatacatagattttcattaaaatgctgtgcaccttaatctttaataaccaaaatataattattacrtaaaacagtaatgcttaacccaaagcctgcatgtcccatgtaaaccaacgagcttgactgcccagctctagacctaatttcacatccaaaccctcattttctctataggaaaagaaaactcagagtcagtaatagtgcagaacattataccatctgattattaagaggtttatccctctacttatggctccagtagaggaaagagattccaatcaactgagcttttctttaggtggttattagctgttgacctgtactatcagtatccaaagacctaaaaatttntggaaatattcatgccggca

SEQ ID NO: 482586 - DNA, 555 bp, Homo sapiens
ttaaacaattacagttttgagtaggtagaaaatacgtaaatcaaagataccaattcttcaaatgttctctatgcattttactcagcctcaggttcatatgtgcctcaagatccaatggtgactctcagagataagrgcataccagatctctctagaaatttctcccttcatttgttaaagaaaataaagtttaatatcttaaaccataagataacacaacttgcagtttttaactgtaaagaggaaaaatgatgaaagtattgctaacttgacagaagacttttctttgacttttaccaaaaggggccatgaagtaatattcattcagtcttacttcttgtttgattcagtcttgtttcttgtttcattaaaagtaatggcaaaaaccgcaattacttttgcaacaacctaattaaataaccatggcttgaattaatctctaaaaatacttcagtgaaatttttctctaaaaataatagaattaagacaaaaagtaaataatagagcccttctacaaacctctgaattctttctgaaaagacagtcaaatttctc

SEQ ID NO: 482587 - DNA, 662 bp, Homo sapiens
ttttgagcaattagaatcagggagacagaaatctgagtttatgtaaaaggcttgatagaattatattctattctagactgacctaagatgtgaaacataggaaaaaaatatgacaaatgtaacataagtaaaaatatccaaataaaactgtagcagttatagctaatggtataaccaaacagcattgaccaaccccaacagaactttccatgatcatggaaaagttctatatctgcaccatgtccagtacagtagccactagccacctaagattatggagaattttaaatgaacctattgagctagtatgggtgagaaactgaagttttcattgtatataattttaattaaacttaaatagtgtgarctaaatatgatttaaagtccactaatccgatgcattcatggggagcttaaatttagaacacagtttattagggagagagtcaaggcttgtggattatagatgaataggttctggggccaacagtggtagtgatagcttaccaatttgggagaggagcagcagtttccttggtagtttaccagtgtggctttgtaaatattcttgaaaactcagactagagtttatttttttaatgcttcccggtgattctgtgagctattgcaaaccctatgacaaaagttcccaaatatttttc

SEQ ID NO: 482588 - DNA, 596 bp, Homo sapiens
gctgtgtgccaccaggaatcaactaaggcctgctgtgtctttcctgggtcacctttatcttactgtgtgcaacagggatcagatagagtatgatggctgtaactttatttaatgagtagagaatttgttttcttagggaaaacagctttgttatgcttcttattgttgaaaatactactttgccgggcgcggtggctcaygcctgtaatcccagccctttgggaggctgaggcgggcggatcacctgaggtcgggcattcgagaccagcctgaccaacatggagaaaccccatctctactaaaaatacaaaattagccgggtgtggtggcgcatgcctttaatcccagctactttgggaggctgaggcaggtgaatcacttgaacctgggaggcggaggttgtggtgagccgagatcgcgtcattgcactccagcctgggcaataagagcaaaactccatctcaaaaacaaaacaaaacaacaaacaaaaacaaaaaacacaaacaaaagaactacttcataaaattcttatatttgaatctgatatatgatacttgcttcaatataatctccagtgatttctgggaaggaattaa

SEQ ID NO: 482589 - DNA, 596 bp, Homo sapiens
gctgtgtgccaccaggaatcaactaaggcctgctgtgtctttcctgggtcacctttatcttactgtgtgcaacagggatcagatagagtatgatggctgtaactttatttaatgagtagagaatttgttttcttagggaaaacagctttgttatgcttcttattgttgaaaatactactttgccgggcgcggtggctcacgcctgtaatcccagccctttgggaggctgaggcgggcggatcacctgaggtcgggcattcgagaccagcctgaccaacatggagaaaccccatctctactaaaaatacaaaattagccgggtgtggtggcgcatgcctttaatcccagctactttgggaggctgaggcaggtgaatcacttgaacctgggaggcggaggttgyggtgagccgagatcgcgtcattgcactccagcctgggcaataagagcaaaactccatctcaaaaacaaaacaaaacaacaaacaaaaacaaaaaacacaaacaaaagaactacttcataaaattcttatatttgaatctgatatatgatacttgcttcaatataatctccagtgatttctgggaaggaattaa

SEQ ID NO: 482590 - DNA, 650 bp, Homo sapiens
aacatggccagggagagaggagggaagctgggtgcatggccccacgggacccctgtcatgcatgcaagatagaaggagggttctctatgaaaagcaggtgctgaagaggaggggtaaggagctgcatttttcctgaagaacctgtgtgctcactggggcccctagaaggatgaatgcaggaagagggcccgagccaaggtagtgggtcctcatgtgagctggcacccatctctaatgatgcatccaagggctgggccagtggtagggcagaggggggcacaacacctgcattccccagggmtcaggtctctcagtggagccaggtaaagaaggaagtgaagacaggggtggctgccagagtgagaagacaaggaggagttctgcagggaggttttgaggaggtcaaagagccggtgaggggtgtgatcaaggtggatagagcatgtcaagggggtagcatttctggggaaaccacacctggctcaggatgtggttataaacaccggatgctgattggaagggaaggcttttacagacaggtaagggtcagcttgggggctgagttgttacgggttggcctgcaggggcactggagccactagctatgagaagagaggtgtgggaactgggaaggcccgtgagcagggcac

SEQ ID NO: 482591 - DNA, 450 bp, Homo sapiens
ctcaggaggctgaggtggaaggatcacttgttcccaggaggtcgaggttacagtgagccatgattgtgccactgcactccagcctgggtaacagagcaagaccctgtcttatttaaaaataaaaaaaaaaaggaggtgacaatgacagcagccctcccaagggcaggcacagggkgaggaactgtcaagcaattcaggacacccaccagttgagcattgcccttaagaaagtgctatgcccagtgtcaagctagagaacctggaaagaagagcataacagggaattagaggaaaagcaggtatctacgatgttcctgccaggtgcccagcacaaggctccgcaccctcccatatcagcacatcagacacaaaggcacaaaagatgacttccaggtctgtcctgcccttgaggattttgattacatgaagaggccttacaggatagaccac

SEQ ID NO: 482592 - DNA, 496 bp, Homo sapiens
agaaacttgtggcaatgccttccaatcatccatgcattacacaggcatattcttaaaggtagagccacctgtgactagttctcctataaggcccatcataggcttaggacaaagagagcgaggaaggtcacaaagccatatcacatgcagtggtatccaacccactgataccaaggtgcccaaactatatcttaattggctttcagctagtatcttggtatttgaccctccatggaaatgatgcccattcactaagttccctaccttggaaataatcatctcaaaaatcaggcataaggcttacatgattattcaaaatagatacttaaaattaaataaaaaacatgaaaagcccagtgagccttcattagtcagagcatgcaatcatctrccaccttcaaatcctgttgatataactatgtccaattaaacaaaaaacaacatccaaaggttctgtcacatcagtgtggatgggtccctctaattgtgactattc

SEQ ID NO: 482593 - DNA, 495 bp, Homo sapiens
actattcctaacaaccaaagcttatttctaacattttgtatctcagttaaaacaaacctcagcatttctctctgtgattaaaaataagctacaccacaggattacaacgtcaatgtctttccctccccctgcatgtcaagtgttctcgcccttacaaataataaacccggtatctctctgtaataaataattccacacaggttttagaaaagcagcatatgacagagagggtactggaggaggagcaaacacacaacagaataaaccgaatccagaagtgaagctcattcagcctgcccagtacaagcctaactctttcctccctggatccttctaatatgatcatgcatttctatractacatttgcaaatgagtgactcaataactgctacctaactctgtaaagcattgggatgtacttgttcaagagcagctatacggaattaggccctgactgggaatcctgtcactcctcagtgctgtggactgcagcg

SEQ ID NO: 482594 - DNA, 594 bp, Homo sapiens
ctggtcactctgcgctcaccaggccactcttgagccaccagcaatttctgtgagtgctcctgtgcatgctcttcccctcgcatggagtaggcgcctyttacctgttggccttgctctcatccttcaagccctcgctgaaatgtcgactctttagagaccatccaaaacaactgctcctctccctctaacacaccttgcttgtcttatttctgctctcacccctagggcctgagccagagcctggcccgcagtgatgctcagtaactatttactcaataaatgaatgcactaggaaaagcaaagcaaacacatctaaatactacgtctaggtataaacccatccgtgttgaagacataaataacattattcgtattgctctatacatcacagccagagtctggaaactgcctacatacctacgtacagaagaacaggtacgtaatatgaacaaaatgaatgagtaccatattatgatgagaatgacagacccacaactcacacgaagatggaggcaaatctcacaaacatcatgttgaacaaaaccagaaacaagaggacacactgggcaggtccatttacattaagttcaaaaa

SEQ ID NO: 482595 - DNA, 594 bp, Homo sapiens
ctggtcactctgcgctcaccaggccactcttgagccaccagcaatttctgtgagtgctcctgtgcatgctcttcccctcgcatggagtaggcgccttttacctgttggccttgctctcatccttcaagccctcgctgaaatgtcgactctttagagaccatccaaaacaactgctcctctccctctaacacaccttgcttgtcttatttctgctctcacccctagggcctgagccagagcctggcccgcagtgatgctcagtaactatttactcaataaatgaatgcactaggaaaagcaaagcaaacacatctaaatactacrtctaggtataaacccatccgtgttgaagacataaataacattattcgtattgctctatacatcacagccagagtctggaaactgcctacatacctacgtacagaagaacaggtacgtaatatgaacaaaatgaatgagtaccatattatgatgagaatgacagacccacaactcacacgaagatggaggcaaatctcacaaacatcatgttgaacaaaaccagaaacaagaggacacactgggcaggtccatttacattaagttcaaaaa

SEQ ID NO: 482596 - DNA, 594 bp, Homo sapiens
ctggtcactctgcgctcaccaggccactcttgagccaccagcaatttctgtgagtgctcctgtgcatgctcttcccctcgcatggagtaggcgccttttacctgttggccttgctctcatccttcaagccctcgctgaaatgtcgactctttagagaccatccaaaacaactgctcctctccctctaacacaccttgcttgtcttatttctgctctcacccctagggcctgagccagagcctggcccgcagtgatgctcagtaactatttactcaataaatgaatgcactaggaaaagcaaagcaaacacatctaaatactacgtctaggtataaacccatccgtgttgaagacataaataacattattcgtattgctctatacatcacagccagagtctggaaactgcctacatacctacgtacagaagaacaggtacgtaatatgaacaaaatgaatgagtaccatattatgatgagaatgacagacccacaactcacacgaagatggaggcaaatctcacaaacatcatgytgaacaaaaccagaaacaagaggacacactgggcaggtccatttacattaagttcaaaaa

SEQ ID NO: 482597 - DNA, 631 bp, Homo sapiens
tggactccgggcaggtgattcaaatgccatactattactttcctagcatggacagttctggttattaactcactcttacataaaacttttagaaccaraggattggagggatgctgacattccttagatatcttaggtaataatcctgaaaattcacttttcctgaagtttttgatagcagatagtaagaaaatttcactttaaaactcactttgaggacctgaaatgttatattccactttgctgattgaggtcaaggactattgtttgaacctcaaacaagcaggtggtgaggttcactttcaactggtaattacgagaaaacgaaccattatgctagatgcaaggccacctcatcttgcatccggtaaacatgccaacaaaaacacaaacaagtgtctgtaatacctttcaacagctccctgttgctctcattataaatatggaaatccttaccatggcattcaggaatctgcatgatctgatgcatgtgtatattgacagcacatcttgtatcattcgtgacatcactctctattatttggctgattttgacctaattcagcacttggaaaccaccatactcactcctgccttggagtttttatgcatactgtttcctctacactga

SEQ ID NO: 482598 - DNA, 641 bp, Homo sapiens
ctgtgggacataattacaaaggaaatttgtacatttggttattcttgttaagtatctctatttgtaatgccaaacacaaatttttgctacttcaaaagctgttttatttcttaaatttgtgatgtctctattatattttgccaatgtgaggaaatgagtgtctaatcttgtcaatgtaatatttattctcaattcctgctatattcattcctcctaatttgaaagttgataaaatctgttggcaacctccttgaagctgcaaagcagttactcaaaacaattttcagaatgttcagtataaatgggcacatgaaccattcttgaaaaccgatgtgcctttttgcttcmcatgtttaactaaagtcggttataaattttaaaattatttatttaactttttcacatccttgttttaaaatttccataccataatacagtgttctttcaggatcacatgtgaaatagataatatttccaacatttcatgaggagctatggggaagaaatgatgagcaattccataaggcactgatagacataaaataagagtacatactttcatgtcattccagatagaaatatcaaagatggaacattttccttccccttgacttaacagatgcccactctcatttagaact

SEQ ID NO: 482599 - DNA, 641 bp, Homo sapiens
ctgtgggacataattacaaaggaaatttgtacatttggttattcttgttaagtatctctatttgtaatgccaaacacaaatttttgctacttcaaaagctgttttatttcttaaatttgtgatgtctctattatattttgccaatgtgaggaaatgagtgtctaatcttgtcaatgtaatatttattctcaattcctgctatattcattcctcctaatttgaaagttgataaaatctgttggcaacctccttgaagctgcaaagcagttactcaaaacaattttcagaatgttcagtataaatgggcacatgaaccattcttgaaaaccgatgtgcctttttgcttcacatgtttaactaaagtcggttataaattttaaaattatttatttaactttttcacatccttgttttaaaatttccataccataatacagtgttctttcaggatcacatgtgaaatagataatatttccaayatttcatgaggagctatggggaagaaatgatgagcaattccataaggcactgatagacataaaataagagtacatactttcatgtcattccagatagaaatatcaaagatggaacattttccttccccttgacttaacagatgcccactctcatttagaact

SEQ ID NO: 482600 - DNA, 641 bp, Homo sapiens
ctgtgggacataattacaaaggaaatttgtacatttggttattcttgttaagtatctctatttgtaatgccaaacacaaatttttgctacttcaaaagctgttttatttcttaaatttgtgatgtctctattatattttgccaatgtgaggaaatgagtgtctaatcttgtcaatgtaatatttattctcaattcctgctatattcattcctcctaatttgaaagttgataaaatctgttggcaacctccttgaagctgcaaagcagttactcaaaacaattttcagaatgttcagtataaatgggcacatgaaccattcttgaaaaccgatgtgcctttttgcttcacatgtttaactaaagtcggttataaattttaaaattatttatttaactttttcacatccttgttttaaaatttccataccataatacagtgttctttcaggatcacatgtgaaatagataatatttccaacattycatgaggagctatggggaagaaatgatgagcaattccataaggcactgatagacataaaataagagtacatactttcatgtcattccagatagaaatatcaaagatggaacattttccttccccttgacttaacagatgcccactctcatttagaact

SEQ ID NO: 482601 - DNA, 643 bp, Homo sapiens
gcaccacccagatcaataaactggttcatctgatcttgtggcccccacccaggaattgactcagagcaagaagacaacttcgactccctgtggtttcaactctgacctgactaatcagcactcctagctcactgacctccgtccacccaccaagttgtccttaaaaactttgatatccactctttttctggctggaacaatggagggtgtagaagagaagaagaagaaggttcctgctgtgccagaaacccttaagaaaaagtgaaggaatttcacagaactgaagatcaagcacctgagaaagaagtttgtccaraagatgtttcgaaaggcaaggaggaagcttatctatgaaaaagcgaagcactttcacgaggaatataggcagatgtacagatctggaaattcgaatggcgaggatggcaagaaaagctggcaacttctatgtatcttcagaacccaaattggcgtttgtcatcaggaccagaggtgtcaatggtgtgagcccaaatgtccgaaaggtgttgcagcttctacgcctttatcaaatcttcaatggaatctttgtgaaactcagaaaggcttcaattaacatgctgaggattgtagacccatacattgcatgggggtactcaaatctgaa

SEQ ID NO: 482602 - DNA, 573 bp, Homo sapiens
gtggggaagttgatatagaagaatgcaacaaagattgaataatcgttaaaaaaaaaaaactagatagttggtacaaacaagaaaatgtatttgattatgaaccaagacattacaagtattaccatctcccctgtctgctctacaaacatcagtagggagaaaatgtgcaagggagaatgtcttacttagcatactggatggtcacattctgctgtgctatgtgttggtaatccagcctggagaaacacatgaagtttctaaaaccacaaacagaatagcaagttgtaaatggaatcctggagagaaacaaatagggactagtgaggaatgataagaaattgggttgaaaacgccatggggtgccagattatgcaaagcattgcaggtcatattaagtggttaagattttattctaaatttaacaaaataaaatcagcaaataaccttgagaggtttgccaaaacaaggagatggagtgsagatgggaagaaatgaatggattaaacatatgtattagaagtaaaatgtagataactacctaatggatttgatgtaaaaactggtgagaaaaag

SEQ ID NO: 482603 - DNA, 521 bp, Homo sapiens
ctgggaacggggagccggcgtgcccggggtatcccggggtacgtggtctgcagggcgcagccaccacgtctcagcatgtgcgtacccacgagagccggcaagaaggccccggcacagcagccttggtgggaacctcgcggcgcttcccagcccagactctcctaccgcaaaggctttaaagactcgcagcgacactcacttcttgctcagtttcggctcgctgccatccactttcacctcggccgcctgcacggccgccatcttcccggagggcccgacccaaaagtaaggaggatagtacgttaatttccaggtcaaggtgcgaarccccacctcttccgggggagagggggcgggcactctcgatgcgccgcggctgctgctgcgcaggcccagtgctgcgcttcgcggcagaggcgtctgcggtgacagctcagtcagttgagctctgtgtgccaggcgctcgcgagggggtagctcttctagtagtgctcggcgtcagacatggcggaggcgatgga

SEQ ID NO: 482604 - DNA, 635 bp, Homo sapiens
gggagccggcgtgcccggggtatcccggggtacgtggtctgcagggcgcagccaccacgtctcagcatgtgcgtacccacgagagccggcaagaaggccccggcacagcagccttggtgggaacctcgcggcgcttcccagcccagactctcctaccgcaaaggctttaaagactcgcagcgacactcacttcttgctcagtttcggctcgctgccatccactttcacctcggccgcctgcacggccgccatcttcccggagggcccgacccaaaagtaaggaggatagtacgttaatttccaggtcaaggtgcgaagccccacctcttccgggggagagggggcgggcactctcgatgcgccgcggctgctgctgcgcaggcccagtgctgcgcttcgcggcagaggcgtctgcggtgacagctcagtcagttgagctctgtgtgccaggcgctcgsgagggggtagctcttctagtagtgctcggcgtcagacatggcggaggcgatggatttgggcaaagaccccaacgggcccacccattcctcgactctgttcgtgagggacgacggcagctccatgtccttctacgtgcggcccagcccggccaagcgtcggctgtcgacgctcatcct

SEQ ID NO: 482605 - DNA, 531 bp, Homo sapiens
tcaattagtaattcctctatcccaacctcctgcctaggaaaggaggctcaacattatattattttttttcctagataataaaaggcattttaaggttagggaccaaaatatctttcctaaaatctgatatggtctacttgaacagtattcatggaartcaagcttttccatttaaaaagacagagggaaaaaaatatctgcaaaatacctttcaatgtttgctgtgcttgccatgaggaatctgagatttgaagacacatttgtaccattttatcttttactgtcctgctagtgcggtagtataacagcatcaaagtaacatgataccagagaatgaccatttgaaatgagccagtttctccaacttacatttctcaggaaacaccattgcctcacttttataccttgtgtgtgaggatgggcggggaagcattggccaaggaacaggttcactttgttctctcgtgttatgagccaactgggacagaagggtcaatttgaatctcctctccttcgaagtcaaaatggcgc

SEQ ID NO: 482606 - DNA, 631 bp, Homo sapiens
tttcactgcagaaatattcatagctctagagacactcaagccagtaacaggactgaaaagatgcgaaaattctcatctctaatctgctctctaaccatagctaatgcagtgcttaaaaattatgcacaccacaactgttaaacatgaataattacattgatttctaatagctcctgattaaaataattcatattatccaactatcaatgaatacggtaacttcattactttcttgcctttcacttatttaaacatggctttgcaaaaaaaaaatacaaagatctgtttttctggaattactgaaataaatgaatcattattctgtatagaaaggagtgtttctgtgtctttgtttttacaaaacagcatcggcttccaaattctacggcagtcactgcartgggcacttctaatgtaatagaacagcagcaacaacaaacaaagatctagagacaaaatccatatgaaaaacaacccaatgcaaccctaaacaataatgatgaatcagtaaaggaaattaaagagctcggtgatagagaggcttgattttattgacagcacattggtgattttcttttgacttgagtatgaactaatgctcccttctgtttttacttgaatatggtcccag

SEQ ID NO: 482607 - DNA, 574 bp, Homo sapiens
tggggaaggcatatttcttcagcagaagtcactgtactgggctcttttctccgtatttctcatttaacccttgcaccaccaccttgagataagcagcactacttccattttatggataagaaaactaccaggtcatcttcctggtctcatttaattttcacagctatcattcaagacatacttttttttaaatctctattttttacraaacatatgaacagcatatggcagagccagggttcaaacccaggcttcttccacttcgaagcccaaggttttccttgactgactctctatttggtccactttgaacaataaacactagagaaagcacatcaacttaaagtttaaaaatcctttgtagattttatttaaaatgaagctgcagtaagtgatgttgtcttcaggcatttgaatcttactatccgtattttcctctttccccttccctcctttgctccataccctccctttccccagtggataacttggtgagaaaacggagcaagcaaggggactggcaaaaacagcgctgtttctgcaccagagtttcagagacaggtgcaccatgagc

SEQ ID NO: 482608 - DNA, 620 bp, Homo sapiens
catttatacaaaaataagtccttttcagtatttatcctatgctttcttacacatgctagcagacttataacccttctggtgtccatccttaagggaaaacgcaccaggctsctggcttgctgtaggatttcatgtctgcctacaacccagcatagtgctctttcttgatgacatcaacaaggaatgatcttgaaggcaggtcagtggcttcatacaactggaagtcccaggtttccaatttttcctttactccactgaaagttcttgatgcaaataaccactgatcaatgggaagcttgtctttgaatggaaacttgtttctgggaaagcctttcctaaacctgccatatgaactaaaacgtattactaccacaaagagtcctatcttcaagggaaatagtaaaaatacctgcacagcttacacttgccagacaaagagagacaacaaacaagcataataagtcaacaatgaattatgttaaaaggataaattctatggaaaataagtaaagcaggataaaaggattaagacaagtgagaactcatattgaatactgtcctcttcatggtccttcatcaaaagatcagcactcagcaaaagttatggtaagtgttatggg

SEQ ID NO: 482609 - DNA, 589 bp, Homo sapiens
gcaaaccatcggtggccattgctctattacagtaagtaagaggctgtgctctgaagacagactgtctaagacaatatcctagctaggccaggactaaggtgtggcgaggcatctagggcccaaaatccaggccctgctcactgtctgagctctgaaaacacagagcagaaggataaaagaccctctrtggacttcaaactcaagcagcacactctcacccagccctgatggtgcttggcactgagtattagcggaggtcttaacaaaattttaaggccttaaataaaatattacaggtcttaataaaaaggcacgtaagattcccatttggctaaggtcttgcacgtagcaagcttgggaatctcctgtaggtggggtgatggtagggcagactcctgttcttcggtcttttgctgtggtatcatcaaaactcatgaagataccctttaatttctggagattggtattctaaatattttacccgctctccttctcccatctagaaggagaacaaactttcaagatcccaggtggcccatgaatctaagacattaaactgcttttgccccttattcccacttcctaggca

SEQ ID NO: 482610 - DNA, 656 bp, Homo sapiens
ttggcagaacatcaataccatgagaacaacaggaatgaggaatgagggccagaaactaccgacagccatgcctaacacttcaaaacaggtaaagctgtttccayggagctccactttaaaagctaaaccaagtctgttactaaggctccgacaacctctctaacttcagcatttagttttaaaataaaaataatggaattgaccatctttaagttccctttaatttctgagtgtttattcttcctcccctcccaactgcaacattctcaaaaataagataatcggcctgctggacctgcctacaattttcctttattaaagttttaagccagtaatggacaatcctattccaaaggctactggctctgggtgacgtacattttcaagtacttttctactaaggatttgagggagtacttttctacttaaatacttttctactcaaggtctctatgctgagaaatcctaaaaacctagtcttagaattctggcaatacaggaatttgcccaatccttttttattaaaaccattaactaagaagagattgtaacagaggaggattaccgcctttattttgtgttgctccctttgttttcaaagtctgttcccaaagcaggtaattaacttatttgtatgggacttgagcaagcaggca

SEQ ID NO: 482611 - DNA, 639 bp, Homo sapiens
gtttataaaagcacctcccaaattcacacatacattctaacagttaaatgaatctgcgggctatggtcctagaagagaaggcatggccaggcacagtaagtcaacaatgcaaaatgagatctctccacatttacagagtccttggagtgtgttcctgcccacccagagttacagccaagatccacaaattccactttctttaaatgctrccattgccttagtaggtttgaaaaactgtagaggctctagatggtattactgcactctatagaggatttaagtttcttctgataggctggtaagaatagaggatgggtttgtggcatttatttttgatttgttcttattcccagcgtgcagccctcattcccagggtgtagctcttctaaagatcaacggaaagcctactgtattttccagggcaattccaacttgtcataccccgaaccctgacttgtatatccctagtactctcataatgtcaacatctctgctttgctcttcattatcacagcagtttcgctttactattttggcttcacaccccatccacggtcagcttaggattctagaggaaacggcatgtagaattttaggctcatgtttttgcagttctctctactctggactcttggcacc

SEQ ID NO: 482612 - DNA, 574 bp, Homo sapiens
atcctcctgcttcaatctcaacattcagccaaagagataagaaaaggtatgacacagaaaaaatggaaacataattttagaataaaaggaatcatcagaggatacaaagcacctcattcaagacagaaacraagtactcagtagaaaagttggaagttaggtaagttatcctaaaagataaagagaaacactaaatgaaaaatagtaagtaaaagatgagcaccttccttagttaatgtattaaacaacttgctggtataccacggcaagcaggcaccccagaaaccaacagaatggattcaaagaagccctcattgtaataaaatatagcttgaaatatgtcacgccttcagacatctgatgattttctttttacatatagaaccaaagttctcattgagtttgcaatttactttggaaaatagacaagttatcaaactgtgtgaagtgctatgataggtgagtaaacagagtgctttcaaggggtaaattgtttttttaaaaaaagagctatcctcagcccgagagtgtgggtggacatggatagagaaatcgagtgaagcttcctgattgg

SEQ ID NO: 482613 - DNA, 574 bp, Homo sapiens
atcctcctgcttcaatctcaacattcagccaaagagataagaaaaggtatgacacagaaaaaatggaaacataattttagaataaaaggaatcatcagaggatacaaagcacctcattcaagacagaaacgaagtactcagtagaaaagttggaagttaggtaagttatcctaaaagataaagagaaacactaaatgaaaaatagtaagtaaaagatgagcaccttccttagttaatgtattaaacaacttgctggtataccacggcaagcaggcaccccagaaaccaacagaatggattcaaagaagccctcattgtaataaaatatagcttgaaatatgtcacgccttcagacatctgatgattttctttttacatatagaaccaaagttctcattgagtttgcaatttactttggaaaatagacaagttatcaaactgtgtgaagygctatgataggtgagtaaacagagtgctttcaaggggtaaattgtttttttaaaaaaagagctatcctcagcccgagagtgtgggtggacatggatagagaaatcgagtgaagcttcctgattgg

SEQ ID NO: 482614 - DNA, 621 bp, Homo sapiens
aactcactatttttttttctgaagccattttgtcatctgtgcttatgttttcacagcaagaagctttctaatagaaattagtattcttttcttctctttctgttctttacttatttctccttatacatggaaaggtgactttccaatatatccaatatagtgggtgaacttgsgaaaggaaactagtaatgaacatgttcagttttatcccttcttgtattcactttgggatgtgccaacatgcagacttacgtgtttaagtttcccttctgctatgcactataatactctgaccttttagagtgaatcctgtaattgatctagctgttagcatatgtgcataattatgtgtaatttagtgatgaagtattaaaaacagcacttagccatcaactgaagtcttgtcttccaatggctctatcagtagctgatgtaacagttttttctccatcctctgtatcttagtccacgcaggctaccataacaaaataccataaactgggtagcttataagcaacagaaatttatttcttacagtcatggaggtgaggaagtgaaggatcaaggtacctgcacatgtagtgtctggtgagggccccacattctggttcatagaccaca

SEQ ID NO: 482615 - DNA, 612 bp, Homo sapiens
aatctgtatatagaatttgtgttgcagctataaagtcaacagatatcctaattttgaatattggtttggtatacttactgtataactaaggtgacatattccaggcctacaaggtacaaagaaatgagattgcttcacaattctatttatattttgaccgggtgttcccctaagacaattgggagctataaaataaattggacaattatagacataatatgttaagtgagtctctggtttcctaaaacctaggggatattgtagcacaaattgttctattttctaatataaaaatatgaaattatgaaaggagaatgtgtgagcttcttatatttttgctcaaatctaattgcattacaaaatgagcatctagctattgaaagtagggtctgcatacatatagccagacrcttttttccacttggacttttccataatcacctgataatacattatccctctttgcatgatctgtgtcagtaagaaagaaccaaacaataaaatctccatatgatatatctgtctctttttatgctttgaaaaatgctacgttttacaactttaggcggtaaatattattttagagatatcaatgactcatgcatgaaatgc

SEQ ID NO: 482616 - DNA, 236 bp, Homo sapiens
cccacacagcccagcctcaagggccctcaygccctccctgaatgcccttccccaggcctcaagatgggagagaggagatccccaaccacagccggcagaaacttgtaagagagaatagcccatcccacagccagggcagtacagggaagagagaagttggagagaaagaggaaggggaggtggactcattgcttgtctcgggttggtttcctggagtttggtgtagagcatgggca

SEQ ID NO: 482617 - DNA, 637 bp, Homo sapiens
aaaaccacaagtcaaataacatgtgtctagctcccagcccacacatcactccagactccagatccttatagccaaccacctagacgccgtctcgatttgggggccctatttccacctccaattcacctggaccaaactgacctcattttctccatcatatctcagttccttcaacccccaactcagttgtgcaggccagaaccaaagttaataataaatgtcagagcaagggtctcctgtcaggttcaccttsccttcccacttccctgccttcgtcaaagctcttccctccaccctgagcaccatttttgctctgtcttttctgcctttccaaatcccatccttcttcaaatgtccttccctccaggaagcctttcctgattttctcccagccaagggcttcatctgtacccatctcaggtcaataggctctatctgatggcacagacccatgtcacttccctcacacgagattctacatgggccagggaagtctgacttggctattgtctcatgcagcaaactgatccatgtctgacccatgggagatgctcaggagtcaggtctgattcaaagtggggctccacaaaaaaggagataaagtggacttcacccaaattataacttctgtgcatca

SEQ ID NO: 482618 - DNA, 637 bp, Homo sapiens
aaaaccacaagtcaaataacatgtgtctagctcccagcccacacatcactccagactccagatccttatagccaaccacctagacgccgtctcgatttgggggccctatttccacctccaattcacctggaccaaactgacctcattttctccatcatatctcagttccttcaacccccaactcagttgtgcaggccagaaccaaagttaataataaatgtcagagcaagggtctcctgtcaggttcaccttgccttcccacttccctgccttcgtcaaagctcttccctccaccctgagcaccatttttgctctgtcttttctgcctttccaaatcccatccttcttcaaatgtccttccctccaggaagcctttcctgattttctcccagccaagggcttcatctgtacccatctcaggtcaataggctctatctgatggcacagacccatgtcacttccctcacacgagattctacatgggccagggaagtctgacttggctattgtctcatgcagcaaactgatccatgtctgacccatgggagatgctcaggartcaggtctgattcaaagtggggctccacaaaaaaggagataaagtggacttcacccaaattataacttctgtgcatca

SEQ ID NO: 482619 - DNA, 635 bp, Homo sapiens
tttatcctctccagactgagagggaaaagacaaagtataaagaggaacacagtttatcccaatatcaagagaaatttaygatgttttgtcagcaaaagaacatcagtggattctgacactaacaagtttctgtcctatagcctttaccctataaaaactaacatattgagaagattaaataaaaaccaagttaatgatgatgtcattagtcaatttatactgaaacactgtctcagataaaagtaggctacattaataatccagtgtaaaataaaatcaattcttaggatgccaacttcacaccttaaaaatgtagacctagttttttaataactttttatgtccctagaaggaaggattttatagcactgaagtattactttactaagaagtaactttctttaaggatatctagcctgtggatcatttgaatgtttgtttgtttgttttgaatattttaggagttttgaattattcatgacacttgtcttctctatccatgtcaaacacctccaaagttatgaaaaatattaggaaaagtaaagaattttaaactgtgttctaattcaaaagactaacttaaaattatattaagctaagtgctttcttttagtagtgaattaaataaattttat

SEQ ID NO: 482620 - DNA, 635 bp, Homo sapiens
tttatcctctccagactgagagggaaaagacaaagtataaagaggaacacagtttatcccaatatcaagagaaatttacgatgttttgtcagcaaaagaacatcagtggattctgacactaacaagtttctgtcctatagcctttaccctayaaaaactaacatattgagaagattaaataaaaaccaagttaatgatgatgtcattagtcaatttatactgaaacactgtctcagataaaagtaggctacattaataatccagtgtaaaataaaatcaattcttaggatgccaacttcacaccttaaaaatgtagacctagttttttaataactttttatgtccctagaaggaaggattttatagcactgaagtattactttactaagaagtaactttctttaaggatatctagcctgtggatcatttgaatgtttgtttgtttgttttgaatattttaggagttttgaattattcatgacacttgtcttctctatccatgtcaaacacctccaaagttatgaaaaatattaggaaaagtaaagaattttaaactgtgttctaattcaaaagactaacttaaaattatattaagctaagtgctttcttttagtagtgaattaaataaattttat

SEQ ID NO: 482621 - DNA, 525 bp, Homo sapiens
tctgagtgctcacatggagaaggaccaagctcttccagttgtaggaagaattcagtttcttgaaggctattggatcatggctctcagttccttgctagctgttaaccaggggccaccctcaatttcttgtcatatggccctctccatagagcagttaagaatatggcagctttcttcctgaaagccaacaaggaaggctgtctgctaggaagatgcaaatcagaatcttacaccatttattaatgaaaatgaatctattatttttactgaattctgttygttaaaagcaatcacaggttcagcccacactcaaagctagaaggaattacacaggttatcagtaccagaaaatggagataattaagggtcaccttagagtctgtccaatatggggagctaacatcttatcaagtaaccactgtaacaaggtagagtcctcttaagtgtgtgaactttagaggcatggagccaggaaggataatgtagtagctggaattaaaatatcctctttttcacatcaatttc

SEQ ID NO: 482622 - DNA, 520 bp, Homo sapiens
atgacaagctaagaattccaaagaaacgtgggtggagcttatacagatgggagaaacttttgcatgcctagtgatattttgtaaaaggattttcaaatctgtactatacattcgggctatgcatctyattatgctatacatttcattaggctataggcttcattaggcacttgaatcaagaatctcattacatactccagacacacatctcattatgccatgcatctcattaagctcccagccaggaacagatgtaaaatagacaaatttcagcgaggctttgattccagcccacatggcattctcatcaacaaccaagcaagggtggaccaacaattgggtgatttttgaatgacacttgacaaagaggaaccagctcaatcaggcactattaaataacaggagaaaaaaataacttggtgttacattccactttgctgtccactctgggaatgtgtttctactgtcaatcaggaatcatctatcagtaaaaagccggagatggggtagaagagggcat

SEQ ID NO: 482623 - DNA, 520 bp, Homo sapiens
atgacaagctaagaattccaaagaaacgtgggtggagcttatacagatgggagaaacttttgcatgcctagtgatattttgtaaaaggattttcaaatctgtactatacattcgggctatgcatcttattatgctatacatttcattaggctataggcttcattaggcacttgaatcaagaatctcattacatactccagacacacatctyattatgccatgcatctcattaagctcccagccaggaacagatgtaaaatagacaaatttcagcgaggctttgattccagcccacatggcattctcatcaacaaccaagcaagggtggaccaacaattgggtgatttttgaatgacacttgacaaagaggaaccagctcaatcaggcactattaaataacaggagaaaaaaataacttggtgttacattccactttgctgtccactctgggaatgtgtttctactgtcaatcaggaatcatctatcagtaaaaagccggagatggggtagaagagggcat

SEQ ID NO: 482624 - DNA, 533 bp, Homo sapiens
aaaacattgcctgacaactatttatgacccagcagggtttggaagacatacaaaaacgcaaaccaaaccaaagcaaaggcactatctgataaatattgtaggagagatataaacaaagggttatgggccctctggaagacagagcactttcagctggaggttcatttataaggggagaggcccaaatcaggggggtgaaaggagatcaatgggaagaagggtgagtggaaaaagacatttcagagacagtcacgaatccgttatacaggagaagagagacaaygctaagaataacttgctgtgtttacagccaggaaatctaggagagggttaacagaaaataataacaataattataagaaagcaagaaaagctttttggggaagaaaaatgatgcttgttcatcttagtgaacactagaccaaccacttatgagcacactcttaattgaatttctgccttggccaaattctccagcataagacatgtaagtataggatcatgcatcataaccatctcagcttcaatgttca

SEQ ID NO: 482625 - DNA, 636 bp, Homo sapiens
aagaacctctttgggtaatgttaagaatcacctcccaagatggatggatatcatctttatttgttcaccgtctgggtttccaaaattgatggtagacatcatcttacaccgtgttacttgaatagggaccatttctgtttggatagagctcacctcacaaataatcaagtggcatgtcatcacttcaatggtttttaatctattctggcatgaactttacatattttgcaagaaagttttattttattttaagagaactctactcaaaaacattttgacttgaagtttagtaaaggttttatattagttaatatctagtatgtacccaaaactttgtcatgaaatatagacatatgcatttatatttatgtttatatatgtaaacagttatatactgcactaatatacatgttcatgtgtatatatatatatatatatatatatatatatayacacacacacatttaacactattttatccttctacctacattaccccaagaaatattgtttttaaagtgattaatttacatctggagtgagacacataaataacatttgaaaatctatcaaaaattcaaagcatggcacagccttttaaaaacaccctagcaataaagttttataaaacacagc

SEQ ID NO: 482626 - DNA, 636 bp, Homo sapiens
tatctatatgaatgctgatctattctgtaatatgatgacatcagatggaatctgtggcctggagagctagagaaagggctatacacaaatacttctcagttttttttttttttttttattctcaaccagtcagttgtaacttttacaattgtctgtattcctacccagagatcttcaagccctattctaaacttactttttccatatttgctgaatcatgagaaactagataactatccttattagaaaagataaaataagagttaagataattaacaaaagtctgtatttctctgagagtatactgtgagttagmtattcactcatgtattcacataatacatgtttattatgttcacaacctctaggtgttgaaaatacaaagaataaaatgacatgtgtcctcaagaaagggaaatctggaccaaaaaattaaagaaaataaaatatgacatgtcaattattgaaattctattatgggtcatgaaccttagatgaaaccacaaaatcttttaaacaaaataaagcaactaatatttttctcatttaatagacaaaaggaaacttaagttttaataatttcctcaatgtcgtaagtggcataatcaacatttgaaactttgtctctctgcattt

SEQ ID NO: 482627 - DNA, 561 bp, Homo sapiens
acactgacagccagaaaaagactatgagttacacamggtgctaacactataaaaaatgaagaatcttgattgccagtccccaattgtttccaagtaattctccatccacaaaaataatttacacaaatttctagggaaataatttatttgtcctttattctgaagaaagcaacattcatgctgggtggctgacagcaggtgttaattctgcaagtactaatttaacatagcaggtgtcagatacactgggtattaactgcatggttgctacaaagtgatgacaatcactaaatgagctctgatcaggtggctcctggcacttgcaggccttctgcttgattttattacttacctgagcttcattcgttggggcaacatcccttggaagtctgctgctcaggagttttggagtaatgagcgtctactcctgggatgtggacattttgtctatctccaccatcatttccttttgtcagtcacacatgatatgacatatcagggtaattataatcattttatttttttaaatgatgaataatactgtaggaaaattgtcagcag

SEQ ID NO: 482628 - DNA, 607 bp, Homo sapiens
aagccacataattatttctacctcctccaaatatttaattatgacacaatctcttattttcaaaaatatgtttttatattgtcttgttactgattttacttatttcacagttatcacttttatgtcaataaatktttgataaagttctagattccagtcatggtaaatattactcctgcacagacatagacatcagacccacagaaacacacaaagccacagagagacacacatatacccctacaccacacactgaccagacaatatgcacacagaattaggtgtacgtagtgcttctctcactctaatgaggaaaatcaacagcataaaaaggagagctatgacaattgtcctcataatttatctggttcacttctgacttcaaaaaggtgaacaattatataatccaggacagattattattttgccctttccggggaatttcacaatcttctttaatctttttaaaattttatcattcttcgatagcaaaaaaattccttgtttccatctaatttaaagacaattctaaaattatgtaggggattatcaggatgtgtgatgttgagtatgataagggtttataattgtgataagtaatgatata

SEQ ID NO: 482629 - DNA, 469 bp, Homo sapiens
attcacttttcttcacattcattttttcagtgggcacgtgccaatcatttaggttgaaaatatgagtttatggttaaaataggtgtcaaattctaaaagttatgaggcaatctaggagtacacatggttatgggatttaagatttaaaaattttgaatgaataatatagtcaaatgtaacagctaatgtgaataagacaacatyccacctaggatgcttaatattttatgtcaacctgagtaggtcatgaaatgctcagattaaacattatttctgggtgtgcctatgaggttgtctgcagaagattagcatttgaatcagtggatgcagtaaagtagactgcccttcccaatatgggtggacattatccaattcactgaaggcctgaatagaatcaaaggcagaggaaggaggaatttacctctccttttctgcctcactgtttgagccaagacatctcatctcattt

SEQ ID NO: 482630 - DNA, 558 bp, Homo sapiens
ctgggttttaggtattagctgctctactgaatgggatgagtgattctgaaactttgcttgaggtggggttcctggggccaggctgggagactgtgctgtcaggaaggagatggtcactgggagactgaaatgggctctccctgagcactcgggtgagtttgggcctcagtaatgtgtgctcagcccccaactccatctccayggccaaaccctggagctggtcctcctgacaccacatctccatggctttgcaaccaaccctggcctatccctctgcccctggtctagccctccatcctctaccccactgcatcttaaccataccaacaatttttttttttaactcaaaaaccgcccagggaaatgttcccatcgcttccaggccttccctgatccatattatcgatcacggtctcttgcctacaaatctatggcagcccagaaggcagtctggcagaagacagctcatatctattgatcttttttaatgtattatgctttatggatgtggtctcatttaagcctcccacttgtcctattagttataccacctcactt

SEQ ID NO: 482631 - DNA, 613 bp, Homo sapiens
cactgaggacctcattaatggcgtttcaattttgtcattcatacaagcataggggattgtctctatgctctatgaatccaaaaactcaatcrattcctgtctttacctatggattaattgaaaggtgacaaggaggtattcaggactgcactataggacaaattatagcagagcagcccacccctgagaccacatgatgccatacagaccttacatgacaatacagacaactggaagcatcagaaccgaatgatatgctagaaaaaaatcaaagtcatcagtcattccggttgatatgtcagtgtatttcacaacaaggtttggaaacagaacccttccccttcccttccttccagtgaacaaaagaacttccagggaaaaaaaatcctcccactgagcaacgagttggaggctccagaaatataactctagaatgaattaatggtgtactataagttgatattccctataaaatgagtttggtcagagcaaatctggtctgtattaatttgtttgccattgaaactttggacccccagaaaagtgcctgatatattattaaaaagtttatgagtatctcatgctgaagaggtggtagctccttcaatgagct

SEQ ID NO: 482632 - DNA, 527 bp, Homo sapiens
ccttgggcaggtcagttaaaatctctgtgttgcagtgctacatttacatgaaggagatgctgaactttattggtcggcactccaaaaataataactactgaggacaatgcctgcaattcagagtggaaatcaaagagggatctcagagactgcacatctattactccttttttttttttttttttttttttccttttcaggggagaaggagtggtggtgaaagagggatggatgcatgcttgcctcggtcgagcaaaaacaaaacttcattgtmttgaaaaaattagcatgcacctccttccacacatcactgtggtaagaagaacacaatgaggataaagtggccagggttgaaaagcccttcagagaagatcacaggagaaatgctggcagaggaactgtgaggcatctttgggactctggtgagacattcttgtccctcagagtagaaaaaggagggctctgaggcagaagggcttgagtgaccttaagcaaatcatttcaccttcaagtatcaggtccttgaa

SEQ ID NO: 482633 - DNA, 527 bp, Homo sapiens
ccttgggcaggtcagttaaaatctctgtgttgcagtgctacatttacatgaaggagatgctgaactttattggtcggcactccaaaaataataactactgaggacaatgcctgcaattcagagtggaaatcaaagagggatctcagagactgcacatctattactccttttttttttttttttttttttttccttttcaggggagaaggagtggtggtgaaagagggatggatgcatgcttgcctcggtcgagcaaaaacaaaacttcattgtcttgaaaaaattagcatgcacctccttccacacrtcactgtggtaagaagaacacaatgaggataaagtggccagggttgaaaagcccttcagagaagatcacaggagaaatgctggcagaggaactgtgaggcatctttgggactctggtgagacattcttgtccctcagagtagaaaaaggagggctctgaggcagaagggcttgagtgaccttaagcaaatcatttcaccttcaagtatcaggtccttgaa

SEQ ID NO: 482634 - DNA, 603 bp, Homo sapiens
taaagctggaaaccatcattcttaacaaactaacacaagaacaaaaaaccaaacacagcatgttctcactcataagtgggagctgaacaatgagaacatatggrcacaaggaggggaacatcacatactggggcctgtcaggggatggagggctaggggaggaacagcactaggagaaatgcctaatgtagacgacgggttgatgggtgcagcaaaccaccatggcacttgtacacctatgtaacaaaactgcacattctgcacatgcaccccagaacttaaactataataaaaagtaaaaaataaaaaataaataaaactctgatctgtaggccaaagggtacttctttttctttattaattactcagaagtctaggccacagcaatcctactgttctcctctcattttcctaaactattttgatacctatttctcagactttatgggctattagacatttctcacatttccatagataataactcatccgttttgcaacctgattctcaatattaagagattaaaactaatgtatatgactctcagttgacacatactgaagtacagaaaaatccatcatttccttctgcaaatgaaaaag

SEQ ID NO: 482635 - DNA, 603 bp, Homo sapiens
taaagctggaaaccatcattcttaacaaactaacacaagaacaaaaaaccaaacacagcatgttctcactcataagtgggagctgaacaatgagaacatatggacacaaggaggrgaacatcacatactggggcctgtcaggggatggagggctaggggaggaacagcactaggagaaatgcctaatgtagacgacgggttgatgggtgcagcaaaccaccatggcacttgtacacctatgtaacaaaactgcacattctgcacatgcaccccagaacttaaactataataaaaagtaaaaaataaaaaataaataaaactctgatctgtaggccaaagggtacttctttttctttattaattactcagaagtctaggccacagcaatcctactgttctcctctcattttcctaaactattttgatacctatttctcagactttatgggctattagacatttctcacatttccatagataataactcatccgttttgcaacctgattctcaatattaagagattaaaactaatgtatatgactctcagttgacacatactgaagtacagaaaaatccatcatttccttctgcaaatgaaaaag

SEQ ID NO: 482636 - DNA, 562 bp, Homo sapiens
tgcttactctttgggtccacactgcctttatgagctgtaacacycaccacgaaggtctgcagcttcactcctgaggccagtgacaccacaaacccacagggaggaacggacaactccagacgcgccaccttaaaagctgtaacacacaccgcgaaggtccgcagcttcactcctgagccagcgagaccacgaacccaccagaaggaagaaactccgaacacatccgaacatcagaaggaacaaactccagacatgcagacgtgctgcctttaagaactgtaacactcaccgcgggggtccgtggcttcattcttcaagtcagtgagaccaagaacccaccaattccggacacaatatgacctaatttggaccttaaaatattattttatttaaagtatggcttcgatgaggataagaatggatatggagagataatttaggaggatggattgtctgggagagaggtaatagtgggtcagcttagtggaaggcaggagataatgaaaacaatgatgcacgtgagacatttggaggtggaaatagcagaacttgccaactgttt

SEQ ID NO: 482637 - DNA, 562 bp, Homo sapiens
tgcttactctttgggtccacactgcctttatgagctgtaacactcaccacgaaggtctgcagcttcactcctgaggccagtgacaccacaaacccacagggaggaacggacaactccagacgcgccaccttaaaagctgtaacacacaccgcgaaggtccgcagcttcactcctgagccagcgagaccacgaacccaccagaaggaagaaactccgaacacatccgaacatcagaaggaacaaactccagacatgcrgacgtgctgcctttaagaactgtaacactcaccgcgggggtccgtggcttcattcttcaagtcagtgagaccaagaacccaccaattccggacacaatatgacctaatttggaccttaaaatattattttatttaaagtatggcttcgatgaggataagaatggatatggagagataatttaggaggatggattgtctgggagagaggtaatagtgggtcagcttagtggaaggcaggagataatgaaaacaatgatgcacgtgagacatttggaggtggaaatagcagaacttgccaactgttt

SEQ ID NO: 482638 - DNA, 473 bp, Homo sapiens
actgaacccaaatggctaatggattttctttcccgttacatgctctctaatttatgatgctttgcttggggggaaaatgagaggtgggagtctgtttacggaacatggaagtccttttgcagaggtacaagagtggaaatggctgttccccagcctggctctctgagtcagacctgacatccacagagagagcactgcagtaactgcaaacgcttctgttttgattgtggtaattrgaacaatcagggcacaaactgcaaggtcactggcaagggtagcagcaggcatgattcctcccttagtaattttaaagcagcagatttcaaaagggaaaaccaagcagatgaaagtgagcagatttgttcttcagcacatgtgagatacccttggagatgccaataaatcactggagagactgtgaaggaggcttaggccctgcagatgaagttagtgatggagggaaatcgtgttta

SEQ ID NO: 482639 - DNA, 635 bp, Homo sapiens
gacaaagaatattctagtggcatatacaagtgtccatcaaatatagcaatcacttttttttctttcatrgaagaagacaaggattatttcacttcttggtaaagagaaagaatatcacatgcttttttgaagcctcacaaaaacttagtcacataatgttttgtactttccattttttgttgaagaagctgagaaaataaagaggctgaataatttgagcaatccagagcctatagaggacagaatctagattagaatccaggactttcagcactaaaccctgtggtttttctgtatatcatgctgtctgactatggcaggattctgctaatttaacacacttagagttctagctttcttcgaagccaacatccctctggaaatgactgcacaatggggagaaacattccactttgatgttcttatttagttgatttagcaaaatgaacatagcttgaaaaacatggctttaattcttttttttctctgcctgtgttatactagaacctatattatacttgcataatgcaagagcactacacttctgttgtaagatttggcgcagtcactctgaaaattggcagtactgacttaaggcaaacaaaagaatactctatggccaaacagttctactc

SEQ ID NO: 482640 - DNA, 635 bp, Homo sapiens
gacaaagaatattctagtggcatatacaagtgtccatcaaatatagcaatcacttttttttctttcatagaagaagacaaggattatttcacttcttggtaaagagaaagaatatcacatgcttttttgaagcctcacaaaaacttagtcacataatgttttgtactttccattttttgttgaagaagctgagaaaataaagaggctgaataatttgagcaatccagagcctatagaggacagaatctagattagaatccrggactttcagcactaaaccctgtggtttttctgtatatcatgctgtctgactatggcaggattctgctaatttaacacacttagagttctagctttcttcgaagccaacatccctctggaaatgactgcacaatggggagaaacattccactttgatgttcttatttagttgatttagcaaaatgaacatagcttgaaaaacatggctttaattcttttttttctctgcctgtgttatactagaacctatattatacttgcataatgcaagagcactacacttctgttgtaagatttggcgcagtcactctgaaaattggcagtactgacttaaggcaaacaaaagaatactctatggccaaacagttctactc

SEQ ID NO: 482641 - DNA, 527 bp, Homo sapiens
gtcccagcagcatatggcagtgggctggggagaagaaaaccaaatgaggacaaaagcacaaatacaaaaataaacataagtcaagtttgtgctactgggtagtttyctttcatctttctgtgaggttaattaactgcacaatatgtctttgccactctgatgcatccaaagcatcccagaaggctcctcctccacaatctaaattataatgatgcctgacggttgcagaatttttagtttaactagagtgtactgaatcattctggacaatgcaaaagtgaaccttaaccattgtccatattataaactgaacttccactgcaggatcttactgaggccaagagctggtgctgacagattccacaacacacattctgcactctggctgtgagaggtcctaccccacactatatcaaacctaccaaatgcccccatcaaccacattaaaattgcttcaaaagtttttacaaggagtattataaatttgcttttaaaattatctgcctatgagcccttcatttcattat

SEQ ID NO: 482642 - DNA, 595 bp, Homo sapiens
gaccatgaaatcagccctggccttagaggtcaagatggtccagtcacatatggcttcagactgccatgttcttcaacgggtccccagcacccaggcaggcatgtcttgagagtaaaccagagctgcccagcttgctttgctggttctaacagcaaccccyccaccctccctacaggcaggcctaccacatactcacactgacctgtggcctctactcactcgccccctggaagaggaagtctcttccaacagaaaaggcaggtgagcttcaaagccaattcaggtgtccagtcccctcaaccatcttctattctgcattataaagggaaaaaaagtaaacaaaccacagttagagacatttcctgtaagatatgaacttacaggaaggtactcagtgcctcaagtagatttaagacagtgattccaagttaaatgccggaagtagcagaagctttcttgcaatccctaatcataccaaaacccaaattacagaaaacaaaaggaaaatagtgtcttttcaaaacatacgccttttcatacctttctgggtcatgagggttttgctctttactactccaagacaagacaggtggaa

SEQ ID NO: 482643 - DNA, 619 bp, Homo sapiens
gcacaactagcaaacacctggaagctacaaaatggtgggaagctcacagtgggatagatgggcctgcagaaacaccccgtgatctcaggctgcatggggtgggtggagcaggtggctggtgtgatctgcaggaggcacctcatggggcagccctgttagtcctgggctttgcacttaagcactcagaggttattcaagtacatcttgaccgtagggacctggatggtaaaggcattcaaaattacatcctcaacaatacatagtttcaaatagctyaaaggagggtattgaacattcccaatacaaagaaatgataaatgtttgagatgatggatatgctaattaccctaacctgatcactatatattacatgtatagaaacatcactatgtaccccatgaatatgtacaattattgtcaattaaaaattaaaaatcatactctataaaaaaagaatagaaggaatgtttagcccatagatggtagatttgacagccagacagaactgaatcaaatcctggttctgccttttattagctgcaggacacaggcagaattcttaaccttagtagtctctagttgtatgactgccaagaccagtgccataaaagtaaaatat

SEQ ID NO: 482644 - DNA, 536 bp, Homo sapiens
tgcacaactagcaaacacctggaagctacaaaatggtgggaagctcacagtgggatagatgggcctgcagaaacaccccgtgatctcaggctgcatggggtgggtggagcaggtggctggtgtgatctgcaggaggcacctcatggggcagccctgttagtcctgggctttgcacttaagcactcagaggttattcaagtacatcttgaccgtagggacctggatggtaaaggcattcaaaattacatcctcaacaatacatagtttcaaatagctcaaaggagggtattgaacattcccaatacaaagaaatgataaatgtttgagatgatggatatgctaattaccctracctgatcactatatattacatgtatagaaacatcactatgtaccccatgaatatgtacaattattgtcaattaaaaattaaaaatcatactctataaaaaaagaatagaaggaatgtttagcccatagatggtagatttgacagccagacagaactgaatcaaatcctggttctgccttttatt

SEQ ID NO: 482645 - DNA, 536 bp, Homo sapiens
tgcacaactagcaaacacctggaagctacaaaatggtgggaagctcacagtgggatagatgggcctgcagaaacaccccgtgatctcaggctgcatggggtgggtggagcaggtggctggtgtgatctgcaggaggcacctcatggggcagccctgttagtcctgggctttgcacttaagcactcagaggttattcaagtacatcttgaccgtagggacctggatggtaaaggcattcaaaattacatcctcaacaatacatagtttcaaatagctcaaaggagggtattgaacattcccaatacaaagaaatgataaatgtttgagatgatggatatgctaattaccctaacctgatcactatayattacatgtatagaaacatcactatgtaccccatgaatatgtacaattattgtcaattaaaaattaaaaatcatactctataaaaaaagaatagaaggaatgtttagcccatagatggtagatttgacagccagacagaactgaatcaaatcctggttctgccttttatt

SEQ ID NO: 482646 - DNA, 628 bp, Homo sapiens
tttaataacatggacttcctactgttgaattacaagagaagaaagaggtgtaaataatcattaagccaccaattagtagtcagatgacggcttcacaaaacacccttccgtgttagaaatttaggtaaaatgtaaaggaattcagtattacttactaaaaataaatacagaagaattatataaaaatccatcatgcatacttaatgaattatagatcttggcaaaatagatagctacatattttctctttgattttatcacggtgtaaaaacatagtataaatgtaactctttatgcataattttggaattatcatcttatctcaagcttaactaaatagaatatcctaaggtccttctacttgtcaggtaggttatcagtgctaacaccatatatttaagactagaaatgtaaacgtatgtatttatttaatgaaagctgtaacaattgatgtcttcrtataaaacactgctagttaggtgagcctatagaatcacttcacctttactgtgggagttttaaagagttttatttctaataattacagtgattatattttctttaatgtcaaattaaaatagatgttctaagatgcctaactgacttgagacctttagctgattatcag

SEQ ID NO: 482647 - DNA, 616 bp, Homo sapiens
ctttttttatgtgtgtctctgccacgttttggtatcaggatgatgctggcctcatagaatgagttgggaggagtttggaacactttcagtaggaatggtaccagctcttctttgtatacctggcagaatttggctgtgagtctttctgatcttgagattctttggttggtatgctatttattaatgcctaaattttgaagctcattaatagtctgttcagggattcaatttctttgtggcttagtcttgggagggtgtgtgtgtccagggatttatctatttcttccagatgttctagtttatgagcacctgcacttttaaaattatgctgggaacrtaggcttccatcacttttccatctttcactagcatcctacatgtttagtggtcatcagttcaacacactttatgatttctgccaaagattgacaaatacttggctgtgctatttctttgataagggtagattattctttcacatagtgaacgtttcaacataaaaaaattcaaaaggattactttgtcttattaatttggaatggaacataaactatgagtatcagtaatttaaaccgtggcaataatgaagtaagtacccagaaattgataggtcggt

SEQ ID NO: 482648 - DNA, 646 bp, Homo sapiens
ttccagaatgcaagtattgcctcttttggtttgatccctaaaggtgaaagcaaatgcctccttgggactcaatctggagggataatttctttcctctcaaatgtgtggggtttttttgtggttggaaaaaaacaatatgatagaaggttttgatagtaaagacagcttcctgctatttttatagaaccattactttttctgctcattgctttgctaatatgtttgcaataacaaattccccaagaagtcagtgtttgaaacagcattttaatttaggcacttcccttgcaaactattatgaatacatgtggcycactcagatttaactgtttaatgaattcccccaaaatgttaaagatgcaaacataaaaaatttaaaaataaataagtacatgttctgctccagtttggatgtgaaaatttgcaagaggttgtgttcacattaaaaaactaacaatctaagtatgccataaaattatagtttcctttaaaatgatgacaagtttgaggactcaaagaaacctaggtggaataaattccagaaaatgaaaagctcttcatatgagctttcatgggggaacttctacctatggtggaactacgggtagaagacacaaggcctctgtgacaaaggaagatgaaagca

SEQ ID NO: 482649 - DNA, 646 bp, Homo sapiens
ttccagaatgcaagtattgcctcttttggtttgatccctaaaggtgaaagcaaatgcctccttgggactcaatctggagggataatttctttcctctcaaatgtgtggggtttttttgtggttggaaaaaaacaatatgatagaaggttttgatagtaaagacagcttcctgctatttttatagaaccattactttttctgctcattgctttgctaatatgtttgcaataacaaattccccaagaagtcagtgtttgaaacagcattttaatttaggcacttcccttgcaaactattatgaatacatgtggctcactcagatttaactgtttaatgaattcccccaaaatgttaaagatgcaaacataaaaaatttaaaaataaataagtacatgttctgctccagtttggatgtgaaaatttgcaagaggttgtgttcacattaaaaaactaacaatctaagtatgccataaaattatagtttcctttaaaatgatgacargtttgaggactcaaagaaacctaggtggaataaattccagaaaatgaaaagctcttcatatgagctttcatgggggaacttctacctatggtggaactacgggtagaagacacaaggcctctgtgacaaaggaagatgaaagca

SEQ ID NO: 482650 - DNA, 623 bp, Homo sapiens
aaaatgtatttttcttatctaccacatggtcaggctgcaaatttcctaaacttttatgccttgctttccttttaaacataagttccaacttcagaccatctttttctccatgcgtatgagtgtacacttttagaaaaagccaggtcccatcttgaacactttgctgcttagaaatttcttccatcagacaccctaaatcatcttgctcaatttcaaagttccaccagtttctttgctaaagcatagcaagagtgatctttactacagttcccaataagtttctcatctccatgggtgggaattttgtttcattttgtattttaatttargatttttttgtaaagataaaagagacaaacgtgcaagtgtaaatggcctcctcaaaatttttaataaaataggtaatgtaatactaaaatattataaaacttacattatttacttaataattctatctacatgtgatgatttttcaaaaagtttgaaaaaaatgtattatagaagggatgggagagaaggtaaaaggatgggagagaaggtatgacacaggttggcaagatcctctaatatcttctcagctagaagatccaagctggaggcactaggtaaactgtaaagcagat

SEQ ID NO: 482651 - DNA, 623 bp, Homo sapiens
aaaatgtatttttcttatctaccacatggtcaggctgcaaatttcctaaacttttatgccttgctttccttttaaacataagttccaacttcagaccatctttttctccatgcgtatgagtgtacacttttagaaaaagccaggtcccatcttgaacactttgctgcttagaaatttcttccatcagacaccctaaatcatcttgctcaatttcaaagttccaccagtttctttgctaaagcatagcaagagtgatctttactacagttcccaataagtttctcatctccatgggtgggaattttgtttcattttgtattttaatttaggatttttttgtaaagataaaagagacaaacgtgcaagtgtaaatggcctcctcaaaatttttaataaaataggtaatgtaatactaaaatattrtaaaacttacattatttacttaataattctatctacatgtgatgatttttcaaaaagtttgaaaaaaatgtattatagaagggatgggagagaaggtaaaaggatgggagagaaggtatgacacaggttggcaagatcctctaatatcttctcagctagaagatccaagctggaggcactaggtaaactgtaaagcagat

SEQ ID NO: 482652 - DNA, 623 bp, Homo sapiens
aaaatgtatttttcttatctaccacatggtcaggctgcaaatttcctaaacttttatgccttgctttccttttaaacataagttccaacttcagaccatctttttctccatgcgtatgagtgtacacttttagaaaaagccaggtcccatcttgaacactttgctgcttagaaatttcttccatcagacaccctaaatcatcttgctcaatttcaaagttccaccagtttctttgctaaagcatagcaagagtgatctttactacagttcccaataagtttctcatctccatgggtgggaattttgtttcattttgtattttaatttaggatttttttgtaaagataaaagagacaaacgtgcaagtgtaaatggcctcctcaaaatttttaataaaataggtaatgtaatactaaaatattataaaacttacattatttacttaataattctatctacatgtgatgatttttcaaaaagtttgaaaaaaatgtattatagaarggatgggagagaaggtaaaaggatgggagagaaggtatgacacaggttggcaagatcctctaatatcttctcagctagaagatccaagctggaggcactaggtaaactgtaaagcagat

SEQ ID NO: 482653 - DNA, 621 bp, Homo sapiens
cttggaataaaacctaattggtcagaatatattataatttgatacattatgatattatagccataccaaagattctgtgagcgcagtattgtgtacaaaacttgctttcctgttgtgtcagtttggatcctctgagaagcaagacaccatgacaggttttacattcctgagatttatttaaggaaatggctgtgaaggacaaaggggagggtgtagaagtaggaagggaaayctttggaccacaaggccgtccaaacacctgggaacacacagaaagaatctccagcacacagcacagttctaggaaaatcttagggaggcagatgagagtattaagccatatttgctcactacagaagacttgcttcctgaaggagaagcctgcactggttcctctagcaatgctcatttattacctaagagaatgctggacagggggtggaagggggaagcattacctgcaggcaggtagtggtggatcctgaagggcagtatctgaggctgtgagtcaactatgctccctgaagcaaaagatataagcaatgactttctgtgagtttcatactcatcattcgcaccatcttttatccacctttcccaaggcatgtggctttgggttta

SEQ ID NO: 482654 - DNA, 621 bp, Homo sapiens
cttggaataaaacctaattggtcagaatatattataatttgatacattatgatattatagccataccaaagattctgtgagcgcagtattgtgtacaaaacttgctttcctgttgtgtcagtttggatcctctgagaagcaagacaccatgacaggttttacattcctgagatttatttaaggaaatggctgtgaaggacaaaggggagggtgtagaagtaggaagggaaatctttggaccacaaggccgtccaaacacctgggaacacacagaaagaatctccagcacacagcacagttctaggaaaatcttagggaggcagatgagagtattaagccatatttgctcactacagaagacttgcttcctgaaggagaagcctgcactggttcctctagcaatgctcatttattacctaagagaatgctggacagggggtggaagggggaagcattacctgcaggcaggtagtggtggatcctgaagggcagtatctgaggctgtgagtcaactatgctccctgaagcaaaagatataagmaatgactttctgtgagtttcatactcatcattcgcaccatcttttatccacctttcccaaggcatgtggctttgggttta

SEQ ID NO: 482655 - DNA, 629 bp, Homo sapiens
tcttgtacacactctcgtggggcatctcggggactggggattggaggtttgcccagcccagtccactatcactgtcacttacccactcmtcccagggtctcagctccagccagcacaaccagctgacatcactacagctgatatccacttgcatgtaccaaaaggaggaggccctacccttctatacacaaagcagcattattgtcacattagagagcaggagagccacaaaactgtctctattgggctgagtgaggaggttccaaccaaaattactcctgcagagaactgtgggacaggtgtcttttgtggctgtcagctacactgtggcctagagataaatgacagtgtacatttgaactgagagccacgacccctggagaaggagtatgacaggaaaacagatcactttcctgcctatctaagacatggagctagtgcagcctcctcacatcccacagagaccttggtgcattacaccaggagttcccccagacacctctgttaaggtggtgcccatgatcatcattgtggtattcataggtaacccaggaggtccagctttgcccagctattttctaccccctatcctgctgaacaggaatttccaggcaccaggcattccactg

SEQ ID NO: 482656 - DNA, 526 bp, Homo sapiens
tgttaaggtggtgcccatgatcatcattgtggtattcataggtaasccaggaggtccagctttgcccagctattttctaccccctatcctgctgaacaggaatttccaggcaccaggcattccactgtccagcccatcacctgaaacaacagagagcacttcacagaaaaaccagatcaagcacatacctatatgcttttgccacagctggttttacgcacaagtgctacctactggcttgcaggttgaactgcatgacccaatgtaaaatctgacaacagaactgcacatggctataaaagcagagccaaaattcctacccaaaatactctacagtcacaccctcaagagggaaaaaaaatcacatccaaatgaaagtaaattcaataaaaagaagtgacagcttgtacagatgagaaggagccagcaaaacatctccagcaccaagaagaaacagaatgttgtgacacccccaaagggccacatttgttctctagcaatggatactaaccaaaatgaaaacttt

SEQ ID NO: 482657 - DNA, 568 bp, Homo sapiens
ctgtggacttttctcctggtgttgtacagcagttcaaattagcacaagaatcataaaccctatatttgaacagctatataatattatatatttattttcccatttgatgttgcattactttttctaccaatcttcttacaataaattcataaatatcttaattatagcaaatgtgmagttcttaaagatgagaatcatcaaacatgtttctattacagagatatattcttcaaaaagtcatctaaaatagaaacccaactgggagacaccttaaaaggttatctgccacaacagaagctttgcttaaaatactgttctctttgtatttgtgttaataattgatttgtctttgaaattaaattaggaatctactatatctagtggtcttgaaatcaaagccccctccccattccttatcttcactgctgtgttcaaaaagactagactccagggacctgtccaaagctgggttaaatataggatgtctgagagacacccttctttcatagttcgagggtaagcatgtagctgtatgtgtgtggaggggcgggtggaggaggttagctgt

SEQ ID NO: 482658 - DNA, 568 bp, Homo sapiens
ctgtggacttttctcctggtgttgtacagcagttcaaattagcacaagaatcataaaccctatatttgaacagctatataatattatatatttattttcccatttgatgttgcattactttttctaccaatcttcttacaataaattcataaatatcttaattatagcaaatgtgcagttcttaaagatgagaatcatcaaacatgtttctattacagagatatattcttcaaaaagtcatctaaaatagaaacccaactgggagacaccttaaaaggttatctgccacaacagaagctttgcttaaaatactgttctctttgtatttgtgttaataattgatttgtctttgaaattaaattaggaatctactatatctagtggtcttgaaatcaaagccccctccccattccttatcttcactgctgtgttcaaaaagactagactccagggacctgtccaaagctgggttaaatataggatgyctgagagacacccttctttcatagttcgagggtaagcatgtagctgtatgtgtgtggaggggcgggtggaggaggttagctgt

SEQ ID NO: 482659 - DNA, 519 bp, Homo sapiens
gggggtgcggtgtatggaagctcatcctagctagcacttggagaagaactcacacattgcaaacatatccggttaaaaactggcatttgctgcaactaaaaaaggcaagtgatggtctaggtgaactgccttttctttctctccttccaaaggacaaaattaattttttttttttttttttgagayggagtcttgctctgtcacccagactggagtgtagtggtgtgatctcggctcactgcaagctctgcctcccaggttcacaccattctcctgcctcagcctcccaagtagctgggactacaggtgcccaccaccacgcctggctaatttttagtattttttagtagagacggggtttcgccatgttagccaggatggtctcaatctcctgacttcgtgatgtgcccgccttggcctcccaaagtgctgggattacaggtgtgagccaccgcacccggccccacaaaattaaattcttaattaaggaaactgtttcttttacatctattttttcat

SEQ ID NO: 482660 - DNA, 519 bp, Homo sapiens
gggggtgcggtgtatggaagctcatcctagctagcacttggagaagaactcacacattgcaaacatatccggttaaaaactggcatttgctgcaactaaaaaaggcaagtgatggtctaggtgaactgccttttctttctctccttccaaaggacaaaattaattttttttttttttttttgagacggagtcttgctctgtcacccagactggagtgtagtggtgtgatctcrgctcactgcaagctctgcctcccaggttcacaccattctcctgcctcagcctcccaagtagctgggactacaggtgcccaccaccacgcctggctaatttttagtattttttagtagagacggggtttcgccatgttagccaggatggtctcaatctcctgacttcgtgatgtgcccgccttggcctcccaaagtgctgggattacaggtgtgagccaccgcacccggccccacaaaattaaattcttaattaaggaaactgtttcttttacatctattttttcat

SEQ ID NO: 482661 - DNA, 405 bp, Homo sapiens
aagtcactgcacagcaccactaaaatatggtgacygataaaacggacaaaggtcattcagtgaaagtttcaaagcaaagagaatgaatgaatatatatatatatatatatatatatatatatatatatatatatatggatgtctactttttggattacagttttcagattatgtttgttttaaataagccagtctgctttcataataattatacttttaagccattttctgatgagacatttgtcatcatgagaacaatgtagtaaaagtttgttacactggggattaagatattagagtttccattcaagattccctaatactggaagaggttcacttaaattccatgattctatgagaggagtcaaatctgaggtgcaggctctgcaccttcccaggcctgca

SEQ ID NO: 482662 - DNA, 405 bp, Homo sapiens
aagtcactgcacagcaccactaaaatatggtgactgataaaayggacaaaggtcattcagtgaaagtttcaaagcaaagagaatgaatgaatatatatatatatatatatatatatatatatatatatatatatatggatgtctactttttggattacagttttcagattatgtttgttttaaataagccagtctgctttcataataattatacttttaagccattttctgatgagacatttgtcatcatgagaacaatgtagtaaaagtttgttacactggggattaagatattagagtttccattcaagattccctaatactggaagaggttcacttaaattccatgattctatgagaggagtcaaatctgaggtgcaggctctgcaccttcccaggcctgca

SEQ ID NO: 482663 - DNA, 405 bp, Homo sapiens
aagtcactgcacagcaccactaaaatatggtgactgataaaacggrcaaaggtcattcagtgaaagtttcaaagcaaagagaatgaatgaatatatatatatatatatatatatatatatatatatatatatatatggatgtctactttttggattacagttttcagattatgtttgttttaaataagccagtctgctttcataataattatacttttaagccattttctgatgagacatttgtcatcatgagaacaatgtagtaaaagtttgttacactggggattaagatattagagtttccattcaagattccctaatactggaagaggttcacttaaattccatgattctatgagaggagtcaaatctgaggtgcaggctctgcaccttcccaggcctgca

SEQ ID NO: 482664 - DNA, 549 bp, Homo sapiens
ctaggcccttaaaactcctcatggctccctacccaccacactagtgttaacggctcgattagggctctgtaggaaagggaaagaagtttgaatcaaaaattttctttttttttttaataatttaaacaatcagtaaggaatgtgcaatttgatgtcgtttgcaaagaaagtttttaggaacagggctttttatcctattatgtttgttctttgcacgtaattatttgatttaaatggtacttttcttaaaatttttatttacattgtattttatattgcaagaacttcaaatacagccctcacaataaatcagtaactgttcggtctttatccaaactgaacttttatagaaggatataaggaagtctctattctttaacaaatcatatccagttgttttctgtccctgatatcaatcaaaagttcatttcttctgcctttaaccaaaagaagtttacaagggaggaactctttatcttcgaaaaaaattttgcatcttagattttataacacytaatggggttaaggatctgtgttgaaagatcttat

SEQ ID NO: 482665 - DNA, 562 bp, Homo sapiens
ctgtctaggaaggataaaaacctggctccagtttttctaatttgtagctgtggttaccacattttgcctaacttcgaatgtccttttgagtttcatttgtattaatctggttaaacaacagtatttggatgtaaaagtatgccagtaktttattaatataaggtataatctaggccaggcacggtggctcatgcctgtaatcccagaactttggggggcggaggctggtggatcacctgaggtgaagagattgagaccatcctggccaacatggtgaaaccctgtctctactaaaaatacaaaaactagccaggcggggtggcaggcacctgtaatcccagctacttgggaagctgaggcaagagaatcacttgaacccgggaggcagaggttgcagtgatccaagatcatggcactgcactccagcctgggtgacagagtgagactccgtctcaaaaaaaaaaaaaaaaaaaaagtataatctgaacaaaagagaaccacccatttagtgcccaaaatacctagcactccctccagaagcagcttgctttctttaagatca

SEQ ID NO: 482666 - DNA, 539 bp, Homo sapiens
actgtttcttcaataaatggtgctaggaaactggatatccacatgcaaaagaatgaaaatggatgcttatcttgcaacacatacaaaaattaactcaaaatgggcttgggcttcttgacatattcaggtgcaagtggtttaaagtctctggacccagactgctgggtttaaatctcacctctgccagtaactaactgggtgatattgagcaagtttcttcctttctgtgtgcttcaatttcctcatttataaatggaataataatatcaatttcatagggttgttctgaagatgaaattagttgtaaagagcttagaacaatggccagcacaaagtaagacttgaatatgtgttagctctctgaaggctctctttttctttctctttggagtttgtattcaaaaagatactttacaaattttcrtaaactttctgtgtcttcccacaagatgatattttttttttcctgaactgaactttttataactgctttcacaaaggctgggatatgtgtctgactacacttaagatttatttca

SEQ ID NO: 482667 - DNA, 648 bp, Homo sapiens
cagctatgatcaggggtaaacagcagtgactctaatatgcctcaaggagagaccattaagtgtgaggcacttaaaagtgtcagcataaagatgacctgcctgatcatacaagcccctgaccacgcaagggcttatatctttttagagagtgagtccctggcctgtctgggcttgtaccttcttaacagccaccattcagggaacacagaaagcactgtgaccaccatatttatttcacctctgccaaaaactgcttctagctagaaaaaggagtgaaatcccacaaatcaagacttttcaaagccctagatctttcttgccctaatattaacactcaaagtttctttctctggtgataatgacttgaacatctgctatgagaagagacgagatcactgcccttcaatgccctccaccatctaatttcccatttgtgactggctaacctgacagcccagagcatgagaaagagcttcacatggagcagcaagcaagcaagtgcaggttttagagtcagattcttttctgggttcagtcgtccactaattyctggctttggggaagtcctcccagagcattagtttcttcatttgcaaaatgaggccagcataggattgctgaggggttgacatgaactcattgaggtgg

SEQ ID NO: 482668 - DNA, 635 bp, Homo sapiens
agctgtttggaacccgaactgtgagaattcagcaatgggaagaattgtgtaattgttccaggagtgaaaaataaaggttcaaaggctcacgtaggagtaaaggtattatgactgagtcagagaaaaaaagatgaggctaayagagatggagaagcaaatatgggagtttggagggaaggctgagccagattacatgtgattcgttggaagtgtaaaggagttggtagtgatagaaagtcagtggagggttttaagtagtatgttcataaattttatgcacattttaagaagctgttggctgctgagagcattgcagcaagggcaagaagcagaaaagaaaaaccaactaggtggtaaattcatcagccaagtcaagaaataatgacttcagttagggtgacagcagtatacatgaaaggaagctcgggaattggtaatatattttggaaatttaatcaactgaacttcatggtggatgacaaaggtgcaaaaaggtgcactaaagtactgaaaaatccttggttgtttggcccgagtactgttggtgccattttccaaaatggggaagtccagggaggacatagattcaggagctggggcaggggaatcaatagttctatactgtatttgttcag

SEQ ID NO: 482669 - DNA, 635 bp, Homo sapiens
agctgtttggaacccgaactgtgagaattcagcaatgggaagaattgtgtaattgttccaggagtgaaaaataaaggttcaaaggctcacgtaggagtaaaggtattatgactgagtcagagaaaaaaagatgaggctaatagagatggagaagcaaatatgggagtttggagggaaggctgagccagattacatgtgattcgttggaagtgtaaaggagttggtagtgatagaaagtcagtggagggttttaagtagtatgttcataaattttatgcacattttaagaagctgttggctgctgagagcattgcagcaagggcaagaagcagaaaagaaaaaccaactaggtggtaaattcatcagccaagtcaagaaataatgacttcagttagggtgacagcagtatacatgaaaggaagctcgggaattggtaatatattttggaaatttaatcaactgaacttcatggtggatgacaaaggtgcaaaaaggtgcactaaagtactsaaaaatccttggttgtttggcccgagtactgttggtgccattttccaaaatggggaagtccagggaggacatagattcaggagctggggcaggggaatcaatagttctatactgtatttgttcag

SEQ ID NO: 482670 - DNA, 588 bp, Homo sapiens
tcagcttcagctgagttgtcccagtttcaaaatgtgggccactcattcaaattcaatgtatatgaaacatatcaatacttatcagacaagaaaggagggaaaggaggkaagaaaggaggaaggaaaagaaagaaaaagaaatgaacagttgctttgaaacccccatgtacagactttataatgtaccatttgcaatgaacttttctttatggaagtaaggcaaatttcaataaaaagatgccttgtaaaactgattgctgggattggtactgatggaaaaaaatacaaaacaaaagtgctaagcaaccggcatcatccaaaagaaatgtcatttatgatgatgaacagtatgcatgcacaaaaagcagaatttaatgctgggctttagcagatgtaattatatagcatgacaaagtaaggcacaaaaggagttgaaccactctccaaattacaaagctgtaaaacattcagcagtcaagtaataaaaagaaaaaaatggttttacttatttgagtaacttatttttctccaacaacaaaattcctaggatgaacaatgaactcaggagttgcattctgactggtgccc

SEQ ID NO: 482671 - DNA, 657 bp, Homo sapiens
ttgtcccagtttcaaaatgtgggccactcattcaaattcaatgtatatgaaacatatcaatacttatcagacaagaaaggagggaaaggagggaagaaaggaggaaggaaaagaaagaaaaagaaatgaacagttgctttgaaacccccatgtacagactttataatgtaccatttgcaatgaacttttctttatggaagtaaggcaaatttcaataaaaagatgccttgtaaaactgattgctgggattggtactgatggaaaaaaatacaaaacaaaagtgctaagcaaccggcatcatccaaaagaaatgtcatttatgatgatgaacagtatgcatgcacaaaaagcagaatttaatgctgggctttagcagatgtaattatatagcatgacaaagtaaggcacaaaaggagttgaaccactctccaaattamaaagctgtaaaacattcagcagtcaagtaataaaaagaaaaaaatggttttacttatttgagtaacttatttttctccaacaacaaaattcctaggatgaacaatgaactcaggagttgcattctgactggtgcccctctccactcattttccaagtgatttcatttgctcaataagatcagccaccacaggatcgtgagaaatcttcgtgtgtgtgtgt

SEQ ID NO: 482672 - DNA, 602 bp, Homo sapiens
gtaatagatcagattaaatattatgaaggatatgctttcaattttgtggtttcatccgagtgaaattccgtaatactctaggaataakacacctgacatctgtgctctgctctttgttttgagtgtgccatttcacagtctttgaaatattttggattgaaaatgagatttcaaggaagtatttcattagaaggggggtattattctctttgaattgcatccaagctgcagtttttcatctttttttattaactttctatcacattactcttttttctaattatacattaaccaacacactttaatgtgcagaatgaatcctgtttggtttcaacaaaaattgcaatggaagctaaagctttgaagaagtgatgcaagagtgtctttaagttaatatcacatttccttctacactgattgcatatctcagtacctacatatgcttttaagccactgctacaagttttacatttatttaaataacatgaccattatgagtaaaacttaaaaaaaattgagtggaactttaagctgcctggtttattatagttgctttatgtttataaacagattatttttaatgtctgaatgctggtattaca

SEQ ID NO: 482673 - DNA, 623 bp, Homo sapiens
ttactttcaaatacaaaatgttggacggagacatggaaatacctctcgtttaaaaatatatatacatcggcagctttttgatgattagaaaaatcaacattgcatcctgaaaactataaagcactgtgtatatatgtgtgtgtatgtgtatgtgtatgtgtgtgtgtgtgtgtgwgagagagagagagaggagagagagagagaaagagagagagagagagagatagtttggatatttgtccctgcccaaatctcatgttgaattgcaatccccaaggctggaggtgaagcctggtaggaggtgttttgattatgtggtcagattccccatggcttggtgctatcttcctaatagtaagttctttccagattaggtcatttaaaagtgtgtggcacctccactgccaccccctctgtctccctcttgctcctattttcatcaagtgacatgcctgctcccacttcaactttggccagaataaaagcttcctgaggccttcccagaaaccgatgctggcactatgcttgcttcctgtgcacttgcagaaccatgagctaattaaacctcttttcttataaattcccagtctgaagtatttcttgatagcaatgcaagaacagcc

SEQ ID NO: 482674 - DNA, 610 bp, Homo sapiens
atgtaaacttccacttctagcatgatggggaaactaatacaaaaattgccctcccatcatacaatgagaaaacgggacagatatataaaacaatagttttcacttgttagaaaacaggcagggcatcctcgagtctgctgcggaagactaagctacatatatacagggtaaaatttcacaaggctgggagaagaaaagcaggtgcgctgtaagatgaacaatgctcagagygtgcatagaggtaggagccactcgagttccaaagagctgaagtggagagacatcattaaacacctagtgagttcagaagagacctcagatatgccaagcctcagtcatagggctgaactagctttagagtgcaggttaccccctctaacaagcttaaaaacaagccttgagagaataacattgattgacaagtaacttagttgcatgccggaatatagttcaacactctctaagggaaaatgacaaaattgagccctcagtaatgtggtatttaaatttccaagtattcaatcaaaaagtaactagacatgtgaagaagcagaataatgtgacccattacagggaaaaggcagccaatagaaacagaccaagaaatcac

SEQ ID NO: 482675 - DNA, 608 bp, Homo sapiens
caagaagcatggtgcagtggggtgcagtggggtgcaggggggtgcagtggtcatttgaacccatatgtttgtgagcaatggacctataccgcagtttagggttttgacacagcctgtaccccaaaccttgccccagagtacaaaggtctactccacgtggccaccttagcagaaacctaatagactatgcccgtgggatcttgcctcagaggttacttcacccttccagaatgcttactcacaacactcacaaccttatacttaaggctcatgagcccccccagaaatcccaggaaaaactgcagactcacagagggatgggggtgcatgggaaggggcaggaaggacagtagatctcttgctcccttgccaattgctctcagatttacatggtcattcaagtcaaagagcccagctgggcttcccaatctcatctcaacttcacatctacacatttaatcattgatttgaagccctcgcacaaggtggggctggaggaagttccagaaccagccctttcccaggataagtgtctgccccraccctctccactctcagagccagtttccccttggaggatcatctctgcccaaagatctcagtcctga

SEQ ID NO: 482676 - DNA, 597 bp, Homo sapiens
ccactgagacacaggcttgtaggcaagtaaacaacgctgggagtctcccaggaagcaatcgcctgtgcctgctggagaagtggcatggacaaacattctggctgatgtgcttttagggccctcrtacaatttcagcccccccccattatagaatcttcaaaagcaactctcacccccgcatctccccaccagcccttctgaataagaaagagtacccagggatgcttgggggtgtttagccttggcctgagaccaccagagatctgggaaaaagaagaaacagacaggttaagaagcgggtggttaagctgggcaggccagagatgaagggaaaggctacaactgagaaaaacagggcagaatgcaccacgtcagagcggtatagaaggtacagaaggtcagaacgaggtatagtctctgctgggggctggggacaggcacagatctcaggaaaggtcaggacaagggcagctttgggcagacgggctgccacgagggactcccgccttgtggggcacaggaggggagagccgtggcatagcatccatgtttgcccctgcaggtcaggctgagctgtggcttcaaaagaaccttggc

SEQ ID NO: 482677 - DNA, 597 bp, Homo sapiens
ccactgagacacaggcttgtaggcaagtaaacaacgctgggagtctcccaggaagcaatcgcctgtgcctgctggagaagtggcatggacaaacattctggctgatgtgcttttagggccctcgtacaatttcagcccccccccattatagaatcttcaaaagcaactctcacccccgcatctccccaccagcccttctgaataagaaagagtacccagggatgcttgggggtgtttagccttggcctgagaccaccagagatctgggaaaaagaagaaacagrcaggttaagaagcgggtggttaagctgggcaggccagagatgaagggaaaggctacaactgagaaaaacagggcagaatgcaccacgtcagagcggtatagaaggtacagaaggtcagaacgaggtatagtctctgctgggggctggggacaggcacagatctcaggaaaggtcaggacaagggcagctttgggcagacgggctgccacgagggactcccgccttgtggggcacaggaggggagagccgtggcatagcatccatgtttgcccctgcaggtcaggctgagctgtggcttcaaaagaaccttggc

SEQ ID NO: 482678 - DNA, 404 bp, Homo sapiens
gtattttatttctcttggcaataattctctgttgtttgcactggaacctcacatgagaacatcaaatggggytaagggtggaggggaaaatgatgcaaaagaatgtctatcttattctgattcatagagcgatttccacccaggactaagaacagtgatggtaggatcctttaccaacttgatcaacttcctcatctcactacaatttatttgatctctgcctccctttttcagacagagaccaaagagtggcctcctccagagggagaggaatgagctgggcagatgctgagtaagtccactgacagcccgagctcagtgacaataatgctgggtgaagcactcatcatgacagctacgttgggctgttgtcatgattggctgcatcattaggtcccttcctc

SEQ ID NO: 482679 - DNA, 404 bp, Homo sapiens
gtattttatttctcttggcaataattctctgttgtttgcactggaacctcacatgagaacatcaaatggggctaagggtggaggggaaaatgatgcaaaagaatgtcyatcttattctgattcatagagcgatttccacccaggactaagaacagtgatggtaggatcctttaccaacttgatcaacttcctcatctcactacaatttatttgatctctgcctccctttttcagacagagaccaaagagtggcctcctccagagggagaggaatgagctgggcagatgctgagtaagtccactgacagcccgagctcagtgacaataatgctgggtgaagcactcatcatgacagctacgttgggctgttgtcatgattggctgcatcattaggtcccttcctc

SEQ ID NO: 482680 - DNA, 404 bp, Homo sapiens
gtattttatttctcttggcaataattctctgttgtttgcactggaacctcacatgagaacatcaaatggggctaagggtggaggggaaaatgatgcaaaagaatgtctatcttattctgattcatagagcgatttccacccaggactaagaacagtgatggtaggatcctttaccaacttgatcaacttcctcatctcactacaatttatttgatctctgcctccctttttcagacagagaccaaagagtggcctcctccagagggagaggaatgagctgggcagatgctgagtaagtccactgacagccygagctcagtgacaataatgctgggtgaagcactcatcatgacagctacgttgggctgttgtcatgattggctgcatcattaggtcccttcctc

SEQ ID NO: 482681 - DNA, 404 bp, Homo sapiens
gtattttatttctcttggcaataattctctgttgtttgcactggaacctcacatgagaacatcaaatggggctaagggtggaggggaaaatgatgcaaaagaatgtctatcttattctgattcatagagcgatttccacccaggactaagaacagtgatggtaggatcctttaccaacttgatcaacttcctcatctcactacaatttatttgatctctgcctccctttttcagacagagaccaaagagtggcctcctccagagggagaggaatgagctgggcagatgctgagtaagtccactgacagcccgagctcagtgacaataatgctgggtgaagcactcatcatgacagcyacgttgggctgttgtcatgattggctgcatcattaggtcccttcctc

SEQ ID NO: 482682 - DNA, 479 bp, Homo sapiens
accccaagttcttcagaatatgactgtatttggagagagagccttaaatgaggtaactaaggttcaatggggtctgtagggtgggccctaatccaataggactggggtccttataagaagagattaggacacaaaccacacagacggatgaccatgtggggacacagtgagcaggcagccatgtgcaagacaaagagcgaggcctctgaatgaatgaaccctgttggcaccttggtcttgaacttccagcctccagagcagtgagaaaatcagattctgttgttgaagcccccagtctgtggagcactgctatggcagcccgaacaaatgaacacagagggcctcatgcaaaggtggaaataagcaactggcrctgggccaccggggacagactggctgggatggagccaagggggcttcttgtggaaggtcaggaaggagactggcaggggcttcaggacccagtaggccagggcaag

SEQ ID NO: 482683 - DNA, 505 bp, Homo sapiens
ctgacgaccgctcctcccaagccacaggctgcaatgcggctgctacacactgcagggctatgccccagtctttacagggaggggattaaaaytggttcccttcttcacactttctgtctctgtttctcagcctctgaggaatggtatttgttgaccttggagggcaaggctaaagagtctcccactgcgagaaaataggaagtcaggccctctctcgggaggccacctgctcctgctacctaatcattcccaggtgactagggatgacacataggttctgcaaggtgagtgtcctggcacggcctgggagtgaagacagggctcacgatggcagctgtacaatgtcaagcccacatctctgaacacgccgggattgggaaggcctgggaagccacaggtgcttgcttcaagacctggatcctccaagagcttatgcacctcacagaaaaacaacaaccatgaaatcttgggtctcagatttctcacctgtaaaatgggtatgggg

SEQ ID NO: 482684 - DNA, 395 bp, Homo sapiens
ctgcctacttgagccatctgacttcaatccacagggcctcccaggagctgaatccagaagggcaagaacaaaktagcaaagcaggaaagggcattcagaagagaacagcatgggcaaaggtcccaaggccagaggacttggaaactgcaagtccctcagtgtagagatgagtctgtagaggaggttgacacaagcttgtgaaagacccagtatgccaggctaagggggtgggaacagtgagggacactgagggttttatggcttaaattttgacaagtgtatctacatatagacaactaatgtaacactcctttttttttttttttttttttttttagagatggagtctcactctgtcgcccaggctagagtgcagtggtgagatcttggctcac

SEQ ID NO: 482685 - DNA, 612 bp, Homo sapiens
gaatttactcatgaagagaaacagtgtggcctgctcaagacaaagccatcatcacctctgggaaaccaaatcacagagcctaagctgttcctgtgtttctcacacctgttccttctttccattctgggaagaaaagtttagtgacctgtcacagcttgtttcagtaggcttctaatattctccgtgtctctagtctcttcccatcctaataatcctacacatgaaggccaggggcagctctattcatgccatcttcatcgatggccctgaagttaaaacccaatatctttgtatttaaagccttctgtgttcgatccctgsttttccttcctatcttgactcctcatcctctttatcatttaatattgcactcagattgcataacccattagccctcaaattttctccatgtttctcacctttgtgtttgttcttctgatgttacccctggatggaacaccctctcaccaattatctcaaaatgtttttcattacatggcattgttcaagtgtcaccagttttcaactgggcacagtggcttacacctgtaatcccagaactttaggaagctgaggcgggaagattgtttgagctcaggagttcaggaccag

SEQ ID NO: 482686 - DNA, 632 bp, Homo sapiens
attggagtcacctgaaaagcctttctaaaatcccaatcccaggctgtaccccagaccaatgaaatcagaacctctgggagaaggaccctggtactggtgtttttaaagctccccaggtgattccaacctgcagtcaaggtcgataaccactgctttgtgccatttatcactttcttccttgtagtcgtaattacactgcatttgtcttattcccaggactaagtttgcaactcctcgagggcacagaccatcttatcacatctgcttatgccctgcagttcttagtgaatcagagctgcaacaaatactgttgaatcgaatttaggaacttaaaattaaccaaaaacttcctttttagattttgcaaataattttagaagaggtrtcatattagtggaggactaacttgaattttttaatgtggttctgttcgccattaccaaaaatattctgatatgactttgaaatcagaatagctctcattaaagaccaacaagctgcaaatatgtggcctttgcttttatacttttgcttttgaactcttcacaaagaagtcttctgtgtttctttgagaaccaactgcaaaatgtgacagtgcatgtgctcatctctaactgaaataaacaaaagca

SEQ ID NO: 482687 - DNA, 466 bp, Homo sapiens
tgctccggagactcctggctgccaggcttgacttgggcttgattgatttagcctgttacctggaaagggcactgctgctccctgcccaggtcaggtggtgctaggagctcctgcttggtctccgcagacagagcctgggctctgaagccagtcagacttgtgtttgaatcttggcaacacctctttccagttgagtgacttgaacctccctgagtctcagtttcccaggctgggcccagaggtgaggtggcatgctgctatcagtgactgcagtgcctccttcctcaagtcaggggctgtggactgtctgatccagaacggcctgcagaggtgacctggccgaatgtacccattttacagatggaaccctgaagctcagagacttgtaggtcctggatttggttgtacaaccagtatctggtactgctygggctaggaaagaggcttcaagtcagagcatcaggcc

SEQ ID NO: 482688 - DNA, 608 bp, Homo sapiens
cctggtcttaacacttaccatctgtgtgaccttgagtgagttgcttaacctctccgagccacaactgcctcattagctgagtggagctaatggtcctcatcccgcaatgctgtcgtcagcctcaagccaatagtggtcctggctgtgtgactactgccaagtctgccctctctgggcctctatttcgtcaccttccaattccctcaggcctcttccctctggatctcctgggatttttaggatggagggaggagagggagagcagttggttgcgcttgggcagggctggtcccagggtccgatgagatgggagagaggggtgatggcrtcccttggcaactggcgtggcctcccctcacagatggcttctgggaggccctgggcgggaaggctgcctaccgcacatccccacggctgaaggacaagaagatggatgcccatcctcctcgcctctttgcctgctccaacaagattggacgttttgtggtgagcccctgcggaggtcacacctctgctttcccctcgggaggcgagttccacaggactggccggcagcaggggcaggagaaacagttctgatggtgtggcacagaggaaggggccccctg

SEQ ID NO: 482689 - DNA, 517 bp, Homo sapiens
aaggaccagagtggctaagtcttctggcttccatctttctcctgtgctagatacttcctgtcctcaaacatcagattccaagttcttcagtttgtggactcttggacttacacgggtggtttgtcaggggctctcaagcctttgggcacagactgaaggctgcactatcagcttccctactttttttttttttttttttttttttgagctggagtcttgctctgttgctaggctggaatgcagtggcgcartcttggctcactgcaacctccacctcctgagttcaagcaattctcctgcctcagcctcccaagtagctgggactacaagtgcatgccattatgcctggcaaatttttgtatttttagtagagatgaggtttcaccatgttggtcaggatggtcttgatctctttaccttgtgatctgcccgcctcggcctcccaaagtgctgggattacaggcatgagccactgcgcccagacggctttcctacttttgaggtttggagactttga

SEQ ID NO: 482690 - DNA, 517 bp, Homo sapiens
aaggaccagagtggctaagtcttctggcttccatctttctcctgtgctagatacttcctgtcctcaaacatcagattccaagttcttcagtttgtggactcttggacttacacgggtggtttgtcaggggctctcaagcctttgggcacagactgaaggctgcactatcagcttccctactttttttttttttttttttttttttgagctggagtcttgctctgttgctaggctggaatgcagtggcgcagtcttggctcactgcaacctccacctcctgagttcaagcaattctcctgcctcagcctcccaagtagctgggactacaagtgcatgccattatgcctggcaaatttttgtatttttagtagagatgaggtttcaccatgttggtcaggatggtcttgatctctttaccttgtgatctgcccgcctcggcctcccaaagtgctgggattacaggcatgagccactgcgccyagacggctttcctacttttgaggtttggagactttga

SEQ ID NO: 482691 - DNA, 644 bp, Homo sapiens
aatttttttcaaacctagaagcttctcaggctgtatagtctgccatattgtgggaaatagaagcaagtagctcgctttttcttgtatggcctctaaacagcagtaatcccttaacaatcaattatgaaatccatcttttcatcaaaagaagaaaaaacagaaagtattaccacagagaaaacaaaggtttccagccatccttgaatattctctctctctctccacatatatatggaaaggaggcaggtgtagaaagaggggaggtggcctggtatgcctggcctcagactcaggcctgccgtgccccagcagaccccattcaagtccccggccaggccctttcagggctgggccctctgactcgaagttgctgcagaagaagggaaggyctccttcacggaggctcaggtccatcaaactttgctaacttcatgcttttgttttgactgtctgtttgttgaaggtgattgtacaggtttgcaagggctgctgtaacgaaacaccacacactggcagcttacacagcggaaactgtctcacagttctggggaccagaagtctgtgatcaaggttaagagcagggctgtttcctctgggggtgctgcaggaagagcctgccccatgccctgcccctggcctctggg

SEQ ID NO: 482692 - DNA, 644 bp, Homo sapiens
aatttttttcaaacctagaagcttctcaggctgtatagtctgccatattgtgggaaatagaagcaagtagctcgctttttcttgtatggcctctaaacagcagtaatcccttaacaatcaattatgaaatccatcttttcatcaaaagaagaaaaaacagaaagtattaccacagagaaaacaaaggtttccagccatccttgaatattctctctctctctccacatatatatggaaaggaggcaggtgtagaaagaggggaggtggcctggtatgcctggcctcagactcaggcctgccgtgccccagcagaccccattcaagtccccggccaggccctttcagggctgggccctctgactcgaagttgctgcagaagaagggaaggcctccttcayggaggctcaggtccatcaaactttgctaacttcatgcttttgttttgactgtctgtttgttgaaggtgattgtacaggtttgcaagggctgctgtaacgaaacaccacacactggcagcttacacagcggaaactgtctcacagttctggggaccagaagtctgtgatcaaggttaagagcagggctgtttcctctgggggtgctgcaggaagagcctgccccatgccctgcccctggcctctggg

SEQ ID NO: 482693 - DNA, 532 bp, Homo sapiens
aatttttttcaaacctagaagcttctcaggctgtatagtctgccatattgtgggaaatagaagcaagtagctcgctttttcttgtatggcctctaaacagcagtaatcccttaacaatcaattatgaaatccatcttttcatcaaaagaagaaaaaacagaaagtattaccacagagaaaacaaaggtttccagccatccttgaatattctctctctctctccacatatatatggaaaggaggcaggtgtagaaagaggggaggtggcctggtatgcctggcctcagactcaggcctgccgtgccccagcagaccccattcaagtccccggccaggccctttcagggctgggccctctgactcgaagttgctgcagaagaagggaaggcctccttcacggaggctcaggtccatcaaactttgctaacttcatgcttttgttttgactgtctgtttgttgaaggtgattgtacaggtttgcaagggctgctgtaacraaacaccacacactggcagcttacacagcggaaac

SEQ ID NO: 482694 - DNA, 577 bp, Homo sapiens
ccatctctgcagactcataagctggggccaggaaagggttccctccctcggccaacagtttcaggtaatggggcaatgagatgcgtgttgacactggaactcttatttttccacgcaaacattgttataaaggggactaaggtccttcackggttttgggaatttggctattggtcaattatcatcaatgaacttttaaaaacaaaatttaaagaggaggtcctgcaaagcccacagtaagagcattaaacaccagtgtatataaggagcaggaccttggatgaatggactatcggtgaagggagatacagaaactccactcatccatcaggctagacatccactttgtttagcttccagaagctgaggcatttcctctttcttcctcagcaccattaacaaagcaaatgcgaggcagccggcaccctgcacagcctccacagatggaggggcctcatttgtctcgctgcacagaaccagaatcatcatcactcaaatacagcaaggaggccacaggcaggaggcagtgaccacgaaatgcaggcctttggacatctgagtgttcagccctacaaaa

SEQ ID NO: 482695 - DNA, 585 bp, Homo sapiens
gtcagaagcaggcccaggccaggtcctgtggggccgtgtgggatggtattctgcagagagaaggcatgagtctccagaaatgtgcactgggttggggtcggcagaaaatttagagaagtttaagaagcgggcctggctcctaaagaagcttatctcttacattaaaatctcaggattaagtctaaacagtgaacaaggatgcatttaaaactttagtgacttctagctagtcataaaaaccatttttatgaattatctcactttggctcaaagatgttttcagcaaaggctgtcagtttcattgtaataaagcatttagaatgaacttctgagattccaggtcttgctgtgataaatctggctttgcaaagatttataaattttactgcttatagattaattatgatcttgagcacgtttgtttccttgtgggtttactttgaatttggaaaataaattgcatcaagaggtaaatttgctggttattgccaagttcttttaaaagggctcattaaactgaaacggtgtctgtgtcttgcgaygggttgaaagtatttagatgctttctgttcctgaggtcgatca

SEQ ID NO: 482696 - DNA, 519 bp, Homo sapiens
tggtggctggggaagcactgactgggctcgcccaagatcctgtaccctttcccttccccttcagctactcgcttcccaagacccctctccatacaattactcggaatccctttaggacatccatgcctcacatgtcctccttcctactcatgactatggggcactgactcttccttattctcacgttcttgttcttcatttggactatgattctgcttcccacygcaatggtgcctgcacagggaactctcagactgaccatactctgagcccataccttggcctcagcttaggggcccatgaatccatgatatcaggatagcctcagtgaggccagcgagaagctaatagtagtgactggctaatacaaaacttaggcaggtggagatgactcttttacatggttccccagtcattcaccagacagactcagcctcttggattcagggggcaatttcaggctgccctagtttcttgtttcccaggtgatgttcagcaagaggcatatggctttccccc

SEQ ID NO: 482697 - DNA, 498 bp, Homo sapiens
caatgtcccaaggcagttcctttgttcaggacagatgctgatgtttgagaagaggcacacattactggataaagaggcacacattactgaggaagsaagtgtgtggttgtgtaaggaagtgtgttgtatttgtgtacctctttactgttattacgagatgcagagagcatgctggaggcatctccataatatcacaactgtctgaagctacttagctgccagaaaccttggcagacttcaggttgaataagtgcccatagtacattcaattattgttgcaaagatcattggatgcgaaaggtcagaactgtttgggatgcatctcagagttgatgtagttcatctctaactgctgcttgataatctttatgcatatatatgcatattatacatgtattaatctgctgattaatgtgaataatctcttcttctctccatatatatgtgcagagattaattagcagactctgctagaggtctgcctttccttccacatgt

SEQ ID NO: 482698 - DNA, 498 bp, Homo sapiens
caatgtcccaaggcagttcctttgttcaggacagatgctgatgtttgagaagaggcacacattactggataaagaggcacacattactgaggaaggaagtgtgtggttgtgtaaggaagtgtgttgtatttgtgtacctctttactgttattacgagatgcagagagcatgcyggaggcatctccataatatcacaactgtctgaagctacttagctgccagaaaccttggcagacttcaggttgaataagtgcccatagtacattcaattattgttgcaaagatcattggatgcgaaaggtcagaactgtttgggatgcatctcagagttgatgtagttcatctctaactgctgcttgataatctttatgcatatatatgcatattatacatgtattaatctgctgattaatgtgaataatctcttcttctctccatatatatgtgcagagattaattagcagactctgctagaggtctgcctttccttccacatgt

SEQ ID NO: 482699 - DNA, 498 bp, Homo sapiens
caatgtcccaaggcagttcctttgttcaggacagatgctgatgtttgagaagaggcacacattactggataaagaggcacacattactgaggaaggaagtgtgtggttgtgtaaggaagtgtgttgtatttgtgtacctctttactgttattacgagatgcagagagcatgctggaggcatctccataatatcacaactgtctgaagctacttagctgccagaaaccttggcagacttcaggttgaataagtgcccatagtacattcaattattgttgcaaagatcattggatgcgaaaggtcagaactgtttgggatgcatctcagagttgatgtagttcatctctaactgctgcttgataatctttatgcatatatatgcatattatacatgtattaatctgctgattaatgtgaataatctcttcttctctccatatatrtgtgcagagattaattagcagactctgctagaggtctgcctttccttccacatgt

SEQ ID NO: 482700 - DNA, 478 bp, Homo sapiens
gctgctcctcaaatgcctctggaagacaatagcaacttacgacttccttaccaggaaacagcatcagatagccttcaaaccagaaatgcctctcatgtcttgatgtcagagaaccattctaccaagaggaggagcagcccagcaaagtccatcaaacggtgagagtatattccagagcagggggcaggaggacgttaggggagcctgtggcttctgcagcagaggcaatagcagaaggagaggagagggaggagcagaaggagagcagagggagagcagagggaggagccttcaagggctgctgtgtgttcggagcccagctaaagccaagcaggcctctgagctccctgctaggagttcatgtctgcagggcatgtggctgcttggaamttagccatgtagacctcacagtctgtctttgccagagaaaggcagggcaaaccatattatacacctttataacattgtttcaaatcca

SEQ ID NO: 482701 - DNA, 563 bp, Homo sapiens
ggctggctacagacagggactccagtagggaatgcaaaccagagtgccgtcttggctcacggggaaccaaagtggcccagaatctccaggtacctaaagatcaagacagttttcccatggaagagcctccaagtgctgtggtgggagggaccctggggagtcagagaaggccaartagaatcccccccagtgtggcagatcccaggagacagagtgcccctagaaggagcctgccacagtcataccactggtctccatcataagccagtggccccgatggaacaggtgtgtgggatgaggttcaaggggaaagtcaaagcctagacagggaaacctgtccgagctgaggattcggtgtgaaaggtgagcatacaaattgggtcacccttgtcacacccaactaaggcagagtgccaggtagggagaccattcagcactcaggatagaaaacattgctccaagaatgtacttctctgaggcctgactgctgaaactgcctgcggtaacctgaaaccagttttatctgatggctactgagaccacctgctgcaactctaagcctc

SEQ ID NO: 482702 - DNA, 439 bp, Homo sapiens
agtttgccatatgggtaaaaagaagaaacaggatgttttgttttagttgtataagaatgaaatatcacaggaagaataagaaacgaataaaaatatttgcatttgaagatgataggttgactggggatggtgtasaagtgagacttttctgtaacagattttttctaatattttactttagaaatatgtagaggtattacttgtaaataaaacattgaaaaagtaaaagaaatttgcccaagatcactgattggtaaatatcaaaactggtcttcgagttcaaatttgtcttattccaatgaagacatgaatatttttatttaagatttttctcacatgaaagtaatacatgtacatgatggaaagtttggaaaataagaaatggtaaaaatatacctgagatgctttcacagctgacaataaatggtctttttttttt

SEQ ID NO: 482703 - DNA, 499 bp, Homo sapiens
gtctttttttttttttttaaattgtggtcttaaaakttaatttagtaatgggacattttcttcaaacttaatcttgcaaagaagcataaattatgtcacatgaaagtggaattgatttcacatcccctcaaagggttcaaaattctacatctctttagtttagaccagtggttctgaaagtgtggtttgcagacaagtagcattggcatcacctgggaacttgttggaaatgcaaattatctggccccagtccagacctacagagacagaacctctggagatgaggctctgtgtttaagcaagtcttccacgtgactgatgctcaggtttgagacccactcatgtgcaccataaaatccatcttaagttttacatcataatgtaatgttggttttgcttttcctagatggaaaagtctgtgagggaaggaacccgcagtatttatttcagttatgggcacctggtctataccaactaaatacctgtttaatcagcccat

SEQ ID NO: 482704 - DNA, 499 bp, Homo sapiens
gtctttttttttttttttaaattgtggtcttaaaagttaatttagtaatgggacattttcttcaaacttaatcttgcaaagaagcataaattatgtcacatgaaagtggaattgatttcacatcccctcaaagggttcaaaattctacatctctttagtttagaccagtggttctgaaagtgtggtttgcagacaagtagcattggyatcacctgggaacttgttggaaatgcaaattatctggccccagtccagacctacagagacagaacctctggagatgaggctctgtgtttaagcaagtcttccacgtgactgatgctcaggtttgagacccactcatgtgcaccataaaatccatcttaagttttacatcataatgtaatgttggttttgcttttcctagatggaaaagtctgtgagggaaggaacccgcagtatttatttcagttatgggcacctggtctataccaactaaatacctgtttaatcagcccat

SEQ ID NO: 482705 - DNA, 580 bp, Homo sapiens
gaaagaagtgtgttagaatgtatttgtacttataatctgtctttttctcaaatttattttagatctatctatcctcctcagagarttcaggttcttaagggtagaaaatgtgtcatatttttaggtgtttatttttgtttctcaaactacctacctttcttttgttatgtaataggcatataatatttattaaagagaatttatatctaagggaaatgccagcatttttagtacataggagacatataggtttctaattctaatctgaatggaaatgcctggctcacaaaattgtttctgttttagtctttgctgaaaaccaaattaaaaaacaattttgtgagctttggcttaaactctttaataatcgtcttttaatatttgtgatgtatttgttggacactgggaacataccaaaatagtttttcaagttgcacgaatatgttaagagttttagttttaattaatagaatttattttataaaattataatataaaacattatatttagtttagaagaagttaactttataacatctattctcttttttttgaagtgatccttatttccatggattta

SEQ ID NO: 482706 - DNA, 540 bp, Homo sapiens
tttttctcaaatttattttagatctatctatcctcctcagagaattcaggttcttaagggtagaaaatgtgtcatatttttaggtgtttatttttgtttctcaaactacctacctttcttttgttatgtaataggcatataatatttattaaagagaatttatatctaagggaaatgccagcatttttagtacataggagacatataggtttctaattctaatctgaatggaaatgcctggctcacaaaattgtttctgttttagtctttgctgaaaaccaaattaaaaaacaattttgtgagctttggcttaaactctttaataatcgtcttttaatatttgtgatgtatttgttggacactgggaacataccaaaatagtttttcaagttgcacgaatatgttaagagttttagttttaattaatagaatttattttataaaattataatwtaaaacattatatttagtttagaagaagttaactttataacatctattctcttttttttgaagtgatccttatttccatggatttag

SEQ ID NO: 482707 - DNA, 524 bp, Homo sapiens
gaacttctacatgtggaattcaaggagaggaggaggagctgtaaaggacaacgagaatgagtttcaggagagtgtgcggtcaagcagagagtgacgttttaagaacagtgtggtcagttatatcaaaagctgacaatacaccaagtaagattaagacaaagaaacgtccattggatctggcatcctaaagatcaccagtgaccttaaccgtggtggtttctgtaggggggtaggggacagaaaccaagtatgaggtggttgaagtcaacacaaggaagtgagcttgtctccaaaaccccctttgcttcaaacacccaggcatgatatttaaaatataaaaatgattttttccraaaagacacagttgcactcttatatatctccatgatatgtaatccaagatatatatatatcttatgtatctccatgaaccagaaatagaatggaaacacgttaagctaagtatttccttaggctgaagtctcaagcttgtggggctctaagtctggaagttggacactagc

SEQ ID NO: 482708 - DNA, 524 bp, Homo sapiens
gaacttctacatgtggaattcaaggagaggaggaggagctgtaaaggacaacgagaatgagtttcaggagagtgtgcggtcaagcagagagtgacgttttaagaacagtgtggtcagttatatcaaaagctgacaatacaccaagtaagattaagacaaagaaacgtccattggatctggcatcctaaagatcaccagtgaccttaaccgtggtggtttctgtaggggggtaggggacagaaaccaagtatgaggtggttgaagtcaacacaaggaagtgagcttgtctccaaaaccccctttgcttcaaacacccaggcatgatatttaaaatataaaaatgattttttccaaaaagacacagttgcactcttatatatctccatgatatrtaatccaagatatatatatatcttatgtatctccatgaaccagaaatagaatggaaacacgttaagctaagtatttccttaggctgaagtctcaagcttgtggggctctaagtctggaagttggacactagc

SEQ ID NO: 482709 - DNA, 546 bp, Homo sapiens
aacatttccgtgagaaaacccctaaaagccggcaccggctccggtggggccacagagtctctggagcgaggctctctccaatgcctgggccctgggaccgagcaactgtcccagtagaatccctttcgggctttgttgcagggataggggattctttttaacgtgttccttggcttgcacaggcatttactggtcctctggagatcacatataacaggaagtctctaaattcagtatttcttttaaatgaagttgtatttattcatcacatttctatcagtagacttgaaaaacagcgtacacgttttatacattgtatgtaggacattgtatttattcaggtccatcagagagtcttaatctggggtatggggacaactaggagtggataggattcagggagcccatgaaactcctgagattgtttcatattttagggcaaatgtgcaatttttctgggaagaagttctgtcgtttttatgattaccagggttcataaccttagtttggttaagaaatgctrgtctaaggtcaatgctcagcagg

SEQ ID NO: 482710 - DNA, 540 bp, Homo sapiens
taactcaaaagatgaagcacccagccaggtgcagtggctcacacctgtaatctcagcactttgggaggctgacacaggtggatcacctgaggttaggagtttgagaccagcctggccaacatgatgaaaccccatatctactaaaatacaaaaattagccaggcatggtggcgtgcaactgtaatcccagctactcagaaggctgaggcagaagaattgcttgaactcaggaggtggaggctgcagtgagctgagatcacgctactgcactccagcctgggcgacagagcgagacaaaaaaaaaaaaaaaaaggygaagcacacaagtgttataatctttgagcaggacatttgtctcactctcacggagctaccaatatgttgcaggagcagccaaatatctcaaggtgggatgaatgaagtgaactggctggtgctcctccagtaaatactgtccttttattgcccaggggctctggacctgcctcgggtcaagaagggcacaaaagcgggatcagaagaccaaagctttccaagcag

SEQ ID NO: 482711 - DNA, 545 bp, Homo sapiens
tgtgtatatataacaaaatgttaatagtgttgtgtgaatgatgtcactacagttcattttcctttttttctaaatttttattattctatgtttaaaatacatgtttctaaagaagggaagtaaaagtttgctggcagccagaacgagtaggacccatttgtctttgcaatcaccagggaccgcctgctaaggaagcccgttaaacccggggtggcagagcccttgtgctgaaatcgctctgtctctggagcatattttttctttrctaaggaaattgctttccataaaaccagctctctgacacctctgagtaccagggaaccatgcaagcccactttcctggggacattctctaatgggtaactccatcacgttccagcttggcgcttccaacgaatcccagccagccataaaaatttttagcaccctgcatgcaagactgattccagcggcctcataaaaatcccattcactgaccaagagctgcgggtttgaaactctcaagtcccctgctgttttaaacccagtggcttggcgcattgcta

SEQ ID NO: 482712 - DNA, 424 bp, Homo sapiens
aatgataatagcactggttaaagttgtcagtgataatggggaacccaagatgggagtttatgccaatggatccaataagacagagtttggaaaggaggtggaagtgagaaagactggatctgaaagaaggtctacgtcagaaaactaatgaaagttttttttttttttaatttaaaggcaggggtataggcatgcaataaaatggctctgaaaatagtttaaaaatgtattttggatttggcagtagcttacatctgtctcgtgcctagtgttgagggattctttggagaagaaaagagggtatggagagggaaggagaccccagtggaagatcrtatgcccaataacgggtgttgggggcttctttttcccttctaaggggcctattacctagaaaaccaatccatccttaagggaccaagag

SEQ ID NO: 482713 - DNA, 592 bp, Homo sapiens
  misc_feature (1)...(592): n = A,T,C or G
aagacatggcagaaatgatgtttccaagtagaaaaatgtgagccgggggaaagcagaggcaattccttaatcatttgcacaaactaaaatttttcatacactttgttgtaagagaactggaacttgatgtgtgagccccactacatattgtagaaggttggttgtatgcagttatgcatatgaaagtttcatgcaattgaagattgtctttaaccaaaaactgacttggacttcagccctggctgtaccactttttaataaagccagtccttagagaattcacctaacatcgtttggcgtcagttacctgacatataaaatagggataaccaagacctgtctcacaagtctgttccaaggtgttgctgtaatatatgggaaatgcctagtgtgttgcctgaaatttccattcsatatccattcttcagccctcccgagtggctaccacgcctcaggttttgcaataataaatgtcagaatgtttcgtaaattacctttcattcacactctgaagtgtacatttagcctttctaagcagaggttttgttttttcttagactttgctatagttacagaactgaggnnnnnnnnn

SEQ ID NO: 482714 - DNA, 605 bp, Homo sapiens
ctgtagttttacattttaataacgtttttctgcttttgcctgagaaggtattaatatgcccaaagaatggtgtcacttattttttgtgtctgggataccctctgcttcgtggcacaaaaggtggaatgttcatatctcactctaggtatcggccgaacaccgtatgtcaagaagaatgattgcttgggattggcctgtgtcttccttccatttatatttatttctgcttctgtgagattttagtcaatggatgggagtataattgaagaatggtaaatcatgcagacatataaaacgaaaggtcggtaaaatacagagacaaaacatatgcagtggaccttctagaaagtacctggcggaggcaaaagtgacccaaaagcagaggtgaggatatctttcctcttagaaagggaacctttttttgagggagaaaggggaaaacagtcatcaacaaagcatctctttaawtcttagtaagtataaattaataaataagcagatcaataccttacagttagggatttatgatttggaagaatcatacatatctccacaaagtagctacactgtacacctatgcatttgtaactctgaaccatcgctac

SEQ ID NO: 482715 - DNA, 618 bp, Homo sapiens
tcacccaggctggagtgtaggggacaatcattagctcactgcagccgcaacctcctgggctcaactgagtctccgacctcagcctcctgagtagctgggaccacaggtgcgtgtcgccacccccagctaattttttaaattttattttgtagagatgggktctccctatgctgtccaggctggtctcaaactcctgggctcaagagatcctcccaccttggcctcctgaagtgctggattacaggcatgagccaccgcactcagtcctaggatggatttcttatttaacagttttctcagccagaggtgtctgtgaaaaacaaccaaataaggaagctgatagagtcttgtctttgtttaaaattgtaatattttgttcatcatagattatttttacattcattttgattttttaacattatttcattaaaatattgtttaatgaaaattttaatgaaataaatgaaaatgtttaatgaaatattgtttaattaaaatctttattaaatttttgacactttcctctttcattttgtgtctgatggaagtgcctcaattacaagcaggattaagaaaaattatgtctagatcagtcaaatccaaaactatctctacttt

SEQ ID NO: 482716 - DNA, 618 bp, Homo sapiens
tcacccaggctggagtgtaggggacaatcattagctcactgcagccgcaacctcctgggctcaactgagtctccgacctcagcctcctgagtagctgggaccacaggtgcgtgtcgccacccccagctaattttttaaattttattttgtagagatgggttctccctatgctgtccaggctggtctcaaactcctgggctcaagagatcctcccaccttggcctcctgaagtgctggattacaggcatgagccaccgcactcagtcctaggatggatttcttatttaacagttttctcagccagaggtgtctgtgaaaaacaaccaaataaggaagctgatagagtcttgtctttgtttaaaattrtaatattttgttcatcatagattatttttacattcattttgattttttaacattatttcattaaaatattgtttaatgaaaattttaatgaaataaatgaaaatgtttaatgaaatattgtttaattaaaatctttattaaatttttgacactttcctctttcattttgtgtctgatggaagtgcctcaattacaagcaggattaagaaaaattatgtctagatcagtcaaatccaaaactatctctacttt

SEQ ID NO: 482717 - DNA, 426 bp, Homo sapiens
ggaatcaaagaagaacaaaaaatgggaatagcaaatacttttaggaaaccatattactaaagggttgattaatgttcacatatttctgaagagagaaagtttgaagacgtttaaatccaagatytttaacagaggaaataaatttaaccttaaaatggaaatcctgaggaagaaatgcttcagtaggttccaatcagcacgggctcatataaggttgtgctgctctcggagtgagaaggaacacgtgtttttggaattttgttactatatcactaagcaaccttgcagggtacatttcaatgaccagccttttgtgccacagtgacagaaaaatagtactttacaagagaaacaacttatcatcaagcacatagtgtaaaacaagctccagttatacatacgttttgtgtataaaaactggaagag

SEQ ID NO: 482718 - DNA, 426 bp, Homo sapiens
ggaatcaaagaagaacaaaaaatgggaatagcaaatacttttaggaaaccatattactaaagggttgattaatgttcacatatttctgaagagagaaagtttgaagacgtttaaatccaagatttttaacagaggaaataaatttaaccttaaaatggaaatcctgaggaagaaatgcttcagtaggttccaatcagcacgggctcatataaggttgtgctgctctcggagtgagaaggaacaygtgtttttggaattttgttactatatcactaagcaaccttgcagggtacatttcaatgaccagccttttgtgccacagtgacagaaaaatagtactttacaagagaaacaacttatcatcaagcacatagtgtaaaacaagctccagttatacatacgttttgtgtataaaaactggaagag

SEQ ID NO: 482719 - DNA, 426 bp, Homo sapiens
ggaatcaaagaagaacaaaaaatgggaatagcaaatacttttaggaaaccatattactaaagggttgattaatgttcacatatttctgaagagagaaagtttgaagacgtttaaatccaagatttttaacagaggaaataaatttaaccttaaaatggaaatcctgaggaagaaatgcttcagtaggttccaatcagcacgggctcatataaggttgtgctgctctcggagtgagaaggaacacgtgtttttggaattttgttactatatcactaagcaaccttrcagggtacatttcaatgaccagccttttgtgccacagtgacagaaaaatagtactttacaagagaaacaacttatcatcaagcacatagtgtaaaacaagctccagttatacatacgttttgtgtataaaaactggaagag

SEQ ID NO: 482720 - DNA, 617 bp, Homo sapiens
aaattgaattcaggggaatgctgatgatggctcactctggcactacagtcaggattcctgatccctgtctacctctccaacctcatcttgtgcacaccaccctcatgtacaccatcacacatggaagagtggccgtttccaattacyggagcatgctgcactctgctgcattgggctgtttctgctgacatcctctgcctggaatgctcttctcattaattttattataaaattatatgatttacaataaattataaaattatatttttaataattttatataattctaatacataaattatatataattatatataaaaggaggaagttgaacattatttgggcgcatagtgagaattatattccaagaccttcaagactgtcttagaggtgaaatttccctgcctcttagtataaaccccctccctcactgccatacatcaaattccaacaaaatccagagattgagaagtacatgagacatctcctttcacctttttactttcagctgcctcctttttacctttcagccccgatttgaatgccaccagctcaactagtcttcttaaacaccctatctaaatactaactctccttccagtactgaatattgcaat

SEQ ID NO: 482721 - DNA, 617 bp, Homo sapiens
aaattgaattcaggggaatgctgatgatggctcactctggcactacagtcaggattcctgatccctgtctacctctccaacctcatcttgtgcacaccaccctcatgtacaccatcacacatggaagagtggccgtttccaattactggagcatgctgcactctgctgcattgggctstttctgctgacatcctctgcctggaatgctcttctcattaattttattataaaattatatgatttacaataaattataaaattatatttttaataattttatataattctaatacataaattatatataattatatataaaaggaggaagttgaacattatttgggcgcatagtgagaattatattccaagaccttcaagactgtcttagaggtgaaatttccctgcctcttagtataaaccccctccctcactgccatacatcaaattccaacaaaatccagagattgagaagtacatgagacatctcctttcacctttttactttcagctgcctcctttttacctttcagccccgatttgaatgccaccagctcaactagtcttcttaaacaccctatctaaatactaactctccttccagtactgaatattgcaat

SEQ ID NO: 482722 - DNA, 631 bp, Homo sapiens
ctggggcctgtaagactgtatgggcctacaaaaaatatacgaaacctaaaaaaagtctaaagggctaaaaaacacaaacatgaaactaatacaatatgtataaaacatcacaagagttggtacatttggtatttgtaataattttgttacttttgaaaacagtgtacaggttagattttctcatgtatgcatgatatatttctccctatgcttgcttgacatatgcagctttgtgactcatgtgactcatggacaagttattttaatagyagaattataataataacttcaatttttataaaagtttttatttaccacagatttttaaattcatttttatacctttgctatgacatgaaattgagtatccaagtcagaagagctcaggactttgtaaattcattaaaaaaaaatattgtgctcctataaggaactattaactgagataattttagtttgtcttaatttccttgcatgtaagaccctaatatacatactatgaatcaaatgctttgcccatattactgccaatccttaccataggcccatgagaaacctttattcattttgtaagggagtatataaaaaataaaaaaattctcaagacttggggattaagtttagcttccta

SEQ ID NO: 482723 - DNA, 631 bp, Homo sapiens
ctggggcctgtaagactgtatgggcctacaaaaaatatacgaaacctaaaaaaagtctaaagggctaaaaaacacaaacatgaaactaatacaatatgtataaaacatcacaagagttggtacatttggtatttgtaataattttgttacttttgaaaacagtgtacaggttagattttctcatgtatgcatgatatatttctccctatgcttgcttgacatatgcagctttgtgactcatgtgactcatggacaagttattttaatagtagaattrtaataataacttcaatttttataaaagtttttatttaccacagatttttaaattcatttttatacctttgctatgacatgaaattgagtatccaagtcagaagagctcaggactttgtaaattcattaaaaaaaaatattgtgctcctataaggaactattaactgagataattttagtttgtcttaatttccttgcatgtaagaccctaatatacatactatgaatcaaatgctttgcccatattactgccaatccttaccataggcccatgagaaacctttattcattttgtaagggagtatataaaaaataaaaaaattctcaagacttggggattaagtttagcttccta

SEQ ID NO: 482724 - DNA, 555 bp, Homo sapiens
agaagggctgttaggaagattaaagataagtacgtagccaggtgtggttgcttatgcatgtagtcccagctatgtgggaggccgaggctggagggttgcttgagcacaaaagtttgagactagactggacaacatagtaagaccccatctctgaaaaatactgttttaaataaaaaagatataagtacgcaaagcacacagagaagcacatgctgatcaggaagtattgtgaataatgaatgattatcattattaataaatgctmtttcattcaacagacctatatgtagtagctccacttttatcgggtatgaagttgacagggatcgatactaacaataaattaatgaagttataaaccgaaggagcaaacacccactactaagaaaactgtcacctttcaaatatatttgaacatgaaggaaataaaatacttttttatattgggatgcaaatattatctttccttgttgctcacggtatcaagacaaacattctaaataaggaataaggaagttaaatgtaatagtcagagaacttagaaatgtaccaaac

SEQ ID NO: 482725 - DNA, 225 bp, Homo sapiens
atgaaacctcatataaatatgaggttttataaccacctgaagatggctgtttagctcatgtactattctgggcaagaatgacctgcacaggtggctgtacaggtaaacatggatggggaagggtgctaagaaccyatggagactgggagcgctggttatgacagagcattctccatctgtgactgtgccatggtgacaaattagagccattcatgctggtcctct

SEQ ID NO: 482726 - DNA, 354 bp, Homo sapiens
gaatcttatggaacagacacatcgaaggcccttagtctagctcaactcagacgcacctcgttctagctcatagtgttagagagatagcaaaataatatggagaattatgttcctgaagttagggaagggcacactttcaagagaaaagtagtgttaggtgttaaatgcagtagaaaaatcaaaggcagtgaggaaaaacatctgttggatttggtaattggggggttttattaactttgaagagtggttttaggatggtaattgagtcattttgaggttattttatttattcataatattaacacacatrtgtttcattaactagcttaaccctaaataacagatttgagttca

SEQ ID NO: 482727 - DNA, 649 bp, Homo sapiens
atgataacttgtctaatgacaagaaatataccttatgtttacttgtattggttacatttttcatttagaaaagtaagaagtagtgtttatcaggtacacaaaaatcagaattaaaaactgagggacactgttgacattctctgtactcagaaatacagtacccacaagacattatattttcacatgttccctttctattcaaaatccccaaaccacttttttaaaaaagaaaaaaaaaacacattgttattctggtatctcaaataaaatgtaatcatgtctcttgtttaaacaaaacaaagagtacttcaaatgccattttattcttcatgtcatgtatattcctagcatgctttcctttatataccaaaaagcattccaatgatttcwgtgatgggaccagagcatggtgggtagagtgggtgagagacataatagcctagttgaaataaactccatttatttattattttataattctcttatagaaaatagtaaaggtaaaacaattaaaagctcttatagaatttgagcagatatttggtacttctttcactttttaaagacagagaagttataaggctataatgaatttgcagtaagttgttttttaagttttttggtttggctttgctttggttatttgttt

SEQ ID NO: 482728 - DNA, 510 bp, Homo sapiens
acttttatccttcaaaaaatatgtgttccttatcttttcaggtcatcttaatgtagttttcccccattcttcttaatgaccatgtgacgtcctgtgataagaacaatagttactcaaccttgccttgttggtgcccttcacggtgtttccaattttgcactattagaaattgtgcaagaaatgtccttaccaaggaaaatatttgttcctgaattctcagacccaaattaaaggttttggtctgaaatgctatatccctacaaagatagagaggtggacctacacattacatgttggctttatgttattttctggttctctgtcccatctgtaagacttccttcctcaattgaaccatgcacttttgtagggagtggcrtgtcctgtgtttgtttgaatgtctcatgtatcctataacatgtaggatacttcaatataaagtaggtcttaaataattaataaatcaatgaatacgtatcacatgaaagcttccctatcctttctaatcac

SEQ ID NO: 482729 - DNA, 598 bp, Homo sapiens
cttggggaaaattagcatttcaaagtattatctgtgaagtaatgaacacctaaaacrtgtccttcaaaaagaaaagtacatatatacattctttctaaactgttaaaccttttaaaatatgatgactttgtcttccctctttattcatgtttttttcctaaagctataaaataaaaaaaaatcagaaccaccatcatttgtttatagaatcagattaatgtgtatttggtttcaatgtttcaatcctatgtatattcatgaaaataagagaggagaaaattgcttccttcccaacatattccaatgaggattttgataagcagaacaatcatttaattggtacatttctatttctaccagtgtcaggctgggacaagaggctccttatgcaaatcaagaggattggggaaatggatgctgatttatggattgcccaatgataaatcaacatatttttcttaccttgggatctcagcttgaagagcaaggtcaaagacactggttccaaaatgagacaacatagaagggaatgggcctgggtgaactggtaatgttctagtatatggattactgctagacatgaatataacagaaatac

SEQ ID NO: 482730 - DNA, 543 bp, Homo sapiens
ctgtcagaagccaagcaaacaccaaaatcattttacgttatagttgtacttggttagtgaatggagcaatagccaccatttgagaggcatgtagggaagacagtatccttgggggagctaagtctatttattttttttttgagacagaatcttgatctcttgccaggctggagtgcagttgtgagatctcaggccactgcaacctccacctcccgggttcaagcgattctcctgcctcarcctcctgcgtagctgggactagaggcatgcaccatcacacccagctaatttttgtatttttggtagagacagggtttcaccatgttggccaggatggtcttgatctcttgacctcgtgatctaccaaaagtgctgggattacaggcatgagccaccacgcccagccctaagtctattttttttttaaaaaaggctttattttatgtttgggggtacatgtgaaggtttgtgacataggtaatctcctctcatgggggtttgctgtacagattatttcatcactcacgtattaaaccccctacc

SEQ ID NO: 482731 - DNA, 543 bp, Homo sapiens
ctgtcagaagccaagcaaacaccaaaatcattttacgttatagttgtacttggttagtgaatggagcaatagccaccatttgagaggcatgtagggaagacagtatccttgggggagctaagtctatttattttttttttgagacagaatcttgatctcttgccaggctggagtgcagttgtgagatctcaggccactgcaacctccacctcccgggttcaagcgattctcctgcctcaacctcctgcgtagctgggactagaggcatgcaccatcacacccagctaatttttgtatttttggtagagacagggtttcaccatgttggccaggatggtcttgatctcttgacctmgtgatctaccaaaagtgctgggattacaggcatgagccaccacgcccagccctaagtctattttttttttaaaaaaggctttattttatgtttgggggtacatgtgaaggtttgtgacataggtaatctcctctcatgggggtttgctgtacagattatttcatcactcacgtattaaaccccctacc

SEQ ID NO: 482732 - DNA, 543 bp, Homo sapiens
ctgtcagaagccaagcaaacaccaaaatcattttacgttatagttgtacttggttagtgaatggagcaatagccaccatttgagaggcatgtagggaagacagtatccttgggggagctaagtctatttattttttttttgagacagaatcttgatctcttgccaggctggagtgcagttgtgagatctcaggccactgcaacctccacctcccgggttcaagcgattctcctgcctcaacctcctgcgtagctgggactagaggcatgcaccatcacacccagctaatttttgtatttttggtagagacagggtttcaccatgttggccaggatggtcttgatctcttgacctcgtgatctaccaaaagtgctgggattacaggcatgagccaccacgcccagccctaagtctattttttttttwaaaaaggctttattttatgtttgggggtacatgtgaaggtttgtgacataggtaatctcctctcatgggggtttgctgtacagattatttcatcactcacgtattaaaccccctacc

SEQ ID NO: 482733 - DNA, 635 bp, Homo sapiens
gctcagcaattctgcacataatcaagagttgggcagcatccacagacagtttttattacacagacaggcacttgagaatatgtttctggaagcaaaatgagatgatgaggagggaaattatgtaatgagcaatgccaaaataggcataaaggaaaattattcattgggaaaaacaaatgcatttgggcatagaagacatttctgacaatttgtctacctatagaaagtggtccctgttcagatattaagaaaaacacaagggtattaacaaaggtggtaaaagtaccagagtttagttgattcttgtttatgttttcctcctcatctttcattctggaattgtcatatatatatacactcatgcagacayacatattttttatatatatacacatgtgtgtctgtatgagtatatatgcgtatatatacatatataatgtatatatacattatatatgtgtgtatatatctgtatatacacagacatgtcatataatttcagattaatgaatctttttaatcaagacccattttttttttaacttctcgtgaattgttccttctccaatccttcaaaaacagagacacactgagctgcaggccttgcccagtcattctttggcagacttggaaac

SEQ ID NO: 482734 - DNA, 660 bp, Homo sapiens
atccacatgagtgaaacagctacgctcattttcagatcagtgaatgcaacactcccaagtctaatcgggaagttttgcagacagccgttcctgtttgtttattgattgtggttcaacggtagttctcattcttccaaattagaacagcagacttatgttgtgtcaacaatcaccttgcttttaaaaacgtctctgtgcatgcaccagagacacactaataaagaatctaacacaagccaaatcttccatctgctaggggataatgcccgtctgctgtcagaagcaagactggagtaaggtgcaggcaatgccaagacttgcagtgcccgtctttttgaaaaaaggccctagtgggataacagatcgtgttcgtctaaaaaggaagacaaatgagtaacttgtgtttaataacggccatccgctgacacttactgttaaaggagaacaagagatatatcttggcagttttctacatctcattttgtattgagtccaagtcattgacatgagaatgtaacataatctaccttgyggaaaaagtggagaatgatctgcttctctctctacatataatttccaactgagacttccgcttttcttaccattactcaaattgcccagtcagaggcaaaaacacctggtcatatgaatgcatttccc

SEQ ID NO: 482735 - DNA, 600 bp, Homo sapiens
tcaccagccctgaccgccgccgtacctgcggctggcccagcaccccagcggcctcccctccttgtcaggcccggctcaagcgcggcagccgctcagcctcgctccggaaggggacctggggactgcacgtccggggtcgctcaccggcacgcggggcgctgcgcagtcccgggctgcttcggcgcggacagggccgaggacagggtcgtggagtccacagtcccgggagccggggggtggagcgaccggcctggagcgcgcggccgccgtagagctgggacgggggaggggtaggataacgacggcatcagcagaggccaagcgctgctgtaacctgygtccgcgcctgcgcagagcgctcccggagggacacccctggcgtgcgcgtgacgcatgcgtccttcttcctcctgtttgagcccagaggcgtcgatcgtgtgagattgtgcgctcttcaggtttcattaccttcgcgtcccccagacttcaaagtgtccactgtagccacgaattacctaggaacagtcgctcctcctatttcccatatcagaccatttccttttgcaaagggtataaatgtgcaccatctgcctcagcttt

SEQ ID NO: 482736 - DNA, 600 bp, Homo sapiens
tcaccagccctgaccgccgccgtacctgcggctggcccagcaccccagcggcctcccctccttgtcaggcccggctcaagcgcggcagccgctcagcctcgctccggaaggggacctggggactgcacgtccggggtcgctcaccggcacgcggggcgctgcgcagtcccgggctgcttcggcgcggacagggccgaggacagggtcgtggagtccacagtcccgggagccggggggtggagcgaccggcctggagcgcgcggccgccgtagagctgggacgggggaggggtaggataacgacggcatcagcagaggccaagcgctgctgtaacctgcgtccgcgcctgcgcagagcgctcccggagggrcacccctggcgtgcgcgtgacgcatgcgtccttcttcctcctgtttgagcccagaggcgtcgatcgtgtgagattgtgcgctcttcaggtttcattaccttcgcgtcccccagacttcaaagtgtccactgtagccacgaattacctaggaacagtcgctcctcctatttcccatatcagaccatttccttttgcaaagggtataaatgtgcaccatctgcctcagcttt

SEQ ID NO: 482737 - DNA, 510 bp, Homo sapiens
atttggctcctccctccttcctttgccttttattttgtcccttcgtcttttccactctctttccttcctttgttatttctttcctttcctttcccccttacyggaattaacacaaagggaaaaaagggcttgaataagagaaatgagaaatctttttaatactgcaaagactttcaaagacaaaatgacaagcttatagatagggaaaggtgttaatttcttcactcacgtattatgtattattttctccctattaatgttatttgtgagatgacaatggtctatcttacatatccttagtgttactctgcctatcaatttcgctgtaaggctctttatccaatttcacagatgataacttttagtttgtaaaccattggttatcaattaaaagaaatcatccagaactaactgtttggctactataattaatctttatatagtctaatccctatttgatgaggttatctgcaacaaagaatatttactttaaatcatactgttgacatt

SEQ ID NO: 482738 - DNA, 607 bp, Homo sapiens
tgtgaagtatagctccttggatattttcattttcactttccaattaaatgcttaagcagtttttacctgttcagaatggtacaacagtatttcctctttgcatcctagcatattctttttctgtatgctgaaaagcaggcacattgctttgacccaagcaagagcactgactctgctctgatatcctctcttaaagcctagaaatccctccagtctcaagcaaagacaggaatatagcatattattttctaggttcattcgaactatagcatgtgttggtgcttcgttcctttttatggcttaataacatttcatcgtgtgtatatacaarcatttgtttatccattcctcccttgctgaacagttgtttcacctttgtgctatcatgaataatgctgctacaagcattgctgtacaagtttttgtgtgagcatagtaacttgacgtatgtttttatttcccttgggcatctatctaggagtagaattgcagtgtcaaatggtaattctatgtttagcttttagcagggtgccaaactgcactatgtttttacccccaaagcaatgtatgagggtgcctattttgcttgatttttgtgaacacttgt

SEQ ID NO: 482739 - DNA, 610 bp, Homo sapiens
ctgatcaccttcctgtggctccctcaacatgaacacacaacctcaggcctcctgcccaccagggcaccccatgccctctgcacaccaccacatacctggcctgtgccctaggatgctgcttcctgcttgctcactgactgtggatcaactctggctgaggaaacctgagaggtttgcttatcactggggtgcaactgtaccttctctagtgaggttagaatccttgctttggggaaggggctatctccaaatttgttcatcctccttactcttctgctttcccagtatgttatagagtgtccttatctcttgcaatttctctttggtcagatttgaatgagtgaatttccattgttccacagtgtgcttttgtgacttgattggaaccagaccaatctaacagagagatatgtggtcagccctttggctgagggctgtttctgaggtgtggagctgggtagtccccagaacttctggcctggcctgcattcaagctgagtgtttagaggtttcccattgggagtcattgcatggagtcatgatttctggrgtatacgggaggcactatgacagaggtcttcccagttcagcccttagcactgggtcctta

SEQ ID NO: 482740 - DNA, 604 bp, Homo sapiens
cactgaaaaatctatatgggaaatagaaaatgtgtttttctgctctggtagtaagaaaatcaatctgtggccgcctgacagattctgatcttgcaatgtaggtgtctttaatcagagaagtctcatgaaggtagatcggagtgcaatggattaataaagaagaaacttgggaaacagaacagttgcaagaaaatagctgccttctagcacccctgacagctataatagactcaacctcgagagtcctgggctaaaaccctcwctcagccacttactcagagtattaactatgagtatgttaaccacacaaaacttcagttttctcatctgtaaatacttaggattgttttctacctcatatggctttctgatgatgacatgacactttataaattattcaacaagatcacaaatgaaaggttgtgaatacatagtaattggtacaaaatagctagtaagtcccttctgcacatcaaggcttcttaagaaatgatttcttccaaagcaagctccttctctttgcttaagaactcattttctcatttatggtaacctaagaaccttggagccagtcacctgctttaaagatatttaacctttttct

SEQ ID NO: 482741 - DNA, 589 bp, Homo sapiens
aaacactgaaaactaatgccctggagaggatagaatcagtgccatcatttgtataccattgatttaaggaatttccatcattcattactcagtaggctcagtaagtgtttgacatactaaaaccattcaaagttcatggtctttaaagagctgcaggtggtggtaaaaagaagaactgtgataaaagacaacattcaagtttggtatcctctaaacgagtggaactgtaaatagatttttcttttacatttctcagcacttaatggtgaaatattgaaagcttttcaggaaataggaaaaatcatggtgacttcaacagggtggcactaatcaaaaaccttaagacaatgaaaaaaggaaaccaaaaaggaatgagtatgctttttagtayaatgtgcaaatctaagcccatgttttaagaactggtagatcttctgagggcttggtgcttccaggtatttctcagatggttttgtgtgattttagtttcagtccatttcttcttgtttacctgctctaccaattggtctcacctccagaactggctcttaaactggggaacagggttcatccctcttatttctgcatt

SEQ ID NO: 482742 - DNA, 638 bp, Homo sapiens
ccagctggctgcaggcgttgggcttttgttttccattgcatgagaggtcttgctctcaaaagggaaggataattatcctcctcctcctgaggtatgtcttcatctcactcactatttggttcctaaggacaacaagtcttagcgttccagtccaatttaggaagaacagcttgcacttttggccaacacagctctctcccatctaaccatataaagcagcaggctaggggttccaggtgagtatcctgagttttgagcttatctgccagactagatgcaaacatggacgtggaggtccacatatccttttctaatggtaattcttcctctagtcttagtaccttcatcttagctgctaactacacttctgtggccattcccacaatccgtaacagtggccaaccctctgtctcagccacctggtgaacttccttaccccagtgagctgtaagatgttctactaacaagcattctagaccctccagcattttcagggcatctctgtactcacatsatggtccacaggcatctagcaagtagccaacaccaccccacatagatgaggggagcctgccaggatttcctccacgtatgtttcctgccttttgcccaaactttggttcctggacccctattga

SEQ ID NO: 482743 - DNA, 558 bp, Homo sapiens
  misc_feature (1)...(558): n = A,T,C or G
ttgcaactactcaactctgtggcagcaaaaaagcagctacagacaatacgtaataaaaggagggaggctgtgtttgcagctcgtaggttgccatgctctgagctccacattctcttggttcagaagttcagccattatagcccagggttcaaattgaggcccaacagaccttgttggtcttcagttctgtgagctcagtcctcttgatctattttctgctctgataacctgtctggacccagattttgtgccaagaatgggagcttgccatcatcctgctaggctccccagactaattggaagccaagtcactgtaacttactgatgccatcactgtattcccgatgccatcagcaagtagaattgatagcaacaccctgttcacactagaygtgcctccaccctgaatccaagtccgtcttgctcctaccccnatcagggcagctgggaccatttgctgctgtcttggttcctctgtgtggaaggaaagtctgacctatactgcacagcctcagcttcaattgcccaaacctgaccatctctcagtactgccgttgt

SEQ ID NO: 482744 - DNA, 558 bp, Homo sapiens
  misc_feature (1)...(558): n = A,T,C or G
ttgcaactactcaactctgtggcagcaaaaaagcagctacagacaatacgtaataaaaggagggaggctgtgtttgcagctcgtaggttgccatgctctgagctccacattctcttggttcagaagttcagccattatagcccagggttcaaattgaggcccaacagaccttgttggtcttcagttctgtgagctcagtcctcttgatctattttctgctctgataacctgtctggacccagattttgtgccaagaatgggagcttgccatcatcctgctaggctccccagactaattggaagccaagtcactgtaacttactgatgccatcactgtattcccgatgccatcagcaagtagaattgatagcaacaccctgttcacactagatgtgcctccaccctgaatccaagtccrtcttgctcctaccccnatcagggcagctgggaccatttgctgctgtcttggttcctctgtgtggaaggaaagtctgacctatactgcacagcctcagcttcaattgcccaaacctgaccatctctcagtactgccgttgt

SEQ ID NO: 482745 - DNA, 593 bp, Homo sapiens
aacaccactgatgtatagttcacacacaggcaatgtcagcactgatgctcccataaagcccccatggtatccagttgtggactatgaaaacgtccatgcagagtggaggagaggaagatggatctccccatctcacgttacacccggttagagaactcccaaagaagtacaaaggtctcttgctgttttggcatccattatgcctgaaccccactattttagtgcattttattgaaacagctatttccacttctggttggacaccatctctttcttatttaagaagatgtggatctcaagaatagggctgggkcaggttctgtgtgatgtcaccacactcgactcatagtcactccttttctctcatggcccacactttgtactggagtcagacttttctgcctgaccttgttttctttataagttatctccaaaaagactcctcagcccgctaaaagtagtatcagaatgggctggagcagtcccagatggatgctgaggcatgtttgaacttgagatacagacacagtttaggctcattctgatgcttatggaataaagctgaaaccaaaacccaggataaattttctgtg

SEQ ID NO: 482746 - DNA, 593 bp, Homo sapiens
aacaccactgatgtatagttcacacacaggcaatgtcagcactgatgctcccataaagcccccatggtatccagttgtggactatgaaaacgtccatgcagagtggaggagaggaagatggatctccccatctcacgttacacccggttagagaactcccaaagaagtacaaaggtctcttgctgttttggcatccattatgcctgaaccccactattttagtgcattttattgaaacagctatttccacttctggttggacaccatctctttcttatttaagaagatgtggatctcaagaatagggctgggtcaggttctgtgtgatgtcaccacactckactcatagtcactccttttctctcatggcccacactttgtactggagtcagacttttctgcctgaccttgttttctttataagttatctccaaaaagactcctcagcccgctaaaagtagtatcagaatgggctggagcagtcccagatggatgctgaggcatgtttgaacttgagatacagacacagtttaggctcattctgatgcttatggaataaagctgaaaccaaaacccaggataaattttctgtg

SEQ ID NO: 482747 - DNA, 593 bp, Homo sapiens
aacaccactgatgtatagttcacacacaggcaatgtcagcactgatgctcccataaagcccccatggtatccagttgtggactatgaaaacgtccatgcagagtggaggagaggaagatggatctccccatctcacgttacacccggttagagaactcccaaagaagtacaaaggtctcttgctgttttggcatccattatgcctgaaccccactattttagtgcattttattgaaacagctatttccacttctggttggacaccatctctttcttatttaagaagatgtggatctcaagaatagggctgggtcaggttctgtgtgatgtcaccacactcgactcatagtcactccttttctctcatggcccacactttgtactggagtcagacttttctgcctgaccttgttttctttataagttatctccaaaaagactcctcagcccgctaaaagtartatcagaatgggctggagcagtcccagatggatgctgaggcatgtttgaacttgagatacagacacagtttaggctcattctgatgcttatggaataaagctgaaaccaaaacccaggataaattttctgtg

SEQ ID NO: 482748 - DNA, 312 bp, Homo sapiens
tgggaccatttgctgctgtcttggttcctctgtgtggaaggaaagtctgacctatactgcacagcctcagcttcaattgcccaaacctgaccatctctcagtactgccgttgttctgtctcccaatctctgacctgccaccaccacagggcttgattctagatcttggatccttctctttcccctgtcctgtgtaagtcatgagacctcgttcagcaaagttttctgtyaatcatcagatggacagagattcaggtacatgaaggaaaacagggatctcagatttagaagtggaaagaagtcttcagcccac

SEQ ID NO: 482749 - DNA, 312 bp, Homo sapiens
tgggaccatttgctgctgtcttggttcctctgtgtggaaggaaagtctgacctatactgcacagcctcagcttcaattgcccaaacctgaccatctctcagtactgccgttgttctgtctcccaatctctgacctgccaccaccacagggcttgattctagatcttggatccttctctttcccctgtcctgtgtaagtcatgagacctcgttcagcaaagttttctgttaatyatcagatggacagagattcaggtacatgaaggaaaacagggatctcagatttagaagtggaaagaagtcttcagcccac

SEQ ID NO: 482750 - DNA, 630 bp, Homo sapiens
agaaaagttcatttattttcaaggaaactgaaccaaccaagcaacatgcaaacaatagtaggtagtaattagcagtaattaaaaagtaatgatgatgtctttttagtatagtcctgatctcaccaacgtgaagtttaacagtgttgttggagttctagatacaaaagcagagcctcagttcctaaatgggtctcctggttttctcctttctctgatttttaaatagttattccattgtgcaagttaaaatggtacaggatgcactaatttaaggtggatttaacttagaactgttttatagcaatgcagcaaggcttgatgtgggctgcttgtgtttttcaatattttgtttcctcttgccttttctctctccttactggggaagaaggttttgtgtgtgtatctrgggagaaatagaacagtgattctcaactgcggttgatttttcccactctttccacagacatttggcaatatctagagacatttgcggttgtcaggaatcaagtaaggatgctactggtatttcctggatatagcaatattgagagaagctttaaatggtaaggaggagctaactattcagagggggataggaagatttttccaagcagacaggcatcaagagca

SEQ ID NO: 482751 - DNA, 630 bp, Homo sapiens
agaaaagttcatttattttcaaggaaactgaaccaaccaagcaacatgcaaacaatagtaggtagtaattagcagtaattaaaaagtaatgatgatgtctttttagtatagtcctgatctcaccaacgtgaagtttaacagtgttgttggagttctagatacaaaagcagagcctcagttcctaaatgggtctcctggttttctcctttctctgatttttaaatagttattccattgtgcaagttaaaatggtacaggatgcactaatttaaggtggatttaacttagaactgttttatagcaatgcagcaaggcttgatgtgggctgcttgtgtttttcaatattttgtttcctcttgccttttctctctccttactggggaagaaggttttgtgtgtgtatctggggagaaatagaacagtgattctcaactgcrgttgatttttcccactctttccacagacatttggcaatatctagagacatttgcggttgtcaggaatcaagtaaggatgctactggtatttcctggatatagcaatattgagagaagctttaaatggtaaggaggagctaactattcagagggggataggaagatttttccaagcagacaggcatcaagagca

SEQ ID NO: 482752 - DNA, 560 bp, Homo sapiens
gcaattacaatttaatagaaaatctacaattcttgtcacctactttattcaaggggygaggaggatgggaaataagcctttggggcccacagaacaaagaaaagcacagcatctgtcattcttcgcctcatgtacagctttaggtttttcataggtaaacttcatcaggttcaagaggtatcttcttgtcctcgcccttacattttaaattagataattcgcatgtcttatattttgctatctcaaaaatattcagcttaaactcagaataatgccatctggaactataggcaacacttggttatgcgtttcagaattttaactgtgagcgaaaaaatatttgacttttccatgttagttgatgtctacccagaccatcatggcctgatgtagtttaactgctttcaaatgagagtctcatttatgtaagtgaggaacatgcagggttaaggtcatgttccagggctactttgtgttgaacactgaagctgagcctaagctgtaagagtacaatatgcagcacaaagcattttgtgaaatgaaaatgaaatcttaattcc

SEQ ID NO: 482753 - DNA, 572 bp, Homo sapiens
tccctgggccctgccttgacctccagaatcacatctctggaaacgacagtaaaaaaacaccatcctttgtaagccagcctggtgattttttttttcgagacagagtctcgctcttgttgcccaggctggagtgcagtggcgcggcctcagctcactgcaacctctgcctcctgagttcaagcgattctcctgcctcagtctcccgagtagctgggattacaagygcgcaccaccacacccggccaatttttgtatttttagtagagacagggtttcaccgtgttggtcaggctggtctcaaactcctgacctcaggtgatccgcctgctcagcctcccaaagtgccgagattataggtgtgagccaatgcacccgaccagcctggtaatttttaagcacgctgcagggtgagaatcattgctttagagtctctcaagagtaaacaaaaaaaaaattatcacttcatttgactgactgaaagtaaacaaaaagttaaaagcataaagtactttgtttacaaagagctttcaaagccgtgggctcctttggccctcccaacaaccactgacgca

SEQ ID NO: 482754 - DNA, 536 bp, Homo sapiens
tgcccacagaacccgcctgtgcacagagcctcaagcggtgtgataccctctcctccagaaggatccatggcagagaaggaagggccatggtctggagtcaagtctayaagagcaaaaccccaaccctggcttcctgcccggcctccctttcccttccctttctgcctcactgcctccattctgaatcacatccaaaacacaccacataccctcccacctggggttccatctccttctgggagatggccttctcctagaagccctgccaacctggcccttcagggccactaccctggccagccacagggacatgaccccaccccaaatctcactagaacaccccaaattccagacatcactgacccatgctccctcctcttctaacttccctacaactaaattctaactggaagaattccccagccaacacagaagcatggtgacttacttctggtgagtccaaagtttgagaaaacaagacttgaaaaaagcaacactctccggactgcgtcctcaacctgtctcactttcaacag

SEQ ID NO: 482755 - DNA, 417 bp, Homo sapiens
acctgtgtgggagttttttcccttcctttccctgctcttgcatctctgagtctagctcaggacctgctgtgtaggagtcgctcctcaggtgtctgttgagtgaatgaaacccagtgygcatgtttgcagttactgatgtatgttctttgtgttgcaggggttttgctggagcttggtctgaagaaagagcacatgacgaagcagagggtggaacagtatgttctgaagctagacacggaggcacagacaaaatttaaggcttttctgcaaaactccttccagaacccgcatacactttttgtcctaatccatgaccatgcgcactgggatcttgtgaggttagattgacttgatatatgacaagttgacattttccttctttgaagtgatgtatgtggatgttcccgggggctgagg

SEQ ID NO: 482756 - DNA, 417 bp, Homo sapiens
acctgtgtgggagttttttcccttcctttccctgctcttgcatctctgagtctagctcaggacctgctgtgtaggagtcgctcctcaggtgtctgttgagtgaatgaaacccagtgcgcatgtttgcagttactgatgtatgttctttgtgttgcaggggttttgctggagcttggtctgaagaaagagcacatgacgaagcagagggtggaacagtatgttctgaagctagacacggaggcacagacaaaatttaaggcttttctgcaaaactccttccagaacccgcatacactttttgtyctaatccatgaccatgcgcactgggatcttgtgaggttagattgacttgatatatgacaagttgacattttccttctttgaagtgatgtatgtggatgttcccgggggctgagg

SEQ ID NO: 482757 - DNA, 477 bp, Homo sapiens
gactagcacttttaattccttcaagaacttttcctttgcattcacaagctgatyaactctttggtataagaggcctggctttcagcctatctcagcttttgacatgactttctcactaagctcaatcattcctaatttctgatttaaagtgagaaatgtgaaactcttcctttcacttgaacacctagaggccattacagggttgtaatgggcctgagttaaatattgctgtgtctcagggaatatggaagcccaaggagaaggaaatatacgccagtgcaaggggacttctgggacatggggaagggagcttcctagggccacacttgagtctcagtacccggccatctttggtacagtccactccaactccccaatcacagcagccagtgaatccccatttgcctcaagctacatcaagttgtgagcttgtaatttgtaagacagaggggaagggggagaggggaagggcaggca

SEQ ID NO: 482758 - DNA, 438 bp, Homo sapiens
ggctgtgcctctagagctccactttgctgctcccaccacccacagcaggaagggtccctctccctcacccttcatcctgctctgaggtacagagcaatgcctctgactgaggggacccttgttctaccttcactgtcatkcttagtctctggggtgtgaggcagggtcctacgagggggctcatgtctgtcagaagtgtaaaaaagaaaaaaaatagagtgaagaaaacttaaggaacgtatggaatatcatgaaggggatacgtatgtgcattatggaagctcgacaaggaggagagagccaaaaagcttattcaaagaaataataactgatgacttttcaaatctggggaaggaaatggatatccagatccaagaagctcccaccagccccctccaaaaaaaccaaattagataaatccaatgaaatacacattga

SEQ ID NO: 482759 - DNA, 623 bp, Homo sapiens
cattttcttcctagaagaatctgggtttgggttgcagctccactcagcaggaggcccgggaggagctgggagcatccagtcgcgaggggaaggggcggtgtgcactcaggagtctcctcacaggagcatcagacactctcatgccttaagatgattgcggccgcttcctaacggtgctgtgagagcacttccgccacgcctgaagtttgagcaacactgaaccctagaagctactgagtcctcaaagggcagggcctggtggcagtgggccagccatgtggtgacaccatccggaggttgccgggaggtgtgcagagtgccccactccatgctgggtggctgggcagtgggtcccacccttcactgcgcagggcagtcagccgtgactgctgattccaccaggcctggaggggcggtccttgagcgtggaactcttgttatccaatggcaccagcgactcatcgtgacatcagggactccaaccgagaaaggctttagaggctgcccttgcaatggctccccsgcatctcctcctctgtgctcccttttcctgctcacatgccaggaattgactgagggactccgtggcgcttcggggccagctcacaacacccacggggcag

SEQ ID NO: 482760 - DNA, 563 bp, Homo sapiens
ttttatctgctcacaggtcaggagagacccagttaatctcaggaaggctgagagccccccactgctcttcaaggccttccaggttgaaggggtctcaagtcctgtgtggctcccaaggctcactctgctgacagccaaaacctctggagtggatccatgcttgctcctctggagtggatccatgcttgctggcctggccaattgwgtggggactcggggcccaccctggtggcccatgggtccctgagtgtgctggaagcattcctgccctggttctggatccctccgccttgcagggccagaggctaggtgggcctgggcctatgccaactctcagggtgagcccaggtgactgagcctccggacagtggctcttggtatcctgatcccaaagctggccaccctcctgtagagaattggatgagctcccggaaactgagtgggggaaatttgatgctttgccgcttttcagggttcctttcaggcaagaatgggaagggctaatggagggcacttggtaagtgcgggttccagcagccacaggctcagcagccctcctgagc

SEQ ID NO: 482761 - DNA, 438 bp, Homo sapiens
ctgagtttgtgataatttgcttcacagcaataaaaacattctatgcatctcatttatttttcttgtttccttacaatgtaggctcaatgtctgtgtctgctttgccatattgccagtgtktaagggggttcccatcccacggtgggcattgcgtgaatgcttccttcatgaagctctgttttattgatttcaaagacaagtgacagacaaagagagaagcattttgattaacaaaatccaaaatgtttttgctttgcagatacagcagtggggtcccatggtcactttattttttctgtaatctcatttaatagccattcctttcctcaaatagagacacaggatgtgataatgagaaggggacttcatgaccacctaagctgacctcctttacagatgaggaaagtaggtctcagagagaggaaaagactcattcaa

SEQ ID NO: 482762 - DNA, 415 bp, Homo sapiens
caacggattaattagttactccacaaccaatctgtcaatgaccagctagtccatcaagcattgcattaattcacctggaagtttggtggaagagaaaatgctaaagggctttagcacccaatagagcacaatgtaccaaaaccagcatccacactacaaaaaactgcctcgatgaaacgcccaacgtctgcaacctggccagccccagcccctcaagcatcccggcagactccaggctcggcrgggctgacagcagatgcttcctgggctggggagagagaacaaagagaagagcaccacttttaaggagttgctgactggagtgatcttaccagctctaatagatgcctcacaggtaacatggtttatgtcacaccaggcacgaccttcagaacttttctagaaacccaaggca

SEQ ID NO: 482763 - DNA, 535 bp, Homo sapiens
cagctggcctttctgaagaggacagagattgatggatgtgcagacttcccataggatcctcattcgcattctcatcgcctcctccgtatggattaatgggggttccgtggcatgagaaaatggtagaaggagaaatgtatccccattagggacccrctcctgtttaaggaggcaaagtctgtgtttcaattgttctctgctttgcattcagaattaactctatcttccaaccgcatgtctcaacagcattaggcatttacactctgcttcccacctagtttcaaggtagaacttgcattccagagaactcctggcgatgaagtattataattcttgtgctctgccacactctcagaaaggcaaatgcagatcctcccccaaatacaagtttctgttcatttttccacatcagagatttgaaaagacagacagacacaaggaaacaaccacatgcatctagttagagggcacagctagtaaagagaggctggaattgctgacagacgtgctctctcagccccaggccacagcaggt

SEQ ID NO: 482764 - DNA, 535 bp, Homo sapiens
cagctggcctttctgaagaggacagagattgatggatgtgcagacttcccataggatcctcattcgcattctcatcgcctcctccgtatggattaatgggggttccgtggcatgagaaaatggtagaaggagaaatgtatccccattagggacccgctcctgtttaaggaggcaaagtctgtgtttcaattgttctctgctttgcattcagaattaactctatcttccaaccgcatgtctcaacagcattaggcatttacactctgcttcccacctagtttcaaggtagaacttgcattccagagaactcctggcgatgaagtattataattcttgtgctctgccacactctcagaaaggcaaatgcagatcctcccccaaatacaagtttctgttcatttttccacatcagagatttgaaaagamagacagacacaaggaaacaaccacatgcatctagttagagggcacagctagtaaagagaggctggaattgctgacagacgtgctctctcagccccaggccacagcaggt

SEQ ID NO: 482765 - DNA, 535 bp, Homo sapiens
cagctggcctttctgaagaggacagagattgatggatgtgcagacttcccataggatcctcattcgcattctcatcgcctcctccgtatggattaatgggggttccgtggcatgagaaaatggtagaaggagaaatgtatccccattagggacccgctcctgtttaaggaggcaaagtctgtgtttcaattgttctctgctttgcattcagaattaactctatcttccaaccgcatgtctcaacagcattaggcatttacactctgcttcccacctagtttcaaggtagaacttgcattccagagaactcctggcgatgaagtattataattcttgtgctctgccacactctcagaaaggcaaatgcagatcctcccccaaatacaagtttctgttcatttttccacatcagagatttgaaaagacagacagacacaaggaaacaaccacatgcatctagttagagggmacagctagtaaagagaggctggaattgctgacagacgtgctctctcagccccaggccacagcaggt

SEQ ID NO: 482766 - DNA, 546 bp, Homo sapiens
atctcctgataagactcccagcccctacccggcagcacagtgccccatccttcccccttcctggattctgcagctcggctctcctatgttgcatctcacaccatgagtcacaacataacgtgacccacatgtatgcatctcctggagcacagggagcttgtcctgttctctgggggctgccctgtggtccagcaggtgcctgacacacartagatgctcagtaaatgttaacgcccccatgcagatggaagaggctttgcatttaagaagcaagtcacgatccacacaacttagttagaagccctgtgtgttacgggggactgaaatgcaccatctgaggttcacagcaggatccatgagcaggaagtacctgcagctcaggcctgtgagggaagagccatgcctcccacagggcttctctaagaaacacacaaccgtgagccgagcccatcccacaaacctggtgtttcataaacccaaatgagatcgagtcgtcagcatgtggtttgttggagtcacggcgaccagaagaacactcatctctca

SEQ ID NO: 482767 - DNA, 642 bp, Homo sapiens
gctggtattcaaaaagagttacattagaagttctttctaaatcatgagaaattgaactggttgcactaaagtgcttcactttaatggtgaattcaataacttttttctgcttatgttatttatagaataacttttgcttatagatattcaaatatatgcagttggttataatcccagagaaaatatgggcaaaaaaatggattcttgatcattagtatggagaatcatctcaaacacaataggttttcctcatgacaaatcacacaaaatctccatagcaacctcacataattatgcataagatttcagtgtagtaacaaaactaagcccagaataaattacaaagaatagtgatatagggtaagacggatgtggggtaggtgacacacaggaatattgaagtggggcagttgtaagaygtgagaaatgcacaaaggacaaagaagattgcctgctttgcacttcagagaggactgattaagtcactgcattatctggaaactggagactgggagccgcaatatctgataataccaaggtgcctgctaaaactaccattgttaaaggaatgtcaatgtttctttcataaatctttctttttctgagtttgtaacaattataagaaagtctacacaatacgtt

SEQ ID NO: 482768 - DNA, 614 bp, Homo sapiens
gttgagatgttcctcttctctctttctttgctgtctcattccactgttcttctgcttttctcaccacctcatctgcttctggagcctggggtttgcagtttatgtgacaggataggggtgtgtctcaggccaaaaggcaactttttgggtacaaaaacaaatgcctgttcccacttagggccatgggtctccatgcttgaaggtggggcttttrctgggaaccaccctcttctacccagcatttccctgtctcctgtctatatcaaattgaggagaagtcaggttgatgtgacttcaatattcagcaaatgccctgatgttaccgtctctggccaacttttatagaggactgagctcagaagtccagggtagagatagatatggaaaactgggagcagagggtctctaaggtaccttctagtcttaaagactccaaaaatgccttctgtctcagatagtaggtgataatcccattacttcctcccacatgtccttcatgccttttggtgacactagcatggttggttcctcagatttgcaggctgattttacaaagtcccaatactaatgctctgagtttttgcttcgcagttcacttcccttgagtttgtgaa

SEQ ID NO: 482769 - DNA, 672 bp, Homo sapiens
tcatttaaaagcttcacctaggtcagtcaagagaatragaacattttagacaatacagcaaactgaaaaaaaaataaaaggactttttaaaaaacaatatttgtgcacttaacatgaattggattgtcacaaaagcatacacttgtttttattatacattgattaacactgttttatgcaattaggagcagccagttgccctgggcaggagtatatgaaattatctaaaacataccagtaaagaagcctgccataatcttgacttctaggttcaaaagtcacttgtgaaggtaaaagaaaagatcaccaggagaacgcaaacagactcaagaggtccctctactcatcctttcctcccctcttccagtagagaaaacagctctagggtaggaagaagaaagagcaggtttgaagtggaaggaggagactcaggggtgagctggagctgcagttgatggaagtctgcatgcttcaagcttgggctcagggagaagagtggtgatccatgctggagacggctgcgggcagctcaaaggtctcaggaaatttccagaagcagggtccaaaagttagccgaaggagagggagtgtgcaagaaaggagggcccttcccatggaggagcatctcagtgaaacaggaagtttcctaccagggctgaggtagaaaatgca

SEQ ID NO: 482770 - DNA, 515 bp, Homo sapiens
ggtgaaatttttagaatagtagaggataggtcaatagcagagtcaaagctatcttgctttgacttgagcaatccggctttgggaatgctggatggcaggacagtttgggaatcttgtcacgaacaactgccttaaccagagtttttcccaggcagggcataattcaaaagcttggaacacgcagttcatttgggaagtgaatccacggagtaggagtaggagatgagcaagagtgaattagagaaggaggagaagcccatgcaaaggtgcattgttgaatcagccatggctgtgggcaactgagggtcaatctgtctggtaccttctgaagagtagaattgtctacccaagggattgaagagacaccattaggcctgtgttgcttctgtagagtaaacactttstcacttccagattctgaatatgtgagtgtgacctcgtacaggaggctctatgcacaggatcagagaaaccccaggacagaatgatggcaggacagttccccaaaggaaaaa

SEQ ID NO: 482771 - DNA, 563 bp, Homo sapiens
gattattaaatgctaatgagtaataaaggattatatgatactagtattgaaaagtaaattaattatattaaaatgataaggctaaatcttatttcctttttcaaaatgtcagtggaaaaatttgctaaaatgcagttcttttatttgcagtttttttagatcataaaaatagaatgttttcagttttgtatatgtgtaaagtgaatgtgtagaattagagctttaaaaatttttgatctggaaacaacctagacatcatctagccccgggcttgtttttacagatgaggaagtgagaaattccgagaagcatagtgactagtgagtcatgtggccattgcagaacaaaagggaagaaatyttctgtctcctgtctcccagtgtagggcccctttcactgtcctatgtcatttggatgcataggttgcatttctgctacatgtttggggtttatgacactagctatactccttaaacttgttaaatgaacagccatggttttctagcctagagggaaataagttgtactcaaactctgctcttttggagatatgattttgagct

SEQ ID NO: 482772 - DNA, 558 bp, Homo sapiens
acttctatttaagtcatattggccagagagttggtacatgtcrtcttgtctatcccctgtccatgccccgttcctgccttatgaaaaggcagggaaagtgaatatttagctttgtcaaccttaaaagtagaggcaggcaagggagacaggtggttgacaataggtgttgagtgagccagcctacagtgcctgtcacagtcttaccgtaattctatttggagcaaatagcattggataaacattgagtgcacatcctcatagtttcctgccactgatgaattttgtgattattgcttctgagtgctaggcagctcttttctgctcacttctggggaaagtcaaatttaaagaactataattacatgggagaagagaaggggtgctggattcttaatagttctttgtcagtataactagctcatttttttttgggtgcaatagttacacatctaccttatcatcctttgtaaatgtttattttatgcatgcatgtaaattagttaagaattggaattaaactgtggccgcttgtcttaagaatggtgtaggatcagcaag

SEQ ID NO: 482773 - DNA, 482 bp, Homo sapiens
acaactcctcaaatacttttctaaagaatttccattgtatatattaaacccataaaacatccctgaggatctatcatccatatatgtctccaccttgacaacatttactataaaaccacaatatttgtgcgacttckttgctttctcaccctcctaccctaaatatttgcactactttttcttgcctgggtgaaattaagtttgaaaataattattttgtaaattactgggcactcacccatcacattacaccccaattgtcttcagttctttattccttaccatatttgtcagcttcttgaggtttaggggactctatcctatttatacttacaaccccagcacttaccacagtaggtcctcaataaatgtgtttttaaatctaaataaattcctccccaaaaagattcctaattttaacttttaaaatatattttcctggtgatttgccttctggtcatctgaatactcagacagaaacc

SEQ ID NO: 482774 - DNA, 647 bp, Homo sapiens
agtaacagaatacaaatatgaaaatttacattaaagccaggtcatggagtgctagagtgacctgaatgcattaacaaatttggattctttcctattccttactgcctagcaaatgaggctcagtgttaaatatcactctgtgcatgtatgtgaaatgaaaaggttctaccttataactttctccatcaagggagagaaayacagttgagacagtatacgacagaggttgacaaggcagatgtggcataaggacaagagataagaacaattttaggtgctggtaatagccttgttgatagagttgattgtggatctgagaaaggaatcaagggagctaatgggttagaatatgggtgttgagaaatcagaaaccacaaaaaaggttaagtacaggttcagtaagagtgagtgaagagaaaacagaattatgatgaacagacaaatgagataagagagattcaaagttctcaattttgaagctggaacattagttcccagagattatatgaccctttgagagacagtgtttagaggtgctgatgggggatggcaattttgaggaataagatcgtgaataagaataataaaactaaagagtgtgagagagtcctggaggtcagtggaaaacattaatgtggatgagaaaa

SEQ ID NO: 482775 - DNA, 582 bp, Homo sapiens
agcccccagggcacactctcagcaacccttacggtaaagtaaaggctggccagctcctctggttatttctccaaaatccatccataagttggttattcggaacttttaacacatatttgtagagaataaaatctataaatgctgaytaattcctgggtcaatctacaaacgcctatataatccatagagtgcctaaaatttttaactaatttttaatcacatttaatttcccttcataaccgtccctatttaaacacacacacacacacacacacacacacacactttcagagctccaaaagaagattcccccatttccttactcccctagatttatatatattcctatgacccaggtattttttctgcctgcgtatcagcctaaaagagaatacaatgcttcacaaactccactgtctgcaggggtatggggaaagtgggcctggggtaaaacaataggatgtaagctccatatattgacgccaagcagaacacctgccagattgctctgtcttttcaagtacagcacaggcctaacaaaatagccaaagacagaagaggttgcaatccctttctagaata

SEQ ID NO: 482776 - DNA, 560 bp, Homo sapiens
aagatggaaagagaaaggggaggaaagaggtttacaaattccttgccaaatggatggagagaaattctgtgaggtgattagcgggtcaggaagcgttttccctggatgtggtggtaaccacaaggaccagtgataatgcttgggggattgattgctttccggttgtgctttctgcagcgcaaaaactctgggctcttgcattgctctttactgtgatgcagggtccacttaaaactctgcctccctaccgggaaagttcacacatcttgggatttcgggatcatttaagtctagagggattctttttttwcacttgagagtaagctgtgcattttcttcattgtatgggaaaagctaacccttcattggaaagcaatgcacaaccatccggtgggtctgcatttatccagagttctcccttcctccctccatcaacggtttagtgaagcttgcagagaaaatgagggaaagcatccatcagaacgcaaagacgcagagcggaacttttcctctgccgtcagtggggagaaaaagtcacttgtgcgtctcgtggctgacag

SEQ ID NO: 482777 - DNA, 542 bp, Homo sapiens
tgcagtcctgcaagtgttctatcacccaaatgatatggcccaatgcaagaaggagaagctgagtctgtaccaaagggatgggtagtggactaggtcagkaatcattatgggtgaggataagacatctgttacctcatttacacttcacaacaatagccctgtgatgtgggttttaccttctgtgttgacacctagagagatctggcaccagaaccaaaacttggatcttctgctccaattccttgcggcttttcaccattatcatagggataatatgttagctagttaagatattagtgggctaggtgcagtggctcacgcctgtaatcccagcactttgggaggccgaggtgcacagatcgcttgagcccaggaattggagatcagcctggtcaacatggtgaaaccctatctctgcaaaaaatacaaaaattaggtgtccatgatggtacgtgcctgtagtcccagcaactcgggaggctgtggcaggagaattgcttgagcctgggaggtcaaggctgcagtgatctgtgattatgcca

SEQ ID NO: 482778 - DNA, 619 bp, Homo sapiens
tgcaaaaaattcatttttcarttaacacacaggtgaagagctcatatcaactgtaccaaccaacccccccaaaaaaattaatagtaatagccagtatttattgggaatatgttatgcagtaggcactgtggtaagatttagttatctcatttaatcctcacaaggttctatgagatagacaccgttacttcctacattttacatgtgaggaagctagacttgaataggtttagtaactttcccaagtttatacagctagtaagaggcagagaccagatgcaaactcaaattatccatctctgtttagattctacagttttaccattatgggaaatattaaggattacattcaggttctgttcacatgttcaaggctggattcctgtccatgaaagaaggcggctccttgatggaatatgaagttcaaaaatctgctagaatgcattccagaagctgttttagccattcacatccattgacaccaggtaactgattatttttgtgcgaagatcccaacaattgtgtcaggtttggagagtttggaacaagatgcctcaggaaacttcatggtttgcaatataatccattaatgcctgtgaaggcgatactactactacta

SEQ ID NO: 482779 - DNA, 593 bp, Homo sapiens
gcaaactcaaattatccatctctgtttagattctacagttttaccattatgggaaatattaaggattacattcaggttctgttcacatgttcaaggctggattcctgtccatgaaagaaggcggctccttgatggaatatgaagttcaaaaatctgctagaatgcattccagaagctgttttagccattcacatccattgacaccaggtaactgattatttttgtgcgaagatcccaacaattgtgtcaggtttggagagtttggaacaagatgcctcaggaaacttcatggtttgcaatataatccattaatgcctgtgaagrcgatactactactactactactgacagtagtgatagttaacacttattagaagctttcttaatttccccaaggtcacacagctattaagttggagagccagggtttgaacccatattgttggagccacagtttgtactcttaaccaccacaaactgctgtctctggtgtggtatgtaaacaatgagtggcagtctgttcaacaacatcttttcacaatgctctttaccaaagttgtgagacagtgttgccaaggactaaacaatatttc

SEQ ID NO: 482780 - DNA, 554 bp, Homo sapiens
cacacacagaattggatttctacctggaaccatattaaaaataaattagtaaagactttgatgtaaaaatttcagaagaaaaacataggctaatatctttatatctttaggataaaaaaagtatttyaaaacataaaaaataaaagccataacgtagttggataaattcaactacattaaaattaagcatttctcttccccaaatgacaagcttcattctgaatggggataattttactacatggaaccacaaaagtttaatatggagactataatcttcaaaacagtaagaaaaacaattcaaccatgtcagtcatttaccaagtgctttacatgaatcaactcactcaatcctcataagaacctataacaattactcttgtcattcccattttgcaggtaagaaaatggagacacagagagcttctgttcctcatgcaaggtcccagtaagtggttgagagactttggaacccaagcaatgtgggtccagagtgtgcattccgctttgttgcctgtaacaaaaatgaacctctccctggtcctatttcctcc

SEQ ID NO: 482781 - DNA, 554 bp, Homo sapiens
cacacacagaattggatttctacctggaaccatattaaaaataaattagtaaagactttgatgtaaaaatttcagaagaaaaacataggctaatatctttatatctttaggataaaaaaagtatttcaaaacataaaaaataaaagccataacgtagttggataaattcaactacattaaaattaagcatttctcttccccaaatgacaagcttcattctgaatggggataattttactacatggaaccacaaaagtttaatatggagactataatcttcaaaacagtaagaaaaacaattcaaccatgtcagtcatttaccaagtgctttacatgaatcaactcactcaatcctcataagaacctataacaattactcttgtcattcccattttgcaggtaagaaaatggagacacagagagcttctgttcctcatgcaaggtcccagtaagtggttgagagactttggaacccaagcaatgtgggtccagagygtgcattccgctttgttgcctgtaacaaaaatgaacctctccctggtcctatttcctcc

SEQ ID NO: 482782 - DNA, 581 bp, Homo sapiens
taaagtcaaatagcatattgattccacttatgtgaggtacctagaataggcaagtttgcagagaccaaaagtagaatagaggttatcagggcatgagggaagttgaaaatgggaaggtattgtttaataggtcagattttattttgggggcaatggcaagttttgggtagaggtaatggtgatgattacacaacactgtgaatgtttcaatggcactgagttgtgtacgcttacaaacggttaaaattatacatatcttgttatatacattttaacaccataacagaaactatattataagcaaaacttattttaaaaagacaactgacaaattgaaataaartattttaatttatataaaaggcaatagctaacatcaaaaacatatttaaaaattatcatatatcaataataaataatttaaaaatgtaaataagtaaaaaatatataattaattttaaaataaaatatcactaaccagtaagtgaataaaaatatgcccaacttcattagcaattgcagcaataagaatcaaaacaatggccagattaaagaaaaaataaaagaataattcaactatt

SEQ ID NO: 482783 - DNA, 581 bp, Homo sapiens
taaagtcaaatagcatattgattccacttatgtgaggtacctagaataggcaagtttgcagagaccaaaagtagaatagaggttatcagggcatgagggaagttgaaaatgggaaggtattgtttaataggtcagattttattttgggggcaatggcaagttttgggtagaggtaatggtgatgattacacaacactgtgaatgtttcaatggcactgagttgtgtacgcttacaaacggttaaaattatacatatcttgttatatacattttaacaccataacagaaactatattataagcaaaacttattttaaaaagacaactgacaaattgaaataaagtattttaatttatataaaaggcaatagctaacatcaaaaacatatttaaaaattatcatatatcaataataaataatttaaaaatgtaaataagtaaaaaatatataattaattttaaaataaaatatcactaaccagtaartgaataaaaatatgcccaacttcattagcaattgcagcaataagaatcaaaacaatggccagattaaagaaaaaataaaagaataattcaactatt

SEQ ID NO: 482784 - DNA, 597 bp, Homo sapiens
ccctgaaagccagtgtttcctacaaccctttacagtcatattttaagagaaaaaaaattctaggaagcattcccaggagcaatgagttccacggaattagaaatttataaatggaggcccccttggcttgataaatttaatagtctttatcactgctgaaaaattaaacctgttccttgaggrcctgtgctgtgtctggacacagtgaagaaacctcgttcctctaggcagagcctgggaagccccatgtgcctctgtgcgtggatagactctcctcctggcctgggatgaatatgtagaaagctgatgttccatgtgatataaatgcctttaggaccagactgcatcctcttcatttgtttcacaacgtttatcaagtgtctgacatagaaatgctgctcagtaaatatttgtggagtccctcacagccaaaggcagagttctcaataaagtaaaaactgcaaacgttgtgtggcaatgtcttcttgccctgtgtgtttccagatctgaaagaactgatgtcagcacacgccattcattcacagcatttgaatcttgctgcaccttctgatgcagctttaggaaatatatagaatt

SEQ ID NO: 482785 - DNA, 597 bp, Homo sapiens
ccctgaaagccagtgtttcctacaaccctttacagtcatattttaagagaaaaaaaattctaggaagcattcccaggagcaatgagttccacggaattagaaatttataaatggaggcccccttggcttgataaatttaatagtctttatcactgctgaaaaattaaacctgttccttgaggacctgtgctgtgtctggacacagtgaagaaacctcgttcctctaggcagagcctgggaagccccatgtgcctctgtgcgtggatagactctcctcctggcctgggatgaatatgtagaaagctgatgttccatgtgatataaatgcctttaggaccagactgcatcctcttcatttgtttcacaacgtttatcaagtgtctgacatagaaatgctgctcagtaaatatttgyggagtccctcacagccaaaggcagagttctcaataaagtaaaaactgcaaacgttgtgtggcaatgtcttcttgccctgtgtgtttccagatctgaaagaactgatgtcagcacacgccattcattcacagcatttgaatcttgctgcaccttctgatgcagctttaggaaatatatagaatt

SEQ ID NO: 482786 - DNA, 519 bp, Homo sapiens
actgactgtcccctgggagctrcctttgtcccctgctctgtggccccgtccgagggcatttcacgacgtgggtatttccttcctcaaggctggcaggagatctcctcactccggcctgctgagatggagttaacgtaatggaatgtgctcacaggagctgcccctcgctttgccactttctgttgttcaaaagcacgttccaggccctgctcactctcaaggtgaggggaccacacagggtgtgattccctgagggtcaccctggaatgtgtctgccacaccctgatacggtaaggacagattccaaaggcctgtgttcccggaccatttctgctgccactgggtgccctagccggccactcacctctgttgggtcttgatgttctcctccgtccagcaaagccatagaggtcagtggtcattaatttaacactgaaattgatgcattttttttttcttgtgtccagagaacatgtttagctctgttttttgtgttagtcgtaagaatgctcccaattg

SEQ ID NO: 482787 - DNA, 582 bp, Homo sapiens
ctgcaactctaggccctgcttgctgtgaccagatactcaggctgagacccccgccttaaagtttccagtgtcagtggtcttggatggaccccggcatgggtcagtcatcaaagctcccaagtgatgtccagctacagacgctccagatgagtggtcctcaacctgcgctgaacgttagaatcacctggaatgtttaaaaaataatcycaggccaggtgcagttgctcacacctgtaatcctgtaaaaaagttgctcacacctgtaaaagcacttcaggaggccaaggtgggcggatcgcttgagctcaggagtttgagaccagtctgggaaacacgacaaaaccccatctctacaacaaataacaaaacttagctgggcatgggggtgcatgcctgcagtcccagctactcaggaggctgaggtgggaagatggcttgaggccaggaggcagaggttgcagtgagccacgatcacacactattgcacgccaggacgacagacggagccagcccccgtctgaaaaaaattaaaataaaaagaatcccaatgcccaggctgtacccagaggacctcaatcagca

SEQ ID NO: 482788 - DNA, 597 bp, Homo sapiens
gctgcaactctaggccctgcttgctgtgaccagatactcaggctgagacccccgccttaaagtttccagtgtcagtggtcttggatggaccccggcatgggtcagtcatcaaagctcccaagtgatgtccagctacagacgctccagatgagtggtcctcaacctgcgctgaacgttagaatcacctggaatgtttaaaaaataatctcaggccaggtgcagttgctcacacctgtaatcctgtaaaaaagttgctcacacctgtaaaagcacttcaggaggccaaggtgggcggatcgcttgagctcaggagtttgagaccagtctgggaaacacgacaaaaccccatctctacaacaaataacaaaacttagctgggcatgggggtgcatgcctgcagtcccagctactcaggaggctgaggtgggaagatggcttgaggccaggaggcagaggttgcagtgagccacgatcacacactattgcackccaggacgacagacggagccagcccccgtctgaaaaaaattaaaataaaaagaatcccaatgcccaggctgtacccagaggacctcaatcagcacctgtgggtggggc

SEQ ID NO: 482789 - DNA, 436 bp, Homo sapiens
ctgaagggactgcctctcttctctcctcctctcctctccagacttggaagacagcaccttactcaagttcgagccaggaccccagtgcagcggtggctccatccaccgcatggcctctcacagccakgaagctaccagcgggggaagcggccagtccacggagacacggaccaatgtggaaaattcacaccaacatcaccctctcctctagtactcacaagtctttttgtcatctaaggacacaaagggcgttacattcaacattattagctcacagttgagagctcgtcatatttagagttgtggaggcttggggaaaacaggaagaaaaagtcttggaaaggaacagcagaggctcctgcccccacccccacactccaccccttcttgctctctccggctgggtgtcctcagaagagaaggggtcagagttctc

SEQ ID NO: 482790 - DNA, 436 bp, Homo sapiens
ctgaagggactgcctctcttctctcctcctctcctctccagacttggaagacagcaccttactcaagttcgagccaggaccccagtgcagcggtggctccatccaccgcatggcctctcacagccatgaagctaccagcgggggaagcggccagtccacggagacacggaccaatgtggaaaattcacaccaacatcaccctctcckctagtactcacaagtctttttgtcatctaaggacacaaagggcgttacattcaacattattagctcacagttgagagctcgtcatatttagagttgtggaggcttggggaaaacaggaagaaaaagtcttggaaaggaacagcagaggctcctgcccccacccccacactccaccccttcttgctctctccggctgggtgtcctcagaagagaaggggtcagagttctc

SEQ ID NO: 482791 - DNA, 436 bp, Homo sapiens
ctgaagggactgcctctcttctctcctcctctcctctccagacttggaagacagcaccttactcaagttcgagccaggaccccagtgcagcggtggctccatccaccgcatggcctctcacagccatgaagctaccagcgggggaagcggccagtccacggagacacggaccaatgtggaaaattcacaccaacatcaccctctcctctagtactcacaagtctttttgtcatctaaggacacaaagggcgttacattcaacattattagctcacagttgagagctcrtcatatttagagttgtggaggcttggggaaaacaggaagaaaaagtcttggaaaggaacagcagaggctcctgcccccacccccacactccaccccttcttgctctctccggctgggtgtcctcagaagagaaggggtcagagttctc

SEQ ID NO: 482792 - DNA, 519 bp, Homo sapiens
tcacttcttaatgtgattccagggaactggccacattccaaaattcataatctaaggtagtgaaagaacgtgaacatcaagacagtttggctgggctcagaggctcacatctgtaatcccagtactttgggaggccgagggtagatcccttgagcccaggagttcgagaccagcctgggcaacatggcgaaatcccatctctacaaaaactacaaaaattagccagatgtggtggcatgtgcctgtagtcccaggtacttgggagactgcagtggaaggattgccgagcccgggaaagggaggttgcggtgaatggggatcccgccactgcactccagyctgggtgacagcgtaagactctgtctcaaaaacaaaacaaaacaaaagattcatttcttattgataaagcaagctccttggagaaagatcttggaacctcattagtgctgggggtgggggtggggcttcttcaatccagccgagctggctgtgaaacccccaggctttggtaccaagtga

SEQ ID NO: 482793 - DNA, 613 bp, Homo sapiens
gtgacctgagaagtgtgaagaggaaggtaaaagttgatagaaaatattgaggttcttcagtccggaaaaagccttaagcagcacatcagcacaaataccatgcagcagttttcaactccatctgctttgctgggagagacctgaatcaatgtccctggattttcaccagggctaaatctactgtacttctgtttctgagaagatgtaatctttaaatgagaatcaagaaaagcaaaatcaaaaactataggctgataataggggaaaatatggatgaaataccttccacagacaagaaaattccacaacattctaaaagatgaaaagcatattcaagaatatggagagatgaaaccaagtgaagaaaggtgagacgaaagcctaaggagaggggattagagcagagagagtttgctgacctgacggaatgacagtgctcgggaagttagaagctggaagtaggttggaggacrggagtgaaaaatgaggttggaaatcaggtaatgtgttgaaggatgactattttacccttcaattccactttcgtatattgtatacatgcagagctattgacggccaaccagccagggatattttcttcagggagctgggg

SEQ ID NO: 482794 - DNA, 613 bp, Homo sapiens
gtgacctgagaagtgtgaagaggaaggtaaaagttgatagaaaatattgaggttcttcagtccggaaaaagccttaagcagcacatcagcacaaataccatgcagcagttttcaactccatctgctttgctgggagagacctgaatcaatgtccctggattttcaccagggctaaatctactgtacttctgtttctgagaagatgtaatctttaaatgagaatcaagaaaagcaaaatcaaaaactataggctgataataggggaaaatatggatgaaataccttccacagacaagaaaattccacaacattctaaaagatgaaaagcatattcaagaatatggagagatgaaaccaagtgaagaaaggtgagacgaaagcctaaggagaggggattagagcagagagagtttgctgacctgacggaatgacagtgctcgggaagttagaagctggaagtaggttggaggacaggagtgaaaaatgaggttggaaatcaggtaatgtgttgaaggatgactattttacccttcaattccactttcgtatattgtatacatgcagagctrttgacggccaaccagccagggatattttcttcagggagctgggg

SEQ ID NO: 482795 - DNA, 438 bp, Homo sapiens
acatacaataggatataagttagattccggaatacaaatagaggcaatataccgtgttacatttcatgcctctctgaaatgtgagaagagtatattgttactggaaaaagtcttacctttctattattgaaaaataatagttattgttgtatcaataatatcataagataactaagaggcaatgcatcctaaaccttattgtaagcataacgctgataaaaatgtaaatgccaacactttaatactgaataagacatamcttagtcatcttattttctacctaagtcatcttactttccttctagtcctctcggacttgtaagatctcaaagagtgcttctgaaagatacaggaatcttaagctttaactcagtttataatttatttatttgaaaacatatattcatgggagtagtcattttggtatctattgtcttc

SEQ ID NO: 482796 - DNA, 417 bp, Homo sapiens
tggttgtgtaagaataatgtgcattaagcaaggggtgtatgtaagaaaaatatgctccttatctaataatttacaaatacagaatgtcaacagcattcccttatctccaaatttttgttcttcactcatacattcctccatttgtcacatgtgcctacatattaaccttaagcaaaggttatatatgcatacccacgaattaataaaagcaatgaaacaaggtaagattttatgcatactccgcatagaatactaccaattaaaataaaacaaaatccttatctgtactttgtcaataaatctacaaagayttcttaatgttagaatgttgtattataaagtatgataaataatgttgatattagtgttgtttagtagaaagcccaaagcattttatgcatctaagcaatttatatt

SEQ ID NO: 482797 - DNA, 527 bp, Homo sapiens
caggaaatggctaaagaatttgtgtttagctttcagaagtagcagctggggagtgatctattaattgttttcaaaccctttgatggttgctaggtgaaatttgtatgaacagtggtttcccatgtctgaggaagcaaaaatataaaaaaagaaatgggcctcctactgtctagcatagcttagacaagctcttgccttaatactggattagatgatccttttgagatcccttccagctatactttaaaacgcttagactatagaattgmtagaataaagttatgtcatttcttagcagcaatttgtatattttatataaacggaagatttttggataggttatacttttcttttgccaatatctgggaggcttggtatatatttgtaaacacacaaaatgcaattcaagaaggttgcataaaatgaaaaacatttatcaccagaagacattttttatatatggtatttgcctctacatagtataaacaaattctcttttggatgaaaagggaaagcacttaaggtaa

SEQ ID NO: 482798 - DNA, 495 bp, Homo sapiens
aagaagtacttatcaatgaatgcttgtgttaccagtctacccttcagcagttataattagacttttataccttcatgaaaaatctttgtattggaatctgaataacatatatcattacctttacaaattatgttggctgtaactcagaaataaaatgcatcttgattaaagaagcccatgtgatttaacaaaagtgccacattcatgaaggcaattcgttaacagatattaggatttatgcctgtatttgtatttcccgaacaattacttacgtgaaaaaaaatacatacaagaattgtccaagtctcaaaactgcctctaaatcataaaaattttccctccctccctccttccctccctttcttcctgcctgccctaccccctccctccttccattccttcctgtgrcagagtgggctaccaggtgatcccacactaagacaccttgcagggcttttcaaataaatattgctttatttaattgtcacaaaccag

SEQ ID NO: 482799 - DNA, 562 bp, Homo sapiens
ttagcctacattccttgatgcttggctcccttctcagattacagcttcttctttcctggctcatctacttctttgctctctgatctccccctggcaagcacccttgtgatgatattgggcccactargataatctaggataatctcccacctcaggatccttcacttaatcacatctgcaaagtccattttactatgtaaggtgacatattcacagattccaggaattaggatgtgatcttctttggggtcccattattcagcctgccatggggctcttattcaattttagtcaatttcaaattttattcttatttggcttgtctctcgatccatcttagtttcaaggatgaatgagctccagctagaattgtacaccaatcttaaaacatgcaaacttgtgtacatattttgtgggtgtacatacacatatgtctgtagagtaagtttctaattattactactgtctcagcatgacaacaaaaattattgattaaaaatcatgttatactattgaaatataaattcttttcattcctcaatgcccgtctaattcaagcctc

SEQ ID NO: 482800 - DNA, 562 bp, Homo sapiens
ttagcctacattccttgatgcttggctcccttctcagattacagcttcttctttcctggctcatctacttctttgctctctgatctccccctggcaagcacccttgtgatgatattgggcccactaggataatctargataatctcccacctcaggatccttcacttaatcacatctgcaaagtccattttactatgtaaggtgacatattcacagattccaggaattaggatgtgatcttctttggggtcccattattcagcctgccatggggctcttattcaattttagtcaatttcaaattttattcttatttggcttgtctctcgatccatcttagtttcaaggatgaatgagctccagctagaattgtacaccaatcttaaaacatgcaaacttgtgtacatattttgtgggtgtacatacacatatgtctgtagagtaagtttctaattattactactgtctcagcatgacaacaaaaattattgattaaaaatcatgttatactattgaaatataaattcttttcattcctcaatgcccgtctaattcaagcctc

SEQ ID NO: 482801 - DNA, 562 bp, Homo sapiens
ttagcctacattccttgatgcttggctcccttctcagattacagcttcttctttcctggctcatctacttctttgctctctgatctccccctggcaagcacccttgtgatgatattgggcccactaggataatctaggataatctcccacctcargatccttcacttaatcacatctgcaaagtccattttactatgtaaggtgacatattcacagattccaggaattaggatgtgatcttctttggggtcccattattcagcctgccatggggctcttattcaattttagtcaatttcaaattttattcttatttggcttgtctctcgatccatcttagtttcaaggatgaatgagctccagctagaattgtacaccaatcttaaaacatgcaaacttgtgtacatattttgtgggtgtacatacacatatgtctgtagagtaagtttctaattattactactgtctcagcatgacaacaaaaattattgattaaaaatcatgttatactattgaaatataaattcttttcattcctcaatgcccgtctaattcaagcctc

SEQ ID NO: 482802 - DNA, 562 bp, Homo sapiens
ttagcctacattccttgatgcttggctcccttctcagattacagcttcttctttcctggctcatctacttctttgctctctgatctccccctggcaagcacccttgtgatgatattgggcccactaggataatctaggataatctcccacctcaggatccttcacttaatcacatctgcaaagtccattttactatgtaaggtgacatattcacagattccaggaattaggatgtgatcttctttggggtcccattattcagcctgccatggggctcttattcaattttagtcaatttcaaattttattcttatttggcttgtctctcgatccatcttaktttcaaggatgaatgagctccagctagaattgtacaccaatcttaaaacatgcaaacttgtgtacatattttgtgggtgtacatacacatatgtctgtagagtaagtttctaattattactactgtctcagcatgacaacaaaaattattgattaaaaatcatgttatactattgaaatataaattcttttcattcctcaatgcccgtctaattcaagcctc

SEQ ID NO: 482803 - DNA, 599 bp, Homo sapiens
tgtggctgaattccaatgggasgagagtataaggaggcatgtccgaccctcccctccccatcatggcctgaactagatttttgggttcattttggaatgctcttggctgagagtgggggtccatcagttgcttggaaggcttagaattttaattttggttgacagtttacagaaattatttctataaataccttataataatatgtaattattaaataacccattatttctcccatattaggagcaatgtaaattaaataagtacataaaagtttgaagatttgaaaaatatattacaaaagaccgcaatggcttgtttaattttattgaattttgttaaagaaataaagatttaaaagtggctttaaggataaagccacatacaattaaaagtagagtttgttaataggttaagccatacctttctatttaatttcattacttttttctttttaactatatgatgagaaagtttatgtagaatatgaatactttttttctcattaaattaaagcaagaaactcctgatttaatgtagaattcttagttgattatcattagaaatcatatgaaaaccaattctatgctttgcacacatg

SEQ ID NO: 482804 - DNA, 357 bp, Homo sapiens
ttccccaaccccccggcgctgagcacggctgctggggtcccagggcycaccccactccgcctgctcccttccgcgggcactgctcaattctcaagccccgactgggggctccctgctgccgggctgcacggggagtgaggctgcggggctgcgggagtcctgcccactctccccctaccccgagcttggcagcccactacctgccacgtgcatcaactccagtccagccttgggaccccggggccaccacctccctccagcctgtgcacccaggcccagtagacgctgcctgttctccagacgttgcccacggtaggctggcttgaggcctcagcgcaccaactctcccagggtgct

SEQ ID NO: 482805 - DNA, 357 bp, Homo sapiens
ttccccaaccccccggcgctgagcacggctgctggggtcccagggctcaccccmctccgcctgctcccttccgcgggcactgctcaattctcaagccccgactgggggctccctgctgccgggctgcacggggagtgaggctgcggggctgcgggagtcctgcccactctccccctaccccgagcttggcagcccactacctgccacgtgcatcaactccagtccagccttgggaccccggggccaccacctccctccagcctgtgcacccaggcccagtagacgctgcctgttctccagacgttgcccacggtaggctggcttgaggcctcagcgcaccaactctcccagggtgct

SEQ ID NO: 482806 - DNA, 357 bp, Homo sapiens
ttccccaaccccccggcgctgagcacggctgctggggtcccagggctcaccccactccgcctgctcccttccgcgggcactgctcaattctcaagccccgactgggggctccctgctgccgggctgcacggggagtgaggctgcggggctgcgggagtcctgcccactctccccctaccccgagcttggcagcccactacctgccacgtgcatcaactccagtccagccttgggaccccggggccaccacctccctccagcctgtgcacccaggcccagtagacgcygcctgttctccagacgttgcccacggtaggctggcttgaggcctcagcgcaccaactctcccagggtgct

SEQ ID NO: 482807 - DNA, 373 bp, Homo sapiens
tcacaggcctatgttattacctgttactagtgctggtaacacaaaaaaatccagtctcccaaactgactggttggaaaaagagcttaaactttcatccactataaggtggggaccattcctcttatgagttttttatgtacatctgaacttcctggcaattcttacatagaagtaaaactacacatctctgtgtagtgttgcattgaacaagacctgaaactccatcaggtacctcatgtcagtatagtaatggtgccacctcttactggagcttaaatcactgkatcttcccacgtccacaattaaggacagaggatgctggtctatgctcccaagcccaccttagtgtctgaataaaaccctcctccgtgc

SEQ ID NO: 482808 - DNA, 217 bp, Homo sapiens
ttggccaggctggtctcaaactcctgagctcaagtgatcctctcayctcatcctcacaaagtgctgggattacaggccggagccacagcaactggccttgtttagtttcagtgaataaaactgccttttgagggagctacagaggcaatatagcagcttggaatccaggaagcttccttggtcttgtgtttctaagggtcccaggcatattataagc

SEQ ID NO: 482809 - DNA, 217 bp, Homo sapiens
ttggccaggctggtctcaaactcctgagctcaagtgatcctctcacctcatcctcacaaagtgctgggattacaggccggagccacagcaactggccttgtttagtttcagtgaataaaaytgccttttgagggagctacagaggcaatatagcagcttggaatccaggaagcttccttggtcttgtgtttctaagggtcccaggcatattataagc

SEQ ID NO: 482810 - DNA, 663 bp, Homo sapiens
tttcattctccacagtatagctggggtaatctctacaacatgaacttgatcctggctagtcttctgcttgtggttcttcattacctaggatatagcctaagacctgcatgccttagcagaaacattggcaatttctgaatggccccacatgctctctacattttccagcctttcttgtagttagctgggactttgcagctatttctggcaaggaggggatgaaatgaatgtgttacttttggacctacacatgtaagaggtggtgtgccacttccacaccctgtctttacctgctgtggggatcttgaaagccacatgttgagatggcaatatcaaaacatagtgggatcctgggtgtctcagttacatcatggagaacygccctggaatatcacctgaactgcattggaatttatttgacagagaaataaacttgtgtttgttgagctagcaaactttaagtttcattcctgcagcacaacccggcctacttggctaatgcacatggccaacacagccctgcaggctcaaactccagcccatctctctagcttgtctgactcttcaggcatgcaagacaatttcacttcctccaagttgccatgttttctcctgcctctggttatttcccgcttgctgggcaatgtctgcctcttcccctac

SEQ ID NO: 482811 - DNA, 582 bp, Homo sapiens
tttccttattttcaaagactatatctgagaaatgattttaatttaccatgcattttaaacctcacacaatatagatttcttatatcctggaatgtatttgatgagaaatacattattcattcatggaagtcaatgtgtatttttgaaagtatcaaatgtagctttaaaaaaacagcatttaccctaacatgctcggtcctttcctccaagaaagttctctggaatgttaaaactacttatttctctaatttctctaaagtagcaaaaggaagttattcatgtatcttgcttcatgtgagtcacaaaacaaagtctgaaaagttaaaacaataaactgaagcttttctccccaaaaatgtagccagaaaaaaagcatgagacctgaaaacatgggttatattagtttagcaacacagaagaaagaattctgctcttccatagaccaagccactgaaacagggagagcactgtgggttcttttaggaattctcttgtattcgtttttgaagtacagcactgagcctgacccacagagggcacacggcaacayactcctgactgacggaatgaaaactgaatgaa

SEQ ID NO: 482812 - DNA, 581 bp, Homo sapiens
ctgctgcttcaccatctaccatggcaaccacatggagtccctggacctcatcacctccaaccccgaggaggcccgcacctggatcacaggcctcaagtacctgatggctggcatcagtgatgaagactcccttgccaaaaggcagaggacccatgaccaatatcctttctagaactttattttcagctctctcttgctctctgtgtatgcgtgtgtgcatttgtgaagtaaggattagactatgttttaatttttcccataattttcctttctctttctttacccctcacaccgtcttctcccctcctgactctcactccaaataaatgaacgcatgaaatgtatggacacttaagcttgtatgaactcaggagcaaaattctttaaagagaccgaatctrgctccacaatcagaggtctccaaatacagcctcaagtttcctaagagagggaaagtgcccattaagtatcattgcctcttttaaatcataggcatattcattaactgtaactgggaaaacactgatttggattagagaaaatcctactttgttataaagtcagtttagtttaacaaatac

SEQ ID NO: 482813 - DNA, 627 bp, Homo sapiens
gaggtgtgttaagatcagttgattatatatagtccttagaacactgcctagcacttaataagcagtttacaagtaataggtactgctgtcattgctaaaaagaggtaaagagtggcaaatctttagctttcctattcagataaatgaaagtctgaatactcagcagatctgtatgcaaagatgatggttctggcacttaggctcagcatttttctctatcagaccattctccttcatgttttccccaccttatctcttgaccccatgagggaaattattacttccagaaggctttaggccacctgttatgtatgttataaatccagaccttattcttcccccgtcaaactgctgggcaaatctggcccactccsaatccaggaggatttttgcgtggactcctgagctaagaatgggttttaaatggttaaaaaaaatcaaaagaaaaacattttgtgacctgtgaaaattacttgaaattagaatttcagggttctgaaattttaataaaggttttattggaatttctgaaattccaataaaggtttattggaacacaaccgtgttcattcatttatatctgtatggctgctttctcataacagtgacagagtggaatagttgcag

SEQ ID NO: 482814 - DNA, 296 bp, Homo sapiens
aatagttgcagctgagagcaaatgtcctgcaaaacttaaaatattcactatcaggccctttacagaaaagtttgccctcccctgtrctagataggatcattcaatgctttgcatgctcctacagtctcttgatagaaaatcctagatcattacttcacattcagtctcacccagattttctctgaggaatgactgtttctctttttaaaattattatggtgtggctataaattattaattcagggctttattggacactcatatcttaattatgaagaacatctttaagatatcag

SEQ ID NO: 482815 - DNA, 614 bp, Homo sapiens
ttgcagaggagaaaaaaaattctcccttaatttggatgcagaagattctaacgaagctgattcctgaagggtggtgcaagtggagaagaatggaactccacaccatagcagttcagagacagcaccgttagaaagaacactcttgatatttagaagccaaaaatgacaagagcaaataaggaggagtttgagtgacctaggatacaaggggaaagaagattcagggccgggcgcggtggctcatgcctgtaatcccagcactttgggagactgaagcgggcggatcacctgaggttgggagtttgagcccatcmtgaccaacatggagaaaccccgtctctactaaaaatacaaaattagctgggcatggtggtgcatgcctgtaatcccagctactcgggaggctgaagcaggagaattgcttgaacctgggaggcggaggttgcggtgagccaagatcgtgccattgcactccagcctgggcaacaagagcgaaactccatctcaaaaaaaaaaaaaaaaaagattcaggagagttgtcattccaggtcttgattacagtagacaaccatttgtaacagattctagcaacacagtgtttcctggagttagtc

SEQ ID NO: 482816 - DNA, 606 bp, Homo sapiens
agctggcatctcttggcttcatcataatgtggctcaaaatacacacttctgggtgatacagttgacctaaaataagcacggaaagcctattaattgctgcagagttgggaaattagatgagctgtcagtgctcagactcgctgttaacggggctgtgttattggcgggatgccgtgtgaatgctaacgtgttgtttctgctctgttccctcacgccttcccggattcagagagaggtaaccggccgattttcacttctccccccttcgtggtgtcttaacgtgtctggcaaagctcacttgctttcttcatgtcgcattgccatcctcacaaccatccttgtctttgaaaggcagaacttttgttttgttttgttttgtttcgcctcttatcaccagcatttaaaacagagtctggaattgcrtctgcgttcctcattctctactgtgtttgaccctggttgtggaaggtgatgggctgagtgattaagtctaacaccaatgtggtcactcactaacgactgagaaaaatctcatcagtgtggcagggagtgaatgtgatggaaataggttatgtgccatgttgtagaaggaggcttttcatgctt

SEQ ID NO: 482817 - DNA, 491 bp, Homo sapiens
ctctgtctctaaataaataaataaataaataaataatattagtgcttatattacatattctctagaatttgattggtaagggttggcactaggctactagcctagccagaagcactgattcagtttcagtgtcaattattagccaaaatatatggtcctccctctccaccacaagaaggatagaaccacagaaaagacatacctatgaaacaagagattttgacctcagttgtgtttttccaatgctctgcatgtcygcctgcccgtttgattgattggggactttaagctccatgattccatagctctaccacttaataaaaactccacttttgatggaataagggaatttggagataattctccttgaatgaatgatggtggttcctgctgggcaaagcggagagacacgaaggcagatctcctctttgtgtcggagttggtgtcatgtaacctccctgcctggttgggagctggaagtgatgagtcct

SEQ ID NO: 482818 - DNA, 492 bp, Homo sapiens
tgagtcctggcaaggggatggagatggcctgagcacaggcagggaggcraagagcagcttagaatggctgcgtggtgagggggctggaaatggagggatggatgccagaaatttccaggaggtgaaacaggacgaatgtggggattgggtgtggcacgtgaggcagggggagtccggttctagcatggaggacactgagctagaacgtgaggaagcaggagtaggttgggaggagaaatgttggggtcatgtgtggattgccggtgattaaagcgtcatggggcagccaggtgaggtgctgctgagctggagcctgggcttagggagccccactgcagggctgcctggggcatggcgaggtgaggttgcgaggcagggttttccggccagaccttcacgatggccagttgcctgctatagtaaatccctgtcccttcccaaggccgccaaggctttcttggggaaagtatccatcatagtctatgaaaaggc

SEQ ID NO: 482819 - DNA, 549 bp, Homo sapiens
atcccagcacttcaggaggccgaggcgagcggatcacttgaggtcaggagttcgagaccagcttggccaacatggtgaaaacccgtctctactaaaaatacaaaaattagccgggcatggtggcaggcacctgtaatcccagctacttgggaggctgagacacgagaatcacttgaacctggaaggcgaactttgcagtgagctgagattgtgccactgcactccggcctgggcgrcagagccaggctctgtaaaaaaaaaaaaaaaaaaaaaaaaagaggttagggggaagtagaagatacaagaaaaaaggattttaattgatagaacaagataccatagaaggcagatcatttgctttagataggaggagaataggagagacctctctcctattgtaacagatgtgggaaggaggataggatgccttggatccatttaagtttctgagttgtatgcagtgggtgctggaaccagctcctacaagctcacaggagccaattgttaaattttcagcaattttgctaattggttaacctcacattaaca

SEQ ID NO: 482820 - DNA, 535 bp, Homo sapiens
gctgccctgcctgtgagatgaagataatgctgctggatttaacaaatcatggctatttgcattgcttttatttttaaggcatttctgagcaaatccatcaattgatcagatctattctataacatatactaagtttatttttgttatgtagtttgagtcstcagaagtctgaaagaccgcttattatcccaatctgcactcttagatgatcatcgttatgtttcatcacatctcaggaaaatatgatctagagtcaaaattttccatcagggttatgaaacagtctattatgaaatccaattgtttagcagaattctgacaagaaatatacagactcaaaatttaggagaaaatttcactgaaaaaattaatacatcctttagtaggccctgaatgttactttgataataagaggaagcttttcatattcaggcaaatactattgtaaatttgagctatgcccctaattggctaggtaatttcagtctagatgcctaattattttggtctttgatttccttacctttaaaacaag

SEQ ID NO: 482821 - DNA, 649 bp, Homo sapiens
gactatccatacaatttcagccgacagattttcttctcttatttcttaataacagtgggaagtcttctgcaagaacaagtaacactgaagagacaaagcccagagaggaggggcagaagcctgagatggtgtatttttagtcattttgattaaattatggagaaaaaaagttgataatttattgaaggggaacaggraagtctatgtaaatgtttgcagatgaataattaatgtgactttcctacataactaggcctttaattaaagccactgtgaaacaaagaaagaaccaaagagcacaattagatttcagctccttgtgagttcttatcctaagtactatttgaaagtccatgcttaatttgcatctttaaaggaagatagctcagacctagggtgacagttgctttttatcccagtttaactaattccccacaaatcaaaaaatctattaatatattaatgaatttcctcctactaaaattttacccaaaaagtttcagggtttatttattgtttttttttcaatgtattaattttcattttagggaaatatattggtacctctcagtaacttagaaagtaaaatgaatactcaatgtttttaaatactaattgtgtaatgtgttgtttcacatgttatttacaa

SEQ ID NO: 482822 - DNA, 641 bp, Homo sapiens
cgcaatttcccagccctctggaaggcagtgagggcagggagggagggacgcgccggcgggctgggctgacatctccgtgagggctggggctggcgccaaagccaggaaccccaagggtcagtgcggcactgcgcaagtgcccccgacaggtagggaaagtgcaggctttcaggggtaagctgagacagtcagggatggggctttggtcatctcgtctgggtggaaagaggggctggggtctgcgtgcttctgggtctctacccatggatgtctggtcgctctctgggmattggggtgaaaattccatctgtttggggagtctggcatgtggatctctgacctctggcccctgtctccctccctagattgaccaggatgggctcaatctgctagagaggactctgtacctcgctcaggatgaggagagtgagaaggtgctgggacatgggatggggaggcagggaaggcctggggccccaggatgggtgtccctaggctaggcctgtccctgtccctggatgagccccttcccgtggtgcagatactggcagcacacagggtgttcatggagcgagtgctcagcctcctgggtgctgatgctgtggagcagaaggctaaggagaccctgtggctgtagtggg

SEQ ID NO: 482823 - DNA, 641 bp, Homo sapiens
  misc_feature (1)...(641): n = A,T,C or G
atgtttaagtcaggactgcagtttttgtgaaagcatcttacggttttacgttatcaataggatcaatggcaatgagatctaaggacttgataggtctaccccttctccacaaaagcaattacaatcaaaggtttcattcagagaagttgagtccatacagtaacggagattagagctaatctttaatatgagcccattagattatatactactgtactcagctccagccactggacatctggaaggattctggcaaactggaacatgtccttaagagcaatgtggtaaaaagtgcasattactagagagagcaatgtggtaaagacttcaaatatgcagcaatggcctaaacaccgcagaatttctgaatgaaaaacaactttttttaatatanctaggggcaggagtgctgttttcaactgctaatttcaaatgaaagaaagcttgtttttctttttttttcctgcaatgctagagggcagatgttaaaagattctggctcaatacaatagttaataattcaaagtaattaaaatgacccaggttcttcaatcgtagaagaggtaagaaaaaaaaagagggcaagtttaatttttctcaagaggtgcttgaaccaaggttacacaacaaacctgggatag

SEQ ID NO: 482824 - DNA, 641 bp, Homo sapiens
  misc_feature (1)...(641): n = A,T,C or G
atgtttaagtcaggactgcagtttttgtgaaagcatcttacggttttacgttatcaataggatcaatggcaatgagatctaaggacttgataggtctaccccttctccacaaaagcaattacaatcaaaggtttcattcagagaagttgagtccatacagtaacggagattagagctaatctttaatatgagcccattagattatatactactgtactcagctccagccactggacatctggaaggattctggcaaactggaacatgtccttaagagcaatgtggtaaaaagtgcagattactagagagagcaatgtggtaaagacttcaaatatgcagcaatggcctaaacaccgcagaatttctgaatgaaaaacaactttttttaatatanctaggggcaggagtgctgttttcaaytgctaatttcaaatgaaagaaagcttgtttttctttttttttcctgcaatgctagagggcagatgttaaaagattctggctcaatacaatagttaataattcaaagtaattaaaatgacccaggttcttcaatcgtagaagaggtaagaaaaaaaaagagggcaagtttaatttttctcaagaggtgcttgaaccaaggttacacaacaaacctgggatag

SEQ ID NO: 482825 - DNA, 355 bp, Homo sapiens
ctgttcctcagccccgggaactggggtggggacaggacagagcagcagcagagagcacagaaaggtgtgagggggcacacagtccccagtgagcatctgcatcaggacaccagggctgtcccagggctgtcccagggatggctgggcctgtgggaaagccatggtccccacccatcccacccgaccctgagccacctccaccagccaagaggggccagggcccttcatcaacctcacccaggtcatctggggaactgggccaccactgagaacaaagcccagacatgtctgggagtggaggctgtgcccacctcccccagagacttgcccccracttaacccagggcccagcagg

SEQ ID NO: 482826 - DNA, 385 bp, Homo sapiens
acaggctgtgatgggtcacactccacccctygctcccccagccctagcacaaagcccacctgatgggccttgctgagacgcccagctctcccacctgggatggtggctccaggcccagggtcaggcctggcccccttccccaaggacccaggaaccagagagcaggcccctccatggccagtacagctcggcaaggtgtgcaggctttggggactgtgtttataggaacgtgaaggaatgaaaggccagcgaatggtccgtggccgccctggaaactgtgtccccgaagacaaggaagagagctgtccctggctcggctcctgccctgagtgactgttgactcacagttctctctccaaggggacatgggcctgtcctaatgctg

SEQ ID NO: 482827 - DNA, 341 bp, Homo sapiens
acctgatgggccttgctgagacgcccagctctcccacctgggatggtggctccaggcccagggtcaggcctggcccccttccccaaggacccaggaaccagagagcaggcccctccatggccagtacagctcggcarggtgtgcaggctttggggactgtgtttataggaacgtgaaggaatgaaaggccagcgaatggtccgtggccgccctggaaactgtgtccccgaagacaaggaagagagctgtccctggctcggctcctgccctgagtgactgttgactcacagttctctctccaaggggacatgggcctgtcctaatgctgccttaggggcttg

SEQ ID NO: 482828 - DNA, 341 bp, Homo sapiens
acctgatgggccttgctgagacgcccagctctcccacctgggatggtggctccaggcccagggtcaggcctggcccccttccccaaggacccaggaaccagagagcaggcccctccatggccagtacagctcggcaaggtgtgcaggctttggggactgtgtttataggaacgtgaaggaatgaaaggccagcgaatggtccgtggccgcyctggaaactgtgtccccgaagacaaggaagagagctgtccctggctcggctcctgccctgagtgactgttgactcacagttctctctccaaggggacatgggcctgtcctaatgctgccttaggggcttg

SEQ ID NO: 482829 - DNA, 560 bp, Homo sapiens
atctccagaacattctcatcctgcaaccttgaagctctgtccctattaaactccaactctaaccctaaccccaaccctaacccattgcctcctccctcagcctcagrcaacctccattccacttctgtctctatgtatttgactcccctcgggacctcagagaagtgtgttcgtgcgtatttgttcttttgcactggtatatttcactgagcataatgtcctaaggttcatccatgttgtagcaggtgtcagggtcgcctttgttttcaaggctgcgtgatactccattgtatgtgtgcaccctgtttggtttctccatttctcttttgctggacacttgggtagcttccagctcttggctgctgtggataatgctgctgggaacatgggtgtgcagttatctgttcgagtccctagttcgcattcctttggctacacactcagagtgggatgtctggactgaagcaatacttttgaactcagcctgaggttaccaaactctctgaactccttatcagaggctacacttctgggtgttccccggggcccatggaaaacag

SEQ ID NO: 482830 - DNA, 519 bp, Homo sapiens
aaaattttaccaacaccgcgattacccaaacttcattccatgctgtagtatataattacttaatattttcaatcaatttattttaaaattaaatgaatatattttataaagaaactttatattattattgtaagttgatactagtattactcaaaaagagtgacatataaaaataaagacaatataaattctagccagatgactttgcccattggcatctctcttcattataaagggagtcttgaacatgtagagacatgtgaaaatattactaaactgaaactttgtgtttgacatgatgtgagggactaaaaaagaaatagaaaataatgtattgctataataaccaacactatttaatrccaagtctacatgactgctaaaataatgacaattactacctattttactgctgttgtacacctctcacattttgggagtcaccaactcttgattctggacatgactagctctctgagtccaaaatatacggaaaaacattctttctttcggtgattg

SEQ ID NO: 482831 - DNA, 519 bp, Homo sapiens
aaaattttaccaacaccgcgattacccaaacttcattccatgctgtagtatataattacttaatattttcaatcaatttattttaaaattaaatgaatatattttataaagaaactttatattattattgtaagttgatactagtattactcaaaaagagtgacatataaaaataaagacaatataaattctagccagatgactttgcccattggcatctctcttcattataaagggagtcttgaacatgtagagacatgtgaaaatattactaaactgaaactttgtgtttgacatgatgtgagggactaaaaaagaaatagaaaataatgtattgctataataaccaacactatttaataycaagtctacatgactgctaaaataatgacaattactacctattttactgctgttgtacacctctcacattttgggagtcaccaactcttgattctggacatgactagctctctgagtccaaaatatacggaaaaacattctttctttcggtgattg

SEQ ID NO: 482832 - DNA, 572 bp, Homo sapiens
ctgcatatttgagtacagtgcatagttgagtacagcagttactgccatatacttgaggaatctcatcctcttaaccrtcttgaccatatttggccctgagaaaaatagactttctagaaaattacttttagaacaacatttccttttgccgttttcatatcgttgcctgtcaaaagcacacaagttacagatttgatctgagaacaaaggatcccgtaaggttggctatacggtaaccaggaccatttggggatatcagctcaaaatcaaagttcaggaaatcctttatcaagctaatatctaataatttctgttaggtcatttagttttggaatttgctttaggaagctcaagtagaaaaatctagtatagtatatgaagttgatatcaatttggaatattaactgctttatcattttttcattttattagccattttactttaagatgtttgcaatggtatataaccatttctatatttttatttttctggcctcatgatcaagatcatccccaatgtaaaagttatttggtatttactaatctaaacactaatattactgctatcaaat

SEQ ID NO: 482833 - DNA, 572 bp, Homo sapiens
ctgcatatttgagtacagtgcatagttgagtacagcagttactgccatatacttgaggaatctcatcctcttaaccatcttgaccatatttggccctgagaaaaatagactttctagaaaattacttttagaacaacatttccttttgccgttttcatatcgttgcctgtcaaaagcacacaagttacagatttgatctgagaacaaaggatcccgtaaggttggctatacggtaaccaggaccatttggggatatcagctcaaaatcaaagttcaggaaatcctttatcaagctaatatctaataatttctgttaggtcatttagttttggaatttgctttaggaagytcaagtagaaaaatctagtatagtatatgaagttgatatcaatttggaatattaactgctttatcattttttcattttattagccattttactttaagatgtttgcaatggtatataaccatttctatatttttatttttctggcctcatgatcaagatcatccccaatgtaaaagttatttggtatttactaatctaaacactaatattactgctatcaaat

SEQ ID NO: 482834 - DNA, 643 bp, Homo sapiens
tgtaattcacaatagtgacatttgcaagtgtctcagtggccaagctgagaatttgcagtggtggtagcatagctttgctgggctgtttctcaagtcaggagtgcattcatgcacacagtgggttggctgacttggtgtgtggcttgctggggttgggcccatgacactgttactctggccaagtacacaaacacatagttgcttggataccctggacstgcctgccaggagtggccaacagggctgtttctcaggcccagggaatgtgtacgagctgctcggccagtctaggggcatgtttgccagaggtagcctatgaggctatttctcaggtccaggatgcagatacaatgctgctcctctggcctggtggcatgcctaaagagtagcctatggggctgcttctaagccctgagaagcaggtggaggttgcttggctggcctggaggtgagtctgctggggatggtccatggggcatttcccaggcccagtatatgggcacaaggctgcttgtttggcctgagcactggcctgagccagtgctgagccattattcttcttctgattgttttaaattaaaggcccttgaggttcagaaggaactggaagagattgtagtctgatattcccttatctatctta

SEQ ID NO: 482835 - DNA, 610 bp, Homo sapiens
ccgtgactctgcaattcctctcctgggtaaataccaaggagaaatgacttcaggtgtttatggtgatgttcacagcagctttctaaaactggaaagccatccacgtgttcatgcacaggagcacagacaacccgactataggctatccctaccaaagaacactgatacccgtgaacagctggctaaatctcacagactgttgagctaaagcagccagacacgtaacagtacctaatttatgattccattccatccaggaacaagctaaaccactctcatgtgacagagagcaaaacagtggtaacctttgggagggtatgacaggaatcttctgggatgatggaaatgttctatccgggcgagagttacaagtgtacaaacatacgcccctgggggagggaagacaagcaagcgctccccattyttttcacctctcctccaaactcttcgtggccctgcctgccctcagcaccaagttaaactccttggcctggtgaccatgtccctgcaggagctggtgcagctactactgcagctgactgttcacttctgtgtaacaatggttccccaatttgagtgtgcatccaaattacctgccaggcttaggaaa

SEQ ID NO: 482836 - DNA, 610 bp, Homo sapiens
ccgtgactctgcaattcctctcctgggtaaataccaaggagaaatgacttcaggtgtttatggtgatgttcacagcagctttctaaaactggaaagccatccacgtgttcatgcacaggagcacagacaacccgactataggctatccctaccaaagaacactgatacccgtgaacagctggctaaatctcacagactgttgagctaaagcagccagacacgtaacagtacctaatttatgattccattccatccaggaacaagctaaaccactctcatgtgacagagagcaaaacagtggtaacctttgggagggtatgacaggaatcttctgggatgatggaaatgttctatccgggcgagagttacaagtgtacaaacatacgcccctgggggagggaagacaagcaagcgctccccatttttttcacctctcctccaaactcttcgtggcccygcctgccctcagcaccaagttaaactccttggcctggtgaccatgtccctgcaggagctggtgcagctactactgcagctgactgttcacttctgtgtaacaatggttccccaatttgagtgtgcatccaaattacctgccaggcttaggaaa

SEQ ID NO: 482837 - DNA, 577 bp, Homo sapiens
gtctgaaaaagcaacaaaatactgcattgtcagactattcacgtatcctgtatgtttctgttacctcccctctaactaagagagagcagtgtgcctcgttcacttattttcgacttcagatttgctcagctttgttcaagactgtgcttaatgtctggtacgtcaatgattaggctgttacagatcaattaagtaaatatctctgagggcggaatctgagcatctgtatttttttttttttcgagaaaggatctctctgtcacccaggctggagcatagkggtatgctcatagctcactgcagcctcaaactcctaagctcaagtgatcctcccacctcagcctcccaagtagctgggattacaggcatgagccaccatgtctggctaaaaaaaaatttttttttttgtagtgatggggtctcactatgtttcccaggctggtctcaaactcctggccttaaacaatcttcccgccttggtctcccaaattgttgggacttcaggtgtgagccaccataccgggcctaaatgtgccattcttaactgacctccaggcctttgcaaatgttgatcctg

SEQ ID NO: 482838 - DNA, 387 bp, Homo sapiens
aataaatgggtctggagctcagaacagaggagtgggtgtttccagcaggcagagataggggaaagggcataaagagagaagggaaggggacccaggactgagtcctgagaagctctgacgtttatggagcagtggaggatgggaggccaccaacacagacagagaagggacagagagatgggagggaagtgggagagagtataccacagaaacccgcggaggaaaggactcgagaagcaggaagtggtcgtgggtccagcaggtccaaggctgaaaatgtccactcatatggccaagaggactttgatgacaggcgtggcttcagtgaaatgaggagatggccrgctgaggcagggaggaagtgcaagctggggaggggtgtcgttg

SEQ ID NO: 482839 - DNA, 250 bp, Homo sapiens
atgaggagggattcagggccactagagtggctaaatcaatggatttatcaatagagagcaagggtcagcaaaatgatctctgcgggtcataccatctctgtcacaactactcaattttgtggttgtcctgggaaagcagctttagacaaygagtataaatgaataggcatggttgtgttccaaaaaaactttatttacaaaagcaggtgaccagctagatttggcccacaggccacagtttactgacccc

SEQ ID NO: 482840 - DNA, 565 bp, Homo sapiens
gaagaggatgaggagggattcagggccactagagtggctaaatcaatggatttatcaatagagagcaagggtcagcaaaatgatctctgcgggtcataccatctctgtcacaactactcaattttgtggttgtcctgggaaagcagctttagacaatgagtataaatgaataggcatggttgygttccaaaaaaactttatttacaaaagcaggtgaccagctagatttggcccacaggccacagtttactgacccctgatttaggtcattagagaacttaaaaaaggcattttttttttcctctgcagagtggttggggtagaagccagaatgcaaggagttaagaaatgagtgggtcatgacagccattaaggaggaagcccccaccatgacctgaatgagccctagccaacaagctagtaggagtgatttcttccttctctttaatcttttctattattacttttcttaattacaaaaatcatacatgctcattataacatgtgaaataatgttatgatctctctctcactcctcctccatccacagcaccctggggcaacc

SEQ ID NO: 482841 - DNA, 547 bp, Homo sapiens
ttcatacagaaagtttagaaagcagaaaaacacgaagggacaaaaaccatcatccttatctcctctcagatgagtttcttcaaaagtgcctgtcacttaattcagaaaactaaaaagcaaagacaccaaaatgtgtagctaggaaatactaattatgaagtaacggggctttgttcagagacctgacccttcccttacaatgtcactcagggcatcccatttgagggtaaagctcttggaaaaatccttctctcttcaagagatccagtccacagaaaaagttctctcacaacaagccaagactctgagcctcctgggtgagcccaagctctccaaacaactgacgggcacatgcatatacagaaagacaaacctagctctctgccggggtcccgcggctgccaaatcccttttccagggaggtgtgttattaccacctcttcccactgtttctgtcccaaatatcaartgagcttaaggcagccttgggaggtggaacctcccagctcaggagcacaggcccagccttcagcgacccctgatgtgc

SEQ ID NO: 482842 - DNA, 497 bp, Homo sapiens
ggattcatattatttcccatttaagagacaaggatggtttccagcttcaaccatgtccctgctaaggacatgaactcataaaccatcattctcagcaaactaacacaggaacagaaagccaaacaccgcatgttctcactcataagtgggagttgaacaatgagaacacatggacacagggaagggaacatcacacaccagggcctgtcgggggctggggggctagaggatggatagcattaggagaaatacctaatgaagatgaggggctgatgggtgcagcaaaccaccatggcacgtgtatacctatgtaacaaacctgcacattctgcacatgtattccagaacctaaagcataaaaaaaaaaaaaaagagataaggacacagagacatgaagaggttatttgccygatgtcccatggccagcaggtggtagagccaagatataaagctaggttgtgtccctaaacaccagacaatactgccctgacatcact

SEQ ID NO: 482843 - DNA, 588 bp, Homo sapiens
tgctttgcagaatggtttatacccaaagctatgagagacctaataaaaaagcaatgtttttatagcacttcaaaagctgattttactttccctatgttctgatgcatccctggaggccagtcccccatcccrctttctccatgggcctccctgcgtacatacgtctaatgggagctgctcccatccaaggaaacagtcccagcctgaagcccccaccagggaaagagagggtggacttccagcctgtggaagacaaagtgtgctgacccccttaccctctttaaggctctagaagcagtagcgtgagcagggcagggagcgaaggggcatcagggatcccctttttacaggtgaggaaactgaggcccacagacgtgctatgactgaatatttgcatcctcccaaaatgtatatgttgaagccttaattcccaatgtgatggtattaggaggtggggtctttgggcgggggcgattaggtttaggtgaggttacagggtggagccccaaaatggaatcagtgcccttatgaggagatgaagccaccagagctccctttctctttcttgtgaggatatagcaggaaggc

SEQ ID NO: 482844 - DNA, 492 bp, Homo sapiens
ttctggtttctcttgacttgttccttttcctcatttcctrtagttaatttatctcaatgacctgtgttctgtctctgaagtcagtgagttctaaacctgttggcacatgagaaaacataggaggacagctattaaaatgcttattcctgatactcaaacctgaaaatttagtggggattggctctatattttgtttaaagctccccaaataattctgatggatagtcagttttcataaacattgcctttaaatatttatctaatttctcttattctctccatctgtgttggaattacatgaaattcctatctcctacctaaagtattccaatagtttcctaattttttttctctcttactccattaatctcctttggatttcagttgattctctacagtgattatgtcattctctttttaaaacttttaatagaattgtggttcattttgtaggatggtagtatctggaggatcagaggaggacttgtggga

SEQ ID NO: 482845 - DNA, 677 bp, Homo sapiens
cttacctctgcctatttcttttcacatccttgaggaatgtggataggtttgccccttcatatttctgyattaaataggcccagtgtctgtgacctttatttagacagacaattttccaaccatttaatcattttcattgctcttctttggacttgtttcaaactctctttcattgggtgggccccaagtggtcacagcgttgcagtacagtgctgactaaatgggaagttacttcactggaaacacatagcgtgagctggatctctttttttccacatggctacacctcattttatgcaacctcactatgtgaaaatccagatatagcttaaactttacaagaagattcaccataggtgaacctctagaaaaattgtctaatatatttaaaatattatttgttttctaatatctatgtatgtataacttttcagaggacatctatcatgtcctctgaaattatattacataatgttcatccattcattcgcctactcattcttttatttattcaagaacgttggtcaaattcccagtatactctggtaggccctggagatataaaactgaataccttaacttggttcccttggctgcttaccttgaggagcgtgtagcccagagagacagtgtctaagtattttgatatcaatcagatctgtgttaaaattgtggct

SEQ ID NO: 482846 - DNA, 677 bp, Homo sapiens
cttacctctgcctatttcttttcacatccttgaggaatgtggataggtttgccccttcatatttctgcattaaataggcccagtgtctgtgacctttatttagacagacaattttccaaccatttaatyattttcattgctcttctttggacttgtttcaaactctctttcattgggtgggccccaagtggtcacagcgttgcagtacagtgctgactaaatgggaagttacttcactggaaacacatagcgtgagctggatctctttttttccacatggctacacctcattttatgcaacctcactatgtgaaaatccagatatagcttaaactttacaagaagattcaccataggtgaacctctagaaaaattgtctaatatatttaaaatattatttgttttctaatatctatgtatgtataacttttcagaggacatctatcatgtcctctgaaattatattacataatgttcatccattcattcgcctactcattcttttatttattcaagaacgttggtcaaattcccagtatactctggtaggccctggagatataaaactgaataccttaacttggttcccttggctgcttaccttgaggagcgtgtagcccagagagacagtgtctaagtattttgatatcaatcagatctgtgttaaaattgtggct

SEQ ID NO: 482847 - DNA, 677 bp, Homo sapiens
cttacctctgcctatttcttttcacatccttgaggaatgtggataggtttgccccttcatatttctgcattaaataggcccagtgtctgtgacctttatttagacagacaattttccaaccatttaatcattttcattgctcttctttggacttgtttcaaactctctttcattgggtgggccccaagtggtcacagcgttgcagtacagtgctgactaaatgggaagttacttcactggaaacacatagcgtgagctggatctctttttttccacatggctacacctcattttatgcaacctcactatgtgaaaatccagatatagcttaaactttacaagaagattcaccatargtgaacctctagaaaaattgtctaatatatttaaaatattatttgttttctaatatctatgtatgtataacttttcagaggacatctatcatgtcctctgaaattatattacataatgttcatccattcattcgcctactcattcttttatttattcaagaacgttggtcaaattcccagtatactctggtaggccctggagatataaaactgaataccttaacttggttcccttggctgcttaccttgaggagcgtgtagcccagagagacagtgtctaagtattttgatatcaatcagatctgtgttaaaattgtggct

SEQ ID NO: 482848 - DNA, 677 bp, Homo sapiens
cttacctctgcctatttcttttcacatccttgaggaatgtggataggtttgccccttcatatttctgcattaaataggcccagtgtctgtgacctttatttagacagacaattttccaaccatttaatcattttcattgctcttctttggacttgtttcaaactctctttcattgggtgggccccaagtggtcacagcgttgcagtacagtgctgactaaatgggaagttacttcactggaaacacatagcgtgagctggatctctttttttccacatggctacacctcattttatgcaacctcactatgtgaaaatccagatatagcttaaactttacaagaagattcaccataggtgaacctctagaaaaattgtctaatatatttaaaatattatttgttttctaatatctatgtatgtataacttttcagaggacatctatcatgtcctctgaaattatattacataatgttcatccattcattcgcctactcattmttttatttattcaagaacgttggtcaaattcccagtatactctggtaggccctggagatataaaactgaataccttaacttggttcccttggctgcttaccttgaggagcgtgtagcccagagagacagtgtctaagtattttgatatcaatcagatctgtgttaaaattgtggct

SEQ ID NO: 482849 - DNA, 445 bp, Homo sapiens
tatttggaggtgaagtcagaaataagaacaaagctaaatcagatatataaacaaacagtagaytcattttagatacatggcagtaacaggtacagcataaataatagtagacaggtctcaagggtgaatgagaaaatctgcatctacaggatagattctgagtcagcaattgaagccaggaactgaaaatacagtgtggtggttttgttttctatcgattctgctaagctggaactctacttcacagaatcttctttcctatgtggttctaggcttgaattggcaaaaaaaaaaaaaaagagaaactggtacaagatttagatggcagacatgacaacagccatttctctttgagagtcctagtggttaggcacagaagacagatgcagcagcagtcagcttgttcttcctcttccccattccacatccagctcttctgcctgtc

SEQ ID NO: 482850 - DNA, 611 bp, Homo sapiens
ctgctcctacaatcatgtaggccaaattcctatgtaaacctcttactccataacattcacagtgcttctgcttcctcagttgaatcctgactaatagttatagctactagaattggctccagggaacagaaccgtaaggatgggaatctgaccatcttactctgataaaattagatttaaaggcattagtgactctgtgcccagtggtttaggagacactagttgttcatggaatgctatggcaaaatagttattttaatcatcatctgtcatcacttatcatcaaattcttgtagaatataaggcttcgaacaaacaagaagttgctaccatacaattttatagtggaaataaataatacattaggttggtttgttgcttctgagtgcacttctgaacayggagaaagaaaatcattaaattttcaactccaggtctgggtgaagaattagaaagcttttaggtctatatcaacttggctgagttgtaactatgttttctaaaacgtaggcattgatgcagaagaaagtcactaaccaaccctcctcaagcactggtgcaggtggacaagttggaaacttcaagttcaatggctctaggaaagtccaggc

SEQ ID NO: 482851 - DNA, 483 bp, Homo sapiens
tgtgccctgtaagtatatatcaataggaaaattaatgagaagaattcaagaagttacatccctaggaatatacttttttcatttttaaaacttccaagagtaatttactcaatcaatataaaaatatgaagaataggaataaatgcaaatcaatgaggaaatgagaaaaattgggttgctttcaaaattggtattggatttcataaaaacaaattagctgaattactgcattttccacattttatagagtcacagaattttagagtgggaagaagctctaaggctctctattttgcagcaraatacacatagtctctatgtagtctgttctattgcttcatgtgctttgacttctttgactttggtcattaaatttgttttgaggatttagcatatgaaaaacaaagtcacaggaggaatgatcagcactgaattttggacaatagttaaccctgggttaggtgtaaaatggaaagaaatgca

SEQ ID NO: 482852 - DNA, 414 bp, Homo sapiens
tgtgttattttctctctgagccccaaaagccatttatgtatttcttgctaaccatttttgtgatggccaaattggacattgttgactttgtcatatcaatcagtgacttgaggcaacaactgtaagccaggtaggctctcttgcttctggaatgttcaaaatgtggataatgctaatattttccttgtgacttgttgcaaactgttatgcrtagctattagagtccttggtctcttctttggggagggtcaggagaggggtacagtggcaggtggcaaattagatgaccaatccttgttatgtttccttagcaataataaacttttgcatttgctccttcatggagatttctttatttattcattcattcaaagaggaacagattctctcaacatcccttctggcccttaaatt

SEQ ID NO: 482853 - DNA, 664 bp, Homo sapiens
ccatgttggccaggctggtctggagctcctaacctcaggtgatccrcctgcctcagcctcccaaagtgctgggattacaggtgtgagctaccaggccctgccaacatagaccattcttaacttattctgtgctctctccccaaaataccttcctctgcctttttttggttagtactttctcaccttctaggaccactcagaggtcctctcctgctcagagcccttcctcaaacctcctatgtctgtctctgacatggtataaaactgctacccagctgggttctcccactagacttgaggccctgaagagctgggagcaagtttagttcatcttcatgcctcaatgcccagcagaaggtaagcaccagtgaagagggctttaaccaaacccaactcttcagagtgaatttgggaatgaagcaagttgcctcttgattgagatgaatgacctcagtgttgtaaaaccacccttaggccaggcaggtgtgtacgctaagctctgcaggacccacctggcctgcctcgggctgtgcccctaccccacgccttgaggaatgtgcatccccacctgactgtccccacttggagctcacacttccctttctaggtctctctctgggtgcctggggcttgcttgtcttctgcaggtctgtccttctcccaa

SEQ ID NO: 482854 - DNA, 291 bp, Homo sapiens
ttatttagcacctactatatgccaagcatcatcctaagctttgaagatgtattagtgaatgacataaacaggtctgatctcacagggtttacaatccagcccagagaagwagaaaatgataataagtaaataaatatatcaggtaatgttaaatgctttgcagagaattaaaacaagcttctatggactgagtcatccaggaaagctttctttaaaaaagtgtcacaagagctcacatctgaatgaaaagaacatgcactgaaccagccatacaaggctcaagggaaaacg

SEQ ID NO: 482855 - DNA, 602 bp, Homo sapiens
ctgcccccgctgcccccacccccattgtgtttgctttccctggcttggggttctttggctgtgctgttacctgctcttaaaatctccccactaccttctctgggccaattcttggtcatcctccagactcagctccagtgtcccctcccaaggaggcctctctgactctcccactcagctccaacctgtccagaggatccttccctgatgtttgtcccggcactgagcagcctgtgccatgtgcctttacttctctggataccccataagatggtgtgaagatggggccacgcttttatctgtcatcttaaccttaacatcgcatctgatatctgggactcagggaatgcttggtgagttttgatgaaggaaggagtgatgcgcacagcttattccattcaaggaaatgatggggggaaggaaccaacatttgtcttatgtctwctcaggcattgtacaaagtgtagtatcctaagtgctttgaatatgctattgcaataagtctcagataacacagggaggcaaaggttattattactcttttgcagatgaggaaacaggcttagagaggaaaatagttccctggaatgtacccaatttgc

SEQ ID NO: 482856 - DNA, 663 bp, Homo sapiens
tttattattttccacagttacccgttttttcacagtaggagaagagaaggattaccccgctgagaactccatttcaaataccacaatcattgttgtgtgcttacagcgggtcaactgcacgcagtggaaggatgaggaatgcagtgacaaaatcaataatgctgagttgctccttgttgaacagtgaaaaaattttatckttttgttaataggatagtgtttgtttttaccccaaatcaattaaatacaactggaatgtgtattttatgttttccttagaaaccaaattaatccactggtaattgtttcactctctagcgaatgggcatagaccagcacttttattctatttgtctacttagttttttaatcagcaagacgggtttaatggcttcctaattaaaagtaacattttcttaactttcactttatttctcctgtttcttctccttttattggattatcagatgcattccaataaataacatttctcttatgctctttacaatatgaaataataacacatcaggaaatttggtgatgtctactctgtgcatggccttttgaaggagtaagcattttgatacagaataccttatattgtctatctctaattatttgtaaggtcatctaatatgagatttgattttttacaattaagca

SEQ ID NO: 482857 - DNA, 663 bp, Homo sapiens
tttattattttccacagttacccgttttttcacagtaggagaagagaaggattaccccgctgagaactccatttcaaataccacaatcattgttgtgtgcttacagcgggtcaactgcacgcagtggaaggatgaggaatgcagtgacaaaatcaataatgctgagttgctccttgttgaacagtgaaaaaattttatcgttttgttaataggatagtgtttgtttttaccccaaatcaattaaatacaactggaatgtgtattttatgttttccttagaaaccaaattaatccactggtaattgtttcactctctagcgaatgggcatagaccagcacttttattctatttgtctacttagttttttaatcagcaagacgggtttaatggcttcctaattaaaagtaacattttcttaactttcactttatttctcctgtttcttctccttttatkggattatcagatgcattccaataaataacatttctcttatgctctttacaatatgaaataataacacatcaggaaatttggtgatgtctactctgtgcatggccttttgaaggagtaagcattttgatacagaataccttatattgtctatctctaattatttgtaaggtcatctaatatgagatttgattttttacaattaagca

SEQ ID NO: 482858 - DNA, 488 bp, Homo sapiens
ctgatgaaagctgcctcacacacagccacgctcttttctggggacagcctggatctggtgactcttccatacaggaatgtaaaaacatacccgcttctgacagctgaataacctcgagggcycatcccagcctcagtgctctccaggagatcacccgagctctttgtaactgctttgtagctcaacttttctttgccaatcctacttcctaataaacttttttcatgttactctccatctctgtctgcttcccagggaacccaatttgaagcagttactgagtccaagtcagagctctcatttctaagttctcggagcaatgacttgattcatcttggccagatagcttctaatccatttttaccctttaactccttctagtcctgcttgaaatttaattatttcttaaacatttgtgttcaaattttctagtcatatctacatacacaaaaaataattttagatcactttttttaaactggatagct

SEQ ID NO: 482859 - DNA, 639 bp, Homo sapiens
tggttacccaacacaatccctgggacatagtaagaacataacgagtacttgttgaaaaaaattcaaatgggatgtggaatgcttagaaagagatgtggtaatgacctctaaaactgaagactatataaatgaccaattttagttataaaatttagtttataaaaatatttctcaatcaaataagttaactggcatcactgcctatgaaacagactctctacgcactgacatcctggaagcctctaaagttaaggacaagactctaatctgcagtaacattkctgagggacaagctgaacctttgagagaaagaatctaattatcggagagcacacttttcagaatattacacttcataagctatgtcatctttcagaaactctaagcatatattctgacctgtctttggttttcttcaaaccttttccaaagaagactctaaaggtattttaaagttagagaaatcctaaaatatcatcataatagaatttacagaataaatcaatacatgcagatatatcctattggaagtatttctagagttctaactcagggtgttaagtatgcatctctcttccttattggactaaatggggacttcccttcctactttcccccatctgtacctctttaccaaag

SEQ ID NO: 482860 - DNA, 639 bp, Homo sapiens
tggttacccaacacaatccctgggacatagtaagaacataacgagtacttgttgaaaaaaattcaaatgggatgtggaatgcttagaaagagatgtggtaatgacctctaaaactgaagactatataaatgaccaattttagttataaaatttagtttataaaaatatttctcaatcaaataagttaactggcatcactgcctatgaaacagactctctacgcactgacatcctggaagcctctaaagttaaggacaagactctaatctgcagtaacatttctgagggacaagctgaacctttgagagaaagaatctaattatcggagagcacacttttcagaatattacacttcataagctatgtcatctttcagaaactctaagcatatattctgacctgtctttggttttcttcaaaccttttccaaagaagactctaaaggtattttaaagttagagaaatcctaaaatatcatcataatagaatttacagaataaatcaatacatgcagatatatcctattggaagtatttytagagttctaactcagggtgttaagtatgcatctctcttccttattggactaaatggggacttcccttcctactttcccccatctgtacctctttaccaaag

SEQ ID NO: 482861 - DNA, 542 bp, Homo sapiens
acagtgagatgtaacattaagaatgcctagattggacaaacagtttttgttatacctctgtgaataattgtatttcttctaaataagtctctagttaaagggcttaacaaaatttgttactcccttagtacatgttcccaattttattwtttaaacctgacttttcatgtacttcttttaaatgccatcagtgatactgaattcttctggctcttgtccatgtcaagttggttttcaaaagtggcttagaaaaaccactggagagccacttcagtgtttattctagatctatgctattttaccctttcttagaacacatgtaaaataatacttaggaaataaagacatggaattatgtaaggctagggaaatttttgatttgatgtttaaaggtgaagagcaataattaatcgaaaggcagtataatagaaaacaaaaacaaggatgggtatcctgtaaattcgatgggagaagcttttgttttacttgtctatttcttttggccatagcatagactcagctatggaaagaacaggaaaaga

SEQ ID NO: 482862 - DNA, 542 bp, Homo sapiens
acagtgagatgtaacattaagaatgcctagattggacaaacagtttttgttatacctctgtgaataattgtatttcttctaaataagtctctagttaaagggcttaacaaaatttgttactcccttagtacatgttcccaattttattttttaaacctgacttttcwtgtacttcttttaaatgccatcagtgatactgaattcttctggctcttgtccatgtcaagttggttttcaaaagtggcttagaaaaaccactggagagccacttcagtgtttattctagatctatgctattttaccctttcttagaacacatgtaaaataatacttaggaaataaagacatggaattatgtaaggctagggaaatttttgatttgatgtttaaaggtgaagagcaataattaatcgaaaggcagtataatagaaaacaaaaacaaggatgggtatcctgtaaattcgatgggagaagcttttgttttacttgtctatttcttttggccatagcatagactcagctatggaaagaacaggaaaaga

SEQ ID NO: 482863 - DNA, 667 bp, Homo sapiens
agctatagacactgacaggtatttatctggaaaggcttgctgtcaggggttcacagtgctgcttgtgggttatctccagaccctttacatttggcactttaggacagcgtgagtcacaggttgcactagaakttgcctttgaaattagacctaaactatgtggaactggaacccttgtacacaaagctctctatcatccaaatcctgctgaactctcttaggaaagaacagttttacagattcattctttccacacacaagatttccccactgcccagttactctcacctttttattttcttgactgttatgttttacttgactctggaatcttaccttgtactctcacatttacatggaagtatagcttatttcaccaattatactatcaaaagcagaagtagttacttacacctgaaaatttgtactgagaatgtagctgtgaatatgtttaagaaagtatacttaaagcagaaatccaaggaagtatatttaaatcaaagcaagaaatcccatttccaaatggcaataaagcatgtgttacatagaatcagtgcatgaaagtgttttagtagcccagattagattgtaccctggcgaataagcaagagttctttttcattttcatcttgcaattcaactgggtatttgggttctttttctattc

SEQ ID NO: 482864 - DNA, 667 bp, Homo sapiens
agctatagacactgacaggtatttatctggaaaggcttgctgtcaggggttcacagtgctgcttgtgggttatctccagaccctttacatttggcactttaggacagcgtgagtcacaggttgcactagaagttgcctttgaaattagacctaaactatgtggaactggaacccttgtacacaaagctctctatcatccaaatcctgctgaactctcttaggaaagaacagttttacagattcattctttccacacacaagatttccccactgcccagttactctcacctttttattttcttgactgttatgttttacttgackctggaatcttaccttgtactctcacatttacatggaagtatagcttatttcaccaattatactatcaaaagcagaagtagttacttacacctgaaaatttgtactgagaatgtagctgtgaatatgtttaagaaagtatacttaaagcagaaatccaaggaagtatatttaaatcaaagcaagaaatcccatttccaaatggcaataaagcatgtgttacatagaatcagtgcatgaaagtgttttagtagcccagattagattgtaccctggcgaataagcaagagttctttttcattttcatcttgcaattcaactgggtatttgggttctttttctattc

SEQ ID NO: 482865 - DNA, 667 bp, Homo sapiens
agctatagacactgacaggtatttatctggaaaggcttgctgtcaggggttcacagtgctgcttgtgggttatctccagaccctttacatttggcactttaggacagcgtgagtcacaggttgcactagaagttgcctttgaaattagacctaaactatgtggaactggaacccttgtacacaaagctctctatcatccaaatcctgctgaactctcttaggaaagaacagttttacagattcattctttccacacacaagatttccccactgcccagttactctcacctttttattttcttgactgttatgttttacttgactctggaatcttaccttgtactctcacatttacatggaagtatagcttatttcaccaattatactatcaaaagcagaagtagttacttacacctgaaaatttgtactgagaatgtarctgtgaatatgtttaagaaagtatacttaaagcagaaatccaaggaagtatatttaaatcaaagcaagaaatcccatttccaaatggcaataaagcatgtgttacatagaatcagtgcatgaaagtgttttagtagcccagattagattgtaccctggcgaataagcaagagttctttttcattttcatcttgcaattcaactgggtatttgggttctttttctattc

SEQ ID NO: 482866 - DNA, 499 bp, Homo sapiens
aagagtggagtctcaacaagaaccattgtattctggacatgtgtgggccctggagtgtgcaaggctggatgccttgtctgcctgtgccttacagagtgacaccattgtggtgtggttgatcagaggtttgtttgcccacggatgaaagcaaaagtgagttggcttcccaagaacttttaccagtagcctgttttgctacaattctmgacccagactggggtcccaaggcatcatagcccacagcttcttagcaagtgcatgttcagttggatcccccagctcagcctgggtcatccccaccttttgcctcttgggccatagctcagctctgcacactgagccatcatcctatggtgagcaagaccccattcttgggcttcagtctctttccttgcagcaggcaatcaaggtggtggctggaaagggccaaggagccacatctcacagtgccctgctgcctgaacaaggaccagaggcctgtggaacacatggctctcag

SEQ ID NO: 482867 - DNA, 499 bp, Homo sapiens
aagagtggagtctcaacaagaaccattgtattctggacatgtgtgggccctggagtgtgcaaggctggatgccttgtctgcctgtgccttacagagtgacaccattgtggtgtggttgatcagaggtttgtttgcccacggatgaaagcaaaagtgagttggcttcccaagaacttttaccagtagcctgttttgctacaattctcgacccagactggggtcccaaggcatcatagcccacagcttcttagcaagtgcatgttcagttggatcccccagctcagcctgggtcatccccaccttytgcctcttgggccatagctcagctctgcacactgagccatcatcctatggtgagcaagaccccattcttgggcttcagtctctttccttgcagcaggcaatcaaggtggtggctggaaagggccaaggagccacatctcacagtgccctgctgcctgaacaaggaccagaggcctgtggaacacatggctctcag

SEQ ID NO: 482868 - DNA, 499 bp, Homo sapiens
aagagtggagtctcaacaagaaccattgtattctggacatgtgtgggccctggagtgtgcaaggctggatgccttgtctgcctgtgccttacagagtgacaccattgtggtgtggttgatcagaggtttgtttgcccacggatgaaagcaaaagtgagttggcttcccaagaacttttaccagtagcctgttttgctacaattctcgacccagactggggtcccaaggcatcatagcccacagcttcttagcaagtgcatgttcagttggatcccccagctcagcctgggtcatccccaccttttgcctcttgggccatagctcagctctgcacactgagccatcatcctatggtgagcaagaccccattcttgggcttcagtctctttccttgyagcaggcaatcaaggtggtggctggaaagggccaaggagccacatctcacagtgccctgctgcctgaacaaggaccagaggcctgtggaacacatggctctcag

SEQ ID NO: 482869 - DNA, 567 bp, Homo sapiens
agatcagaggacaggaaatgcagataaataattgtaataaccgcagtaagtgttctaatacaagtatgtacatttggctctagagtcatagagtaaggggcagtcaggcaatcagygaaggcttcccagggagatgggaactgagtcctgaagcataattcgtggtttaatggtagtaaaatgttaaacaaggcagagggtaaaataatgcatcatcatcatcataatactagctgttatttgttgaaaagcttataattctgaccacatctctgcaagatattttcattttataagtaagaaaataggttcaaaaggttgtgatttgatcatagtatttaatgaagtcagtatggtacattagggaggtgcaaatggttaagtatcactggacagtagcaaacaagcaacagaaaggataaagataaaactgaaaaaggggctcaagtatgctatattctagatattaaaaaataaaaataataaaactagtggtttcatgacagacaggggagactattttaacatatatgagacaaaggattaatacctagtaaaatatgccta

SEQ ID NO: 482870 - DNA, 567 bp, Homo sapiens
agatcagaggacaggaaatgcagataaataattgtaataaccgcagtaagtgttctaatacaagtatgtacatttggctctagagtcatagagtaaggggcagtcaggcaatcagcgaaggcttcccagggagatgggaactgagtcctgaagcataattcgtggtttaatggtagtaaaatgttaaacaaggcagagggtaaaataatgcatcatcatcatcataatactagctgttatttgttgaaaagcttataattctgaccacatctctgcaagatattttcattttataagtaagaaaataggttcaaaaggttgtgatttgatcatagtatttaatgaagtcagtatggtacattagggaggtgcaaatrgttaagtatcactggacagtagcaaacaagcaacagaaaggataaagataaaactgaaaaaggggctcaagtatgctatattctagatattaaaaaataaaaataataaaactagtggtttcatgacagacaggggagactattttaacatatatgagacaaaggattaatacctagtaaaatatgccta

SEQ ID NO: 482871 - DNA, 567 bp, Homo sapiens
agatcagaggacaggaaatgcagataaataattgtaataaccgcagtaagtgttctaatacaagtatgtacatttggctctagagtcatagagtaaggggcagtcaggcaatcagcgaaggcttcccagggagatgggaactgagtcctgaagcataattcgtggtttaatggtagtaaaatgttaaacaaggcagagggtaaaataatgcatcatcatcatcataatactagctgttatttgttgaaaagcttataattctgaccacatctctgcaagatattttcattttataagtaagaaaataggttcaaaaggttgtgatttgatcatagtatttaatgaagtcagtatggtacattagggaggtgcaaatggttaagtatcactggacagtagcaaacaagcaacagaaaggataaagataaaactgaaaaaggggctcaagtatgctatattctagatattaaaaaataaaaataataaaactagtggtttcatgacagacaggggagactattttaacatatrtgagacaaaggattaatacctagtaaaatatgccta

SEQ ID NO: 482872 - DNA, 524 bp, Homo sapiens
atttagagatgcatttcattctccccttcagtaagacccagaactaagagtttcgggtaactgcactcatctcaaaatggcatgcctagagcaaactgtcctgatcatacctcaggagtggacacccagaatgaacctgaggaaagggcaggcaagacaaaccaaaactgcggtgctgaataatgaatgcttttctaagtacagaagtacacaccactgctagaataagagtttgccagaaaaaagaacagattaaacttgyaattcaactatttctcttggaaaaattcaaaggtaaacaaataagcaaaaggtaaagaatgtattttcactatgtttacaaaattctctccccttcaggtcttagcaatcaccatttctgagaaaaatagagagctcatattgatctccattttccatcctgtgcatttgttcacaaccaagcaacgagtttagaaaaggtgacagtgcatcaatggcttcaagcaaagtgctgcttggttttaggaagaaatgagttttta

SEQ ID NO: 482873 - DNA, 524 bp, Homo sapiens
atttagagatgcatttcattctccccttcagtaagacccagaactaagagtttcgggtaactgcactcatctcaaaatggcatgcctagagcaaactgtcctgatcatacctcaggagtggacacccagaatgaacctgaggaaagggcaggcaagacaaaccaaaactgcggtgctgaataatgaatgcttttctaagtacagaagtacacaccactgctagaataagagtttgccagaaaaaagaacagattaaacttgtaattcaactatttctcttggaaaaattcaaaggtaaacaaataagcaaaaggtaaagaatgtattttcactatgtttacaaaattctctccccttcaggtcttagcaatcaccatttctgagaaaaatagagagctcatattgatctccattttccatccygtgcatttgttcacaaccaagcaacgagtttagaaaaggtgacagtgcatcaatggcttcaagcaaagtgctgcttggttttaggaagaaatgagttttta

SEQ ID NO: 482874 - DNA, 458 bp, Homo sapiens
taaaaatttgaagcacaacaaagatgccatgcatggtccatttttgtcttttataaaatttcccctctctataacaccttttaatctaatgtctttctaaacatcagggtatttctttaaaagtactggaaatgacaacactcttaatttagagatactacatatacagtcaggactgaagtaaatactttatctacttgaaatcacattttaactagaagaggcctcagttataatctrgtctgagcttgtcactattacagagaaaactgaggccaaggaggttacctgatcatcctacattgaggtcaattaaaaccaaatcagaacaagaacctaagtgtctggtctctatgccacagctcttcctacttccctatgtgaccaatgtttggaatcgatgaagaaacagactcttgacaaaaatcaggaactaagctgaaataaaggtaaaacca

SEQ ID NO: 482875 - DNA, 458 bp, Homo sapiens
taaaaatttgaagcacaacaaagatgccatgcatggtccatttttgtcttttataaaatttcccctctctataacaccttttaatctaatgtctttctaaacatcagggtatttctttaaaagtactggaaatgacaacactcttaatttagagatactacatatacagtcaggactgaagtaaatactttatctacttgaaatcacattttaactagaagaggcctcagttataatctagtctgagcttgtcactattacagagaaaactgaggccaaggaggttacctgatcatcctacattgaggtcaattaaaaccaaatcagaacaagaacctaagtgtctggyctctatgccacagctcttcctacttccctatgtgaccaatgtttggaatcgatgaagaaacagactcttgacaaaaatcaggaactaagctgaaataaaggtaaaacca

SEQ ID NO: 482876 - DNA, 232 bp, Homo sapiens
tatgtgtgtaaatagaaaaagtaacaaagaatatttgccctgattttgccagwaaattctaacactaagaattttctttacaccaaaactctaaaacccaacctatgtttacttctcttttaaaattaagataatgagtaaacacattcagaatgaacagaaggatatttgtaattcagagagttggaaattcaattagtcataagcatacagaaaattaaacaaaagacaa

SEQ ID NO: 482877 - DNA, 427 bp, Homo sapiens
cagccggacagggtatgtgtgtaaatagaaaaagtaacaaagaatatttgccctgattttgccagaaaattctaacactaagaattttctttacaccaaaactctaaaacccaacctatgtttacttctcttttaaaattaagataatgagtaaacacattcagaatgaasagaaggatatttgtaattcagagagttggaaattcaattagtcataagcatacagaaaattaaacaaaagacaattattaattctggagaaaaagagttgtttaagagaggaaaagcaatcacagcccatatatgaatagtgtttatactatccaactgaaaaaagactactgatgtaattgaaatgaatatgaaaactatagtgagaaaatgcagaggtagaaatgaggtttgcatttatggtagtggagaaagt

SEQ ID NO: 482878 - DNA, 580 bp, Homo sapiens
tcatagatgacattctactattttagaggtatgcactaaagatactggcttctctatacctgaaaatatataaaatatattaatgcatttgtttaaaatattcaaactcttcctgtttataatttatctttttttttttttaatagaaacagggtcttgctctgttgcccaggctggagtgctgtggcatgaccatagctcactgtaaccttgaactcctgggctcaaaaaatctcttcctgcctcagcctccygagcagctaggactatacaggcctttttgctttttaaaactatgtattctgaaataattatagatttacaggatgttacaaaaatactacagaggtacagtatacctctcacccagtttctctcaatggttacatttcacattactataacatactaaaaaccaggaatacctgtacaatgtgtatcattctatgccattttatcacacatacatttctgtaatcgccaccaaaatcaagatgcagaaccattccactgcaataaagatctcatgctacccatttatagtcacactcagcttccttcctctcgctattcctaacac

SEQ ID NO: 482879 - DNA, 580 bp, Homo sapiens
tcatagatgacattctactattttagaggtatgcactaaagatactggcttctctatacctgaaaatatataaaatatattaatgcatttgtttaaaatattcaaactcttcctgtttataatttatctttttttttttttaatagaaacagggtcttgctctgttgcccaggctggagtgctgtggcatgaccatagctcactgtaaccttgaactcctgggctcaaaaaatctcttcctgcctcagcctcccgagcagctaggactatacaggcctttttgctttttaaaactatgtattctgaaataattatagatttacaggatgttacaaaaatactacagaggtacagtatacctctcacccagtttctctcaatggttacatttcacattactataacatactaaaaaccaggaataccwgtacaatgtgtatcattctatgccattttatcacacatacatttctgtaatcgccaccaaaatcaagatgcagaaccattccactgcaataaagatctcatgctacccatttatagtcacactcagcttccttcctctcgctattcctaacac

SEQ ID NO: 482880 - DNA, 580 bp, Homo sapiens
tcatagatgacattctactattttagaggtatgcactaaagatactggcttctctatacctgaaaatatataaaatatattaatgcatttgtttaaaatattcaaactcttcctgtttataatttatctttttttttttttaatagaaacagggtcttgctctgttgcccaggctggagtgctgtggcatgaccatagctcactgtaaccttgaactcctgggctcaaaaaatctcttcctgcctcagcctcccgagcagctaggactatacaggcctttttgctttttaaaactatgtattctgaaataattatagatttacaggatgttacaaaaatactacagaggtacagtatacctctcacccagtttctctcaatggttacatttcacattactataacatactaaaaaccaggaatacctgtacaatgtgtatcattctatgccattttatcacacrtacatttctgtaatcgccaccaaaatcaagatgcagaaccattccactgcaataaagatctcatgctacccatttatagtcacactcagcttccttcctctcgctattcctaacac

SEQ ID NO: 482881 - DNA, 580 bp, Homo sapiens
tcatagatgacattctactattttagaggtatgcactaaagatactggcttctctatacctgaaaatatataaaatatattaatgcatttgtttaaaatattcaaactcttcctgtttataatttatctttttttttttttaatagaaacagggtcttgctctgttgcccaggctggagtgctgtggcatgaccatagctcactgtaaccttgaactcctgggctcaaaaaatctcttcctgcctcagcctcccgagcagctaggactatacaggcctttttgctttttaaaactatgtattctgaaataattatagatttacaggatgttacaaaaatactacagaggtacagtatacctctcacccagtttctctcaatggttacatttcacattactataacatactaaaaaccaggaatacctgtacaatgtgtatcattctatgccattttatcacacatacatttctgtaatcgccaccaaaatcaagatgcagaaccattccactrcaataaagatctcatgctacccatttatagtcacactcagcttccttcctctcgctattcctaacac

SEQ ID NO: 482882 - DNA, 627 bp, Homo sapiens
  misc_feature (1)...(627): n = A,T,C or G
cagctgaaaaattttgccatgttacctacatggaaacatacaagtcttttgaaattgacwttttttacatggcttaatgcccttaaaaggcattcaagttattgcaagtatcaatagttcactcctcctcattactaagtagaattccatggtatgaatataatattatataatattccatggtttgtttagcaatttcacctactgagaggcactttggttgttttcagttttgtactattataaataaagctatctttagtctcaacctatctatattgttgtctgaaatcacttcctataaacagcacagtgtgtcatttttaaaattcactctgcacatctgtcttttccaccgtattcaccacgggggtgaaggacgcgtactnnnnnnnnnnnnnnnnnnnnnnnnnnnnnnnnnnnnnnnnnnnnnnnnnnnnnnnnnnnnnnnnnnnnnnnnnnnnnnnnnnnnnnnnnnnnnnnnnnnnagtcgcggtccttccgcccgtggtgaagacatctctttgaatagattttttttaaagtagctgctgaaggactgcattacatataacttaccaacatttactggtgtcaacatttcaccagttccagtaaagtgtagac

SEQ ID NO: 482883 - DNA, 627 bp, Homo sapiens
  misc_feature (1)...(627): n = A,T,C or G
cagctgaaaaattttgccatgttacctacatggaaacatacaagtcttttgaaattgacattttttacatggcttaatgcccttaaaaggcattcaagttattgcaagtatcaatagttcactcctcctcattactaagtagaattccatggtatgaatataatattatataatattccatggtttgtttagcaatttcacctactgagaggcactttggttgttttcagttttgtactattataaataaagctatctttagtctcaacctatctatattgttgtctgaaatcacttcctrtaaacagcacagtgtgtcatttttaaaattcactctgcacatctgtcttttccaccgtattcaccacgggggtgaaggacgcgtactnnnnnnnnnnnnnnnnnnnnnnnnnnnnnnnnnnnnnnnnnnnnnnnnnnnnnnnnnnnnnnnnnnnnnnnnnnnnnnnnnnnnnnnnnnnnnnnnnnnnagtcgcggtccttccgcccgtggtgaagacatctctttgaatagattttttttaaagtagctgctgaaggactgcattacatataacttaccaacatttactggtgtcaacatttcaccagttccagtaaagtgtagac

SEQ ID NO: 482884 - DNA, 559 bp, Homo sapiens
  misc_feature (1)...(559): n = A,T,C or G
nnnnaatagattggtattgccactcttatctcagaagctgaatgaccatggtcaagtttcttgacacctctaagcttcagttttatcacctatgaaataatataataacggccattaccttacagggtagttatagatattaaacaagaagatacatgcttaataaatgtaagctattatcaatgggtagcctttcctacaagtggatgtaaaccagaacacctcaaaagttyctttgtgctaagtaggtaaggtcaacctggtcaagtgaaatggctttttttcagttctgggtcataggattgtcttaaaatatgtctttgaatcattttaaggtcatttttctcatatccttcttttactcttgcattacaatgtgcttggcatcttcccccttgaatgtattgctattggacattgttaaatttttagaatgaaatcaattatcaggattttgatatttaagggaaaattacatgcttctctgatatggaattacctcatagcttattgaatttcagttttgtgccctgtactgaatgaaatattaaaatgcaga

SEQ ID NO: 482885 - DNA, 559 bp, Homo sapiens
  misc_feature (1)...(559): n = A,T,C or G
nnnnaatagattggtattgccactcttatctcagaagctgaatgaccatggtcaagtttcttgacacctctaagcttcagttttatcacctatgaaataatataataacggccattaccttacagggtagttatagatattaaacaagaagatacatgcttaataaatgtaagctattatcaatgggtagcctttcctacaagtggatgtaaaccagaacacctcaaaagttcctttgtgctaagtaggtaaggtcaacctggtcaagtgaaatggctttttttcagttctgggtcataggattgtcttaaaatatgtctttgaatcattttaaggtcatttttctcatatccttcttttactcttgcattacartgtgcttggcatcttcccccttgaatgtattgctattggacattgttaaatttttagaatgaaatcaattatcaggattttgatatttaagggaaaattacatgcttctctgatatggaattacctcatagcttattgaatttcagttttgtgccctgtactgaatgaaatattaaaatgcaga

SEQ ID NO: 482886 - DNA, 559 bp, Homo sapiens
  misc_feature (1)...(559): n = A,T,C or G
nnnnaatagattggtattgccactcttatctcagaagctgaatgaccatggtcaagtttcttgacacctctaagcttcagttttatcacctatgaaataatataataacggccattaccttacagggtagttatagatattaaacaagaagatacatgcttaataaatgtaagctattatcaatgggtagcctttcctacaagtggatgtaaaccagaacacctcaaaagttcctttgtgctaagtaggtaaggtcaacctggtcaagtgaaatggctttttttcagttctgggtcataggattgtcttaaaatatgtctttgaatcattttaaggtcatttttctcatatccttcttttactcttgcattacaatgtrcttggcatcttcccccttgaatgtattgctattggacattgttaaatttttagaatgaaatcaattatcaggattttgatatttaagggaaaattacatgcttctctgatatggaattacctcatagcttattgaatttcagttttgtgccctgtactgaatgaaatattaaaatgcaga

SEQ ID NO: 482887 - DNA, 626 bp, Homo sapiens
  misc_feature (1)...(626): n = A,T,C or G
naatagattggtattgccactcttatctcagaagctgaatgaccatggtcaagtttcttgacacctctaagcttcagttttatcacctatgaaataatataataacggccattaccttacagggtagttatagatattaaacaagaagatacatgcttaataaatgtaagctattatcaatgggtagcctttcctacaagtggatgtaaaccagaacacctcaaaagttcctttgtgctaagtaggtaaggtcaacctggtcaagtgaaatggctttttttcagttctgggtcataggattgtcttaaaatatgtctttgaatcattttaaggtcatttttctcatatccttcttttactcttgcattacaatgtgcttggcatcttcccccttgaatgtaytgctattggacattgttaaatttttagaatgaaatcaattatcaggattttgatatttaagggaaaattacatgcttctctgatatggaattacctcatagcttattgaatttcagttttgtgccctgtactgaatgaaatattaaaatgcagaatcatttggacctatgagacacaaaatcaaattagaatttgtaatgacttgttaaaaagatgactacgta

SEQ ID NO: 482888 - DNA, 647 bp, Homo sapiens
ctgctaattatacactgttgttatttggaggccggtaacagatttctctgttccatctgggtaatccggctttttgagaatggacttttcctcaccctaacatgagtagaattttggctgccacattttgaaggcagtgatgaaataaagtcacaatgagtaggcagacagcagttttcaaggaagaagatgagatttacctagtgatgttcacaaaatattttattttatctttgatatcatagcacagtaaatgccatctaagtcatttaatgccaggagaaatataggagtgcctatatacatttgcagaatgaataatagatatgtacattctaagamtattttatttagagaaagtattgagcaaatcagccacaaactccatcctatttattcagcagttacaggagctgcattggggcataggatccagcatttctattccaatggagtaggggagagcagggtagctgtgtgtcacagccttgaagccagactgcaggggctcaaagccagctattgccatgcaccagttgttagaataggaaagtttcctcagatttctaaaattgggtttctctctatgtaaaagggggtgaatataacatctaaatgtcaggattgtgagaacggcataagatcaa

SEQ ID NO: 482889 - DNA, 647 bp, Homo sapiens
ctgctaattatacactgttgttatttggaggccggtaacagatttctctgttccatctgggtaatccggctttttgagaatggacttttcctcaccctaacatgagtagaattttggctgccacattttgaaggcagtgatgaaataaagtcacaatgagtaggcagacagcagttttcaaggaagaagatgagatttacctagtgatgttcacaaaatattttattttatctttgatatcatagcacagtaaatgccatctaagtcatttaatgccaggagaaatataggagtgcctatatacatttgcagaatgaataatagatatgtacattctaagaatattttatttagagaaagtattgagcaaatcagccacaamctccatcctatttattcagcagttacaggagctgcattggggcataggatccagcatttctattccaatggagtaggggagagcagggtagctgtgtgtcacagccttgaagccagactgcaggggctcaaagccagctattgccatgcaccagttgttagaataggaaagtttcctcagatttctaaaattgggtttctctctatgtaaaagggggtgaatataacatctaaatgtcaggattgtgagaacggcataagatcaa

SEQ ID NO: 482890 - DNA, 647 bp, Homo sapiens
ctgctaattatacactgttgttatttggaggccggtaacagatttctctgttccatctgggtaatccggctttttgagaatggacttttcctcaccctaacatgagtagaattttggctgccacattttgaaggcagtgatgaaataaagtcacaatgagtaggcagacagcagttttcaaggaagaagatgagatttacctagtgatgttcacaaaatattttattttatctttgatatcatagcacagtaaatgccatctaagtcatttaatgccaggagaaatataggagtgcctatatacatttgcagaatgaataatagatatgtacattctaagaatattttatttagagaaagtattgagcaaatcagccacaaactccatcctatttattcagcagttacaggagctgcattggggcataggatccagcatttctattccaatggagtaggggagagcagggtagctgtgtgtcacagccttgaagccagactgcaggggctcaaagccagctattgcyatgcaccagttgttagaataggaaagtttcctcagatttctaaaattgggtttctctctatgtaaaagggggtgaatataacatctaaatgtcaggattgtgagaacggcataagatcaa

SEQ ID NO: 482891 - DNA, 309 bp, Homo sapiens
ctcgaattggctcttagcggggttttccaatttcaatatgtggttttaggaggaaaaagctgtcctatcagcccatcttagcaatctgagtaatagaggggaaaattgcagtgaaagatatgtagctttgagtacacacattctttttgctccscaggtttgacacattatggaataaccttttagagaaattacaaagctttcatcttgccccttcctacttatatgtggatagctggggagagaagaaaattatgtgcagttacaaagcattgactttttagtttgcagggttttttcccctttgat

SEQ ID NO: 482892 - DNA, 647 bp, Homo sapiens
acattcctcaggcgcagaattgctaagtaagcatatttagtgcaaatgtccaccatagtctatattctattcttttcaggttttctgaacagcagtgggggctctcgctggggtcttcagcaccatcttggaggttgccatggtgaggggattgggagctgccaggggaacctggaggagactcttctcacaggccctttccaggccccatacccagggccccctgagcaggcagcttggacaggagtcagtggctgtggatgcccagatgtcctcaycttagagtgaggggcctgcactggggttgaaggaataaaaagaacatcaggcagccccccatttccaatctggaggttcaaatggaagcttgggaaagtgcttggcaaaccagaaagcactcaagaaatgtaagtgcaggtgcttccagttccaggcctgtcttcgtcctctgccagacttagaaatgttcttttttgttttctgctcttccctccctatcattttccatagatccccactctctttcttccaaaatacctttacctgcttttatgtgacatgttttcctgaacatgcatagggaaaccaaataaaagccacatgtgcatatccatgtaccaagtatccacacgcttatagtacagaca

SEQ ID NO: 482893 - DNA, 554 bp, Homo sapiens
attagtgccaagattaagaaaccttgatctaagttgacccactcctccttatatttatttttaaagggaattttatacaactatcataaagaccaggatcatctgtcataagcagaaggtgcctacagtcataagtaaaaagtattcagagaaatatgtacagtgaaaacaaaataatttaaaaatgtagttcagacatagtgacctactgaaggctttgagcctgagggctgctctcttaaaaaaaaaaatccacacgtaatagaaacattaaagacacagcagctccaaactaagactttctcctcattgtggccaaaaggacagaaaggagaactgagagggaaaaagcatttcttcacacaattaatgatgtagctatgcacctccaaaatcatcttgggtaccaccagtagatgatgatrccagtaaagtgaatctcagtcagtcttcccagactccaaagaacagaattactgtgactagttcttgaggagaaaacccaaagaggcaaaagacaggagaagctggtgttatctgatctgcgttataaa

SEQ ID NO: 482894 - DNA, 587 bp, Homo sapiens
tgaagggaaaatgtggtagaagtcctagtggagcgagacagtgatctccacagattatagtgtaaattacctactttttcaaattaaaaaaaaaaaaaatcacatgatcatgtgactctattaccagggtctttcccagggccttggaaggggcctatgcaarcaagaaacccttgacgcatgagctttattagctccatggtagatctacaagtgaaggttcactcaacttaatctaggcctacttccccgaacatggtggccagctaggcttccttcactcgtcattaaatgttgagaaatgactggcatttcaatccaactcagtttcccaatatttcctcaacttaaaagccttgccagtttggggttccattcctgcatatccccaccttcatacagcagacagaaaaaagagccaagctttgaggaatgtttcctaagaggaaagtaggttttggtccgggctttccatctgcagtagagagggcttccctcagtcgtgtagggcccttgtctacgtaaataattagaatcactccaagtcagtatgtcagcaccattctggtagcccactttcttgcagt

SEQ ID NO: 482895 - DNA, 587 bp, Homo sapiens
tgaagggaaaatgtggtagaagtcctagtggagcgagacagtgatctccacagattatagtgtaaattacctactttttcaaattaaaaaaaaaaaaaatcacatgatcatgtgactctattaccagggtctttcccagggccttggaaggggcctatgcaaacaagaaacccttgacgcatgagctttattagctccatggtagatctacaagtgaaggttcactcaacttaatctaggcctacttccccgaacatggtggccagctaggcttccttcactcgtcattaaatgttgagaaatgactggcatttcaatccaactcagtttcccaatatttcctcaacttaaaagccttgccagtttggggttccattcctgcatatccccaccttcatacagcagacagaaaaaagagccaagctttgaggaatgtttcctaagaggaaagtaggttttggtccggsctttccatctgcagtagagagggcttccctcagtcgtgtagggcccttgtctacgtaaataattagaatcactccaagtcagtatgtcagcaccattctggtagcccactttcttgcagt

SEQ ID NO: 482896 - DNA, 587 bp, Homo sapiens
tgaagggaaaatgtggtagaagtcctagtggagcgagacagtgatctccacagattatagtgtaaattacctactttttcaaattaaaaaaaaaaaaaatcacatgatcatgtgactctattaccagggtctttcccagggccttggaaggggcctatgcaaacaagaaacccttgacgcatgagctttattagctccatggtagatctacaagtgaaggttcactcaacttaatctaggcctacttccccgaacatggtggccagctaggcttccttcactcgtcattaaatgttgagaaatgactggcatttcaatccaactcagtttcccaatatttcctcaacttaaaagccttgccagtttggggttccattcctgcatatccccaccttcatacagcagacagaaaaaagagccaagctttgaggaatgtttcctaagaggaaagtaggttttggtccgggctttccatstgcagtagagagggcttccctcagtcgtgtagggcccttgtctacgtaaataattagaatcactccaagtcagtatgtcagcaccattctggtagcccactttcttgcagt

SEQ ID NO: 482897 - DNA, 587 bp, Homo sapiens
tgaagggaaaatgtggtagaagtcctagtggagcgagacagtgatctccacagattatagtgtaaattacctactttttcaaattaaaaaaaaaaaaaatcacatgatcatgtgactctattaccagggtctttcccagggccttggaaggggcctatgcaaacaagaaacccttgacgcatgagctttattagctccatggtagatctacaagtgaaggttcactcaacttaatctaggcctacttccccgaacatggtggccagctaggcttccttcactcgtcattaaatgttgagaaatgactggcatttcaatccaactcagtttcccaatatttcctcaacttaaaagccttgccagtttggggttccattcctgcatatccccaccttcatacagcagacagaaaaaagagccaagctttgaggaatgtttcctaagaggaaagtaggttttggtccgggctttccatctgcagtagagagggcttccctcagtcgtgtagggcccttgtctacrtaaataattagaatcactccaagtcagtatgtcagcaccattctggtagcccactttcttgcagt

SEQ ID NO: 482898 - DNA, 259 bp, Homo sapiens
gccccggacaaatgggcactgactctttaaggagataggtaggctctgatttgggaggggtggaatttagccacagggaaccaacctcagtgcaggggctgcatgaragtctggggcaatcggaggtatgccaggcatgagaggggaaagtggttactggatagtcccatctcccttgacaattttgctcagtgctgacccagtctttaacttgggagcctcatggatccagaaatttatgattaacacagcccacaca

SEQ ID NO: 482899 - DNA, 613 bp, Homo sapiens
tgttctatgcatagaataacattcctttaatttactgtgtttgctttttagaccctattttgtttttccattttgaagaactaaatgccccagatgaatcagtcaacaatatgtyggctgctctcacattcagccttctgctgttttataatagtacccttatcttatttcaagaaaagaatgacaaacttatagctgcaaatgctaaatttatggggttctttgtggcaggcattactgagaacagggctaaggaaacaggtaagacgtcctggaaagaagaaacctccataaatacaaggccaggcctcaattttcatctgagccctgcaatccaagcagttttcactacctatttgaattttttaaagatgtatggggcaatcaaaggtgctgagtgctaattagatggacaaatgaatggtcaccctcaaaaggcacattatgcctagtcacagctcttctgaatgccctggtcgctactttaatagctctgtgactttcaatggtacaaggtcaagaagagttgccttttgctggaaccttcccaacagaccccattctgcccaccagaaccggaagttgtgtctttgcaaaagcaaccagttagaat

SEQ ID NO: 482900 - DNA, 613 bp, Homo sapiens
tgttctatgcatagaataacattcctttaatttactgtgtttgctttttagaccctattttgtttttccattttgaagaactaaatgccccagatgaatcagtcaacaatatgtcggctgctctcacattcagccttctgctgttttataatagtacccttatcttatttcaagaaaagaatgacaaacttatagctgcaaatgctaaatttatggggttctttgtggcaggcattactgagaacagggctaaggaaacaggtaagacgtcctggaaagaagaaacctccataaatacaaggccaggcctcaattttcatctgagccctgcaatccaagcagttttcactacctatttgaattttttaaagatgtatggggcaatcaaaggtgctgagtgctaattagatggacaaatgaatggtcaccctcaaaaggcacattatgcctagtcacagctcttctgaatgccctggtcgctactttaatagctctktgactttcaatggtacaaggtcaagaagagttgccttttgctggaaccttcccaacagaccccattctgcccaccagaaccggaagttgtgtctttgcaaaagcaaccagttagaat

SEQ ID NO: 482901 - DNA, 498 bp, Homo sapiens
cagttttctgaacagaaatgtaccattcrggtgcaaataaatgatgcctttttctttgaaatttagagagatctttctctcaaaagatggggcaaagtacacaaggttaatcttgccagacaaccagtttagatgtctaggcccttccacttcggataaactgcattgcaaatatctcattaaccatgttgaaatctatttcaaatcttatcattatttttgataaatgggtcatggaaaaattaaaataataccagcctgctgtggcctttgttccttgggaacaaactgctgtaacaataacaatttctgtagttttaaagaattcatgctatttgagctgatgtaagtgtgaggcacacaactgaggtgaaggtaagtttgctctgtgaagaaagttgagggctgtctacttccatggacagcatccacaaggaaaatgagaggggactccttcctaaagatgggcagactgtcctcttttgggtccatattgtc

SEQ ID NO: 482902 - DNA, 610 bp, Homo sapiens
cagttttctgaacagaaatgtaccattcaggtgcaaataaatgatgcctttttctttgaaatttagagagatctttctctcaaaagatggggcaaagtacacaaggttaatcttgccagacaaccagtttagatgtctaggcccttccacttcggataaactgcattgcaaatatctcattaaccatgttgaaatctatttcaaatcttatcattatttttgataaatgggtcatggaaaaattaaaataataccagcctgctgtggcctttgttccttgggaacaaactgctgtaacaataacaatttctgtagttttaaagaattcatgctatttgagctgatgtaagtgtgaggcacacaactgaggtgaaggtaagtttgctctgtgaagaaagttgagggctgtctacttccatggacagcatccacaaggaaaatgagaggggactccttcctaaagmtgggcagactgtcctcttttgggtccatattgtcttctagtccctttaaatacatgcagagtctgggctatgggttctgatgtctgactgggaagaaggtggagccttgctgccccagtcaactcattttataactggcttgtcct

SEQ ID NO: 482903 - DNA, 649 bp, Homo sapiens
tcatcacctgtgagcttgctgtaagtgcccagggtgcagctcccagggaccaaagagaagtcctccagggtttttgagcccttggagactgctggttgctgtgattccttgggagaagcagctcagatggtaaactaaagagccccattaacctaagcacaataacaccgacacttccaattagccagaggctgtcaggtttagccatttacattgcatacattctctgttcctgactgtgtttgagttactttcttccagcacagatggagaaagtgatttttttttcctgttaaaggaagtcttcccagatgaaccatatccaacactaatcactcttttgttttaagaacacaattctgtaagacttggcttacaattagaccttgagttgctataattggatgagttagccacattttaagatatttgagagtaaatacttttcctatttctagtcaattccaggactccataatcaatgactctgtttacacctggargctgataagtacttgcaaaatgtgatagtcaggatagactgcgtcatatgcaggaaccagaaatccctaaatcttatcaccctaatacagcaaaagtttaggcgcttaaacaatatcaacgtggatgtgaatgactctctagggca

SEQ ID NO: 482904 - DNA, 591 bp, Homo sapiens
atatcaaacctcagtcaaataaaatatcccaatgcctttgatttgaaacactgccaagccagacctttcaagcacatacttcaataatagatttttgaaaatataaagctaggacttctaacttacaatcctattaaattttgtctgataggtgtcaggcagtgttttagcttgctgggaccrcttggaaccatgatctaaaacctgtggaatgttctgacctctccaactttatactttgaaagttaataaaaaaggcctttttccagctccttacatgttcttgataaaaatgtttactaggtcagggacaaggacaaattcaagtctgaagttaaaatatatggataaggcctcagacttaggaaaggaaataagatgtgttttatacgttctttgggaaatatgaagatagacaccaagagatgacttcaccagtataaaggtaaatacttagatgagccatgttgcttttcccctgaagatctacttgtattaggtctggagcaatcagcaaagcaaagagtttccagtgtgaactctctcagcttaatcaagaaatttaaaaagagaaactaagaactatccaag

SEQ ID NO: 482905 - DNA, 604 bp, Homo sapiens
gtctcatccttaactgctgctcaccccatcccctctctggtcactcagcagagctgctaagatacagtgacaaaatattcgtacctcttgaaatgcagtttgaaaaccactgttctttcacaaccctctcactttaaaaatgtggaacaatgaaggccccaagactagaaaagcccggggtcaccgggttggttaatggacaggcaggggttagaatccaggtcatctgatttccagcccaatgtgctttctccactccktacagccctttaatgcatcggtgacaaactgcccattttaaaatatggtaaagtagggcatctaatgaagaatctccagcgggaagatcttcattgtctttttcaccttccatactgtgtcaaatattgatatttataaaataatggaagaactggcatcagaaaatgtatgctacagcgactctttgaatgagggccagaaagagaataaaaagcccagagtgacctgctgtacacccacactgcttccccaattaactccaaacagactttgtctgggatgaaatgatttagcctcaacgcaaggtcagtcccacatatccagaataaagattgccgaatat

SEQ ID NO: 482906 - DNA, 604 bp, Homo sapiens
gtctcatccttaactgctgctcaccccatcccctctctggtcactcagcagagctgctaagatacagtgacaaaatattcgtacctcttgaaatgcagtttgaaaaccactgttctttcacaaccctctcactttaaaaatgtggaacaatgaaggccccaagactagaaaagcccggggtcaccgggttggttaatggacaggcaggggttagaatccaggtcatctgatttccagcccaatgtgctttctccactcctyacagccctttaatgcatcggtgacaaactgcccattttaaaatatggtaaagtagggcatctaatgaagaatctccagcgggaagatcttcattgtctttttcaccttccatactgtgtcaaatattgatatttataaaataatggaagaactggcatcagaaaatgtatgctacagcgactctttgaatgagggccagaaagagaataaaaagcccagagtgacctgctgtacacccacactgcttccccaattaactccaaacagactttgtctgggatgaaatgatttagcctcaacgcaaggtcagtcccacatatccagaataaagattgccgaatat

SEQ ID NO: 482907 - DNA, 399 bp, Homo sapiens
aaggtaggggcaggttgattctattgaaggagctgtggattcaagcaggcaaagaaacgtgtctagcacaggggaggacaagaatttgcactcrattttaaacataatgtcatatattccagaaactgtgccaccacttctatttgatccttttgtcaagaatttttttttccattgcactgaggtaccatcataggtcttttctctcaaagaacaacaagacagaaaacattgtcactgtgtcttttttgtaggtttttgaatgacggtatagaataataatcattggggtgtaaaatgtttattgttatagggcttgagaaatttaaacacacatcgcatatccattttttcaagtccatcaccatcaagcgtcccattttgcatcaaagtgtctat

SEQ ID NO: 482908 - DNA, 534 bp, Homo sapiens
acattgtcacaaataaatcagtctgttctacttttagagtcctggatactggctctactggaattcacagatttattttgtacatacacatgcccacagaaattgctcccctacatgcataagtctccactgtgaacctctttttagtacctttagtttgccaagtgaaaagcattcagtcagaaccacttggcaatgtgtcagtttgtgcaaccacgtaggacaataaaaatatgactgtttactgttttcaaaaatagaggcagtaaaaatgagactggtattcaatgacctcaccaaaaagacataaaacctcagattgttaaacagtgtgaaaacctgtatttttatttgggcttttgccagattctctaataaatgtcattacatgacaaggaacaatatatttagattgcaatgtaaaacttggcttggtagccactaacagctaccagatcagtttatcaattctccagaaaacrtcacatctagaagtgttgtaggtaaaaaaaaaaaaaaaatgtttcagatgtt

SEQ ID NO: 482909 - DNA, 535 bp, Homo sapiens
agctgtttctatcatcctttctcacctacccctacctcatttggcatgaaatgttatacctcatctcagagtgcacattaatcagatttatagtcttcatataatgatcattcccacccattaggacttatgggtcaccctgacagtgagttgactgcctctcactctggggctgtttgtcatagcgcagttttccttagaagatgcagttctgccacaactattaactcctacactattgtaaaataatgttgagtgagagttttgtagttttcattttccagctatttttctgttccatcatagatgccagtgaatgaccatattctaagaaagataagggaatacctagagctaggtcctgagcacaggagaatgggtccactcaggttgttgcaaagagacttagaagatatcaggaagggctgggagcagtggttcacacctgtaatcccagcacttttggaggcygaggcgggcagatcacctgaggtcaggagttcgagaccaacctgaccaacatggagaaaaccca

SEQ ID NO: 482910 - DNA, 605 bp, Homo sapiens
tggtttctcttgaagtcagaaagttaacctsttctctgcctcagcaaggacaaagcgtgttctattcttgcctgtcagtgtggttggagttttcaaaagtgaaagggaagatatgtgtaaaaaaatgtcttactgatttttcttttcaaaatatgcatgtggaagaaaatgtaggtgccagacattaaaatatagtattctcatgtttattacaccaataatagcttaatttgtggagacctttatagatagtaacagtgttttaagcactttggatgcatgacattattttttcctccaggtaaccttctgagatatgcattgttgttatcccaaatttacagatggagaaagtgagctacagaggtcacttgcccatggtttcctcattagtatatagtggaacagggattctctgattccaaatcttgtgatcttaaccatctcattgaactatctcaattcagctaatgagtcttacatcaatgagacttattgaatgagtgaatataggaaaataaaattacactgcataaagtaggtacttagtaaatatctgtggaagaaagtttacccttgttctgatcatgagtcaaatccctatt

SEQ ID NO: 482911 - DNA, 605 bp, Homo sapiens
tggtttctcttgaagtcagaaagttaacctgttctctgcctcagcaaggacaaagcgtgttctattcttgcctgtcagtgtggttggagttttcaaaagtgaaagggaagatatgtgtaaaaaaatgtcttactgatttttcttttcaaaatatgcatgtggaagaaaatgtaggtgccagacattaaaatatagtattctcatgtttattacaccaataatagcttaatttgtggakacctttatagatagtaacagtgttttaagcactttggatgcatgacattattttttcctccaggtaaccttctgagatatgcattgttgttatcccaaatttacagatggagaaagtgagctacagaggtcacttgcccatggtttcctcattagtatatagtggaacagggattctctgattccaaatcttgtgatcttaaccatctcattgaactatctcaattcagctaatgagtcttacatcaatgagacttattgaatgagtgaatataggaaaataaaattacactgcataaagtaggtacttagtaaatatctgtggaagaaagtttacccttgttctgatcatgagtcaaatccctatt

SEQ ID NO: 482912 - DNA, 559 bp, Homo sapiens
tttaatatttattacacataaaaatgacaaaaaggtgccttttaaatgagttccattatatgctgtttattatggcctcttagatgtattttcatgatgtatcccttatttagtgtacaaacagtgcttagcaggcaacggaattcagggacttcttacaagaagtgataggggcctattagaagatgagagccagcactttaatttagaagatacatcaaggatgccagggaaaatgccaagaactcagaaatcatggtcttgcttcatgtcgtttttgtactgtagggcagtcttkgttgggcaaggcagctaacttcagtgagccttaattaacttatttttacaaagctataactttttatctacttctcagattggctaggaagaccaaatatggtcctctctttcatagtgctttgttacacaaatacaaataaaaggtggttatattatccaaatggtctcatatcctatcattatatacagaagattttactttcggaaaccaacagcattttacaatggagttctatgagtaaagcgccccccatacccc

SEQ ID NO: 482913 - DNA, 654 bp, Homo sapiens
tgtcaacagttgggagatattattctggtgtcctttttatctgtttccatatgtacatgaagctttatagacatgtctggttttagtctttttattaatatatgtagagttatgctatacatgtgattttcaacttgctttttgtcacttaacactcttggagatcttttcatatcaaagcatacagttagatctcatttttgaaaaaaaaaactgcatgagattccatagtacatagtatgtactatgagatatttactcctctttttctgaaaaatactgttttaattcatggagctttataatcttcaaacatgtagggcaatagtaggatgacttttgatttgagaatcagaagagaaagcctgagasttgaggaagggagggagttagctagaggaggagtgggaggaagagcatctgtggcagaggaaacaatgtgcaaagacactgagtgtgaatgagcagggcctggaagaaattctcaaagatgcctttgtgactagagtgtagtaaaggaagagagggagacagtgagataaggactgagaaatagacaagggtcacactcttagggtcctgtcgattgtttaaaggaattcatattttaccctaaaacggtaaagagtagagagtaattgaagacttaagcat

SEQ ID NO: 482914 - DNA, 579 bp, Homo sapiens
ctggtttgggcatacatgcttttttacacctgaatttctagtcacgtgttagcccagggccaagacttgcagcagcaaacttagctcccaggcatgatcgttagcaggagtgagctgttgccttctatgagcccaacagtgagttgcttgccaaagtcatcactccaccttgatctcctggttagtcgagttcagtcaagatttccctcagaagctggagctcgttactgtttctccagtctcttccaaggttacctaccttctctggcagaggataaggaattcatcatctttcagactgcagtctgttgcttggaggcttggaggaaactggctgagaaaatcatagttagtagttgataacaggccartgaaaattagcgagactaaggggactacgaaaagtagttgctaatgggacaaagttttactatgtcttccatgatgaaattcaacctcttcatggcctctttaggaaggggtcagtaaaaacttctactatttttaaaagttgccacaaacaaagtttgatttgctttgaatgtgacaccataacagaagtaggctttcaggaaagag

SEQ ID NO: 482915 - DNA, 591 bp, Homo sapiens
ccaaaaataatcaagcataactgtggttaattgtgcagcaacctacaccctccatactctgctaaatccctaggtgatcgttttgaggttttctttttttctttctttctcatcactgctgattcaaagacaggtacaattttagcttagtacgagttttccaaagacaagacaaagcaacatagtttggctatgttgtctaaacgttgtaatcacaattttcctatgagagcaacattttggatataaagtgtactttacaatgtaataggctttaactaccaagatatacacctttctaagtaagtcctattaaaacaatttaatagcgtgtcaacaagtacaaacagaattgtgcagtttgttttyatgcagtgagctagtttagccggggtctgtcaagtgctattgaagctcactttgaactaacaggattacatgatcggaattgtattcatggaaggtctttattcttagtgctgacagatgaaacgcatgataagttataggggttacactaaagaagtattgagtatttttgtgcatgtgcaaaatgtgtaggttcacatacatttccatacttaacagacg

SEQ ID NO: 482916 - DNA, 649 bp, Homo sapiens
caacctttgtgatgttcatctcagcaattttgcaccttttgtgccctgcacattttctgatacactgttgagagtaacatttccaattgtttccatttaagactctttgctttggtatctggtctccaggacacctgtgtgatccttccttcagcccagatataccagtcactcccttatgctttacaacaaccacatctttcccctgcctggatatatcttggatgatcagaagtctaygtgtccttcaaaaatggcctgcttaaaaaaggaacgtttctctaatttcccaagtcagtggtgatctcatcctactcttagtattcataagcttattttctgaatcattttttgccatacataatatactgttctacctttactgggaaattataactcctggtggtcaggaaatatttcttacacttggaattccctgctgtctttaaaaagtactttgcatgtagaagcttcattcaagtaatgtggagtgaatgagtgcttctgatatatagaaatatgagagacaaagaggagaaaaaacccaaaatctattattttcaagggatattcccacctggtctttgtgtggttttctgtttatagggagctagtaccttaagggttaagatcagttttaccaacaaca

SEQ ID NO: 482917 - DNA, 632 bp, Homo sapiens
gacatgaagccctctgctcctccctctgcaggctggtggcctcttcttggaagtccagagatggtacattgccaggcagcatcagccgggtttgccttttcaccaaagggtttgaaataggggcttcccctccatttttatcctctctgcaactgcttagcagaaccaggcctctactcccaacttctgaattcttctctgggcagaccagccagccaggactcatctgaggctggctggctgcctctgtcctcaccacccccaccttgagtgagcagccctgagttgtccctgttgtcccacagcctaggcagccctctctcttcttcaggagagaggagtwcagtgcaagcatagtgctcatccaaccccatggcgagggacagcaaggggcgtgggaagcctgcattgctctattatggttgatgctctgatagaaaagcaggagatccagggagccaataaataagacccctttgccctcctgagctgggaaacaacagggaattacagtcgtcagacagataaacatcaaaatagcagctttacttttgataaagctagagaatgtcatatgtctttgatgtgccacaaaacgggtgccttaatatgccctctaagtggaactcatc

SEQ ID NO: 482918 - DNA, 312 bp, Homo sapiens
atatccgcatcctatactcctcccatcttccatctgctaacagtgcccttcattggctgaatccaactgaaagccagagagcaaagtgcttgggatcccacttgggaggtcagcctctctgccaggcattgggaaggctcctagagatggaagagtgaatgaataaagcacagtgcttactttcagagagctcccagtcaagtggagagggctgtgctctragaggaaacaggtgaggaacctgctgagaaagcacaaggagaggatttccccaaattctggcttcttcaccagggggcttcccaatggaag

SEQ ID NO: 482919 - DNA, 511 bp, Homo sapiens
ttttttcacactctataacccccagcaggtctgaaaatcccctgcagatttcaagatattgcatgtcartagagtaaagcacagttctttgttactattattttaaggccaggtttcccatattacttcaacataaaaagctcctgtgctatgtaagtaaatgttttctagctggcaaaaggtagtatcattttatttccatccagacatggggtgggaggatggccacttcagctcttcatgcataactacacccagaacaaaaccaaggaaggtgtaaggcacctggttgatgtaatcctgagtctctgttttaaactttaatgtggacactgcattcatttttagctgaataaggacaatgcttcagctcctccacacttattcaccatatcagtgttcagaggaataaccaaattcttatgcattttcagttttgtctttacttaagctgtaactaagatgagaattcccaagaagaaagccccacatctagatcttgctcatcact

SEQ ID NO: 482920 - DNA, 511 bp, Homo sapiens
ttttttcacactctataacccccagcaggtctgaaaatcccctgcagatttcaagatattgcatgtcaatagagtaaagcacagttctttgttactattattttaaggccaggtttcccatattacttcaacataaaaagctcctgtgctatgtaagtaaatgttttctagctggcaaaaggtagtatcattttatttccatccagacatggggtgggaggatggccacttcagctcttcatgcwtaactacacccagaacaaaaccaaggaaggtgtaaggcacctggttgatgtaatcctgagtctctgttttaaactttaatgtggacactgcattcatttttagctgaataaggacaatgcttcagctcctccacacttattcaccatatcagtgttcagaggaataaccaaattcttatgcattttcagttttgtctttacttaagctgtaactaagatgagaattcccaagaagaaagccccacatctagatcttgctcatcact

SEQ ID NO: 482921 - DNA, 511 bp, Homo sapiens
ttttttcacactctataacccccagcaggtctgaaaatcccctgcagatttcaagatattgcatgtcaatagagtaaagcacagttctttgttactattattttaaggccaggtttcccatattacttcaacataaaaagctcctgtgctatgtaagtaaatgttttctagctggcaaaaggtagtatcattttatttccatccagacatggggtgggaggatggccacttcagctcttcatgcatractacacccagaacaaaaccaaggaaggtgtaaggcacctggttgatgtaatcctgagtctctgttttaaactttaatgtggacactgcattcatttttagctgaataaggacaatgcttcagctcctccacacttattcaccatatcagtgttcagaggaataaccaaattcttatgcattttcagttttgtctttacttaagctgtaactaagatgagaattcccaagaagaaagccccacatctagatcttgctcatcact

SEQ ID NO: 482922 - DNA, 666 bp, Homo sapiens
tgcccccatttatagctgcagagtagctctgtacttaagtgcatgaagagaaaagtatctttggtagatttcaaaagagttaggatggatttgagaaagtagcaaacttttaaaactcttatgcttttttagacacctgaaccccagttatgtgcagtgggatatttctcatggttctcctcaaaccgaccttgactgagtgttcctaagaattcaagattgatggatacaagactgttttaggtcacaaccattgcaatttccagacatctggccttgaagtgaggccactgacagtcccatcacctccaactcacaagtccattgagctctattactgagtataactgcagtgctctgaacaggaggggaagattkttctgccttagattgtaatcagcatggactatttccttttatgtgctaaatcctgactctactgctggggaggagcataaatgcatgtcatgtataattcagccttacctgtttaagatacagctctatatttgtatacaaaattatgttaagactgaacataggattcctgaggctggatagagtggaactgtgtctcaccaggtctggttaattacagaaagcctcctggaagttattttccgagagatgagagaagtatttgaccaggaaaaggatagctatttc

SEQ ID NO: 482923 - DNA, 634 bp, Homo sapiens
aggggactgctggttgttacatgtttttattatcttaaaatccttgcacctgccagaaacacctccccctggaacaagttcagctctttcttggccctctcccttctggaagcaaacacagaaatggggaagtatacaaagtgtaggcaagggaatttgcacatgttcaaaaatatggaacaagccattgctcttctaatgtagctttcacagaactcaggagactgagtcgtcctggttgccatttggaccttcttcaaagcaagcatgaacactcttaggacagaacattgtgctccataaaaaaaggttgcagaatgagagaatcccctccagtatgccctgagaaactagggatttggtttatagcatgtcaactttagaaaaatacacacagatgtgcacatacacatatatacacacatacacatgtacgtatatatacaaatgcacaaagtatgtwtttgtgcacatatgtgtataatgttctgaatctataataatgtgtttgttgtaaacatttagaaaaatgcaggaagttatgataccatataattctaatggactttcctggaagatcttcctattagtattattactaaatataatatcagtattatcatcaatattatta

SEQ ID NO: 482924 - DNA, 555 bp, Homo sapiens
agagcaacaataaaacctcatctggtaatgatgcacacttaatgtggatcgtatcttagaaactgccccccatttgacagttacggccctcatgccagttactttgtctttcattctttaattaaacaggattccttttcttgggtttggagcttgcaagaactccatcttttgactaattcaccttcaaatgagtgccatgtcttgatgtattaccgtgataggctgtaccacacatgtaatccatcatagtagttagctgttgctgggcttccaggatagagaaactgagccagatgttgttctgacacattggagtaatgcatcaaccaagcctagggctctgacgatctattaccccaagatggctctggccagaatagagacaatcytagggcacatggagcattgtgcaggcttgacagagacctactcagggctgagaaagacttcaacactgagtggtttgaaatagatattggttttccagacccagttcagcaggtttaataagggggtacagaatcatgcacaagtattgctgtcattgatcaa

SEQ ID NO: 482925 - DNA, 610 bp, Homo sapiens
gaaatgggtatgatatttcttaatatttcttactccacactcaggttttcagaaactgtaactctctttacttttctgcaactgaactgagtatctgtctcaatagaaactcaaatcttccttctgtcctctaaaggaaaatgtttttcaattcatagaaacatagtcagatcagagcttgcctaatggattcatggtaaatttggtcaaagttagagtctccccttcacccagaggaggcatgtcatctatgctccctcccgtcgggggaggcctcgggtcctcagcctccatctgtccaccgggcatcttcagaattgtagggatcctgcctgattctttgctatcctcatctcttcttgctggtacccaccagcatggtgatgttcccatctggcctccagccatggcactcagcctgtacctgtgactgccttcccctacaccagttgtaagacatcccagttctgacagmtcttgacacaggtctaaactgctgcaggccacgcaggaaaaggtttcaggcctctgtgtcctctcagggcctgaaaatgctccgggaggtggcctcagccccagctgcccgcaagcagcacaggagtaagaggcc

SEQ ID NO: 482926 - DNA, 567 bp, Homo sapiens
ggctttctctgctctctgagcgagttgcttttatgccagtttcctaataggtattaatcctggtccactaattccaaataactctacaaacagttatttctctagtttcctatagccatgtcaacaataaggcaaaataacactttatttccctttggatagctgactggggattgaattacagaagccgtgaaatcagtgaaactccttgagatgatcaagttggaagggcagtgatgcatgctttctctgttgacaagactgacattgtaagtttgaaaagtctttattgctgtttcaatctgtgctcaccaagaaggaaaatgatttgaaaatcgagttgaaaattcagctaggagatgagttcttcatctgcctttcctctgtgcaaggtaatttccttgggagcactttcccaytggagaaactggaaacagcccagggcagtcatacaagtcagaatgaaggttaaacccacaggacatctacttgatgagtgctatgggttgaattgtgtccccaaaaaggcgtacattgagggaactaacagtacttgagaatgaggtc

SEQ ID NO: 482927 - DNA, 499 bp, Homo sapiens
ttgtctgggacctattggctactgtcacctaggcatgatttcaccttgtcatttggggatttctgaatgcataaaggcccctagagactcaagcagtgggtcctaatgtgtacgtaaaaatccagaaaaatccagtgctgtctatttccttgctttaygattcatcagggcagattgaaatagttaatgctcccctaaaactgagcaatatactctggcctcacaagtagaatcaaggccaataaactgtaacaaagcataatattcaggacatacatataactccactcaaggataatgttctacgcataactcatgcagttagctccaatcaatcctcctccagtgaacatacagtgctaataggtctactgtggcctttaaatttccacccacattttgatgcatacattctttagaaagcaaaaattattaatcagagtagccttttttgtgcttctgttatttgtacccagaatcatctggaatacaaaataag

SEQ ID NO: 482928 - DNA, 618 bp, Homo sapiens
tgcattttcatttgagctgaggtgatgccaggcctgccctggcctaaaatccacaggtaatatactctcctaaagcagagttttgatggagaggccatgcagtgcggggtgtcaggcggcagggggaaggggtgcctgttggcatgctacgtccccacttactagctgtgtgacctcaggcaaatgacttaacctctctgagcctcagtttatttgcagcatgaggataacaaactcttgtttgtagaattgtttcctgcagtagaggcagtgtggaataggagcctagccgggggtctcagatagagtggagctccacaaatcctgctgttattattctcaacagtgaatgcacggccaagcgccacagcgagctgggcagggagctcctgcagcccagcaaggcacactgcgtcacctggcccactcccttagcactccttgggctgccyttcggtcaccaggccctccacaggcaggtgcacacagccctgtctgcctggctccctgagttgatcaggcagccagacctcagggagcacaattagaggctgttttggccctgaagacaaacatgattccagacaggtctgaaggggctgctgttgaacgacaccc

SEQ ID NO: 482929 - DNA, 569 bp, Homo sapiens
aataaaattatcttcctgcctttgcctacacatctagcagatgtccatatcatccatccaaatgcttctacttgtgagtatacaactaatttggatccaattaatgcacaagtaattaaagttgatttttgtatgttattataattttcctcacactgtgcttgtgtttccatactttggtatttcataagctgtcagctcatgaaacattccagttataagagactttagttgactctcataggatgtatataagtgcatgtatcaaattgacccatctggatagcacaaaattcccagacaagcccgtttgaactgagccacttgcgtggtctgctgtaatagtttactctgtcctgttttacatttgtatttgacatttgctttctacttcctgtacatcaatacaagaattcaggratctttttccgagttaccccttaggctaggtctacacttaccaatccatactctctctatccaaaattgcaagggttaaaaaagcagagttaaaattcctacttgattccacagcaaagataattaatcgtaatgcagttattactttt

SEQ ID NO: 482930 - DNA, 635 bp, Homo sapiens
gctgtgttctcacatagtggaaagggtgagggctctctctagggtcccttttataagggcactaatatcatttcaggtgatctaattacctcccaaaggctctactttctaataccatcacgttgggggttgggatttcaatatatgaattttgagggaacccaaacactcaagactatcgcaataagccagggaacaagttacaaatttgtaaaatgagaaagaaaatggttgctacatcctttagtcaattccaaagtcatcatcactaaaaaatatagagatgatcaaagaaactgtgtgtgccactactgcataaaagtgcagtatgaatgtatatattttaggatgggctttgtgtgtttaaaaattttatttctaattcacgttagaatattttttacattttctcagctgaacctaatttgttttaatccataaatattatgtcccaaaatgratcatctatcttctaaaaacctattttccactttcaatactcctccctctgttgcagcacctggccaaaagcaggatgtgttggaccttacccaactgattagaagtgacactacgacaaactccacacaacaaggagccttccacttattctgtacatgacatctctcatctct

SEQ ID NO: 482931 - DNA, 640 bp, Homo sapiens
gactatctcctacagggagggtgaattgatgagctctcttttcagagagcaattatgatccaactttctgaagctayaaaattcaaattggatattttcaaccagttttcctttaactcaaagtttatgttttaaaagttaagaataattgtggtctcttgtggatcaaggaataaactgcttacagcaaaagagtagcaaggtcttcctggcaagatgatgcctttctggtgttcttcctaccaacagagtaacctcctgatctctagaaggaatcctgaagcatgtgccagagacgcagttcctaaagtctttttttctctatggttagagtgactggccaacatccccacaaatctattaaagcaggtttttgtgtgtgtgtgtgtcttgttccttgagatttcatttccacatgtgagcctgagtagtctgtacggaatccatggttcacctttgactcaaaatctgctgcctgtagtatacaaaaacagcatcctaacagacagatctagttcatttcaatttccatgcatctctgacccttttcagttctcatcacttcagcttaacaacttcatttttcactcttatgcctttatccatttgattatagattacgtttctcaaagtggacctt

SEQ ID NO: 482932 - DNA, 640 bp, Homo sapiens
gactatctcctacagggagggtgaattgatgagctctcttttcagagagcaattatgatccaactttctgaagctataaaattcaaattggatattttcaaccagttttcctttaactcaaagtttatgttttaaaagttaagaataattgtggtctcttgtggatcaaggaataaactgcttacagcaaaagagtagcaaggtcttcctggcaagatgatgcctttctggtgttcttcctaccaacagagtaacctcctgatctctagaaggaatcctgaagcatgtgccagagacgcagttcctaaagtctttttttctctatggttagagtgactggccaacatccccacaaatctattaaagcaggtttttgtgtgtgtgtgtgtcttgttccttgagatttcatttccacatgtgagcctgagtagtctgtacggaatccatggttcacctttgactcaaaatctgctgcctgtagtatacaaaaacagcatcctaacagacagatctagttcatttcaatttccatgcatctctgacccttttcagttctcatcacttcagcttaacaacttcatttttcactctyatgcctttatccatttgattatagattacgtttctcaaagtggacctt

SEQ ID NO: 482933 - DNA, 498 bp, Homo sapiens
acatttctacacaaacgtactcccaccaaggtcatcactcaccttcttaaacaccaggggagcacaagccaacattttaatttacagaacaaatttatacatgggactaaaagatatggtgctcctattgagggctgccactgagcaccaggaacatatggagcggctcaaggcagtttggaaattctttatattctgcccatgcgctttacactcggattctcactctctgttaacctcttctctttctgtataacctcttctctttctgtratggttgtaaccagtgccggcactttgcttgaaaaagcacaaggagtttatttcaaaaataaactagtggaatagtgggttcttgctgtatatgaagcaaaaagggaaaacctgcataaggaatatgaacaaatgaattagttttaattggtgtactccaccaagtctattctgggccacatctagatgtagggccctattaaattaggaagaagacagcattta

SEQ ID NO: 482934 - DNA, 651 bp, Homo sapiens
aagctgacatctcagatttcaaaagaaagttacatttggcaagagcctcactcccatgatgtgttagttatatttaactctttttttttttttttttaacaaatgactaaacctggaccctgcattgcttgggccaagacatcatcttttatgacacatttctacacaaacgtactcccaccaaggtcatcactcaccttcttaaacaccaggggagcacaagccaacattttaatttacagaacaaatttatacatgggactaaaagatatggtgctcctattgagggctgccactgagcaccaggaacatatggagcggctcaaggcagtttggaaattctttatattctgcccatgcgctttacactcggattctcactctctgttaacctcttctctttctgtataacctcttctctttctgtaatggttgtaaccagtgccggcactttgcttgaaaaagcacaaggagtttatttcaaaaataaactagtggaatagtgggttcttgctgtatatgaagcaaaaagggaaaacctgcataaggaatatgaacaaatgaattagttttaattggtgtactccaycaagtctattctgggccacatctagatgtagggccctattaaattaggaagaagacagcatt

SEQ ID NO: 482935 - DNA, 614 bp, Homo sapiens
atctttgacatgcaccaacctagacaaatgtcacaaatgtaatgttgagcaaaagaagacaaaggtaaaagagtgcatattgtataattgcacttataaaagtttccagaatagrcaatttaggctctttgaagttaagctactaattatcttgtgatgaggatgaggttgtgacttggagggctcatgggggtgtcatctaagttacaggtaattatttcttgatttgaatgtgctacttaagtgtatttatgctgtaaaaatttattgtgctgtgtatttataatttgcattgtttatgtatgttatacttccagaaaagagtttaattaaaaaaaatcccactatctaaatcctgctaatgaccttcaaattatactagatggagttactaattatgactcagtgcaccagtggtcagtagactatcaatattgatttcacttccttcattgtttacattctcaataagagagtactttttctattgcttattgtaaaaagaccttttttgggtgatgttatgttcatccataatagatttctaatactcccagggtctctgttttttttcttctttctgtaattatcttctgtaagattaaccagtcctt

SEQ ID NO: 482936 - DNA, 614 bp, Homo sapiens
atctttgacatgcaccaacctagacaaatgtcacaaatgtaatgttgagcaaaagaagacaaaggtaaaagagtgcatattgtataattgcacttataaaagtttccagaatagacaatttaggctctttgaagttaagctactaattatcttgtgatgaggatgaggttgtgacttggagggctcatgggggtgtcatctaagttacaggtaattatttcttgatttgaatgtgctacttaagtgtatttatgctgtaaaaatttattgtgctgtgtatttataatttgcattgtttatgtatgttatacttccagaaaagagtttaattaaaaaaaatcccactatctaaatcctgctaatgaccttcaaattmtactagatggagttactaattatgactcagtgcaccagtggtcagtagactatcaatattgatttcacttccttcattgtttacattctcaataagagagtactttttctattgcttattgtaaaaagaccttttttgggtgatgttatgttcatccataatagatttctaatactcccagggtctctgttttttttcttctttctgtaattatcttctgtaagattaaccagtcctt

SEQ ID NO: 482937 - DNA, 623 bp, Homo sapiens
catgtgctttaggagcaacttatagttagtaatatttaactttattaatattccttgtcatattgtaaacaactatctttccaaaaacatttttaacaaaatggtatttcattacatagaaacattacaatcacagaaatctaaaacaagctagaaaaattagtttgtgcattgacttagtctcaaaattccatgcaggcataaaaaaagactcagattgtgcgaatactgaagttgaaaacaaaactccctccacacagcctggcaaaagtgcagcattgtgtttttttccctattgccagatgaaccatggctatgggcttaatgtaaacattcagtttccttacaaaaatcatttcatcatatcgtcaatgttcccaatagatgtaatgcgtttccatttcattgtgaattctaaataatgagcgcaggtaaacctttgaggttcagcttggcttgaaccaggatacacatgattaaatgcttattcaaaactctttcatctggaagtcttayaagaaggcttgtttttgttttactgcctttcttaaagtgtttcagtatttccagtttgacttccatctcataccagaaggtgaaaagacattggaaatgattgctct

SEQ ID NO: 482938 - DNA, 302 bp, Homo sapiens
aactatatgcagttctcttggacctcatgctgtyccacctgtgtgcattttattccccctacctggaagaaagcaactttccatgccaccttaacttctaaacattatcctactctctgcttcagaaattgcccccaaattcacactttttgaaaccttatattttatttgaaggaaaattagaaaaatacacttattaattaagaaaatattcctagactgagaatcacatgaaagcaaggacaaaccattcaaatggccattcgaggtggtggctcatggcactgctagcccatgatggg

SEQ ID NO: 482939 - DNA, 280 bp, Homo sapiens
ttattccccctacctggaagaaagcaactttccatgccaccttaacttctaaacattatcctactctctgcttcagaaattgccccyaaattcacactttttgaaaccttatattttatttgaaggaaaattagaaaaatacacttattaattaagaaaatattcctagactgagaatcacatgaaagcaaggacaaaccattcaaatggccattcgaggtggtggctcatggcactgctagcccatgatgggatggctgtggttgatccatccttgcag

SEQ ID NO: 482940 - DNA, 486 bp, Homo sapiens
ttacaggaaagtggaaggggtgctgccagcagggcagcgtgttctctgaggtttgggaatggaactgtagaggctgggggtgagagtggactgtgctggctctctgatctctcggctcctgatggaaccagaacagccccaattgccatgggtcttccaataaggttatttccttagttgcaagttcaggtgaagggctaatgctttctgtgaggcatgaatccaaaaggttacaactcctggtgatcagcttaaattcacgaccatatttcaggtcacaaactgggctcaggggtgcwgtgactccatatactaatctacgtcagtcccccacagacccaaagccaacatccctgatgtctccttgctgatcaacttaaaaagtggtgaggaagcatggattttaaatgagcatgatataaagtagcttgttacacactgcttgaggctacttgccttatacctatttttctaaggaaggtgaac

SEQ ID NO: 482941 - DNA, 478 bp, Homo sapiens
aaaggagaggctgggcctattacatttattggaggcccacagcctggtttctattaagtttgacagtatttatttttgaagctagaatcatgtacttacctatgattgcaaacattgttttcaaaatatcaaataacgaatgtgcaaaaactgaataataatgaaatggatggaaagtgacaaaacggaaattcttctcccccacagcaaaggctcaaaaattccagagrgtggacaaacatgaatacttcctgtttcactgtaaaggtttttggtgcttaaattttaagtctccattttcagtctgtgattgtctatcaattatatttaattaatgtttttattacaataatattgtgccatcagttacaaaatattttataaaacaatgcatattcgtgttattgcctttcaagaaaattccagaaaattcatagggatattcccctcaaattttaatgttataacatttcccgtg

SEQ ID NO: 482942 - DNA, 638 bp, Homo sapiens
gtgcttaaattttaagtctccattttcagtctgtgattgtctatcaattatatttaattartgtttttattacaataatattgtgccatcagttacaaaatattttataaaacaatgcatattcgtgttattgcctttcaagaaaattccagaaaattcatagggatattcccctcaaattttaatgttataacatttcccgtgtaataatgtgtcttaaaaagttgccacttataaaatagttttcccgtatgacatacccaaattctgggtcttgtccaaacctttatgtttctgtcctacaacattttctcatttgatagttggtcatgtgaaaaaaacatgttatgttttcatgttatgtttctctaagtagaaagatttttccagtgaacaaaatcttagctcaatgttcccagtaagagtctgaacaagcaatcttggtatgttgtagaacttcaagttctgttatgagcagaatttcctcacaaatgtagcaaaattattgctcttacttttcagtttttcttgtcttttttttttaatgaaggacttgaaaccaccaaatcttattttctttcttatggattctattaattataatgcatatttgaaaattgaagctttgtagttattaa

SEQ ID NO: 482943 - DNA, 638 bp, Homo sapiens
gtgcttaaattttaagtctccattttcagtctgtgattgtctatcaattatatttaattaatgtttttattacaataatattgtgccatcagttacaaaatattttataaaacaatgcatattcgtgttattgcctttcaagaaaattccagaaaattcatagggatattcccctcaaattttaatgttataacatttcccgtgtaataatgtgtcttaaaaagttgccacttataaaayagttttcccgtatgacatacccaaattctgggtcttgtccaaacctttatgtttctgtcctacaacattttctcatttgatagttggtcatgtgaaaaaaacatgttatgttttcatgttatgtttctctaagtagaaagatttttccagtgaacaaaatcttagctcaatgttcccagtaagagtctgaacaagcaatcttggtatgttgtagaacttcaagttctgttatgagcagaatttcctcacaaatgtagcaaaattattgctcttacttttcagtttttcttgtcttttttttttaatgaaggacttgaaaccaccaaatcttattttctttcttatggattctattaattataatgcatatttgaaaattgaagctttgtagttattaa

SEQ ID NO: 482944 - DNA, 638 bp, Homo sapiens
gtgcttaaattttaagtctccattttcagtctgtgattgtctatcaattatatttaattaatgtttttattacaataatattgtgccatcagttacaaaatattttataaaacaatgcatattcgtgttattgcctttcaagaaaattccagaaaattcatagggatattcccctcaaattttaatgttataacatttcccgtgtaataatgtgtcttaaaaagttgccacttataaaatagttttcccgtatgacatacccaaattctgggtcttgtccaaacctttatgtttctgtcctacaacattttctcrtttgatagttggtcatgtgaaaaaaacatgttatgttttcatgttatgtttctctaagtagaaagatttttccagtgaacaaaatcttagctcaatgttcccagtaagagtctgaacaagcaatcttggtatgttgtagaacttcaagttctgttatgagcagaatttcctcacaaatgtagcaaaattattgctcttacttttcagtttttcttgtcttttttttttaatgaaggacttgaaaccaccaaatcttattttctttcttatggattctattaattataatgcatatttgaaaattgaagctttgtagttattaa

SEQ ID NO: 482945 - DNA, 582 bp, Homo sapiens
atcacttcatatgttctccatgagcaataaaatataatacaatatgtatttataatattaatataatgtttttaaaaacatgcctttcatcctgtgctctttttaaaaaaatcttattgaaataaaatatgcatacaataaagtatacaaatcttatgtataaagcttacttaatttctacttaatatgaacctgatgtaaatacttcaatgttaagatgtaacagatctccagactcttaaaagcatactctctgcctcttccaagtcagtactccccaaagtaaccactattttgacttctgtctaaacaaattagttttgctagagactttcaaacatgatatgaaaagaatcctatgatacgtacaatttttagcctggctttttctgttcatcactacatctgtgggatatacccatatagttttgtagagcagtagctctttmatttttcattgctgagtaacatttcattgtttgaagatttatagactttatatatcctttctcctgttagtgggcatttgggttgtatatgagtaatcaattactatgcaatatattactccaatatatagca

SEQ ID NO: 482946 - DNA, 582 bp, Homo sapiens
atcacttcatatgttctccatgagcaataaaatataatacaatatgtatttataatattaatataatgtttttaaaaacatgcctttcatcctgtgctctttttaaaaaaatcttattgaaataaaatatgcatacaataaagtatacaaatcttatgtataaagcttacttaatttctacttaatatgaacctgatgtaaatacttcaatgttaagatgtaacagatctccagactcttaaaagcatactctctgcctcttccaagtcagtactccccaaagtaaccactattttgacttctgtctaaacaaattagttttgctagagactttcaaacatgatatgaaaagaatcctatgatacgtacaatttttagcctggctttttctgttcatcactacatctgtgggatatacccatatagttttgtagagcagtagctctttaatttttcattgctgagtaacatttcattgtttgaagatttatakactttatatatcctttctcctgttagtgggcatttgggttgtatatgagtaatcaattactatgcaatatattactccaatatatagca

SEQ ID NO: 482947 - DNA, 674 bp, Homo sapiens
tggcatgtaataaatacaacttagcagtaactagacaacagttctgaatcatcacaccaacaagggccttcccttccacagggatgttttattgtatcaccacccatgaaatctttaccaatgggcaccatttggggccaggttccattttgccccacttagcactcaggattatgctcaattcagctaccaaatgtgagttaactaatctcatattaccatctgttttctcgcaccatcccagtgccaactgcatcagcattcacaaagtgatgcaagactctcacaggtaggaaaagaaaagtaagaaaggaggattagataagaagggtcagagattgctgcatagttccaataaaggtgagaccaggccaatgggcagtacttgaacaaaacttgcccattgaagtcccacctgtcaccttattgccttgactttattacctttagtgtcagttatttgctgggagcacccttttgtaaacatggtctcaatataaaccctttagtggatccagaggggcagcccctcatgttaacaatctttgcagtgcacactaatctaattccartcttcttcaatcattccataaaaccaaccttttgactaggtcatctataacctccatcttgctatatccaatggtattttaccatttggccatgcaccaagc

SEQ ID NO: 482948 - DNA, 513 bp, Homo sapiens
acctctttggcagggctggggatggtcaaccctaggtcctgagcaataccttatgattacacagactcatgctatggtctccttcaactgatgaaaacattcactagttaacactttgaaacatttttttctatgcctacacacatgtacgaccacataatattataatagtagatatataactaataggcaaatttctcctttccatctaagtaatgcaactcaggaccacatatcwcaggcattatctgtgatttgttgaaattgtattacttcttataggtatattctaccagcaaatgttttctgctaagttttgaaagttgtctagattgtaattgcaccattttcccctaaaaggcatatatccctccattattacgtatgatacataagagttcatgcagtttcacagaacatttttcatactgccattactttgatgtatttttctaagacagttaccatatggttgaaatatatttaaaagtatagtggccatttcgcaaatca

SEQ ID NO: 482949 - DNA, 472 bp, Homo sapiens
aaaaaccatatttctgtctagaatctgtaatgcaattctttttttgttttgtttttgttttttgagacagagtctcgctctgttgcccaggctggagtgcagtggcgcaatctctgctcactgcaaactccgcctcccaggttcacgccattctcctgcctcagcctccccagcagctgggactacaggtgcccgccaccacgcccgctaatctttttgtatttttagtagagataaggtttcaccgtgttagccaggatggtctggatctcctgacctcatcatctgcctgcctcggcctcccaaagtgctgggattacaggtgtgagccaccttgcycggcctagaacttgtaatgcaattattgtcaaccctgtggggatagttccaaaaagggggcttggatcctgataaaacagcttatggcagtggagagaggaggaattctattgggctgtaataaataattgct

SEQ ID NO: 482950 - DNA, 493 bp, Homo sapiens
ctgttaatcttattgcaatttctctgtacacagtaagtcataacacatgaatcttgtacataagtcttgaacataaagtcatgtacatgagacttgctgctttcaagatttttacttcatctttgacttcaacattttgactttgaaatgttttctgggtaaggatccctttccattgaaaaacaaaagtttactctaatttggagttaacttctttgatatgttggttggtgtttttasttaaattttagaagttttcagcccttgtttctttggatattttttttctgctcttttctccctctcatctcattctgatttgcccattatgtttatgttggtgtgattatgtcatttcatatttcttctgaggctctgatcatttttctttttttgccattgtgtttttcagtctgtataatttctatttatctatcttcaaatttgctgattttttcttctgttggctaaaatctagacagttgagcctctt

SEQ ID NO: 482951 - DNA, 543 bp, Homo sapiens
agcagatttggttgctagtaaggccttcttcctggctcatagacagccagccactttctctctggggcttcatacagcttttcctttgtaagtggggatggagactctctctctctctctctctctcctctctctctcctctctctctctcctctctctctctcattctcttgctctctcactcttcctcttcttcttcttataagggcacaaaattcattrtgagagtctcattgtcctgacctaatctgaatcttggtcacactccaagtaccattactggagattacagcttccacacgtgaattttgggagacacaaatactcagtccataacatctacaaaacactggaaacacattaaagaggcaatagtcttggatatagatttgcacagcttgggtggaactgcaaacagcatcacccctctcatggagatgagtggaaaggcctcaactcccatatgatcaccttaccaacttgagagggtgacaccacagtgagaaagtgagaaaagcaattgacaaactaaaactaagatgt

SEQ ID NO: 482952 - DNA, 610 bp, Homo sapiens
gaaatatgtataataaaatattggttacatacatgtttttaaaaatcttacttcaattggtcagaaattgaatgaaattagcaaagcgcacttgcattacctcaccctgaatattcatttgttccctgtcatttactcttttatcaattattgagcagatttccaaccagccgaaacctctgaggtactttagcaacacctgttgtccctcaaatgccccatatacttgagcctatttctctactatccaatcttgtctacattatattccattcttggccagctctttgctggctataaattttgagatggattttataaaaagcttcttaggtgtgccatagaagaagaagawatgagctggaagtcagaggactggagccctcaccgtagttctcccactgattcctacaattagccagtgtttgttgagcagtgagtaatttttgagataatttgacacatttagttctcacaacaaccctatcattcctatttgacagatgagaaaaggtgagtcagataggttatatattttggtaagggtttcatgatacaggcaagatttgaacagtgacttgtcaaactccaaagcctgggactacaacca

SEQ ID NO: 482953 - DNA, 639 bp, Homo sapiens
atactagagaagtcttatttctagtgcttttaaactgagtcttttgagtgtctgtcccagtcagggaatattcaatggacaaaaagagccacaaggagtttaatgttgcattaagtggccttgtctttaaagaaagtggaataaatcagataagtaatggtattaatgtcattaggwaccaaatttctcattgtaagtaaaaagatttttaaaaagtaatccaagaaggaaaaccctacagtatttatttttatttgaaaataagagtatcgattcatgtgctgtatatgagtgtgtgtgtgtgtacattttttgatatcaagcttatagaaaagtttctagaatagcacaagaaactcccataactctttaccaatttcccaggaaaaatatttttaaaatatttttttaaaggaagaaaagaaccaacttctgaattcatccatcttttgtatggttttccatgtctcagtttccttcagttcagctctgatttgagttatatcttgtcttctgatagctttggggtttgtttgctcttgtttctctagttcttcgagctgtgatgttaggttcttaatttgagatctttccaacttttagatgtgggcctttagtgctctaaggttccctcttaac

SEQ ID NO: 482954 - DNA, 635 bp, Homo sapiens
aattttgtgggtgtggatgtggatatgaaaggggtgggataggtcctgaggtgatgactgctgggatgggtgatgactctyaagtgctcacttttgtcattgttaaaaatgtaccgtaataaaatttaaaatggaaataaaatgagattttcaaacaaggaaaagttgaaagaatttgttacccgcatatctgcacttaaaatagcaccaaaagggagtttccggagaggaaaattattccagatgagcacgaaataatgcagggaaaaaaattagtccctagaaaatgcaagcaggtaaatctaaatgaatattgtttaaaataataatacttgtgaggttgaaatatacataaaattaaaatatctaacaaaaaatgaccaaaacttagaagaattaatggaattattttgtgatccttgcattgtctgggatgtagtaaaaacaataacttacattcagctgcgatgaatcatggatgcaagttgacatctgtaaagtaactgattctttagaaaatcggaggctatagtgggttgtttgttttcataaacagtggaactattgaaatgaatttgtttgaggaagctgctccctgcaataaaaaccctctttcatattcataacatgttctg

SEQ ID NO: 482955 - DNA, 635 bp, Homo sapiens
aattttgtgggtgtggatgtggatatgaaaggggtgggataggtcctgaggtgatgactgctgggatgggtgatgactctcaagtgctcacttttgtcattgttaaaaatgtaccgtaataaaatttaaaatggaaataaaatgagattttcaaacaaggaaaagttgaaagaatttgttacccgcatatctgcacttaaaatagcaccaaaagggagtttccggagaggaaaattattccagatgagcacgaaataatgcagggaaaaaaattagtccctagaaaatgcaagcaggtaaatctaaatgaatattgtttaaaataataatacttgtgaggttgaaatatacataaaattaaaatatctaacaaaaaatgaccaaaacttagaagaattaatggaattattttgtgatccttgcattgtctgggatgtagtaaaaacamtaacttacattcagctgcgatgaatcatggatgcaagttgacatctgtaaagtaactgattctttagaaaatcggaggctatagtgggttgtttgttttcataaacagtggaactattgaaatgaatttgtttgaggaagctgctccctgcaataaaaaccctctttcatattcataacatgttctg

SEQ ID NO: 482956 - DNA, 593 bp, Homo sapiens
ctgggggagaaggtcttggtgaagtcgggatgtccaaagaaccatcagggtcgtgtgtgcagctccaatcgcagcgggaaagtgagatctcagaggccgcagacacacagtgctgtcaagtgggagaacaaggggaccaataactgcaggagtggaagacgctgccatgggctgaagagtgtccccctcaaaattcacgtgttgaaggcctaagctcaatacctcccacgcgactgtatttgtagacaaggcgttcaaagagggaactgaagttaaatcaggccattgggctggacccactaagaggaaatttggacacaggtggagagggatgatcatgtgaagacacagggaggtcggccatctacaaacccaggagagaggcctcgagagaaacccaccctgtcacattcttgatctcagacttgcagcctgcagaatcctggagagaataaatgtctgttgttggagccacmcagtctacagtgcttcattacggcagcctgagctgactctacagatgctgaaactgcagattgcaccagtgaggccctcgtccccacagcgccacggtagactcaggcctggtgtgc

SEQ ID NO: 482957 - DNA, 578 bp, Homo sapiens
gtgctagaagatcctgactaaactgtctgggtagtctgagagcagcacyattttatcgtaggattcctgagattttcggttcaaacctgagagtgccccttgggaagggaaaccccagcacacacaggcctctgatgttagcccggctcagtgcccacaagcacatctccatctcaagggcctttgccccacgagggccagggtgaagtctccttgtttcagcacccccagggacgctgggtgatgacttttctctctgccttccttggggccaggtctggaggcccaatgccacctgtattcgacctgcatagggggctgtgagtgtcatcttccctgggtccagggccacatttatgttttctttgtattgccacaatgcatcttaattcccatctgcattctcagctaaggcgaggcccaccccagcacatcacctcaccctgatgggctccctggcctctgatccctgcacagttggtgtcctcctgtgcctctgggacatgtgggatggacccaggctgctcccctctgcgctcgccttcctgagctctcccacttccaggggccctgagcgt

SEQ ID NO: 482958 - DNA, 195 bp, Homo sapiens
tttgtttctttgatcaggctttagctaagcttgatgtagtcaggaaaaccctctctgggctggtggcctggggcacatgggcactgcactgtcttccttcaaactatgggtgctcacatgggggaacattccaggcatttgcttcccgtgttaaacaggaccstctacaaaggcaatggtggtgtctatcctgtt

SEQ ID NO: 482959 - DNA, 623 bp, Homo sapiens
agctggtgcctgggcttggctgggaggccaagaaggcttcactcacaagcccgcccgtgtgtgctcctgcttctgccaacttctattggtcaaaaaggttgcaggacctgcctgaattcaagggaaggggaaatagactcttcttaaggagagacagcaaagccacaatacaaaagaacatgtgtgatggcagagagtgctgtcaccatctctggagacaaatctaccactctaactttcacttctttacaagctgagattaccctgcaaattggaatttttatatgtgaggaaaaattaatatttataggatccctaccatatgctgagtgctgtgctaactactttcacgtagaatttctcctttgctgcgacctatattttctgtagacctaatctctgggttcatttgaaccatctgctgatggaaaggcagtagctcatagctggtccgtccataaaggasgatgcatgacaattccgacaggtggaacctctctagcttccttccacacgcaagaacaaccctaaacttgttctctttgtccctggggatcacgggataccgacttgcattcctaaaacagctcatatcacactgttgttcatttggcctcccaggg

SEQ ID NO: 482960 - DNA, 607 bp, Homo sapiens
gcccctctcagttggcccctggggtgcctgtattgagtttctctctgtggatgccaaccatacatggctgatgacgctcctgacaaagcccagtggaggttttggttgcctatttcccctcttttttaagctctgtaccaaaattgattcagatcatcagatacaggcaccctgttcctactttgttaacttttctccaaaacacttcatagaaccctgagtcaacatcctagctacggctcctatggaagttcaaagcaagaaacaaaattatgtccacttttagaataattatgtgaactttttgttcttagtaaactgctataagcttaaaatgcatcagctttcccaagcttcctatctggcctgcttactgtgtaattgccatttttaatggtaacrtattttaactgtatcacatcactctagtagaagagatttgcagcaatatttacttctttggtcatattgttatcatgatgaataaacgggtatggtaacatcagaagattaaattctctctcttaatggaaaattaactctgaaaccagacattctagaatttctgtttcctggagcaatggttcctgatttgtgggcagcagag

SEQ ID NO: 482961 - DNA, 646 bp, Homo sapiens
gaatcattaatttacaacaaaatgctaaataccagtcccctccaggaaacagtgaagcagactttgcattccttagcttttttcttataaaagatattttagatccattttactgcatgaatcatttctcttccaaatccaatatgttaaacgatttcacagtatagcacttatcaaaacctacaycctggccaagtgcagtagctcacatctgtagtcccagcactttgggaagccgaggtgggcggatcacctgaggtaaggggttcgagaccagcctgaccaacatggtgaaaccccatctctactaaaaatacaaaaattagccggacgtggtggtgcatgcctgtaatcccagctacttgggaggctaaggcaggagaattgcttgaacccaggaggcggaggttgcagtgagccgagaccatgccactgcattccggcctgggtgacagggtaagactctgtctcaaaaacaaaaaacaaaacaaaacaaaaccctacatcctgtgccaggtcctagaatgattccacaatagtggtggtgtcccctgctgggtttgaccctgttctttatttcagctagtgtccgcagcaatgactctcagcagatgcttgtcacagcggagggcatgtttcatgctag

SEQ ID NO: 482962 - DNA, 646 bp, Homo sapiens
gaatcattaatttacaacaaaatgctaaataccagtcccctccaggaaacagtgaagcagactttgcattccttagcttttttcttataaaagatattttagatccattttactgcatgaatcatttctcttccaaatccaatatgttaaacgatttcacagtatagcacttatcaaaacctacatcctggccaagtgcagtrgctcacatctgtagtcccagcactttgggaagccgaggtgggcggatcacctgaggtaaggggttcgagaccagcctgaccaacatggtgaaaccccatctctactaaaaatacaaaaattagccggacgtggtggtgcatgcctgtaatcccagctacttgggaggctaaggcaggagaattgcttgaacccaggaggcggaggttgcagtgagccgagaccatgccactgcattccggcctgggtgacagggtaagactctgtctcaaaaacaaaaaacaaaacaaaacaaaaccctacatcctgtgccaggtcctagaatgattccacaatagtggtggtgtcccctgctgggtttgaccctgttctttatttcagctagtgtccgcagcaatgactctcagcagatgcttgtcacagcggagggcatgtttcatgctag

SEQ ID NO: 482963 - DNA, 646 bp, Homo sapiens
gaatcattaatttacaacaaaatgctaaataccagtcccctccaggaaacagtgaagcagactttgcattccttagcttttttcttataaaagatattttagatccattttactgcatgaatcatttctcttccaaatccaatatgttaaacgatttcacagtatagcacttatcaaaacctacatcctggccaagtgcagtagctcacatctgtagtcccagcactttgggaagccgaggtgggcggatcacctgaggtaaggggttcgagaccagcctgaccaacatggtgaaaccccatctctactaaaaatacaaaaattagccggacgtggtggtgcatgcctgtaatcccagctacttgggaggctaaggcaggagaattgcttgaacccaggaggcggrggttgcagtgagccgagaccatgccactgcattccggcctgggtgacagggtaagactctgtctcaaaaacaaaaaacaaaacaaaacaaaaccctacatcctgtgccaggtcctagaatgattccacaatagtggtggtgtcccctgctgggtttgaccctgttctttatttcagctagtgtccgcagcaatgactctcagcagatgcttgtcacagcggagggcatgtttcatgctag

SEQ ID NO: 482964 - DNA, 648 bp, Homo sapiens
ctgtagactactcagtgtggtgagtggtccgccatcccttcttctcaacacataaggggctgtgtgtgtgaaagtggtgacaagagattccatggagcaggggttcttgtcttgaaatgacttaaaatatgcctagagagactcttctgagaatcagatgaatggtgcagagacgtgccctccaggagtgcagagtgtgacttcacacatgaagtcttcattcaactccccagtcactcagtgcaaaaccttggttcatcccctatcaagtgccagatgtgtgtgaaataatagaaatacagagatatacarctcagtctctgcacttgagaatcccagagcccgagagggcagacagacgtgtgaacagagagctccagtgcaatgaggtagggatctggaatcactcccggatttctggtttgggtaactcagggatggcggtgcatttgtcttagctggagaccagaagaaaaggaggctgcaggggaagatggtgggtccagcccaggacatgtccagttagttgtgccttaagaggagattgacgaagacccttctctgagccagcactgtgctaggcttgagagcagcagagactgtccctgccctcaactaatgtagtatggagcagagtgagtctcacac

SEQ ID NO: 482965 - DNA, 628 bp, Homo sapiens
actagggtcagcaccctgcacccttcagcaaggccgtgccatacatttgcaagttagattcttgggtcacagtytgcattgcatcctggcatcccctggcctcactgaaggcttgttgcattgggtgccttgctcatgcactctctggctactgtgatgtggagagacttcagtgagtcaagacagaagacaggcaccaacactgcacctggcgagaggtttagacctgggaggtggccatggagaggagaatatgtagatgagataaattttagacacagagctatggatttgaattacatttttgaagtaagtacaaagatgtcccagagggagcatctctctccattaaatgtcctgaaaccagaagtcttcaccctcctcttcccagcccccatgacactgggtaggaggaatccttaattgtgacatcaccataccccaaagaaccacgcctactagcaagcacatcattacttatgtggatctcatctttcagtgcgggtggattgggttgtctaatcatcacgggcgccggtcataaatactgctgtctgggctgttttcaacagtcacgtgatgtgggaaacactgtcactcacctaagccatctgctcagaaccaggag

SEQ ID NO: 482966 - DNA, 627 bp, Homo sapiens
actagggtcagcaccctgcacccttcagcaaggccgtgccatacatttgcaagttagattcttgggtcacagtctgcattgcatcctggcatcccctggcctcactgaaggcttgytgcattgggtgccttgctcatgcactctctggctactgtgatgtggagagacttcagtgagtcaagacagaagacaggcaccaacactgcacctggcgagaggtttagacctgggaggtggccatggagaggagaatatgtagatgagataaattttagacacagagctatggatttgaattacatttttgaagtaagtacaaagatgtcccagagggagcatctctctccattaaatgtcctgaaaccagaagtcttcaccctcctcttcccagcccccatgacactgggtaggaggaatccttaattgtgacatcaccataccccaaagaaccacgcctactagcaagcacatcattacttatgtggatctcatctttcagtgcgggtggattgggttgtctaatcatcacgggcgccggtcataaatactgctgtctgggctgttttcaacagtcacgtgatgtgggaaacactgtcactcacctaagccatctgctcagaaccagga

SEQ ID NO: 482967 - DNA, 491 bp, Homo sapiens
ctctctggctactgtgatgtggagagacttcagtgagtcaagacagaagacaggcaccaacactgcacctggcgagaggtttagacctgggaggtggccatggagagragaatatgtagatgagataaattttagacacagagctatggatttgaattacatttttgaagtaagtacaaagatgtcccagagggagcatctctctccattaaatgtcctgaaaccagaagtcttcaccctcctcttcccagcccccatgacactgggtaggaggaatccttaattgtgacatcaccataccccaaagaaccacgcctactagcaagcacatcattacttatgtggatctcatctttcagtgcgggtggattgggttgtctaatcatcacgggcgccggtcataaatactgctgtctgggctgttttcaacagtcacgtgatgtgggaaacactgtcactcacctaagccatctgctcagaaccaggagcag

SEQ ID NO: 482968 - DNA, 470 bp, Homo sapiens
gctggcagccaccacaggcatggcggatgcatggctatgtcctgtgtggctcacttaccaggagcaagctgtctacccaggaatggcctctcccctccaccccgagtggtcagrgccggcctctcactgagcccccaaagctgacagggtcccctggatcatcaggccttgactactcaacccagagactgctaccccaaagtggggcttctgggcctacggcccccctcaccaccccaactccgccatggcgggagctgccattagagatttgcagctctatcccctcagggctcccgttcttctaccacagccaccaggagccacgctgaaagccatcatgtcccgagggtgacctgggctgcatgctctgcctggaccttcccaaaggcataagcctcagagctgaacaaacatggaatcaagatctgaaatgtggctgggcgcggtggctcacgcctgtaatccca

SEQ ID NO: 482969 - DNA, 581 bp, Homo sapiens
actgcccattctgtaagaagaaaatggtttctgcctccacttctcatcaatccgagtttatgttctgacttattttacatcatcagacccttcaactttatcaaatatattatcaaattcttttactttattaacttcttttatatgatcaaggttaccgcatttctaagctatgacttctgggctttgtctataggtcgatttcaacatagctcttatagtactatgattacaaaaacagtaccaggttggcccctcagagaagcaactgtattctcaagtcactaaacctaggctgcttgaagaagacacaagacttggggtcagagggattctcttactgcacacgccatcagcttctcaaacccatcagttgctgcaytttagtttaaattgtacatatttgggccatgactgccgtgttcagtttgttctttttcctggctccttcttgttctgcctttcatttctcatccaaagaagaaacacactcttcttttccatgtccttaaaatcacccagatttgtaatcagtggggaaggttctgaactggctttctggttcctgtgcagcccgcagc

SEQ ID NO: 482970 - DNA, 596 bp, Homo sapiens
ctttcagggcaccacactgcgctaattccactgttcgttctaccccatgccttcctgtctttcagattcctttctaattttgcatgtaatatgtcctcaaacaatctttgtctgaaagggtatttaattgatagtttgcctagttgtagaattgaaggttcaaaatcattttctctctgatcccattgacctctagcatctatgctgttgtaaattctgatgcaaatgcaaattctgatgctaatgcgattcccttttcttgcaagtgacctctttttttattttctggaagctaagatcttatcattggccttccgaaatttcataagggtattttaggatgtcctgccttccagacaaagacctgtattttccaacagcggttattttctccattttctaggactctgaatgatgacggctgggcctcctggcttgaccctctatggagactctgctgctgatctctgytgggccacttttaggttgtgacttctttgatctggtttagtcattagttcagtataatcctcttcccattttccaacacaaatctctgaccctgatgaactctttgtcatgttgatagggatttc

SEQ ID NO: 482971 - DNA, 602 bp, Homo sapiens
ctagatggttgtagtggaatccgtggggaggtgaggaggcagttgctctgtgcacattgaaatcccttatgagccagtgtcctgcaggaataacaagaacagatgtgtgttttggtgtttatcaaatgacttgacctctactatgttagcattgaggcaggcaggaaagaaatggttgtctacacacacctgtgtagacagttttctcatttgacagagtcagaaactgaggcccagagagaagggactcacccaaggtcacatggcagaaaatactggagtcagaagcagagccaggccttccaactctcaggcctggctcttgccttcatccctatggcctccgactgcaggcaggtcccaaagcggtggtgcccctagagtagctgaggacrctgttctgtccctggaactgacgcctccctggggactgtgggtgggagcagcaatgaagggagtgggtgtgatggtgatgagaaagaagaggaagggaaagcagggtctgagaatgaccctggggcaacaggagcctcttcagtccccacaaggggcagagggcagcagtgaatccagagagagcagccagtacaccctacccccag

SEQ ID NO: 482972 - DNA, 598 bp, Homo sapiens
ataggaatggaggaggaggaggaccagggaggagaggattgagggggcccccgagtgatagcccatgtgtgcgacctgacccgactccatgttcatgacaaccctgaggtgtttgtgctaggagaagggtgaagaaatggctcagagactgagtgacgcacctstcatggaattactgaccccctcactgagatcagaaacctgtcatcaccttagacaattcccttctgtcagccgatcaccttaactgtccagatgtataagcacgtttgccttctgaagttccccctagcctgtcttcccctcgcaccaccgctgctctcctagtccaggctctggtcatttcttctatggaccatgagcaaagcttccctggaaagaactgactctcagcctgttccctcatggcactacgtctgctgcaaacctaaggggtcccctttcaccaagaggaatctgggttcccagttatgtcctagtcacgcccgctgcagaccctcacagtgtgactctcaggtcctgtacccaagatgctatttaactccattccaccaagttcacttcctgtctccacatcacctcctccaagaagtcctcc

SEQ ID NO: 482973 - DNA, 598 bp, Homo sapiens
ataggaatggaggaggaggaggaccagggaggagaggattgagggggcccccgagtgatagcccatgtgtgcgacctgacccgactccatgttcatgacaaccctgaggtgtttgtgctaggagaagggtgaagaaatggctcagagactgagtgacgcacctgtcatggaattactgaccccctcactgagatcagaaacctgtcatcaccttagacaattcccttctgtcagccgatcaccttaactgtccagatgtataagcacgtttgccttctgaagttccccctagcctgtcttcccctcgcaccaccgctgctctcctagtccaggctctggtcrtttcttctatggaccatgagcaaagcttccctggaaagaactgactctcagcctgttccctcatggcactacgtctgctgcaaacctaaggggtcccctttcaccaagaggaatctgggttcccagttatgtcctagtcacgcccgctgcagaccctcacagtgtgactctcaggtcctgtacccaagatgctatttaactccattccaccaagttcacttcctgtctccacatcacctcctccaagaagtcctcc

SEQ ID NO: 482974 - DNA, 597 bp, Homo sapiens
ataggaatggaggaggaggaggaccagggaggagaggattgagggggcccccgagtgatagcccatgtgtgcgacctgacccgactccatgttcatgacaaccctgaggtgtttgtgctaggagaagggtgaagaaatggctcagagactgagtgacgcacctgtcatggaattactgaccccctcactgagatcagaaacctgtcatcaccttagacaattcccttctgtcagccgatcaccttaactgtccagatgtataagcacgtttgccttctgaagttccccctagcctgtcttcccctcgcaccaccgctgctctcctagtccaggctctggtcatttcttctatggaccatgagcaaagcttccctggaaagaactgactctcagcctgttccctcatggcactacgtctgctgcaaacctaaggggtcccctttcaccaagaggaatctgggttcccagttatgtcctagtcacgcccsctgcagaccctcacagtgtgactctcaggtcctgtacccaagatgctatttaactccattccaccaagttcacttcctgtctccacatcacctcctccaagaagtcctc

SEQ ID NO: 482975 - DNA, 433 bp, Homo sapiens
aggagagaattctacatgctgatgaagttgaacttgcttctgcctaatttctactgggytctaattcctttctgcggcaggacctacactcatctggcgcccgagggctttggtaaacggctaagagacattcgttgtggtagagagcggggaggacagcacccctggcctggtctgattccactgaaagatggggccatgatggtagctgattgctaaatttacataactcagttcatcgtcacaggagccctaagaggttgatacgaccatgagtccattttcactgaggaaaaccgaagaaaagagattgtaaatggccagagatgtatggctggtgaatggccctgtgtggaggcagggccaaggtgaatgctcctgctatgcagatgatgcagcccagagagccgcagccacctctgcgagtcccaca

SEQ ID NO: 482976 - DNA, 472 bp, Homo sapiens
ctgctgtcaccaactggtgaggcctacagtgatgcgtctcctatgccatgtrtgacacccaatgactgagtgctgtacacacaaggaatatcctcccgcggcgtagggcaccccaggcaacctgccttcaggtggtgaaaagtgcagcaagggccgaatgggcactgggaggtgcacacgcacagccagccctctgccaacggcaccgagttcacgcagtgtgcacgcgcggcctggtgtcacccacggtgtcactgccaccagtgtggaggaggaaggtgaggctggatgctgaggggagacgcgctgggctctagggatgcacctgtgtgaagtcacttccgcctcctgcaaccctgcgaaggagctctgctacccagacccacttaaaatacagggaaacagacccctaaagggaaagtgcctgcccaggtctcacccggcatgaggtggagctgcgttcaatcccagg

SEQ ID NO: 482977 - DNA, 627 bp, Homo sapiens
acctgagaccttgggcgagcctggcccctacctgggcctcagttccccttcggcagagcgaagttggactagaaggtctctgcggccgtgcagacgaattctcccggacgaatcgccgagccccagcctgcatgggagaccgtggccagcagggatgtccaggctgggttgggggaacagaggtagcagaagagttttcaggagaccagaattttccgttttcgcacagccaggactttcggctctcttgggggatcagcagggcaataacgataagtctccttaaggcccaggacctcaggagggggtgcacgacttcttttcaacccagccccggactctgatctcggattctggcccgcggctctgggtcaggccgcggaactatagcagcctgcagtcctggtcttgggtgtaggggtgcgctcctggtcccgcggctcagggatatgcagtgaccatgggttgttggcctgatgggacttttggcttgctaaaccaaagctcggttcggatakcccgggcgaagacgtccgctgctctgggccaggctggcagcgttcaggctggggcagagacgcggagtcgggcgctggctccaacaggcctggctcccacatcgaagac

SEQ ID NO: 482978 - DNA, 647 bp, Homo sapiens
ttccctgtaaattaattgtgacacattgagtggcggttcctcatgcctggaggcgtggctattttttcatctaatttcatttatgtttttttttgtgccaaactgccttttgttagaaaaaatatatatattcaacttgattaatttgggggaggataaacatgcattattttgtgtatgagttatcttcatattttggagtgtgcagaagtgattggctatttttgatgaccactaatacagtaaaatttggtatctcattatttaaayttattgatcagaaggaaagaaaaagcactgtgagaactgactgtaatgaaaagtctataaggtactaccttagcttaaaacatctaaatagatttctcacaacaattaagggtaaatatgtcccttggtacatgcacacaatgaacagcttggattgttgtatttaatttcttacacagtatgataaaagcaaactagtggaatttaaactttagtttaaagcaaagttcatgtctctatgataaaattcagtgaatcaaaagccagttttttcagccgacctaatatctcatttattttatgacacaatagatttgattggctctgccatttgagatatacagggctagaaataaactaaagtatgtgtaattcag

SEQ ID NO: 482979 - DNA, 647 bp, Homo sapiens
ttccctgtaaattaattgtgacacattgagtggcggttcctcatgcctggaggcgtggctattttttcatctaatttcatttatgtttttttttgtgccaaactgccttttgttagaaaaaatatatatattcaacttgattaatttgggggaggataaacatgcattattttgtgtatgagttatcttcatattttggagtgtgcagaagtgattggctatttttgatgaccactaatacagtaaaatttggtatctcattatttaaacttattgatcagaaggaaagaaaragcactgtgagaactgactgtaatgaaaagtctataaggtactaccttagcttaaaacatctaaatagatttctcacaacaattaagggtaaatatgtcccttggtacatgcacacaatgaacagcttggattgttgtatttaatttcttacacagtatgataaaagcaaactagtggaatttaaactttagtttaaagcaaagttcatgtctctatgataaaattcagtgaatcaaaagccagttttttcagccgacctaatatctcatttattttatgacacaatagatttgattggctctgccatttgagatatacagggctagaaataaactaaagtatgtgtaattcag

SEQ ID NO: 482980 - DNA, 647 bp, Homo sapiens
ttccctgtaaattaattgtgacacattgagtggcggttcctcatgcctggaggcgtggctattttttcatctaatttcatttatgtttttttttgtgccaaactgccttttgttagaaaaaatatatatattcaacttgattaatttgggggaggataaacatgcattattttgtgtatgagttatcttcatattttggagtgtgcagaagtgattggctatttttgatgaccactaatacagtaaaatttggtatctcattatttaaacttattgatcagaaggaaagaaaaagcactgtgagaactgactgtaatgaaaagtctataaggtactaccttagcttaaaacatctaaatagatttctcacaacaattaagggtaaatatgtcccttggtacatgcacacaatgaacagcttggattgttgtatttaatttcttacacagtatgataaaagcaaactagtggaatttaaactttagtttaaagcaaagttcatgtctctatgataaaattcagtgaatcaaaagccagtkttttcagccgacctaatatctcatttattttatgacacaatagatttgattggctctgccatttgagatatacagggctagaaataaactaaagtatgtgtaattcag

SEQ ID NO: 482981 - DNA, 647 bp, Homo sapiens
ttccctgtaaattaattgtgacacattgagtggcggttcctcatgcctggaggcgtggctattttttcatctaatttcatttatgtttttttttgtgccaaactgccttttgttagaaaaaatatatatattcaacttgattaatttgggggaggataaacatgcattattttgtgtatgagttatcttcatattttggagtgtgcagaagtgattggctatttttgatgaccactaatacagtaaaatttggtatctcattatttaaacttattgatcagaaggaaagaaaaagcactgtgagaactgactgtaatgaaaagtctataaggtactaccttagcttaaaacatctaaatagatttctcacaacaattaagggtaaatatgtcccttggtacatgcacacaatgaacagcttggattgttgtatttaatttcttacacagtatgataaaagcaaactagtggaatttaaactttagtttaaagcaaagttcatgtctctatgataaaattcagtgaatcaaaagccagttttttcagccgacctaatatctcatttattttrtgacacaatagatttgattggctctgccatttgagatatacagggctagaaataaactaaagtatgtgtaattcag

SEQ ID NO: 482982 - DNA, 551 bp, Homo sapiens
ttttcttcgttcagataatcttctataaaagctacttttactagcttaaatccattgcaaactttgcagtaataatgttttctaatttctcttcccccagttgattatgaattatactggacagaagaacaggatacattgaaaaatttcacacaaatatgtttttattcaagtagaaaactggagttttaggatttgacccaaattaaatccaaatattgaaatttcaattcaaagtgccatagtattgaactattaagtcttcccttctgaaataactagccattacatttttgcaaaacagcttaacttatgaaatataatatctgaaatccaaatatcatggcgaaagatcttaaacaaagtgagcccaattcaayacccatgtaactttggcaaatatcccctcagggtttcaaaggatatgaactgtggctaagtaaaaaaacctttcatctagaaagatcccataatgcccaacagtctgaagtgaatctgtctatgtgttagtactcaatacagggtaaaaacatactgctttcagggcagag

SEQ ID NO: 482983 - DNA, 545 bp, Homo sapiens
actgggttcctttcagggctcaagattccattttttttctcagtattttctcctacagaataggagtcttcttcatgctacaatgtgcactgtgtacagaaactgtgaatagagaagtagccrttcttcttgctaagtttctttcagaaggtggttccacatagatgactttcactctgaactcagtatcatggggcatgtgtgtgcccacacattgccagtttcagttgtgggcaaacagaactaatactctctcaccaagataaacatacaaggaaagcactctatctttgtgcagcatcatttgcatcctataaaataatggcttcttaaagccgacctgtcttatgggtggtttttaattagtccaagcagaacctaatgtggccactaatattccacttgctaaaacaaggacagtcgaattcgatctgtcatcattgattagatgcatgcagtcacccaatgctgtttgcccaagcatctgtaggcatagattccccagtgctgattccccaattcttgtaaggggcaggacttaatta

SEQ ID NO: 482984 - DNA, 606 bp, Homo sapiens
atcataaaaaaactttgatttagctgcaaatccaaaaagcttttttaaaataatgcttgataatctcagggtttagctccagatggatggttggatggatggatggatggatggatggatagatacctgtctatagataaagttggacattatcaytatgttgtagagtgacccaatctatttaggagttggggaagatcttgtggaggaaatgacatctaatttgtgatctaagaaacgttaaatttgaccaagcatgtgtctgtagcatggtaggaagagtgtggcagtgtatggtgagggggtgttccagataaaggaaatagtaagtgtaaaggcaaaagaaattagagggttttcagctttgcttggccatagagttcaaggtgaagaattccaagaaaagaagctggagggccaagcagagtcaagttgcttgtgggcttttttggctacctgagtgaaaacgtggttcagtgtatgtgcatgtctgttgaagggtaaaggagaatgaggaaatgatggcaaatgcacatggttaaaaagagaagacttaagcaaagagaaatatgtcaatttcccatggctacctcttggactagatct

SEQ ID NO: 482985 - DNA, 485 bp, Homo sapiens
tttaacttctgcaaaccgtgctctatatctgtaaaatggggatttaaaaattttctcacggaatattatgaagattacctttttagtgtatgcatgcacgttacctattaatggacctggaatagatgctccaatagtgtggaaataaatgaatattaaccaaaygaaaaaagcaaagagtatttattcagagactgctatagcaagaaagtcagctccatcagttacattttggcagagacttaaaggcccgcagaggagtgggaaagctgtgtagggttaaaaaaaaaaaaaaaaagggaaggcttcatctatgccctcattagagactgttggcctggggaagctataggcaggataactagaagccattggttagaggtgcatgtttgacttttttctgttggtctgaagttggaagcaaggacaaaaattaggaaagctgccagttattaatcaattctggtcatttggagctgattgtt

SEQ ID NO: 482986 - DNA, 580 bp, Homo sapiens
tatatgaaagatgaaaggttccaagattaatgagtggataaagaatgagagccagccgggcgcggtggctcacgtctgtaatcccagcactttgggaggccgaggcaggtggatcatgaggtcaggagttcaagaccagcctggccaagatagtgaaaccctgtctctaaaaattagccaggcgtggtggtgggcacctgcaatcccagctactcgggaggctgaggcagagaattgcttgaacccgggaggcagagactgcagtgagccgagatcacgccactgcactccagcctgggcaacagagcaagactccatctcgaaaaacaaacaaacaaacaacaacaaaaaagaataagagcccaagtcaatatttcttcaactggatcatagagtcattattggggtgtgtgtgtgtgtgtgtgtgtgtgtgtgtgtgtgtgtgtgyggagtaagagagttttttcaaaaaagtagagtcccacagaatcaaaccaaatagaaaaatgactaaataaataaatatatgtatacataaatagacaaaagacattatgtgtcatatatataaaattcagcc

SEQ ID NO: 482987 - DNA, 578 bp, Homo sapiens
gttgctgaagggggtggagatgctgccaatggcaggcccaagagactggttctcaggtcctttcaggggtgcatgcaagggtgtgtggcagctctgcaaatgaaggcaacagggccaccagttgtggcagtgggacccctaagaaatacacaggtgcacccrgtggctccactgctggaaggagcagggtattcagtgataactagcctttgaatttttaaaggacactgtttaaagagagaatgcacatttagatattatttgtagaataatttcaaattttggaagtaaattatattaataaaaattttatattacttttagttccatctgtgatttgaggttaggctccttaatttacgaatgtcacagggagtacattaaatggtgggaaacaaagttcctggactctaaaatagacagttctcagttgcctctctgtcactctttctagtctatgcaaaattttataatgattcagggacacactgacatggtagcctcatgtgatggactctaactctcagggctgctggactcctgttttaaatttcactgactttcctaaacttactaca

SEQ ID NO: 482988 - DNA, 578 bp, Homo sapiens
gttgctgaagggggtggagatgctgccaatggcaggcccaagagactggttctcaggtcctttcaggggtgcatgcaagggtgtgtggcagctctgcaaatgaaggcaacagggccaccagttgtggcagtgggacccctaagaaatacacaggtgcacccggtggctccactgctggaaggagcagggtattcagtgataactagcctttgaatttttaaaggacactgtttaaagagagaatgcacatttagatattatttgtagaataatttcaaattttggaagtaaattatattaataaaaattttatattacttttagttccatctgtgatttgaggttaggctccttaatttacgaatgtcacagggagtacattaaatggtgggaaacaaagttcctggactctaaaatagacagttctcagttgcctctctgtcactctttctagtctatgcaaaattttataatgattcagggacacactgacatggtagcctcatgtgatggactctaactctcagggctgctrgactcctgttttaaatttcactgactttcctaaacttactaca

SEQ ID NO: 482989 - DNA, 610 bp, Homo sapiens
aatcctaagacactaggagaatattttgagttatttaaataggtaccaaatgaaattatctgaagtgactagctaatccgcactaagcacacaatatcagattttgaatttcttgttctcagtaatgcatattttttacttgattccatcagacttattcctatgtactttccttttcttcctcattcttctctgtccctctcttctcttttccatgtgtattcttgtatgattcttctttcattttccttgttaaaaactgtagttattaactaaagaagagccattattgttctacttttctttggcgggtggtgggttctgaacctctytcttgtccttttaccaagctctttagtatctaaagtcattttgttttactgtaaccatgtattccccatagtagttgttgagggcaatgtatcttatttctgtctccaatctgtggcaaaatattcaccaggtttatctttatttctgcaccatcatccctgaaatttgtttcctttagccttgattgtaaataaattaacactattataacatccatggggagtctttgagcttttctgtatgcttgcaacccatctaatatcagagttagacttga

SEQ ID NO: 482990 - DNA, 506 bp, Homo sapiens
atgtccactaaactttgtgaagtaccgcctgacctattagcacatttcagcttccaaagagcagataatcagccccaattttaccatctgggtaatgctaaatgaggcccacttccagttaggttaatgaagctacagcagactgcatgcttctgcaaaccaacgctgatctagcaccttcaaaattccccataggaacccaggaagaagtagtattagtaaaatcactgaggtgtgagtgtgcaatccacatagcaatattaaattagccttcttaatcaagtgagtagctttgcaatttgtacatgaacaaaccctgctggaatttgagccasgaatccttgaaactaaaaactatagctccgctttttgtaattgaaggagaatcactgattacagagattacactagattcctaacttctttttcagtcacagaattattattaagcaagggcatcacagcatgtaactaaagagcatcttccacctgagtttctaagtccc

SEQ ID NO: 482991 - DNA, 559 bp, Homo sapiens
agacacgttttttaatgtcagcctgatctaacaccaaatacgtctattatcctgggatccacgtctgcctgtctgctacagacttgtgaatgagataatagtattgatttataacacatgtctatggagttacgatccaaagcactctaatgctatgaaatggatttaagaaaacattagagattttcatttgaaaatatgtctagtgcatgtagtcaaaagcacattgtacatgttatgtgctgtttcattttcytttctctcttcctctttttaaaatgataattcattagtgaagatattaaatagtactacagtataaaaagaggaacatcaaaaaaatttaaagcggggttttaagcatgatgaaattaaataaaccaaaatttttgtgtaaataatgctctgtggagttgtgttacgtagtgaccctgagtaatatctactattttagtatttttattatacttttaaaatgagcttaagacttgagataacttaaactttaaagacatgaatttaattgcactcttactaaatgagagcatatgaattttat

SEQ ID NO: 482992 - DNA, 610 bp, Homo sapiens
atgtgtgctttccatttcatactcagatttaatctaaattgcatatgaactatgtctattgagttttaaaagtgaatataagctactatcctcagcagaaaagaacaattagcacattcatgagctagagctcaatttatggttatattataatgaataaccatttcctaatttaatraaaccctatgccttaactgcaaatgttaatagataaaaatagtagctgaacttttcactggttgtgaaatacaaaatattaaattttacaaaacagttaaactattgaggaaacatcttattttcataccagtttcagtattctgctactaatattacacggtctaaaacatttcagaacaatactgtgataacatgaaaatgcaccttatctttaagtaaattttatctagttcagccaaaaggttctgataggaattcagaaacattatcagcaatatcttaaatactagttatcaagcttcttgtaggaggtacactattgggtactaatcagtattaatatctagacataaataattttaatttgtaaagatgattaaagttgatgttagaggtatacatagaatagtaattaacaaatttattaatt

SEQ ID NO: 482993 - DNA, 610 bp, Homo sapiens
atgtgtgctttccatttcatactcagatttaatctaaattgcatatgaactatgtctattgagttttaaaagtgaatataagctactatcctcagcagaaaagaacaattagcacattcatgagctagagctcaatttatggttatattataatgaataaccatttcctaatttaatgaaaccctatgccttaactgcaaatgttaatagataaaaatagtagctgaacttttcactggttgtgaaatacaaaatattaaattttacaaaacagttaaactattgaggaaacatcttattttcataccagtttcagtattctgctactaatattacacggtctaaaacatttcagaacaatactgtgataacatgaaaatgcamcttatctttaagtaaattttatctagttcagccaaaaggttctgataggaattcagaaacattatcagcaatatcttaaatactagttatcaagcttcttgtaggaggtacactattgggtactaatcagtattaatatctagacataaataattttaatttgtaaagatgattaaagttgatgttagaggtatacatagaatagtaattaacaaatttattaatt

SEQ ID NO: 482994 - DNA, 641 bp, Homo sapiens
ttcaccaatcaagctacttaacatacccataatctcaggtagttactttgcgtgtgtttgtgtgtatatgtgtgtgtgtgtacttgtgtgccaagaacacttaaagtcggccygcctagcaaaattgaaatatacaatacaatatggtttactatcaccacattgttctatgttagagttccagaatttatttatcttgtataactgaaattttgtacccctcgactaacatccaaagacaaacactttatttcagctgaacacattcatttacatttctatgtaacatttcttgatttttttcttgatagtccttatcttatcatcaaacatatatatggtgaacatggtgtctctcctctgatcttctgactgttgtgatgtaatagtcatcatttacattattagactattatggtgacttatgtaaatcataaatcatgttatttattgttcatgttatttattgatcatttctgtttctctaatgtttctgttccctctttctgaaatttctttagttagttgctagacatactggatcctataattatgtcattattattctgcaatagctagttgaaatagctttggctttttgttttgctttctgataattttttatcctattttgctctctt

SEQ ID NO: 482995 - DNA, 641 bp, Homo sapiens
ttcaccaatcaagctacttaacatacccataatctcaggtagttactttgcgtgtgtttgtgtgtatatgtgtgtgtgtgtacttgtgtgccaagaacacttaaagtcggcccgcctagcaaaattgaaatatacaatacaatatggtttactatcaccacattgttctatgttagagttccagaatttatttatcttgtataactgaaattttgtacccctcgactaacatccaaagacaaacactttatttcagctgaacacattcatttacatttctatgtaacatttcttgatttttttcttgatagtccttatcttatcatcaaacatatatatggtgaacatggtgtctctcctctgatcttctgactgttgtgatgtaatagtcatcatttacattattagactattatggtgacttatgtaaatcataaatcatgttatttattgttmatgttatttattgatcatttctgtttctctaatgtttctgttccctctttctgaaatttctttagttagttgctagacatactggatcctataattatgtcattattattctgcaatagctagttgaaatagctttggctttttgttttgctttctgataattttttatcctattttgctctctt

SEQ ID NO: 482996 - DNA, 551 bp, Homo sapiens
gcaccaatagttcaaaaacaacattaaaaaaagataggaggttaatagaaatgcaaatctcaagcctcactcagataaaataataagaaatctccacagtcaaagctaaatttctgaatcctatctaataatggattaaaggaattcattattgggtgtatcatgaaggagcatactctttatagacctatacagactctatgaraaaaaaatatattaccatagatcacagaaaatgtaatcatttaatatattgtttaggaattcagagttttaaattgaactgctacaaattaaattaaagatacagactttagaaaacaaaaagagaaacatagagaatacctgtctattttactctctagaggtatcaagttttgcgtgtctttgaatgattttggagtcaatatttagggaaagaaaatcaccttatatttcctctttaggtcagaaaaaaattgtagaaatgtggctatttcagggtggggtaggcaatatgtcttacggtagccagattcatgtctcagcatttattctctgtatttcagttc

SEQ ID NO: 482997 - DNA, 643 bp, Homo sapiens
ttataaatatgttcaatgattttggaaaggatggatattataatgagtgaacgaatagaaattctcatcaaatgaatggaatccataaaaatgaaccaaatggaaaatcttgaattaaaaagtataatatctgaaatgtaaaattatcttatgggcttaacagaaaatgggatattacagaagaaacaatcagtaagcttcaatacacagaaataaaaattataaaatcagtacagagagggaaaaaagtttttaaacattaacagaatctaagtgacccctgggtcacttcgtggtttaacatctgygtaactggaatctcagaaggaagacaaagagattggcagagaaataaatatccaaagatatggtggcttaaaactttccaaatctgatctgggaaaaaaaaattgatccctagaggaagctcaatgaatcccaaacagaatacacattaaaaaaatagaccctagatacataatagtcatatttctaaaaacaaaagacaaatttataaaaatatttgaagcaattcaatggagaaagaaaaatacttcaaatattacactgaaacatgttaatattaatatagaaaaaaatcatgaactacactgaattctagccacaaacaataattaaatct

SEQ ID NO: 482998 - DNA, 608 bp, Homo sapiens
cttcatatctattactgatagaagctttgagatgaggatttaaatactactttatatttatttcttaagctcagccacaaagcattttcacacgagacattcagcaactctgaaagggctacttcttcccagccatttgyatttggtcaaacttccttctttccttgctgtttatgactgtaacaagtggcataatatgaaggactgaaatagggaggttgccaacttttcaaaactttttctggaagaaatataatttagtaggaataatatatccaaaagtaatactcaaaaaagggccctgaaaaccctcttcagaaatgtatgtgggtaatatatttctaaggattgtgatttgtacagtgcaaaatccatgggcagttcaaaaaagttggaccaggaagaaaggaagccatttccagcacaagacagtgtttcctaggctgcagaattataaggtttgaatgtgacttgttggtcttcctgtactcttttcttattctaagaagagtttcaaaaataaatgagaatatggttataaaaaacaataaaatatacccattctcaaagagtacatttcatttacttctgaataaaagtcttaacat

SEQ ID NO: 482999 - DNA, 592 bp, Homo sapiens
tacagaatgcacaaatactattatatgattctcttattctctcatatatacaagcaacctgtccactgttgcataaggaaaacacagacttatatggaataaaagacactgccctgcatttggtataggaggcagcagagaagtattttactgtcacactatctcaaaaaagtcagctttcttcccatcaagaaggaaccaaaatcagagataagtcaactctggagcattctaagccatctaagccgtaataaagatattatgattaaattatataatatattgtcaatttctgaaacttctaactataaccacatctattcctcagatggaaagaaggcagggagagagggagaaaattggaacagaagaatgaactgctcacatctgcccatattacctcctttatttgtaatggtggcaaaggaagggagcagcgtttctcaagtctccacatgcagagttctccagcaatttgccccagaactgttttatatggtttmttgtctctcacaaaggcacctcccttaatccctccctccaaattaggggcttcaaaggtatctctggttgactgagccactgatatatt

SEQ ID NO: 483000 - DNA, 474 bp, Homo sapiens
ctgtaacatagtcttggttctgagggatactctgctgactggatgatcgaaacaggagtaatgggatgtttttgttctagctaaagcatcaaaggcctgttttgccaacaatagcaatcattcatctgtgtcctataaaatgggtgtgttttggggggagggacaagagttagacttgagagaaaaaatttctttgggaagatgattgggatgctatgccatttttcctgctctctcaacatttcacatagaagaatatctcatccatcacatgccaagtggaaggcgctttactgggaacacttcatgagcttcacatatgctcccagagtatggagtgctaaacatgccttagaaaaatgaaaaggaagagctacctctgasagcacagaaaagtacaagaggaaggcaaggatgggtaagaaagagaataggtgcaagcctaaggtatgagagagaaaatttaaaagggag

SEQ ID NO: 483001 - DNA, 643 bp, Homo sapiens
gaatgcagggtggttttaacatcttaaaattggtgcagtttaacattagcctactgaaaaggaaaacccataagatcatctcaattttgtcaaatgcagaaaaaagcatttgacaaaattcagcatccattcagataatacctctyagcaaactaggaaaagaagataatttcttcaacctgagaaaaggcatctttgcaaaacctacatcatatttaatagagaaagtctgaatgttctctttttaaccaaggttggctttatgagcacatgacttgtgcagtctggaaattcttaacaattttatttattcatttatttatttgagacggagtttcgctcttgctgcccaggctggagtgcaatggcgcgaccttggctcactgcaacctccgcctcccgggttcaagcgattctcctgcctcagcctcccaagtagctgggattacaggcatgtgccatcacgcctggccaattttgtatttttattagagatgggatttcaccacgttggccaggctggtctcaaactcctgacctcaagtggcccactcgcctcagcctcccaaagtgctgggcaggattacaggcgtgagccactgtgcccagccaacagttttatttttgaacttatgttttgcag

SEQ ID NO: 483002 - DNA, 513 bp, Homo sapiens
gggatgaaggacctgctggaggcacagaaaggagctcagtgagagagagcagctggcgctggttcaggcgttcagccaatgttactgaggacctgcgccgtgttgggtgctgtgttcctagctggggcgtagtgttggcagaagtgagacctgtggatcagggctggttaggggagaccatgacaascttgggtgttcacattgactttagcgttttccactcctggtcccgccataaggtctcctggaaacttttcagcaataccagtgtctgggcctctggttccacttttgtggactctgcctgggcataactccccaggtgattctaaggcacagccaaagttgggatctgctgagtgagggtgaagtgagcacctgcaggtggtgctcatcaagacagtggaggctgaggaactggaatttaggagaggtgatagttcaccagggccttgaacttgaattttggaatttggaagtctctgtcatgtgactaagagagtgcattgagag

SEQ ID NO: 483003 - DNA, 600 bp, Homo sapiens
gctgggatgaaggacctgctggaggcacagaaaggagctcagtgagagagagcagctggcgctggttcaggcgttcagccaatgttactgaggacctgcgccgtgttgggtgctgtgttcctagctggggcgtagtgttggcagaagtgagacctgtggatcagggctggttaggggagaccatgacaagcttgggtgttcacattgactttagcgttttccactcctggtcccgccrtaaggtctcctggaaacttttcagcaataccagtgtctgggcctctggttccacttttgtggactctgcctgggcataactccccaggtgattctaaggcacagccaaagttgggatctgctgagtgagggtgaagtgagcacctgcaggtggtgctcatcaagacagtggaggctgaggaactggaatttaggagaggtgatagttcaccagggccttgaacttgaattttggaatttggaagtctctgtcatgtgactaagagagtgcattgagaggcctggtccatgacctgccatggtccttccagaccagagtctctcaggacaagaagaaggaaaattggaaaggactttaaatct

SEQ ID NO: 483004 - DNA, 543 bp, Homo sapiens
tagtggacttgttggttttcaagtctacataggctgacctgaataagtcattttgaccccattttggtactgatgttggtattggcatccttaaacctttcctcttagactcattcgattctccagagaaggaaatggttgtctggctgccagtattcttagagcccaatcggggaatagcctgagagactggacatcagcatttaaaataaccttcccggccggygcggtggctcatgcctgtaatcccagcactttgggaggctgacgtgggcagatcacctgagattgggagttcgagaccagcctgaccaacatggagaaaccccatctctactaaaagtacaaaattagccaggcttggtggtacatgcctgtaatcccagctactcgggaggctgaggcaggagaatcgcttgaacccgcgaggcggaggttgcggtgagccgagatcgcggcattgcactccagcctgggcaacaggagtgaaactccatctcagaaaataaataaataaataaccttcctctccttggtttgata

SEQ ID NO: 483005 - DNA, 417 bp, Homo sapiens
tgggctccgggacctggtgctcctggtgtggatggcaaatgaagaactgtatctcattttcatgcaacttgtacctatttgtcccactaattttgcaaagaaaagaagcagagagaggaggaggatgccctctgtttgcccacattagtgcagatcagtcactggaggacctgcttctgggaggatraatagcccatgtggaggggccctaccatcaggtggtcaggaaagcttggtaaccaggccaaaagcatcgtcgtcagtaccagaggatgcttggtgaggtgacttaggcagggagggtggggtgaaggctcagttggcctaaggccaggatataaagtgagtgacgtagcatttttccaggggaaagtgtccttacataccccatccaaaggtttaatatgactctaagca

SEQ ID NO: 483006 - DNA, 540 bp, Homo sapiens
tggggcttctcgcttcattacagtcactgccctttataaatatttatagcagttcttctgctaaaaataacatcctggagcccagggaggaggaaaaaataaatgaaaatcaccgggaacgggacttgatcacgtgtgcccgagcccaatcgacccctaaggcgagaggctgcgagcagcgcccccggcggcgcgccccctggcggccacggagtccgcggcgcagagaccctcccgccctctccgaggaggctcagcccggctgcggcgcgcggytgggtctccgcccctccctcccgggctgcaggcggcggcatcacacggggcgggcggaagcctaaccagtgtgagactatttttagcaccgtggccagggtgtgaatgtctacagagccgagcaaggcctgacgctttctttgcacgctggaagaaacctgttggtttttaaaggtcaaagataaggaaacttgtgcccccacgttcaggagcaccccacgtgctggccagacgccaggaagtgtttcatcaggtcacaaacac

SEQ ID NO: 483007 - DNA, 562 bp, Homo sapiens
  misc_feature (1)...(562): n = A,T,C or G
ctcccaaagtgctgggattacaggcatgagccacygggcccggcccatttttgttctttaagtggatttaatttccatcttgagttcctacgctgtctgaactggtcacttaatctaggcatttccaggcaaactcgaaaccagccctcagagattcttatcctgcttcctgtgccctgagatttgcctattctggacattttatataaatgggatcatacgatatgtggtcttctgtgactggcttctgtgactggcttcttgcacgtagcatactgttttctttcttttttttttttttttttgagacagagtctctttctgtcatccaggctggagtgcagtggcgctatctcagctcactgcagcctctgcctcccagattcaagcaattcttctcccttggcctcctgaattgatggacatttgaattgtttttactttttggctatgtcgaataacgctgctatgaaacattggggtcagatttttgtgtggnacatgtttcatgtctcatggatatatacctaggaatggaantgctgcagtctgtccaaagcag

SEQ ID NO: 483008 - DNA, 614 bp, Homo sapiens
ggaaatatatggaaacatacatatacaaacatgygcatatatatagtcacacccaaatgaacacataaatatttatagatatgtacacaaatatatgtacacaaatatatctcattttcctgtcacttgacctagtggagaatcaatgacaacccaggaacaaaaattaaaactcatatttaatacattatataatatttgtcttaatcttagaaatatattttagaatatgccttgagaggaaatatttatctcaaattcagcaattaagcatttttctgtatttcttctataaaatggaattagaattaattacacattttaaaacattctgggttgggtatattttcaattatttctacaagtcattatatctatctacttttctatctataatgagaaattactggaatgtcatatatgatatgcataatggaaaaatcatgcataatttgattcatctgtcagtgacaatattttaatttttattacacttaagttgctttttgaaaaataatgagcagacataatatttatctttaatcttaaaacaaagatataaatcattatcttttaataaaactgaacccagagttatctcttattagatgcag

SEQ ID NO: 483009 - DNA, 526 bp, Homo sapiens
ttactaatgtagttacatgaaaaagtgtctctacatcatgctgattatataatttttataaaacatctttataattaaaaaataaaatatctacataaamttatttttattcaagccaaaaacaaaataccttaaaatggataccatatttgcaattttatctatcatttgaagtttcattgtataactaaaagacacactactcaaaattgatgtagtcttgcacattgttataggtccctgtcctgtcttagattttcttgtactttgccaagagaaaatccaataaatgtaattcctacaatttgcaaacacatcatactattaaatttaactgctaagagtttttcttatggttgggatttagataggatagaaaagatcttttatcttgggttcacacatgaaaaatcagacaaattaaaacttaccccatagggctaatgaagagtggtgaatttaacaatgtcttgatgaactgaatcccagaaagaaacaagcccttggtgtgtaaactgagattcat

SEQ ID NO: 483010 - DNA, 526 bp, Homo sapiens
ttactaatgtagttacatgaaaaagtgtctctacatcatgctgattatataatttttataaaacatctttataattaaaaaataaaatatctacataaacttatttttattcaagccaaaaacaaaataccttaaaatggataccatatttgcaattttatctatcatttgaagtttcattgtataactaaaagacacactactcaaaattgatgtagtcttgcacattgttataggtccctgtcctgtcttagattttcttgtactttgccaagagaaaatccaataaatgtaattcctacaatttgcaaacacatcatactattaaatttaactgctaagagtttttcttatggttgggatttagataggatagaaaagatcttttatcttgggttcacacatgaaaaaycagacaaattaaaacttaccccatagggctaatgaagagtggtgaatttaacaatgtcttgatgaactgaatcccagaaagaaacaagcccttggtgtgtaaactgagattcat

SEQ ID NO: 483011 - DNA, 492 bp, Homo sapiens
catataactggctatatctccctaattggctatataaatttcattaatgtcattgctaacttatagagtagtaacacataaaggatcttgactgctttcaaatactatggataataaaaaaataattaaacttgccattccactttgtgtatttaagtattataactaattmattaagctatgttgactattatgaagtcacaggcaagcagaaagaaatggtcttgatcaagttctagtcagtagtcctgtggtaaactgactacacgatgcatgtatctgcttcctgttgtttgcctggattcatgtgagaggtttccaccaggggatgcatctgtagtctgtcaatctatgtacatagatattgtaaattgatctgaccacattctagaactgcagattaatttacttgccattggtacacttggtcttataactcagccacttactcagcctaatcctaaagttattccttcctgtgaattggagaat

SEQ ID NO: 483012 - DNA, 492 bp, Homo sapiens
catataactggctatatctccctaattggctatataaatttcattaatgtcattgctaacttatagagtagtaacacataaaggatcttgactgctttcaaatactatggataataaaaaaataattaaacttgccattccactttgtgtatttaagtattataactaattcattaagctatgttgactattatgaagtcacaggcaagcagaaagaaatggtcttgatcaagttctagtcagtagtcctgtggtaaactgactacacgatgcatgtatctgcttcctgttgtttgcctggattcatgtgagaggtttccaccaggggatgcatctgtagtctgtcaawctatgtacatagatattgtaaattgatctgaccacattctagaactgcagattaatttacttgccattggtacacttggtcttataactcagccacttactcagcctaatcctaaagttattccttcctgtgaattggagaat

SEQ ID NO: 483013 - DNA, 402 bp, Homo sapiens
agatggagctgttttgcatggcactacggtggtggatacaggactaagcatttttcaaaacccatagaactgtacaatacaaaagatgaactttatggaaattggaaaagaataaaaacaaaagcaggatgtcaggaaatcccaggatggattgcagacaagaaaaatgaacccaactgtattataaatgtataacataacttcactgaagggrttgaagagaaaaataacaaacctaagtaactttggcaaccagtgttttgactagatacaataaaccaggaagggaagaataaaccccgtggggtataactagctgagaaatatcagtgtttaagttaacatagacatgaatatataaatacagaaataactatagatgtatgtatttatgtatgggtt

SEQ ID NO: 483014 - DNA, 402 bp, Homo sapiens
agatggagctgttttgcatggcactacggtggtggatacaggactaagcatttttcaaaacccatagaactgtacaatacaaaagatgaactttatggaaattggaaaagaataaaaacaaaagcaggatgtcaggaaatcccaggatggattgcagacaagaaaaatgaacccaactgtattataaatgtataacataacttcactgaaggggttgaagagaaaaataacaaacctaagtaactttggcaaccagtgttttgactagatacaataaaccaggaaggsaagaataaaccccgtggggtataactagctgagaaatatcagtgtttaagttaacatagacatgaatatataaatacagaaataactatagatgtatgtatttatgtatgggtt

SEQ ID NO: 483015 - DNA, 402 bp, Homo sapiens
agatggagctgttttgcatggcactacggtggtggatacaggactaagcatttttcaaaacccatagaactgtacaatacaaaagatgaactttatggaaattggaaaagaataaaaacaaaagcaggatgtcaggaaatcccaggatggattgcagacaagaaaaatgaacccaactgtattataaatgtataacataacttcactgaaggggttgaagagaaaaataacaaacctaagtaactttggcaaccagtgttttgactagatacaataaaccaggaagggaagaataaacccygtggggtataactagctgagaaatatcagtgtttaagttaacatagacatgaatatataaatacagaaataactatagatgtatgtatttatgtatgggtt

SEQ ID NO: 483016 - DNA, 620 bp, Homo sapiens
ctctgccttttctgttcttattgttataataaattctggttcttatcattacaatattcaaatgtcccagcactagtacagtatgtagcagaaaggcagttttcatattttctcctagaggttgtgagaacatgcaaatgaatgatgtgtgaattgcatgtattkatgtaagccgtcttacatcccctctgaaaaaatattggatcaaaattacaaaagcaaatatattaacaaataaagaaagaaactttggagatgcctggtacataaatattttattaagactaatgtcaagcaaagatattggaaaagaataaaggaacatagcatataacctgctaaaacagaaggatcaaatcagaatatatttcagtgggctcaaatctcagagatttagcttatctaaaagaaatatggggattcacagaaaagctggaacatttgatttcacactgaaattgcaaaaaaaaaaaatgtagaaaagtgatagctttggacataactgaatctataaggaaacaacaattatatagttatatatagtgactatacatgggagttagaaaataataaataagaaaagcaatgcagattataattataaagaaggatgaaaacac

SEQ ID NO: 483017 - DNA, 620 bp, Homo sapiens
ctctgccttttctgttcttattgttataataaattctggttcttatcattacaatattcaaatgtcccagcactagtacagtatgtagcagaaaggcagttttcatattttctcctagaggttgtgagaacatgcaaatgaatgatgtgtgaattgcatgtatttatgtaagccrtcttacatcccctctgaaaaaatattggatcaaaattacaaaagcaaatatattaacaaataaagaaagaaactttggagatgcctggtacataaatattttattaagactaatgtcaagcaaagatattggaaaagaataaaggaacatagcatataacctgctaaaacagaaggatcaaatcagaatatatttcagtgggctcaaatctcagagatttagcttatctaaaagaaatatggggattcacagaaaagctggaacatttgatttcacactgaaattgcaaaaaaaaaaaatgtagaaaagtgatagctttggacataactgaatctataaggaaacaacaattatatagttatatatagtgactatacatgggagttagaaaataataaataagaaaagcaatgcagattataattataaagaaggatgaaaacac

SEQ ID NO: 483018 - DNA, 620 bp, Homo sapiens
ctctgccttttctgttcttattgttataataaattctggttcttatcattacaatattcaaatgtcccagcactagtacagtatgtagcagaaaggcagttttcatattttctcctagaggttgtgagaacatgcaaatgaatgatgtgtgaattgcatgtatttatgtaagccgtcttacatcccctctgaaaaaatattggatcaaaattacaaaagcaaatatattaacaaataaagaaagaaactttggagatgcctggtacataaatattttattaagactaatgtcaagcaaagatattggaaaagaataaaggaacatagcatataacctgctaaaasagaaggatcaaatcagaatatatttcagtgggctcaaatctcagagatttagcttatctaaaagaaatatggggattcacagaaaagctggaacatttgatttcacactgaaattgcaaaaaaaaaaaatgtagaaaagtgatagctttggacataactgaatctataaggaaacaacaattatatagttatatatagtgactatacatgggagttagaaaataataaataagaaaagcaatgcagattataattataaagaaggatgaaaacac

SEQ ID NO: 483019 - DNA, 620 bp, Homo sapiens
ctctgccttttctgttcttattgttataataaattctggttcttatcattacaatattcaaatgtcccagcactagtacagtatgtagcagaaaggcagttttcatattttctcctagaggttgtgagaacatgcaaatgaatgatgtgtgaattgcatgtatttatgtaagccgtcttacatcccctctgaaaaaatattggatcaaaattacaaaagcaaatatattaacaaataaagaaagaaactttggagatgcctggtacataaatattttattaagactaatgtcaagcaaagatattggaaaagaataaaggaacatagcatataacctgctaaaacagaaggatcaaatcagaatatatttcartgggctcaaatctcagagatttagcttatctaaaagaaatatggggattcacagaaaagctggaacatttgatttcacactgaaattgcaaaaaaaaaaaatgtagaaaagtgatagctttggacataactgaatctataaggaaacaacaattatatagttatatatagtgactatacatgggagttagaaaataataaataagaaaagcaatgcagattataattataaagaaggatgaaaacac

SEQ ID NO: 483020 - DNA, 595 bp, Homo sapiens
ctgatgtttttaaatatttttagaaatgtgtctggttatattgctcaggctggtctccagctccaagcctcaagtgatcctcctgcctggcctgaccaagtggttgtgattacaggcatgagccagcacacccagctctttccagttttttttcattgcrattgatacttccctatttcaccaacctcattgctctttcagtctccagttctcccctgtaactatcattctccaatttgcagtccgagttcttttcttagaacaaaaacgtgattgtgtccttcactgggttaaatgcttcagagggtccacattgtcttccagatgagatccaaactcttcaatgcgtcttacaaggcccttcatcatgtgaccccatttatctctcctgtctcctgcctgctttctggattctgccataggctccacctggaacattctttcttccctacctttctttgggtaactttccctgaggccttatgctggattattgatgccatgctatgcttttcccttgctctgtcttcctccatcctggaatttggaatattgggctgtatttgcttatctgtcatctacatattctccttga

SEQ ID NO: 483021 - DNA, 462 bp, Homo sapiens
ttttaaatatttttagaaatgtgtctggttatattgctcaggctggtctccagctccaagcctcaagtgatcctcctgcctggcctgaccaagtggttgtgattacaggcatgagccagcacacccagctctttccagttttttttcattgcaaytgatacttccctatttcaccaacctcattgctctttcagtctccagttctcccctgtaactatcattctccaatttgcagtccgagttcttttcttagaacaaaaacgtgattgtgtccttcactgggttaaatgcttcagagggtccacattgtcttccagatgagatccaaactcttcaatgcgtcttacaaggcccttcatcatgtgaccccatttatctctcctgtctcctgcctgctttctggattctgccataggctccacctggaacattctttcttccctacctttctttgggtaactt

SEQ ID NO: 483022 - DNA, 595 bp, Homo sapiens
ctgatgtttttaaatatttttagaaatgtgtctggttatattgctcaggctggtctccagctccaagcctcaagtgatcctcctgcctggcctgaccaagtggttgtgattacaggcatgagccagcacacccagctctttccagttttttttcattgcaattgatacttccctatttcaccaacctcattgctctttcagtctccagttctcccctgtaactatcattcyccaatttgcagtccgagttcttttcttagaacaaaaacgtgattgtgtccttcactgggttaaatgcttcagagggtccacattgtcttccagatgagatccaaactcttcaatgcgtcttacaaggcccttcatcatgtgaccccatttatctctcctgtctcctgcctgctttctggattctgccataggctccacctggaacattctttcttccctacctttctttgggtaactttccctgaggccttatgctggattattgatgccatgctatgcttttcccttgctctgtcttcctccatcctggaatttggaatattgggctgtatttgcttatctgtcatctacatattctccttga

SEQ ID NO: 483023 - DNA, 512 bp, Homo sapiens
tttctctactctcatcctttggtagacatatattaaatgatmacagtgcattttagaaataatttttatgagactattttaaatctgtgattgaatatcttgcttaagggttatctttttgcaggggagggattctagtcttttagcaaaattctagaaagttttttccagaaatatcccacgaaaaaaataggtaaatataaaataagccatgagcaatttcagctgcaagagttactgaatatagaaactaatcaaatatattgtgaaaaagaataaaagtagggcttcccagtaaatgacaaagatttagtgcaggtgtaaggaggcccagaaaaaggccaggcaggctggagaagtgagacagctggccaaggcccttctgacgggtggtgtgcaggtcattcctgttccttttgctccccatgctttgcctctctccttgactcagaagtcagaaagataaaccatctctccaaggtctcaaactgtggcttggaggtgaggtgctt

SEQ ID NO: 483024 - DNA, 512 bp, Homo sapiens
tttctctactctcatcctttggtagacatatattaaatgatcacagtgcattttagaaataatttttatgagactattttaaatctgtgattgaatatcttgcttaagggttatctttttgcaggggagggattctagtcttttagcaaaattctagaaagttttttccagaaatatcccacsaaaaaaataggtaaatataaaataagccatgagcaatttcagctgcaagagttactgaatatagaaactaatcaaatatattgtgaaaaagaataaaagtagggcttcccagtaaatgacaaagatttagtgcaggtgtaaggaggcccagaaaaaggccaggcaggctggagaagtgagacagctggccaaggcccttctgacgggtggtgtgcaggtcattcctgttccttttgctccccatgctttgcctctctccttgactcagaagtcagaaagataaaccatctctccaaggtctcaaactgtggcttggaggtgaggtgctt

SEQ ID NO: 483025 - DNA, 512 bp, Homo sapiens
tttctctactctcatcctttggtagacatatattaaatgatcacagtgcattttagaaataatttttatgagactattttaaatctgtgattgaatatcttgcttaagggttatctttttgcaggggagggattctagtcttttagcaaaattctagaaagttttttccagaaatatcccacgaaaaaaataggtaaatataaaataagccatgagcaatttcagctgcaagagttactgaatatagaaactaatcaaatatattgtgaaaaagaataaaagtagggcttcccagtaaatgayaaagatttagtgcaggtgtaaggaggcccagaaaaaggccaggcaggctggagaagtgagacagctggccaaggcccttctgacgggtggtgtgcaggtcattcctgttccttttgctccccatgctttgcctctctccttgactcagaagtcagaaagataaaccatctctccaaggtctcaaactgtggcttggaggtgaggtgctt

SEQ ID NO: 483026 - DNA, 512 bp, Homo sapiens
tttctctactctcatcctttggtagacatatattaaatgatcacagtgcattttagaaataatttttatgagactattttaaatctgtgattgaatatcttgcttaagggttatctttttgcaggggagggattctagtcttttagcaaaattctagaaagttttttccagaaatatcccacgaaaaaaataggtaaatataaaataagccatgagcaatttcagctgcaagagttactgaatatagaaactaatcaaatatattgtgaaaaagaataaaagtagggcttcccagtaaatgacaaagatttagtgcaggtgtaaggaggcccagaaaaaggccaggcaggctggagaagtgagacagctggccaaggcccttctgacgggtggtgtgcaggtcattcctgttccttttgctccccatgctttgcctctctcyttgactcagaagtcagaaagataaaccatctctccaaggtctcaaactgtggcttggaggtgaggtgctt

SEQ ID NO: 483027 - DNA, 375 bp, Homo sapiens
cttctgttaacaacatgcctctctgtgaggtgtgtgatgaggatctctgggccagcatagcccttccttgaaaggaagttggacaccaacagcttcaagaacggcaaggagcacagcaggttcctactccagcttgcgatgtgatcattgcctgaagcttcttctcttgttaattagagaacctgattcttctaaagtgtctccactctcctttataacatacagacacatgctttccctccttctcccccaaatcctgatactcwcatattcttcttaccattcccttcctttccatggcccaggagcatttcccatttgaaatttctgagtttctcagactgaatgaagacttagggacctttttaggatata

SEQ ID NO: 483028 - DNA, 521 bp, Homo sapiens
aagttttgaaagtgtccataataagcatgaaaacctgaaaacccttrcagtgttgtcacatgaatcaaacaatgagattttcagtgtccctctccagcattcaggtctgcaaaaagtgacagcatgcttgagtcagatttgacagtaggtcctaagactgcctaccctaaatttattagcatgaaaaatagaaaaagtaggaaatttgagatagggagaccaaactttgctcataatatcaaaccatttagttcttacacagttgtggcccctgagaggtttaatcctggcaggtaggagtaagaggcacaggtgtgtggtccttcagtgtgtgtaaagactctttccccagagatgctcatacagcaccatccccaagaaaaagatggtaattccagcaatggagtaattgttggaggatatgggatgtagccccacgtgagcagattggcctttctccagaccaccagttgagagaagtttcattttataatttgcatgctggatcatatttgttaact

SEQ ID NO: 483029 - DNA, 574 bp, Homo sapiens
atttattagagaaagtaggaaagtatgttgcaaggaagcagtgggcaggccagcaagagaagagctgagcgcaaagagataaagggttactggggattttataggatggtacttgtgctgtgtgctggagagggcttcgtacagtaatgataatgccaaagttacagtgagctaacttgcattttccaatcagctgagtgtctgatgatagctgggtataggaagattgtgagttatttgcccaggagggctatgtgtcctggaccatgaagaaaggcagattygtagcttatctcctttttctttctgttttcccctgctgctgccagactgacttctttttcctcattaggactccacaggttatattcatggggaaacaatagtaaactacttgcataagttttctcagccccacacacctatccctgttcaagcccagtgaaatgttctgtattttatagccttcaaccagccatttgccaagcagctattggactgtctcccatcccggatacttaagatgacttccttccattaactgaaacattgatttgagacaatcactttgcaa

SEQ ID NO: 483030 - DNA, 574 bp, Homo sapiens
atttattagagaaagtaggaaagtatgttgcaaggaagcagtgggcaggccagcaagagaagagctgagcgcaaagagataaagggttactggggattttataggatggtacttgtgctgtgtgctggagagggcttcgtacagtaatgataatgccaaagttacagtgagctaacttgcattttccaatcagctgagtgtctgatgatagctgggtataggaagattgtgagttatttgcccaggagggctatgtgtcctggaccatgaagaaaggcagatttgtagcttatctcctttttctttctgttttcccctgctgctgccagactgacttctttttcctcattaggactccacaggttatattcatggggaaacaatagtaaactayttgcataagttttctcagccccacacacctatccctgttcaagcccagtgaaatgttctgtattttatagccttcaaccagccatttgccaagcagctattggactgtctcccatcccggatacttaagatgacttccttccattaactgaaacattgatttgagacaatcactttgcaa

SEQ ID NO: 483031 - DNA, 572 bp, Homo sapiens
taccctgcataagcattaccctgctatgtttaaataaactaaaagcaaaagcactcgagattttagtgagtgtgcactgaaagtgtgatgatatttgaaacactgaaaatagctcacaggttaaccatcaactgtcctccctacacacacacacacacacacacacactcaattttggttttgttttgagacagagtctcactctgtcacctaggctggagtgcagtggcaaaatctcagctcactgcaacctccgcctcctggcttcaagcaattctcctacctcagcctcccgagtagctgggaccactgccatgcaccaccatgcccggctaatttttgtatttttagtagagatggggtttcaccttgctggccaggatggtctcaaacttttgacctcaagtgatctgcccgcctcggcctcccaaaatgctgggattacagacgtgagccactgtgcctggcctatacacactcaattctacctatactacctacaatgatytctggttagaaaccacagcccagggcagcacaggctcagataaatccaaagaagacaagggtaa

SEQ ID NO: 483032 - DNA, 655 bp, Homo sapiens
ctgcccctatcatcaagaagagaatgtgagcatcttcaagttaattattcttttctacccctaaaattagctattaatttccttgaacttaaagggtataaaaattactgtttttaattatcttgtatctgtttaatgctcagcagtgtcttaggagctgtttagagcatatttcctaagtaggcagcaatagatcacaatttcccaataycatgcacatgaaagctcataattccttggataaagacagtaaagatgccttttaggatcctctaattatccaatgaaaaggcaaaataaagcaagtgaaggctggaacaccaccggtgtaactgtacttatttccttatataattacttttgattgttatttctgatgctgccctttgaaatatcttgggtcatcttcctcctagttttgaaaactcctgaactaataatttattatcgcagaatgtagttatatcactgtgaaatgggcagatggtgggtatcagatacccaaaacaactatacatactctaatcttgtatttaatttgtattaacctgtgtcaaatataatttttctgcgagaaactcaaaagacagactttaattatatttatttaatttgtaatacattatgtgagcaatcatacccagaacgtgattgt

SEQ ID NO: 483033 - DNA, 502 bp, Homo sapiens
gcatttgaggacctttgtgatctgactgtaatctgtcgttctggcctcagctcatgcttcttccactcaacgctctctgtacttcaaccacagtatggtatttgattttctagcatgatcatgtctactcaccttcatgccattgttcatgctattytcatcaagtgccttcttccctctcctaacctcctaaccacccaataagtgcatgacaaatatcttctaatttaaacattgtttaaaatgatgttaccctgctttgatgaggtatagggaagtgtgcaatttcttgtcctgtgcagggaatggagattgttagagaccttccagggcagagcttgatcgtttctatcaaatgcctgataattgtacccactgtgtaatgcaattacacatctagaatatttttcctaaagatatggaaataaatatttggcaagaaggatattcatcatagcattgtatacagtagcaaaaattttgcaacaaccttcatgctcct

SEQ ID NO: 483034 - DNA, 491 bp, Homo sapiens
aaaagacaaaagtatagaaaaatgcttcactatcattcatgattcaaatcagaggaactcatctgtgcatccttaatcattcaggtgggtagaagtactaatgccggattctaatcctttgaaaagaatgacactggatctatgtaaacagtagcacgaccacgaaataggctgtctagttagtcataagyccaagcagtttaggtagatatttataaagagctcatattagcctatttcaattactttcctcaaattttaagctcttttacatcagcccctttcaggagtttatgggaaattttcacctacattataggtgtacatataggatgttttaggggagatatatgctattgtagtttttcaggaccctatgtctcatatatagaaataataaccctaacattcaatgagtgcttactatatgccaagcattatcttaaccacttgatgtggactgtctcaattaatcctcagcaccattttcc

SEQ ID NO: 483035 - DNA, 491 bp, Homo sapiens
aaaagacaaaagtatagaaaaatgcttcactatcattcatgattcaaatcagaggaactcatctgtgcatccttaatcattcaggtgggtagaagtactaatgccggattctaatcctttgaaaagaatgacactggatctatgtaaacagtagcacgaccacgaaataggctgtctagttagtcataagcccaagcagtttaggtagatatttataaagagctcatattagcctatttcaattactttcctcaaattttaagctcttttacatcagcmcctttcaggagtttatgggaaattttcacctacattataggtgtacatataggatgttttaggggagatatatgctattgtagtttttcaggaccctatgtctcatatatagaaataataaccctaacattcaatgagtgcttactatatgccaagcattatcttaaccacttgatgtggactgtctcaattaatcctcagcaccattttcc

SEQ ID NO: 483036 - DNA, 562 bp, Homo sapiens
tctaccaagtaagaatttggtacctgggtggctgcatttcctgatttttcaacctgggcacctagatttgcatgtgaaagcccccaattataggctgatattcacttcaggggttggtgtctggccagcagagcacacataatgactaacttcagcttgggaagggctgggttttgcttataagacagtggagacccctacacatttttatcatttaattttatttcaaaaccagaaaggacaacattgaaggcctaagaacatgggaacaaccaatgagacataatttttccaaaggagttgtcygtactcaaagattaaaagaaacactgttttagatggaagttatagggaggcactttattctttaagtacgcagtaacagtggtgtccccaaaagagtagactagacaagcaagtggaaatggataaaatcccgctcatctttcaaggccattcttaaacaccacgtactccacaatccatttgctttaaaatcatatgacgtctatgctgtccaccacagcttcagagagtactgaaacaaatatttatatttgga

SEQ ID NO: 483037 - DNA, 562 bp, Homo sapiens
tctaccaagtaagaatttggtacctgggtggctgcatttcctgatttttcaacctgggcacctagatttgcatgtgaaagcccccaattataggctgatattcacttcaggggttggtgtctggccagcagagcacacataatgactaacttcagcttgggaagggctgggttttgcttataagacagtggagacccctacacatttttatcatttaattttatttcaaaaccagaaaggacaacattgaaggcctaagaacatgggaacaaccaatgagacataatttttccaaaggagttgtctgtactcaaagattaaaagaaayactgttttagatggaagttatagggaggcactttattctttaagtacgcagtaacagtggtgtccccaaaagagtagactagacaagcaagtggaaatggataaaatcccgctcatctttcaaggccattcttaaacaccacgtactccacaatccatttgctttaaaatcatatgacgtctatgctgtccaccacagcttcagagagtactgaaacaaatatttatatttgga

SEQ ID NO: 483038 - DNA, 594 bp, Homo sapiens
gatttctaccaagtaagaatttggtacctgggtggctgcatttcctgatttttcaacctgggcacctagatttgcatgtgaaagcccccaattataggctgatattcacttcaggggttggtgtctggccagcagagcacacataatgactaacttcagcttgggaagggctgggttttgcttataagacagtggagacccctacacatttttatcatttaattttatttcaaaaccagaaaggacaacattgaaggcctaagaacatgggaacaaccaatgagacataatttttccaaaggagttgtctgtactcaaagattaaaagaaacactgttttagatggaagwtatagggaggcactttattctttaagtacgcagtaacagtggtgtccccaaaagagtagactagacaagcaagtggaaatggataaaatcccgctcatctttcaaggccattcttaaacaccacgtactccacaatccatttgctttaaaatcatatgacgtctatgctgtccaccacagcttcagagagtactgaaacaaatatttatatttggaataatactcaacaagaaatttaacagta

SEQ ID NO: 483039 - DNA, 281 bp, Homo sapiens
tgcttctgctggagatctttctcccayctctccacctgtcaccctcacccatctgggttgctcaggtgcctgtttgctctgggaacaagttcctgtagacagagatgatcattccttctgggctcccactgtgcagtgaagattgtcctggtgtttcttaattatgttttattgccatttttctggggttctttgtgtcttcaggggcatgcagatagtaggcattcagaagaagtgagttgcaccaaggctctgctggatttatacaagaacatcctgca

SEQ ID NO: 483040 - DNA, 355 bp, Homo sapiens
tttgctgaatctactctggtatagatggtacgcagaccaaacaacaaggaaatgcagtgcaggggtgtcaggtccgagcagtgtgtgttagaaagagaatgctggaattcttgactaacgtgaacttacctgggctgagagaagggcaggctgaatgcaaagggggccctgcttggagtcaccccgtgacttcctgccaaggaaagaaagaataatcaggagctgactggaggactaagccaggtttgcaaaaattaacatcttgattcataatagccaaaaggtggaaacaacmcaaatattcataaatgaatgaataacatgtggtatattcattcaatttgactactgtggg

SEQ ID NO: 483041 - DNA, 565 bp, Homo sapiens
tgccctcacttctgtcacacgctgcctcgcgacacggagctgagctcaaagccttaaggcatggggctgagctgggagacaagcttcggtggaagatgccatgcagtgcccagacttggccttccctccagccacagaagcctgctcttcacttaagttgggtgggctctgaggtggcacagggccactgtcatacggtcagcccagagcccccctgatgtctgcttgtctgctctcctagcttcctggtttcccaccccacagcccttttccccagcgctcgaggactggctgatggacgcctcactgaatcagccatggaagtgccttatagagtacagtaattattaatttgagtaaatacattttggctccttcttcacaagcccctacagacactgcagggtttactgcttcaaacttaggcttctggtcagcctcatttaaggcttctctggaatccaggccaaatataaatggtgacccggcagaagtggcgtgaccaggcaaagtgtgatacttyctttgagaccatgagccagccccttcccttccctggctcagt

SEQ ID NO: 483042 - DNA, 597 bp, Homo sapiens
cttaggcaagataattgattgaacccgggaggcagagtttgcagtgagccgagatcgtgccactgtactccaacctggtcgacagagcaagactccgtctgaaattaaaataaaataaagaaaggacaagacagagacacaggttgaagatggcagaggcaaaggttggggccatgtatctagaagccatggaatgccaagagctgatggccacaccaaaagctattagaggcaggaaaggactttcctctgtggttttccagacgggggacatgcacaccttgtckggggacttctagtctccagaactgtcagataataaatttctcttgtttgaagtcccccagtttgtggtacttggttacaacacccctaggaaacagatagacccagtcagtccttacatatttattgtgcacctactgtgtgacaggcactggcctagaccctagatagagcagcaaatcacacgaataaaaggcccttcctttgtggaaattttatcgatgattgtcctgagggaacaaggaatttgtcaaaaagttttgattaggaagataatgtttgtagccttcctgttttatatggaatggaata

SEQ ID NO: 483043 - DNA, 444 bp, Homo sapiens
gtattggatgttgactgaaccaatcaacttgtagtgtctatgaggataggggaaggacaataccccagaaaaatkgtggttggcagccatcctaaaatgtagttgacgctgtgctccatgcttgcagttaacatttttaaaaagaaacatggggagagtgaagacatacatttctttttatataccccaaaagaatgaatctctatggatgtcttttcagtgttcagttagtgatttacattttggggctgggtagcttttcccaattgctctcaaattatatagcttgaatgcaacaatattgcccatccagtgttggaaagcacagagttaggggctgcaggctctggcctgtggggcacactggacacaagaaccatgctaaaatatgcaggtaagtaaggggtaagaatcattatccatgcattggtacttaaagtgtgg

SEQ ID NO: 483044 - DNA, 611 bp, Homo sapiens
tttgcatgaaggatatgcagaccattcaaagactgtgtaattgatcagaagattctataattgtttgcaaaagctaaaattctccatcatcttgacgggagagcaatcaatagcaatgacaagctgatgagaattacaaagcacatatgtgttgaaattcacttactcttcaggcattcaggtatgtgaagagattatagaaacatgccgataagaaagaggccatacaattctgaccagtttcctccctgccaaatccacacgagtctctgaccaggggtagcatcccctagagcagaaaccctgccctgctcattctataaaatgatcacaggtagagaattaactttggactgatgttatagactgaatgttcatgtctcccccaaattcatatgttgaagtcttaacctccaatatgatggtatttggaggtgggtcctttgggtggtaattagggttagattagaacatgagggtagggccctcatgatgggatyagagtcctcataagaagaggaagagacaccagagctctctctgtgccatgtgaagatacagagagaccgcagccatctgcaagccaggaagggagctcccaccaggaactg

SEQ ID NO: 483045 - DNA, 610 bp, Homo sapiens
agaaagctgaatgctctctattccasaatttctcctaactaggagtgccatgtaatacggatctggccaatgagacaggaacagaagtctgctttgagcttctgggaaagtttttgcttttcttaattaaaaaaggccagatatggctcatgatatctcattttctctctccttgtcttactgcctggaatgcaaatgtgatgcctggagataaggcagccattttgtgactgtgacatgaaaagcaggagaaggctacaaaataaacaacagtgattacctcagaaaaactaggaacttgagatgggagggactttcttcacaaaccgagttttctttttttaaaaaacacattttataacataaactaggaaataaaattattttggaaatataaaggaaagattattagggtttgcttgcagtagttaggaggtttctgagaggggaagagtaaaagttgggaaagcgaggcagcagagtaaaaggtgatcaagctatgaaaacaacatgagccaggagtttactgaagcagagtttttcaaagtagaaagcagtagaatatacgagtgaaaagataaagggggctggaggatgaggataagccaga

SEQ ID NO: 483046 - DNA, 610 bp, Homo sapiens
agaaagctgaatgctctctattccacaatttctcctaactaggagtgccatgtaatacggatctggccaatgagacaggaacagaagtctgctttgagcttctgggaaagtttttgcttttcttaattaaaaaaggccagatatggctcatgatatctcattttctctctccttgtcttactgcctggaatgcaaatgtgatgcctggagataaggcagccattttgtgactgtgacatgaaaagcaggagaaggctacaaaataaacaacagtgattacctcagaaaaactaggaacttgagatgggagggactttcttcacaaaccgagttttctttttttaaaaaacacattttataacataaactaggaaataaaattattttggaaatataaaggaaagattattagggtttgcttgcagtagttaggaggtttctgagaggggaagagtaaaagttgggaaagcraggcagcagagtaaaaggtgatcaagctatgaaaacaacatgagccaggagtttactgaagcagagtttttcaaagtagaaagcagtagaatatacgagtgaaaagataaagggggctggaggatgaggataagccaga

SEQ ID NO: 483047 - DNA, 571 bp, Homo sapiens
ttcctgactgactccatattgcttagatgtggactccctccttggtaactgcttcctggctcctgccctccaccatagttgtctgcaagaataaytgaaaagaataaagggaaaaagttaaccacaattagcaggtttggggtgggagaaggagacgttagggagagggccggaagaatcgaagtctggctgacttctggaagctaactaattcccttcactaatgatgagcggattagtagaactgggcttgtgctatgtgttcagaacctcatggcttattactaccgtactcagcaattaaccactgcgtccatcaccccactgaatgctcagatgatacccacttgaagcccagttttgcctctgtctccatgcaaaggtcataggccaaccccagccctcattttttccctcctctgaacacctgagaataccttactagactggcgaaagcctcgtgaaggcagagcattctgtcttggtgaccgctgcatccctgaatcctagcacagggtctgagtgggctttcaggaagtggtttagaatgaaggctgactcaaaaaaaaat

SEQ ID NO: 483048 - DNA, 521 bp, Homo sapiens
agttcagtgaattttaaaaggcttaagaaattgatggattagttgtatgttctgaaaatactgtggtcagacctaacgctgccttgaataggacagacactacagcactccragggggatttctgatgatgagctctgacctcatgatagtggagtacttcgtgagggctagataaaatgcaaacctggggcttaattgggataatggactgggattttccacttgttctgttttctttcttcctttatttttattgaggcataattaattatgatgaactcctaagggtatagctttgtaaatttttccccccatgttttgtcaaacataaaattagatcaagttagaattttaagtgtttctcatacatacaagaggagagttcatggactgggagacctcaaacccaaaaatgtcacagtcttactttatagcagttacggtgcagtttagagcataaaggaggaatgacctgacctttttcatgaatggctgtcatgtatagatccttaaggcagac

SEQ ID NO: 483049 - DNA, 595 bp, Homo sapiens
ctgttttgcttgaagggcttgttctagtgtcaaagctggttgagcaatggatggcaagttaactccttgytttatttaaagtcattctgattctttgatttgattcctcattcagtctacaaatatttatgtatctactatgtacctggctctgctagccatttttcagttcagcatgcagcccagtgacctatgagacaacatattaatacaaaaggattctgaaattgtctccattgtgatgagatgagtatacctgttggagtctctcatatggcccctaaaaatagttattttatatctgaggaggtgattgtttgtgatttctatagcccatgtatattaatgtaaattccagtgagattcactcaagaatctcttgtatccaagtagtaggggagttgaatatatttagaccggtgagcttctgatttaaaatgttcattctccaatttaagttcccaaacttgttagtcaattttggcatttaaacaagtgggggggagtatccaaatcactgagtcacaagtaatatatttccatatcttcctctcaggaacctggccaactgacagctagaatagtgatctatgct

SEQ ID NO: 483050 - DNA, 595 bp, Homo sapiens
ctgttttgcttgaagggcttgttctagtgtcaaagctggttgagcaatggatggcaagttaactccttgttttatttaaagtcattctgattctttgatttgattcctcattcagtctacaaatatttatgtatctactatgtacctggctctgctagccatttttcagttcagcatgcagcccagtgacctatgagacaacatattaatacaaaaggattctgaaattgtctccattgtgatgagatgrgtatacctgttggagtctctcatatggcccctaaaaatagttattttatatctgaggaggtgattgtttgtgatttctatagcccatgtatattaatgtaaattccagtgagattcactcaagaatctcttgtatccaagtagtaggggagttgaatatatttagaccggtgagcttctgatttaaaatgttcattctccaatttaagttcccaaacttgttagtcaattttggcatttaaacaagtgggggggagtatccaaatcactgagtcacaagtaatatatttccatatcttcctctcaggaacctggccaactgacagctagaatagtgatctatgct

SEQ ID NO: 483051 - DNA, 618 bp, Homo sapiens
tgaagaaactgtggctttgagagattaagtaaattccacagagttaggtagttattgagaagcagagtcattcattctttatctctggaactgagttagtagaaataaaaaataaatgatataactgaattcaagataaacattatatcattagatatttttagaccaaaaatatactaagcctgcggtctgaattataaaatataaaccattataggaaaaatggaaattctaaacattcttaaagggtaacattctctcatagctctaggaaattgttggrctgtaataggccaccacccagaatcagtcatccaactagctgttgtgagctgatattttaattttcaaaccttaaatcagcctcagtacatttctatccattggcagtggggagccactctatatgcagtataaagctaaaattttaaaaaaatttcacagcatttctttttaatttctgaagttagctatcacagttctcctaatctcttctctcagttgaatatctcaaattcaagttcacttagccattcgtgtgaaatggattttcaacaccccagtgtctacattaactttcccgggaagctctttattttttcaaatacttctcataaa

SEQ ID NO: 483052 - DNA, 439 bp, Homo sapiens
ctgtcagtccctttcctgaattgcctttgtgaaagagacccgccttgtccaaggacataactccttcctggggcagccagcaatctaacttctaatcagcatgggggtataatggacagtttcccttaccccatctctgaacaactacaatgagccatcccagctccaggtccrgctttgtccttgttgagactatattacagcccagctttccctctacccaatcctgattccttccctttcctcacttcccttttcctcccaaaggtgtcgatctcaagagagagttcaccaatacatttcttgcatgctaatatgtatctcaattttacttcctagggaatcctacagcattcactaagcagtcacccccgacattgaccacaatgtctccaatatagaaaatactagtgaataaaggtgaaaggaaactgatttc

SEQ ID NO: 483053 - DNA, 255 bp, Homo sapiens
agtttgggtgttaggtttacaatgacattgaagcagaaaatctaaaagtcaacatttaaaaaacttaagccaaaacaaaactaacaaaccagttcaattataccagtgatggagaaatgaaaactactttttaaaaatgagattttaacataacatttyagaaatccatctactgaataaagcataaaacttaagacatgtatataatttgtaaacttttttaaaagtactttaattaattagaataattatttt

SEQ ID NO: 483054 - DNA, 465 bp, Homo sapiens
aaacatttgataatatttgaagacatttttggtttacacaactaggggcaaatgtactactggcatctagtgggtagaagatggggattctgstaaacattccacaatgcacaagaaagtctccaacaacacaaaataagtatccattcaaaagtcaatagtgtcaaggctgacaaatcctcttgtgttccataaagtttccctatctttgcaggtataaaaacaggtagaaatccttccaggatccctaaaatcccaacttatcccacaaatactgccaagaatgtcaccttctcccaacctaagaacgagaatttgcagggatactgatggtcgaaagcagcaaagaccccaaaatatcatatcacatgcttacttagctgattagtgcctggattcatggaaggaccaaaaggtctgtgacttctgagatgtcctcaaatgtaaattttgcatagaaaaaca

SEQ ID NO: 483055 - DNA, 614 bp, Homo sapiens
ccccattacctgggagtcagggcaatgcctccatatatagccatgcgttatatacaagatgccygttgaacaccagcaatccagaaacaagtgtacccttctgaccaaaaaaaaaaaaaaaaaaaaaaaaaaaagccacagattccaatactctgaagaaaaggagggaagagggagggctcagtgatacaagagctcctggaatctatctctcaggcatctttattacttttgccactcaaagcatgtttccgacagtaaagtgtgacaccagaacacatcggtttacaaaactgtctttgtagtaaaaatattagttgagatctgtacattcttgagctttcattgagaagcctggcttttctcaaaattttgacaaattgcttattatcaatgtttgtacctcaaatgaagcttatctatattctattaatcaaatgtcttaaaaaatatctaaatctttttagatatttttagatatttagacaaggtcttcatttaggtcttagtgatgaaaaagtatatggttttaaaatataaaaaactctcacagggaagcatataagcctaaaactgagtttactattcatgtttgcaaagggaagatgagtatg

SEQ ID NO: 483056 - DNA, 614 bp, Homo sapiens
ccccattacctgggagtcagggcaatgcctccatatatagccatgcgttatatacaagatgcccgttgaacaccagcaatccagaaacaagtgtacccttctgaccaaaaaaaaaaaaaaaaaaaaaaaaaaaagccacagatyccaatactctgaagaaaaggagggaagagggagggctcagtgatacaagagctcctggaatctatctctcaggcatctttattacttttgccactcaaagcatgtttccgacagtaaagtgtgacaccagaacacatcggtttacaaaactgtctttgtagtaaaaatattagttgagatctgtacattcttgagctttcattgagaagcctggcttttctcaaaattttgacaaattgcttattatcaatgtttgtacctcaaatgaagcttatctatattctattaatcaaatgtcttaaaaaatatctaaatctttttagatatttttagatatttagacaaggtcttcatttaggtcttagtgatgaaaaagtatatggttttaaaatataaaaaactctcacagggaagcatataagcctaaaactgagtttactattcatgtttgcaaagggaagatgagtatg

SEQ ID NO: 483057 - DNA, 614 bp, Homo sapiens
ccccattacctgggagtcagggcaatgcctccatatatagccatgcgttatatacaagatgcccgttgaacaccagcaatccagaaacaagtgtacccttctgaccaaaaaaaaaaaaaaaaaaaaaaaaaaaagccacagattccaatactctgaagaaaaggagggaagagggagggctcagtgatacaagagctcctggaatctatctctcaggcatctttattacttttgccactcaaagcatgtttccgacagtaaagtgtgacaccagaacacatyggtttacaaaactgtctttgtagtaaaaatattagttgagatctgtacattcttgagctttcattgagaagcctggcttttctcaaaattttgacaaattgcttattatcaatgtttgtacctcaaatgaagcttatctatattctattaatcaaatgtcttaaaaaatatctaaatctttttagatatttttagatatttagacaaggtcttcatttaggtcttagtgatgaaaaagtatatggttttaaaatataaaaaactctcacagggaagcatataagcctaaaactgagtttactattcatgtttgcaaagggaagatgagtatg

SEQ ID NO: 483058 - DNA, 534 bp, Homo sapiens
ttaaataacatacaacttcacatttctcaaagtgtgtaatccaggcattatgaataatttctagccaaatcctaagaaattgtacatgatctttctaaacataggctgggaattgttatgctgaagcaaaaatgaagtgtcaggtaatgtctgatgctggggaaaacaattagaacattactgaattaccctcctgttaaagagctcactttcaccttcaaaagctaattatcagtttaccatgttttattcattaattagaattattttctagagtgtcagagcatttcaggtgggttgggttatgatggaaaagactagataatcataacctctgcaagtttgtgatttatttagccaaagatgcagaacttatgggaagcaaaatgctatacagggcagtagaaaacgaggtcyattgtggccactgtttcttttcctctggattccttttaggtgggaggtaggagaaacagggccacagttgccagggatgcttgcttggtacagatatggctctgccagatttattta

SEQ ID NO: 483059 - DNA, 514 bp, Homo sapiens
ttttcttcatttcctagcaagtctgagtgagacttaaattcacataggaaagaagaaaataaatcagatgtaattctgagccttcaatctacaggaaaacatgatgaacatctttgggttataacactaatccctgttacctgagaggaaactctagtaactcacctatggtttttccacttsagttatgaagtctgtaaccagaggaataaatttcttgcccagaccatgtaacttggctgctccatgttactatccaaaattcaagtgttgatattttttggaatcctttcttatgctttatggatttttttaaagaagtatttacagtgtttttatacaagacgaaggtcacaaatgggccactttgaatactgatgtttccttttattctcaactgaagccccattccacaacgtattagcaacctgttttgatgccaaagccaaatagtgacagttgcagtaatgaatatttgctacagggcgctggcagaaaaatggcacagaaatgc

SEQ ID NO: 483060 - DNA, 514 bp, Homo sapiens
ttttcttcatttcctagcaagtctgagtgagacttaaattcacataggaaagaagaaaataaatcagatgtaattctgagccttcaatctacaggaaaacatgatgaacatctttgggttataacactaatccctgttacctgagaggaaactctagtaactcacctatggtttttccacttcagttatgaagtctgtaaccagaggaataaatttcttgcccagaccatgtaacttggctgctccatgttactatccaaaattcaagtgttgatattttttggaatcctttcttatgctttatggatttttttaaagaagtatttacagtgtttttatacaagacgaaggtcacaaatgggccactttgaatactgatgtttccttttattctcaactgaagccccattccacaacgtattagcaacctgttttgatgccaaagccaaatagtgacagttgcagtaatgaatatttgctacagggcrctggcagaaaaatggcacagaaatgc

SEQ ID NO: 483061 - DNA, 573 bp, Homo sapiens
gctgcagcagccgcagcagcagtggcagtgagttcccccttcagtcttcgaactgctccagcagcaacactgttccagacttcygcgcttcctccggcactcctgcggccagctcctggacccattcggaccgcccacactcctgtgctgtttgctccttactaaattccaaataggagtaattgtactgcaataatttttcaaaaaacaaaaaacaaaacaaacaaaagagaactatgcagtgtttatttatagtttaaagtatatctgaagagccaggacttttgatagtgaattgaaaaggttataaaaaagtgggggaggtttgggggtgggagggagggagtggtattttctccaaattaaagcattcctcttgaacgctgattgttttagaagtgatctccagcattgatttgtagtggtatctagaccttctgaagcctctgtgactgtgcttttgggcacctatttccctctgcattgtctgtcctgctttatgaaacaactatacattgtctaagggcattaactggttccaatgtatataaaataatttactctgtagattaa

SEQ ID NO: 483062 - DNA, 573 bp, Homo sapiens
gctgcagcagccgcagcagcagtggcagtgagttcccccttcagtcttcgaactgctccagcagcaacactgttccagacttccgcgcttcctccggcactcctgcggccagctccyggacccattcggaccgcccacactcctgtgctgtttgctccttactaaattccaaataggagtaattgtactgcaataatttttcaaaaaacaaaaaacaaaacaaacaaaagagaactatgcagtgtttatttatagtttaaagtatatctgaagagccaggacttttgatagtgaattgaaaaggttataaaaaagtgggggaggtttgggggtgggagggagggagtggtattttctccaaattaaagcattcctcttgaacgctgattgttttagaagtgatctccagcattgatttgtagtggtatctagaccttctgaagcctctgtgactgtgcttttgggcacctatttccctctgcattgtctgtcctgctttatgaaacaactatacattgtctaagggcattaactggttccaatgtatataaaataatttactctgtagattaa

SEQ ID NO: 483063 - DNA, 627 bp, Homo sapiens
gcctttatgatattaaataggctctttttaaagattcaggaaatacagatggtccccaacctatgatggttggatttaggattttttgactttatgacagtgcaaaagggaaacacattaagtaaaaatttttctttgatacctatacaaatattttatttttcaccttcagtacagcatttaataaattacatgaaatagtcatcactttattataaaataggctttgagtttgatgattttgcccaaacgtaggcaaatgtaagtgttctgggcatttttacagtaagttagagtaagctacaatgttctgtaggttaggtgtattaaacgcattttcaacttagatgctttcaacttaaaatgggtttattggggaataacttcattataagttgaagtgaagccgtgttataatatttaatgaatttctattacccttcgcctttttatttaataaaattataagtgtctaaactactgtattctcaggawattatgggaaatctacttttatattacataattaaattatttagaatattagttttgatattgcttttaacattttaagccaaatcaattgtatctaattaacataaaacctttaaatgaaagacgtcacaa

SEQ ID NO: 483064 - DNA, 596 bp, Homo sapiens
cagattcaaaaagcaaattcttatagacctacaaagagacttagacactcacacaataatagtgggagactttaacactccactgtcaatattagacagatgaatgagacagaaaattacaaagatattcaatacttgttatatgttattttctgtttgttttctgagccacctaccactatggatccctattaagctgaatgcctagtgaaatattaagcataacgttgcttgtgtgcatttttgtggacaactgcaaacaatgtgacataccttagaggttctaatctagtcatttaaaagctttgaacatgacagcccaaggacagagctttgactccactttccctcctctttttttcactccttctccttcttttttcttctttttaagtatcatctttaaatttatttaggatgtattatctgacatgctaagcartttacctacattgtctataaaatcctcacaatcaatagctacggtagtaacagttttccattgtgcacatgaaaatactaatacagagagaagtcatcacctcctagttccagtctgtttgacatgtaagctgttaaagttcacctggtgaaca

SEQ ID NO: 483065 - DNA, 596 bp, Homo sapiens
cagattcaaaaagcaaattcttatagacctacaaagagacttagacactcacacaataatagtgggagactttaacactccactgtcaatattagacagatgaatgagacagaaaattacaaagatattcaatacttgttatatgttattttctgtttgttttctgagccacctaccactatggatccctattaagctgaatgcctagtgaaatattaagcataacgttgcttgtgtgcatttttgtggacaactgcaaacaatgtgacataccttagaggttctaatctagtcatttaaaagctttgaacatgacagcccaaggacagagctttgactccactttccctcctctttttttcactccttctccttcttttttcttctttttaagtatcatctttaaatttatttaggatgtattatctgacatgctaagcaatttacctacattgtctataaaatcctcacaatcaatagctacggtagtaacagttttccattgtgcacatgraaatactaatacagagagaagtcatcacctcctagttccagtctgtttgacatgtaagctgttaaagttcacctggtgaaca

SEQ ID NO: 483066 - DNA, 624 bp, Homo sapiens
tgacacagagatgtgaagtgagcccatgctgttgaaaaaaaatagtgtggatagatttagatttgcctaacttaaggttgctacaaactttcaatttgtaaaaagcataatatctacaaagtgcaataaagaaaagtgcaataaaatgatgtttgcttgtagttttaaagttttgtatgaaaacagtagttggataaattgtttgcctaagcctcttttgtagtcagagggctattgtatgtacttggaaaaagtgtacatgctagggacttccagggcagcttgcatccctgaggacgggactaaaaataacagagtcccctgctttgtgggacctaaagcttgtacaatttgtgtgtgtgtgtgtgtaacgtcttgagtaaaaagaattcaaaatataaaaatgatttcatttaaaatgaaaaaagataatgaaaaattacagattttaagaagttggtaaatatcaccgaaatggataaattaayttactatttgcaactaactgcttgacattcttctataacacttttttctataaaattaataatgttcgctatgaatgccttttcatgtgaaaattctgtaatattcctttctacagataggatagaaaggtaattc

SEQ ID NO: 483067 - DNA, 654 bp, Homo sapiens
ctgtgtgtctcttatgtcacagttttatcatcagagaggcactgatggagtgtttctctggttccaggtttaaaaaaaaaaaaaaaaagttcattgaagttctctagcctagcttgggttaattgattacaccttagtccatctgctgtatataagagcagaatcttttacggacatgacaatttcagttcaaatcacatgataaatatggaggaaaataataatttctttgtgaagaggcttaatgtttcaagatagagacagaggatgtgctgcgccgatagaataatgaaagtctcctatagtcaaaaaacaaacaaataaacttgaggcagattcttcacttcraggtgctcaccataaaatggcaatactaaactatttctagaactctatatagagtgcctgttagttattttgatcctgttacaactctttcagatgatgaggtagaagtgttgtcgccttcttaatcatggagaaactgaggctcagtgaagataaatgattgttttagaacagaagcatggactttaatagttgggatttgttcttttcatccaattctgacctgggttctatgattaagaggtatgtgtctcatagaatcaaatcatcacccttcaaaaatattagccagcttttccagaaaaa

SEQ ID NO: 483068 - DNA, 556 bp, Homo sapiens
cgcctgcccaggaacagggggaggctgccacgttctgtgcccttattgctaactcccggctgcccactatgcaccctgacaaagcctctgctggctcatgtttcccgtttttggagctaccaagaaatctccctttgctttgtctccatttccagagtccgtcttcaacttccccgagacgctttcagggccagggcaggggtcaggaaccaggcagcctcggtgggtgcttcagccctgacccaggcctcagagccgtcagggcaccagcagctcccctctgtaaacctctccatggggaattttaacctaaaataattttctctctttctctctttacaactgaagaaaagtacttcttagagcgagcttaactacctacctttaatgttttacagtcagggaaagcagtacaaagcaacgtgttyaagtagttcctttactagcgttgatagaatcctaaaatctcaagggcctctggtgaggaatgaaatcgtatctctgctaaggctcgtgtgttttaccagttgatgggtccaggcaatgccatggtcag

SEQ ID NO: 483069 - DNA, 647 bp, Homo sapiens
atggataaacaaaatgtggtatgcccatacaatggaatactatttggcaaaaaaagatgaattacttatacatgctaaaacaaggataaacctcaaatattatgccatgaaacaaagccaatcacaaaagatcaaatattattattccatttatattaaatgtccagaagaggtaaattcatggaggcaaaagcagataagtgactttcagaggctrgggttgaagattgaggggggtgatagggagtgacttttaatgggtacggggttgaagattgagggggtgataagaagtgacacctcatagacatggggtttcttttggaggtgatgaaaaatgttccaaaatcagatcatgattgttacacaactctgtaaatatattaaaagcattgaactgtataatttaaatgggagaattttatggtatgtaaattacatctcaatagagctgttttaaaaaagtgttcagatacaaaaaggaggttgctaaaaacagtccttcttcctatagatgaggcatttttttgtcaagctcactacatcatatgcttctccagatgcttggtttggtttctctacttgggggttcttacaataaaacctatttctctacagcctctaagactttatgtagattctatacg

SEQ ID NO: 483070 - DNA, 514 bp, Homo sapiens
caaagaccatcttgtttctccacaagtcatctatgtgagattccagaatttcagggcgataagttcttaattggaacattatatattctctttgcagccagtaagtacgcatcacttcacgagaaagcactgcggccaacatttctcctggtctgctctgggtttcagtgaagggcaggcctggaagcaccttgggaaatgaggtagagccaagctaaccctrgagagccgttgagcttacggagggttgagtgattacgcaggcatagtcttgagttttattttcagtttgaatactgctaactagtctgtacagtcacaggcttactatagggagtttattctacattagctatattctctcttccttagcagcacttaatgagttggctggaaagttgttcccagccaagccaatatcccatgagttataaatgacatttcatgctcatatgcagattttctgcaccgaagtgaattatttacaaggtaggccttatggattccaacagtc

SEQ ID NO: 483071 - DNA, 514 bp, Homo sapiens
caaagaccatcttgtttctccacaagtcatctatgtgagattccagaatttcagggcgataagttcttaattggaacattatatattctctttgcagccagtaagtacgcatcacttcacgagaaagcactgcggccaacatttctcctggtctgctctgggtttcagtgaagggcaggcctggaagcaccttgggaaatgaggtagagccaagctaaccctggagagccgttgagcttacggagggttgagtgattacgcaggcatagtcttgagttttattttcagtttgaatactgctaactagtctgtacagtcacaggcttactatagggagtttattctacatyagctatattctctcttccttagcagcacttaatgagttggctggaaagttgttcccagccaagccaatatcccatgagttataaatgacatttcatgctcatatgcagattttctgcaccgaagtgaattatttacaaggtaggccttatggattccaacagtc

SEQ ID NO: 483072 - DNA, 500 bp, Homo sapiens
tttacggcactgcgcagagggtagcaaaggcagagatggctgggctgtaagctccaaactcaatttgaatcatgaaagattacttttatctggtttttgcacaagtgtacagtgggttttgtataaatcttgagagggaaaaagcattctgctgctaacacattaacaagttagaaatcttgcctcagagggtatttctttagcctgatgcttcaagtggggcctgaaacygttctggggggagctgggcatgctcatgtgtctgagcctgggtgggcttcccccatctttcaagccactttggctctggctgtcaaggatcactgatgtcactgtgagccatggaagagaacaaagagaaagtacttcctgggtagaagagggtgaggcaataggaggtgttataaggaaggatctttagcaggaaatgctccccggagaggccgaaatgatgtcattggaccatcagcccaatagcagtcagaggccaagtgtcatag

SEQ ID NO: 483073 - DNA, 500 bp, Homo sapiens
tttacggcactgcgcagagggtagcaaaggcagagatggctgggctgtaagctccaaactcaatttgaatcatgaaagattacttttatctggtttttgcacaagtgtacagtgggttttgtataaatcttgagagggaaaaagcattctgctgctaacacattaacaagttagaaatcttgcctcagagggtatttctttagcctgatgcttcaagtggggcctgaaaccgttctggggggagctgggcatgcycatgtgtctgagcctgggtgggcttcccccatctttcaagccactttggctctggctgtcaaggatcactgatgtcactgtgagccatggaagagaacaaagagaaagtacttcctgggtagaagagggtgaggcaataggaggtgttataaggaaggatctttagcaggaaatgctccccggagaggccgaaatgatgtcattggaccatcagcccaatagcagtcagaggccaagtgtcatag

SEQ ID NO: 483074 - DNA, 500 bp, Homo sapiens
tttacggcactgcgcagagggtagcaaaggcagagatggctgggctgtaagctccaaactcaatttgaatcatgaaagattacttttatctggtttttgcacaagtgtacagtgggttttgtataaatcttgagagggaaaaagcattctgctgctaacacattaacaagttagaaatcttgcctcagagggtatttctttagcctgatgcttcaagtggggcctgaaaccgttctggggggagctgggcatgctcatgtgtctgagcctgggtgggcttcccccatctttcaagccactttggctctggctgtcaaggatcactgatgtcactgtgagccrtggaagagaacaaagagaaagtacttcctgggtagaagagggtgaggcaataggaggtgttataaggaaggatctttagcaggaaatgctccccggagaggccgaaatgatgtcattggaccatcagcccaatagcagtcagaggccaagtgtcatag

SEQ ID NO: 483075 - DNA, 476 bp, Homo sapiens
tttttgctgtatatctagacaaaaatctaacttgctcttgcttccaccctaacccttatgtggtaaatgattaactcagcaggttttagttgtccaaaccttgtacatttcaaagaaagtttggcccttacctggctactgggaaataacttgtaaggctttggaatattctgactgttaagagtgcctttgtttacctgacgtcttaggccactctagatagtttacgctaataatgtgattaatggygagggccttgggtaataaaatttaggcaataaaaccagtaataaaactggtatcaactttatttctggaggaattgagactgagtatgatggttaattttatgtgtcaacttggtgagcccacagagctcagatacttgctggaacattattctgggtgtttctgtcaagatcttttttagatgagattaacatataacttagtagactttgagtaaagcagattaa

SEQ ID NO: 483076 - DNA, 614 bp, Homo sapiens
ttaccctaaaatgtagcttaatacaacaaaattgtattacttcacaatttctgggagctagaaatttcagagtgttgtagctgagtggatctgactgggagtctctcatgaggttgcagwcaggatgtcaggcagaggtacagttgtccaagactcgattggggtgggaagacccacttctaagatggtgcagtcacaggctattggcagggatcctcagtttatgtctgaggctgttggcagaagacccaaccctggccacagggtctctccaaagcactgactgtgtgtcctcacaaggtggcagctagcttcccccggagtaagtgatccaagagagtgagcaaagagaaagctccagcatgtacccctctggcctagtctcagaaggggcacaacttcatttctgccgtattctattcattaaaagccagtctccaagtacagattgcactcaagaagcagagatttgggatacactttttgaagggaagggtagtaaagaatatataaacatctttaaaaccacttcccaaaagttctgccttaagaacctactgttgctttttgggtggcatatatagtttcagtaaagtgcacaaatcttaagtagc

SEQ ID NO: 483077 - DNA, 503 bp, Homo sapiens
gcctcctcttcccaaaattatttccaaagcattccagtgtgcattaatttcccctctaccaagcctcaaakcacttaaaaacactaccatcgattcaacattgaattatgcattgtctaaaaaacttttttaaccaatccatgtatactactcatatattctttcctcacaaataggtaattctcccaaggatagcaaatatgttttattcacctcctacatattaaaatagtggtgggcatgtaatataataagttgtcacataatgtacaattattactatcaggcaaagtgttagcattttagctgaatcatttagtttaatacaaaaattctttatggtagatatttattattctccattttaaaaatgattattctgaagtttttaaacaaagttactcgcctaaggtcaaagagctggtaaacagcaaaactaagagttgattcatggaatgtttgacccctgagtcttgattatagcaggtattcagcacaaatta

SEQ ID NO: 483078 - DNA, 503 bp, Homo sapiens
gcctcctcttcccaaaattatttccaaagcattccagtgtgcattaatttcccctctaccaagcctcaaagcacttaaaaacactaycatcgattcaacattgaattatgcattgtctaaaaaacttttttaaccaatccatgtatactactcatatattctttcctcacaaataggtaattctcccaaggatagcaaatatgttttattcacctcctacatattaaaatagtggtgggcatgtaatataataagttgtcacataatgtacaattattactatcaggcaaagtgttagcattttagctgaatcatttagtttaatacaaaaattctttatggtagatatttattattctccattttaaaaatgattattctgaagtttttaaacaaagttactcgcctaaggtcaaagagctggtaaacagcaaaactaagagttgattcatggaatgtttgacccctgagtcttgattatagcaggtattcagcacaaatta

SEQ ID NO: 483079 - DNA, 503 bp, Homo sapiens
gcctcctcttcccaaaattatttccaaagcattccagtgtgcattaatttcccctctaccaagcctcaaagcacttaaaaacactaccatcgattcaacattgaattatgcattgtctaaaaaacttytttaaccaatccatgtatactactcatatattctttcctcacaaataggtaattctcccaaggatagcaaatatgttttattcacctcctacatattaaaatagtggtgggcatgtaatataataagttgtcacataatgtacaattattactatcaggcaaagtgttagcattttagctgaatcatttagtttaatacaaaaattctttatggtagatatttattattctccattttaaaaatgattattctgaagtttttaaacaaagttactcgcctaaggtcaaagagctggtaaacagcaaaactaagagttgattcatggaatgtttgacccctgagtcttgattatagcaggtattcagcacaaatta

SEQ ID NO: 483080 - DNA, 619 bp, Homo sapiens
taggttgctgctagatttttaaataatgaaatatggaataatgaaaaacatgctagatatgaagcccagaaattgaattcactacttgagttctaaaaattgtattattctattctctcattttttgaaatacttatacaatatgattgatgcctgaggaagggctcaaacaacaactaaaactaaaatgaagttttccatttactcaggaaacaatttgtaaattataaagctaaatgatttctgcagtttttatattttttattttctcatgaaaatagtgccaaatttcaccttatttcatgttttagaaatatagttttacattgcgcagattcctggagtgccattatacttatttgtgaagaaattagaaattaaaataaattatctaaatatgattgtgatataattgacatgtacatatatatcttcaaattgsattacctatatactgcacaaaagaattaataaaaatttttttgaagatttttctcctttcatcaaaatcagcatgttcattgggaaatatgactaagataaaagagaattttccagaaaaccatgactctatatctttcaaccagatgggaccatgttgcaattagtaaaatgcctt

SEQ ID NO: 483081 - DNA, 551 bp, Homo sapiens
tttaactctcagaaatcatggacttccaagtaatattacacaaagcaatgttaacagtatttactgatatgcagaataagcttcataatgtctattaagaaacagtttactaaaaaattgcttcttgattaatattatagtatttttaactttgtattcacaaattagaatattttcttcagcacttttattatgaaaaataaaaaggttagctatttcaagcttatagtcttctgtgtccttttattaaaaggccattgtacctaggaaaagtaacaaaattcttgataaaacaacatacataaggctattatagcccaaatctagtacctttaaaaaatttatcatttaggccaggcatgctgtctcacacctgtaatcccagtactttgggaggccgaggcaggtggatcatgaggtcaggagatcgagaccttcctggctaacrcagtgaaaccccatctctactaaaaatacaaaaaattagctgggcgtggtggtggacgcctacagtcccagctactcaaaaggctgaggcaggagaatggcat

SEQ ID NO: 483082 - DNA, 575 bp, Homo sapiens
gctactcaaaaggctgaggcaggagaatggcatgaacccaggaggcggagcttgcagtgagccgagatcgcaccactgcactccagcctgtgcaacagagagactccgcctcaaaaaaaaaaaaaaattaccatttaaaatgcattctttttaatatgacttttacatttaatgttaaggtggccaattttgttgttaacttatagactggagacatttaaaaggatatatattgacatgacaatgaagtgaaacagtaataaataaaaatgatttattkatttattaaacagctccacatttacaccaaatctggtgctatttggtgatacatgctgaggtagagatgaaccatggcttctaggcttaaaggtttcactctgagtccatacatttcagcaatgtggtagctagtgattttcaattattagtattcacactttttataattctctcccatgtttaataggactgatgcatgaaaaaataggcttttgtgaaatatgacaaagctaggttataaaagatattgcgactttcaccttgctctacgagtaacttgctctaggagtaat

SEQ ID NO: 483083 - DNA, 561 bp, Homo sapiens
gctactcaaaaggctgaggcaggagaatggcatgaacccaggaggcggagcttgcagtgagccgagatcgcaccactgcactccagcctgtgcaacagagagactccgcctcaaaaaaaaaaaaaaattaccatttaaaatgcattctttttaatatgacttttacatttaatgttaaggtggccaattttgttgttaacttatagactggagacatttaaaaggatatatattgacatgacaatgaagtgaaacagtaataaataaaaatgatttatttatttattaaacagctccacatttacaccaaatctggtgctatttggtgatacatgctgaggtagagatgaaccatggcttctaggcttaaaggtttcactctgagtccatacatttcagcaatgtggtagctagtgattttcaattattagtattcacactttttataattctctcccatgtttaataggactgatgcatgaaaaaataggcttttgtgaaatatgacaaagctaggttataaaagrtattgcgactttcaccttgctctacgagtaactt

SEQ ID NO: 483084 - DNA, 670 bp, Homo sapiens
cataactttaaacacactctatgatttgctttattacaagttactagtttgaataccatttatgcttaaccttcccaatacatttcacttactctataatttgtctttcttttaaacaaatttaatattctaaaaattggaaacttgaattatagtaaycatttagtggaaaattcactcgacagttaactttgaggtgatttccccacctcactcaatttgcttaatgttacacaaattacataaggtacattttaaagagaggattcaggtctatctgtacccaaatgaaggttttgagtttgtttgtttgtttgtttgttttggtttttggagggttctatttttggtttaggttgcttcttttactttaccatttcacttctttgaacaaagattcctaaagtaaatcctaataatgtttctccaggatttccccacaatttatttgtttgttttttgttgttgttgttttttccacacacattaattaagaaaggtcctggaaggaataaaacacacaaaataaatagaacattatgtatagattgaatcttacaattaaccctgccaccctgctgtccttaatgaatatttatgtagttatgcattgtttagcaatgggaatatgttctgagaaatacatctttaggcaatttcatcattgtgc

SEQ ID NO: 483085 - DNA, 670 bp, Homo sapiens
cataactttaaacacactctatgatttgctttattacaagttactagtttgaataccatttatgcttaaccttcccaatacatttcacttactctataatttgtctttcttttaaacaaatttaatattctaaaaattggaaacttgaattatagtaatcatttagtggaaaattcactcracagttaactttgaggtgatttccccacctcactcaatttgcttaatgttacacaaattacataaggtacattttaaagagaggattcaggtctatctgtacccaaatgaaggttttgagtttgtttgtttgtttgtttgttttggtttttggagggttctatttttggtttaggttgcttcttttactttaccatttcacttctttgaacaaagattcctaaagtaaatcctaataatgtttctccaggatttccccacaatttatttgtttgttttttgttgttgttgttttttccacacacattaattaagaaaggtcctggaaggaataaaacacacaaaataaatagaacattatgtatagattgaatcttacaattaaccctgccaccctgctgtccttaatgaatatttatgtagttatgcattgtttagcaatgggaatatgttctgagaaatacatctttaggcaatttcatcattgtgc

SEQ ID NO: 483086 - DNA, 670 bp, Homo sapiens
cataactttaaacacactctatgatttgctttattacaagttactagtttgaataccatttatgcttaaccttcccaatacatttcacttactctataatttgtctttcttttaaacaaatttaatattctaaaaattggaaacttgaattatagtaatcatttagtggaaaattcactcgacagttaactttgaggtgatttccccacctcactcaatttgcttaatgttacacaaattacataaggtacattttaaagagaggattcaggtctatctgtacccaaatgaaggttttgagtttgtttgtttgtttgtttgttttggtttttggagggttctatttttggtttaggttgcttcttttactttaccatttcacttctttgaacaaagattcctaaagtaaatcctaataatgtttctccaggatttccccwcaatttatttgtttgttttttgttgttgttgttttttccacacacattaattaagaaaggtcctggaaggaataaaacacacaaaataaatagaacattatgtatagattgaatcttacaattaaccctgccaccctgctgtccttaatgaatatttatgtagttatgcattgtttagcaatgggaatatgttctgagaaatacatctttaggcaatttcatcattgtgc

SEQ ID NO: 483087 - DNA, 670 bp, Homo sapiens
cataactttaaacacactctatgatttgctttattacaagttactagtttgaataccatttatgcttaaccttcccaatacatttcacttactctataatttgtctttcttttaaacaaatttaatattctaaaaattggaaacttgaattatagtaatcatttagtggaaaattcactcgacagttaactttgaggtgatttccccacctcactcaatttgcttaatgttacacaaattacataaggtacattttaaagagaggattcaggtctatctgtacccaaatgaaggttttgagtttgtttgtttgtttgtttgttttggtttttggagggttctatttttggtttaggttgcttcttttactttaccatttcacttctttgaacaaagattcctaaagtaaatcctaataatgtttctccaggatttccccacaatttatttgtttgttttttgttgttgttgttttttccacacacattaattaagaaakgtcctggaaggaataaaacacacaaaataaatagaacattatgtatagattgaatcttacaattaaccctgccaccctgctgtccttaatgaatatttatgtagttatgcattgtttagcaatgggaatatgttctgagaaatacatctttaggcaatttcatcattgtgc

SEQ ID NO: 483088 - DNA, 599 bp, Homo sapiens
tatgccagagaagatttaggagaaggttgtcaagaaaaaaaaaaaagaaaaaaaagaaaagaaaactctgacgttctctcaaaatgctgaaatcctgccgataataaagcaatccactgtccagttctgcattaagcacctacgtaattgcattcacctttgcactgggcactgtgaacaaaattgaaaagaaaataaatatgtaaagtaagccctccatggagatgcttaaaactgaattcaggaagcaaaatacatattcaataattaacctcacttccatgtacaatctttggtagttcaacatgagttgtataaaaacagrtatctgcatgcaatgaagtagttttctgagaagataactctatttccactgaagtgtggacttgagagaagaaaagattaactgaagattaactgatactcgcctatacaggaaactgcaaaaactttcagggaaaagataatgaagacctgaactaaggcactggcaggggaaatggacaggaaaagccagattcaagagatatttatgaggaaggattagtaagtgaatgattggctgtgcaagataagggagacatcaggagtcaagattg

SEQ ID NO: 483089 - DNA, 615 bp, Homo sapiens
gtgcaatttcatacagatttttaatcatgttgatacaattgagmtattaaacttttacatgatttctgtttcttgatttggcttatgaaactattctctacaaggccaaaatacacctctaaaaaagaatagcacgaacataatgtgtatcagcaaaacaaactaccaaacattctgtattgattgattcattgtacataagtttcaaaaagagaagctactgctgtgtgttagaaaccaaaatttgtgtgacctatggggtagtcacacatcctatctcactagagtgggatgggaaataaagaaagggcactctattatgctagtatgctgtataacttgatctagtgttggtttcaaagatgtatttacattgtaaaaatttagtaagttgtaccctgacaatatgtgtacttttcagtatgcttgcccctaatagccatagcctgttttatcactgccatatagcatacataccatcatatgagtatactacaaaatatcaatccagtttactgttgattggtatttacgttgttttgatgattaaaaataatgctattgggccaggcatggtggctcacacctgtaatcccagcactttgggaggctgag

SEQ ID NO: 483090 - DNA, 628 bp, Homo sapiens
gatatattttatcttattctgaaaatgattatatttactctctcattatataaataaatgagataaattttgcttctggaggttcaggaaatacaaatcagccaatttatagtggacttctctgtgaaaaattagatttaaaatgcatttagtccccaaattaatgagtttggctatcatccaggttaattaygaattagactctcctatttgcttagcaaatttcaagatggctgcatgtaaagtcaataagaggatcttaagaggctggtgaaatgtaagcaatggaaaagtagttaataatcaaaatatactttttagaaggtgaaaaattacctttatagcaattaattaaatagtaattaaacaaagtgtttatttctcgtttcttgtcatgtacatagcaatgccttgcccatcaacttcaaacaaatggtttagctcagatcacctccgtgaggtacaatgtaatatgacaagtgagcctattatcaaacactcattattagcgttatgcttgggaaaatgatgacctgtaaagatgttcacgtcctatccctggaacccgtgaatgtgttctcttatatggaaaaagataactaagtttcagatgaatttaaatttgcta

SEQ ID NO: 483091 - DNA, 598 bp, Homo sapiens
ttttattcaaatatatgaaatgctttttaattggaagaaaaaataacttgggaagtgagcatatagctgtaactgctaattctgcctcttcctgctgttacaatgattctaacaggggagattattaaatgaaatcctgaagtaatggaaagaacgattgtgttaaaaatgctgagacacaggtcaactgagacttgtgatgttattacctttctgcttggcagtacctccgcaatacaatatcggactgcagagttcagcaggaaggaagacaatgtaatgatgattctatttttcatgtagcttttctttgtacttgtagaatatcctacatcacattgcttcaaaaaccaggaactgccacactgtgttctgccgcttgtaagtaattaagaaacatttaaaaggctttatattcaagactgrgttagactgtctgcaaaatgaaagaatggaaataaagattaagaatatgttagtcctggcaaaagaagagaattaacggattagccaaggaatctaaagtgtttccattattgctctgccacttactggatgtaatcttaggcaagttatttagtatctctgtgtcttagtt

SEQ ID NO: 483092 - DNA, 417 bp, Homo sapiens
gaaggctgctggttgaggttattttctgaggatgagtgacttccctaagcttgcattttgtctctatgctttttctacagaccgtacccctcccacctcacctttctacccaggtgtcctgaatgattagaaagcagcagttaagattatagggcttgaagtctcagacccagctttgaatgatttgctgctttctaccccaggcaagccatttaacttatctggggctcagcttcctcccttggtaaacaggacaaacaacaccgtcagaattgtatggcatttcaataactaagttacggttaaccatagtatttgcacaattagcaccaaaacaccctctggactcctaccaaatgcagaccagacaktagctaatcctgacattcaagttgcagtaccccctactctgtactt

SEQ ID NO: 483093 - DNA, 613 bp, Homo sapiens
tagccaaagatgggaatttatttaaaagttatataaactaakcactgaaagaaagccaggcctaaagaatgaaggagattccagaatttgatctttatttcaggacctatctctttatttctttgaaaattaatgcatatatcctcagcagcagcataaagctattgtttgtacatgactatggctgaagttctaaaatgtgttttgaatcgtgaaattacaagcacagatctacaaaatggtgatagtgtctctatactaaaaatacaactgcacattttcaatttctctaaaatgaactatgttactatgtaattgcaattacagaactgctgttaatgatgaaagaccctacgcctacctagaccaatcctcttattctaccattagagaaactgtagcctgggaagaagtgatatgttcataatttcccagaggtttaatagtagagccagtagaagaatggagatcctttgatggctgctgtatcagacatgatgctttgtgccacactgggagcagtggccaagaaagaacttagttaagaacctgagttctctagtgtcagactgtcctcgggcaagtactttatacctttctgagccttcatctg

SEQ ID NO: 483094 - DNA, 608 bp, Homo sapiens
ctgatgtctacgtggtgcagggaaagcaaccatttctggtactactgacataygacagaagtgatattgcattaaaatggaaaagaaagagaagactcatatcccaggaaggaaggaatctgggcctgtctcaggcaaaactgtgaattaaatgaaagatctctaaaacttcatatcttggcctaatggtcacttttttctttcagtggtctgcttaagcagattttaattgccctgaggctttctttccctggctgtgtgcatcttcccagtcacctttgctgaggttatcaacatagcaaaaccctccctaggttgtgccacatgctccagactttcccaacccatttctcaaaaatatcaagtaattactgcgtttggttccatattgggggatttatctaggaatatatcgacatgcttttctttccaagacacatttatacttgaaggtagactgcgaagttttattccaaaggagacactaataaagggcgtttcaggttccaggcaggtgccttggctagtgaaaagaggcagaccgcggtagacaatatgtctaaagaagcttggatcagatgacaacactcaaatcatgtcacaaaggc

SEQ ID NO: 483095 - DNA, 543 bp, Homo sapiens
gagctgtaccattttacttttaaatgtacgtttttgaaaagaacacagtcgtttcttattattctccttttgtacaatttcattgcattcataaccagtcaaagggtcctgwtgattctccggcagaaaaactatttgttatattcacagtccaagtgcctactgattagcacaggtattttgcattagctgattgggatagaagtacagtcttcctctaagctttactgctttctccattttccattttttgttatttttcaggcctggattcctttcacttggttcattctcttaagaattaccagccacagaatgatgtttttatttatttgaaaagtttatgtccatttgcaaatgattcaagacaagactgagaattccactgcctgatttgcagaaagttgttgctgcctgaaaatgtgctgggcatgtcctgttgatagatagtacaaataaacagtgttaatacaatgggcaaacttcagagcatttccatagctcccgactattgaatgatatacaaaaatatatgacttgggg

SEQ ID NO: 483096 - DNA, 674 bp, Homo sapiens
tcggcttgctgaaacctccgtttcctgggttcaagcaattctcctgcctcagcctcctgagtagctgggattacaggtgtgtgccaccacacccagctaatttctgtatttttagtagagatggggtttcaccgtattggccaggctggtcttgagctcctgatctcaagtaatccacccgcctcagcctcccaaagtgttgggattataggcatgagccaccgcacctgrcctatatcttcttctattgagaaccattcatgacttaggaatgacaagaacatatcaactatacttgctaaacagtaaagagaaaaaaatcattttctttttcccttaggaaaacactgagactcagtctgagcttctggaaggctaaagcctgcaaaaacatgggcttttcaaagctcacagaggcaaggagagggaggcgatgggtcagaccaccactcaattttctgtagtgatggcagagctgagacccagactcaggagaaagctgatccatggcccttctatgtcttgtgttagttttgtgggatgacattctgcatgagcaattgattgtgctgctggaaacacaaactatgaatctgagtgtctatggagtttattcttgtgatcttatgaaacaagtctcctgcatacagatttagggacaggcatattgtcag

SEQ ID NO: 483097 - DNA, 540 bp, Homo sapiens
agttttcaagtggcgagggaaaatgaaaaataacctcatttaactatgtactcatctgttttgttttgtttttttttttgcacctcacaaactgatccagtcagcagaaaggactatgggtgtttttgagcccagagtccactrcatcataaacatagggctgttttaaaccaacactgtgtggagctattgccttaacagagtctgatggtcaaggcctgaaacctggatctgactcagactaggaaacaaaaacagtaggcttcagagcatgccatagacagagaattaaacaaaacctgggagagggctcaaattttcagaaggaaaccgcttcagcaatttgaatcattagtttaccaaagcctagtaagagaagaggcttttaggaaacttctaaataaactttatagacccaaattaaataggttgatattagaaccttgggaaagattcagaatatcctaaccacttacaatatttctgccaacaccttttattcctctcttgctccttcttcttaaatgcctctgatttctt

SEQ ID NO: 483098 - DNA, 540 bp, Homo sapiens
agttttcaagtggcgagggaaaatgaaaaataacctcatttaactatgtactcatctgttttgttttgtttttttttttgcacctcacaaactgatccagtcagcagaaaggactatgggtgtttttgagcccagagtccactacatcataaacatagggctgttttaaaccaacactgtgtggagctattgccttaacagagtctgatggtcaaggcctgaaacctggmtctgactcagactaggaaacaaaaacagtaggcttcagagcatgccatagacagagaattaaacaaaacctgggagagggctcaaattttcagaaggaaaccgcttcagcaatttgaatcattagtttaccaaagcctagtaagagaagaggcttttaggaaacttctaaataaactttatagacccaaattaaataggttgatattagaaccttgggaaagattcagaatatcctaaccacttacaatatttctgccaacaccttttattcctctcttgctccttcttcttaaatgcctctgatttctt

SEQ ID NO: 483099 - DNA, 600 bp, Homo sapiens
atgtggtgatgcggtggcattgtgacattaggcattgcatctatggaggaaaatatcattacttctttggccttaatgttgcatatatcccctacaagttcaagagttcattcattgcatttcactacaaattatgtcgcagaaagtgaaataatgcgctatgtagttctaaatcttcttttccataaactatgctgtcctgctttattgttcagtgatgcaaaacttctcccttacagaagatgtatttgtcttgatcccattaatatgggtcagtaatactctaagtaataattcatgcaagacaaagtcatcatgaatgttacctgaaacaaacaaccaacagttttttcctgtcagagacttcaaacttatcacctagtagtccacagcacaatgtaatactaattaggtcagagaggacagttaaaaattattttctcataattactagttgagattatgaaacaaaaagaattggaaataccacaatctacgaatagctggaaaacctccaattattgaatgcacacaaaatcctacaaattttgaggatactcttttcgtcaatctrtgtatttcactctgcataatattaag

SEQ ID NO: 483100 - DNA, 608 bp, Homo sapiens
ctggtggaccaggatattgccttctctttgttccctcacagctccataactctgggattgacaatcaccattgcctcctccccagaacatctaacttgagcatgcccatacatcacgcccccaccaacctatccaaggaattgtgcctattccattacaaggggatgatgagcaggccatgtcctgcagggttggggagggaggccccgggatctggctgtggcctctggtgaccataacccatctcccagctccccaaagagaactgggcatgagcagactcaatctgctttgagtctgcattccaaggccctgaaactcctgggsagcatgataccttttcttcgctgctgatgttccgggtagaagtcctccaggtgatggagggaatggggtctccggaggcttcacaggtaagagtgacctgctcctctaattccatggcagtctggttctctacatatgtgattttgggttttgctgaaaagacaaaacatttctctgagtttatctaattattgagctttctgggtttaaatgatggcatgcacctatccaacaaaggttagctgtctgctaagtacaagaccctagtctaggtgttttag

SEQ ID NO: 483101 - DNA, 442 bp, Homo sapiens
gactttcttaggctgctgcctcatcaagtatttgctcctccttcaagaggaacccaggaactgaatggtgctgttcacttagaaacagtgagacccttgcctaaatttcaasttactcagtccacctgtccaccctgggaatgctctcctcctccataacatcctagaaatattggctaagaggtaaagaggctgcaggaaggggaggaaggaagcattttaaatgtagcctctgcaatttggccaagtgccgggtggcagagatgaaataatagctcacggcgcacacgatcagatgcttgccgagagttaaggggtgattactgactgctctgccaacttatgagtcctcattacagtttccagagctgaaaaactctgcttagcaccacaaaacaatgccctttctggcctgccccctttgaaggtcataaaccacttt

SEQ ID NO: 483102 - DNA, 629 bp, Homo sapiens
ggtgtgagctggaggaggaaaggaggattgacgtagaaagacaacatggtaatccacccactgaactctccaaagaagggccaagggaaacctggtccccacacccaccacactcagaacggctactctgcccatgaaaccagaaaaatatcctcactcagaggcaaaattagagtctgcttaagtcagagatgaggcagggtttarggacgcagtgatctgagtatcaaccacgatactgcttttcaacagtaatttcttttgaagctttgtggaggtcattggtgccagtcattaaaaatgttgggctttccacctgcttcttatgtgacagaacatttcctggttcttttgtaggtgaaggtgtggttatgtgtttagttctgcctgagttgaagcatgccacttacagcttgattggtttccccaccccctagctttgtggaggtatggttgacaaataaaaatcgtatatatttaagatgtacctcatgatgttttgatatatgtacacattttgaagtgattaccataatgaagctaattaacatatcaatcacttcacacagctacgtttgcttgtggtaagaacatttgaggtctactctcctagcaaatttcaagtatac

SEQ ID NO: 483103 - DNA, 621 bp, Homo sapiens
cgacactaaggaatagttcattttgttaggggtgatggtggttttatggttatgatttaaaacwttttatctgctagagtttcatattaaagtatttatgggtgaaatgatacaaaggcttgaatttgttttgaaatactccagtgacggagacattaaggagggtggcaataaatgagacaagattggtaaaatgttgataatgttgaagtaggtgacaggtacacagggaacattatatggctctttacttttatgaatgtcagtgattcccataatataaagtatttctgttttgttttgttttgtttttgagacggagtctttctctgtcacctgggctggagtgcagtggcgcagtcttggcttactgcaaaatctgtctccaaggtttaagcaattctcgtgccccagcctccgagtagctgggactacaagcacatgccactatacctggctaattttttgtatttttagtagagacgaggttttgccatgttggccagggtggtctcgaactcctgtcctgaagtaatccacctgcctcggtctcccaaagtgctgggattacaggcatgggccaccactcccagcctaaagttttaaaatctattaaaaaga

SEQ ID NO: 483104 - DNA, 533 bp, Homo sapiens
tttagtgcaaagtagcagtatgcttcggggtatcattttctgagccccaacaaaggaaacctggtattgtgggtaggagccaatactgtctgagttcaaatcctgactctgccatgtgcagcttatctctgcttcaatctcctcatcaataaagaggatgatcatgatagtacctatcttaaaaaaatttttttttagtgaggtgggctgtaactatgttgcccaggctggtctcaaactcctgggctcaagcaatcctcctgtctcagtctcccaagtggctgggattatgggtgtayaccaccatgcccagttcaatacccatcttataaggctgctattaggatacaatatttgtggtgtttatccacctcctgatactgaatagtttctgtagcgaggtacgtaggcacgtgagtaggtcaatgtgacctacaataactaatgctaataactaatattggactacttgtttgctgtttgctaaactgctgcttgctcaaaaagttctgggctgttggctttgattcttc

SEQ ID NO: 483105 - DNA, 514 bp, Homo sapiens
aaacaacaaaatcatacaaaacccacatcttatagttcctaaagttaaccttaaaaaacatttcctaggagagcaaaagacatcatttttttcatctccaaaaatgcattataactcaccctagttaacaaatagtctggcatattccaaatagatccactgggccatmgacctcatctaacaaagatgaattctgttcatttgctctgtgaatagagctaagaggcttatttgtgcaaagactaactgatgaggtggaagagagagcaagacagcaagaaaatattagtgaatatatatcttccaattgcaaagagatatggagcaagaacctgcctagatggaaggaatgagaactataggctatagttatggatgggaggttttctttacgcaaaattaactagcttatagtgggaagtgagtggatggaaacgtgtctcattaacatcatgttcgaacttaccataagctcagtgagggtcaataacctgataggatggctgtttttagg

SEQ ID NO: 483106 - DNA, 631 bp, Homo sapiens
agtaatgatcactgcaataagcaactcctttccatggacgcagtctcaagtccatgayggctttactttaggagggctatttatgctatcctctatttcagaactatattttgctagaaaaatgattaaagcttattctctttttgcattttgaagtattgggcttttcattttaaagtgtttgatatgaaatttcatctttataatgagagtagctatttattgattgcttacaatgctgaggacactgtgctaagaactttatattcacaaacctatttgagccttaaaacaacccttcaggataagtattatcaactattcttctttatagatgaagcaataaaacatcatataacaagtaggggaaaatccacatctcaaaccttaggctttgggactccaaagcctatgttcttaaccaccaccttaccccatcttgcctttgcaatcatgtatggattgccaaagagctatgcccagttattcaccacattttttcaatataaaataagttcatcatctaataagaagatcatgatttcttttcagctatttaagtgctataaattctctttatttgctcattagctggtatatcttatcagctaatggcaaaatgtaaaaccag

SEQ ID NO: 483107 - DNA, 617 bp, Homo sapiens
gtacaaaaacaagattacaagggtattaaggcaatacacataagaaataagagctttaggtaacagattctgaaggactttgtaattaactgacagcagaagtgaagaggcaggaagattattggatgcttggactgatacactttaaaatagagaattcaagatgagatcatggatgtgttgaatttgaaggtactatggatactaagaaacactcaaatgaaaaatgaccaataatcatacaaaaataaggaccgtgaattcaggagggaggtctaaaatggaaatgtgtgtttgggagtcatcagtgtgatgtggcagtggaaacatttgatatcaatgaagatacattgcttgagaagagaagaacttgagcaagaacaatattgcttagtgtgcaatgccaagcggtattatggaacccataagcatttctgaatgtcagatttgaggattgtgatccaaacaggcagttattgtggtcagatacatcagaagtgactataatcaagagatgacagtgaatcggtaaggaaaagagaccctcttgctatctgtcaaaggaggagggasagaactttaaaatataatgaatataatagtgtgagttagaagat

SEQ ID NO: 483108 - DNA, 601 bp, Homo sapiens
tttacaaaattaaataacaccatatttaatcatagttatattttatattaaatttattatctatttcatttatgtgaatattttctaagttataacagtttgcaagccctaaactagacgaagctgagaactggcagatattatggattaaatttgcatagcatttattttccctttcctaataatggtccagttttcctccatgcatccacctcttccctcatgcagcccatattcataaaggtgcactaaccacatccctatctcctgggaaatttgtttagaggtaatctcaacacatctgccacggtgattgggtcaggaaaacagacataagccgatcagcacatggccttgccctggcctcaaggactggtgcaggaatggacatgtaatctaatttacaccagtgaaatacaaagaaaggtttacgtgaaactcctgggaaataatttttctcacycttaattaaaaacaaccagaaaaaagttttcacttcctctgaaaatcatgaaatgaaactgtgaggcttaaagtaactagtccttttgcttccaaaagaagccagcctgaagatgaagccaatacacagaggaggcta

SEQ ID NO: 483109 - DNA, 340 bp, Homo sapiens
ctgcggtggggaggacccactgtgtgcgcctggggggtggcgtggggcactctgggatgagaagatgcgacttctgccctgagagccctgytttaatggaaggcgggggcatagttgcaggcagaagccatcaagcactgtggtcagaccagcattccatgtcaaaaatggccttgttggccgggcgcagtggctcatgcctgtaatcccaacacttcaggaggccaaggcaggcagatcacctgaggtcaagagttcgagaccagcctggccaacatggtgaaaccctgtctctactaaaaatactggctaatccgggcatggtggcgcgtgcctgtaa

SEQ ID NO: 483110 - DNA, 606 bp, Homo sapiens
cggggctcctgggctcacgctgttgcgccactgcatgcctccgggggctcgggggggcaccctttacaccatcatcacaggcagcactcctgggggaggtgtgctgtgcaggggactcgctggccaccctgtcgggcaaaccacaggggactgtgtaggacaggcggtcagttcaggagggacaactacccaagcaggggtcagagggcactcggattcgggaggagtgctcaacttctcaggcccaggcaaccagaggtggggggcggggtgctgcttcctgacatgggaggcctgggggcctggctgcatttcctggtgtggaggtgctgggaggtgtggaggcctcctcctgaggctgggaccctctggccatcctgacccactgttccgatcctatcctccwgtctgagggcatggcctgaactcacagccgcacacactcccctctgcacagggccctgcggggccggcacagcagcctctcctctacagatcaggatgctcagctccaggagggctgggactgtccaagaccgcacaaccagggtcagacacagctgggccaaccttgtgacttctggctccacgcacagattctaagca

SEQ ID NO: 483111 - DNA, 452 bp, Homo sapiens
ctgtaatttagggtctacccatagatacactgaatgcagtatttagaaggtgcagggacacagcagtcctaactctttcctgcagcgggggtggttcctgagcgagccmcagcatatctagctcctgatcccctctcactgtctagtctccagcttcacggggacaacagcttcgtcccaccttcagacctgaactgacattggctctcctgtgtcttgagactgccagttttcagactcaaacttaacactgtgggctgtcctggttctcaggcctttggattcaggctggaattccatcatcggctctccttgatctccagcctgcccactgcagatcctgggaccgggaggtgggaagcagtgatgatgctagtcaggattttcttctcggtcactttggaagccagggacctccggctgacgatgctccaccctgggccgagtctggc

SEQ ID NO: 483112 - DNA, 330 bp, Homo sapiens
gcatggatgatgggaatgttatcaagaggaggggcctccaggttggcgggggcaggggtggggggattccgggagccgttctgccattgtggggatactgggctttccaacctccctccagattattcctcctgagctgcagaggaatgaaaatccgagcccaggacttttttttcctggggacaagggcaacccagccctttgccccaggccacctgcctgccacaggccatagtcctggaggccggtggtcacccactgcttccaccctgccagcaccctggacaccggcctggagcaacaaygctccagccctgtccctctgagtct

SEQ ID NO: 483113 - DNA, 521 bp, Homo sapiens
tgcctgggcccattgcagcaacagggacccacccaccagcatgaggcccctctgcaggaggggtgggggcaggagggagcctgtggggcacagggctgcaggaggagtcattcttctcttcattaaatcgcaggtttcagccaagttatccccagcatggctgcttgcgtgggaagcccacagctgagggactgtctgcacgtggcatgcaggagtcacaagcgccatctacaccccaccccgggccaggcagatgacctctctggtctcagtttcctgatgaggaacaggaagggctggaccgaaagatcccttccagcccggacatggaatgaccccacgagggccacggtgaggtctgtcccagctccgcacactagctcgggccagcartttccaaaggcacagccgcaggggccttggagcagggacaaggaggaccagcccacttcaccctcctgggcagaggtcaaggaccctgcctttggcccacattccttgtggccaaaaatgcagaagca

SEQ ID NO: 483114 - DNA, 585 bp, Homo sapiens
ttcagtaccttattatgtaggtcattaagaaccaccaaagaacctctgaactgaagtcatcctctgcaaggatttgtaagtatatctcacccctacccctcagatgtgtacaggatttactacagatgtggtaaaacagctattcccatcctgaatttataaactcaggaagataaaagtcatagatatgaaatgtgaaaatggcattctacattatggatgtcgataattgcccccccaacagcttccttattgcttgttgtcatgttacccaaagtaagtcctgtctcctcactttcttaagctcttcttrtttctttgtcctccacccctagttacatttgcaactttgtcatcaccaataattacatctccttaatctccatctcatgcctccctttctttgaccaacgcctctactcttctacctccctccctctagtagtccaacaccaatgacctttctattccatcagactttcaatccattggtcctaccatattttctctgcctttcatccccttgctatcatgattcccttgctatcttgattccttcttcacctatcttaaattccatgttca

SEQ ID NO: 483115 - DNA, 553 bp, Homo sapiens
tgttgggatattgattacagaagcctagtttcatgcaattttctttaagggggatagaaaataggaactactttaaaaaaatcaaaccaggcacagtacactcaaaactggtgtgtcaacacccctaaaatgatactagtttggtgaggttgtgaataacctctccctggttatgcactctcatgggatgtgcgtttgatgtgggagggagagtcctcctcacctcggaggttcctgaggaggactttcagcttctgcggctcattggtgcgtctcctgttgaagtcagctcgtgggtgtgtttgggcacagtggtctgtctgcaggatgtggaagaggctggccatgttaggcccaattttctccatcaggctgtctctgattgtgctgactgtgtcttcatcacattccagcaggcttcggacaagtctgttatagtatctgcatcaagaaagagagtgcatatggtggtcayccagtgagagcccggcgagacccaggctttcacccgggctctagccaacacgagtccctaatggcctgaccatgcaaa

SEQ ID NO: 483116 - DNA, 584 bp, Homo sapiens
gctgcaatacgtaaagggacagcaaactgaaataggctgggcacggtggctcacacctgtaatcccagcactttgggaggccaaagcaggtggatcacttgaggtcaggagttcgagaccagcctggccaacatggtgcaaccccatctctactaaaaatacaaaaaaaaaattagctgagcgtggtggcaggtgcctgtaatcccagctactcagaggcccagaggctgaggcaggagaatcacttgaatccgggaggcggagactcaaaaaaaaraaaacaaaccccaaaatattgaaacaaagttactcacccccttaggctggggagaccacttttgactagaaaactgtcttttaaggctaatatcctgaatgttgccactcggcacaaacggtcccaatcccagattgcagcccctggaatgagaggacctccccagcccgccttgtaaaatcctggcagttgagggctccatgctgtccctcccctccacaccgtgcttctgggacaggctgccaggcttgccgtccctacactcactcactcaccagtcagagtggattggggcccactctaacgg

SEQ ID NO: 483117 - DNA, 645 bp, Homo sapiens
caaaaccgctatgccctcacccctgcctcttgttcataggttgtggagcatggcctgtttgtcaagcactgcaaagtcgaggtgtatttgctggaactgaagctctgtgagaacagtgaccccaccaatgtgctgagttgccatttcagcaaggcagacaccattggtgagaggctgggctggggtccctggtatgtggtgagagagtgtaggacattgtggctgatgggagggaagagggcattattttatatgccctctttagatttgttacccaaatcatctcgagctgtagttgccagtcctgacctgggggcctattcctccaggaattcttatggagagaacactgggcctgctccttgcccatttgtctatgataatgaagataaggaaatgtagatccaaagaagtttaaaaataacytatttaaaaatctcagcaaggtttacagtgagctacgatcccaccactgcactgcagcctgggcatcagagcaagatcctgtctcttaaaaaaaaaaacaaatcgcagccagaaaatggtggagctagcttttgaagccatatctgagttaactccaaagataagctttctcgctttctatgttgcttttgcgccataaatgagagacacacgttagca

SEQ ID NO: 483118 - DNA, 525 bp, Homo sapiens
ttaaagtgctagtaatgtaacgccaaagaatcctagaattgtgaagagtcgtcctggagattgttgcttaaatcccctcattttccagtcatcctactggacctccttgcttggatgcccaaaccacaggacctggtgccaaacaaatggtcttccctttttgcacaaccatctactcctcctctgacttccttgtttctattaataacaccaacagtccccaatctctaaggctcaaaactggaatttcctttttcctctccttcttgctcatcattccatcttctcattgctacaggcccagtttagatcctattaattctttttctagactcaactagtatagtctccttgctattctctgctcccatccscctagaggctctcccacctctagcacatcctacagaccctgaacagcctttacctttcaaatggcactcagtagttactgacttgtcttataatcatttcagtagcaatctccttaaagtataactcagatcatgtcacttgcttgctcca

SEQ ID NO: 483119 - DNA, 630 bp, Homo sapiens
ctttcagctctgtgttagacacatgtatataaggaattcactggagtccaaatgggaggaatgctaaatttctatctggagagagggtggaatgaaaagtttcctgaagaaaatgaccctaaaataacatttaaggggtgaacatgattaccactggtgttgaggtaggataaagccattctgggaagaaaaaaaatacgagcaaaatctgaaggttttgtcctagatggttccaattttgagagagatctattgaaaccttacattataatttttgttaagttctccttgattttttgttgttgttgttgttcattttttgtgttttgtttgtttgtttgtttttcagaatatatctagttctattgcccaggctggagtgcagtgatgcaatctyggctcactgcaacctccgcctcctgggctcaggtaattctcctgtctcagcctcccaaggagctgagattataggcatgtgccaccaagcctggctaattttgtatttttagtagagacagggtttcaccatgttggccaggccggtctcgaactcctgacctcaggtgatccactcacctcagcctcccaaagtgctgggattacaggcgtaagccaccaaacccagccctc

SEQ ID NO: 483120 - DNA, 518 bp, Homo sapiens
  misc_feature (1)...(518): n = A,T,C or G
agagaccatcgtaaggagtttggatttcattctaggaggagtgggaagncattggagggttaagccaaaaagagacatgatctaatttatgtttcaaaaagatcactttgcctactggtgaaaaatagcttagggtggagtgaaagtgaggggaccagttaggaggagacgggtggctctggtgggaggaggcagggacgggggatgagaggaggaggaagaggtgacacttcaggagaaaggggcagttccttcctcctgtgtgaagcctgttctytgatgtgggagcagagggttttcctgggactcgtggcagtttgtcatagtgattctcaagactcagagatggccccaggtgtttccaccattctgcagcgggatccctctccatgtgtgcctgccaggtcgcgtgtctgctctggtttccccactacctgtagctcacaggctgtggcttttgacccctttgcctactcaccagtgtgtgagtgctggctgcggcatggtccagtgttcag

SEQ ID NO: 483121 - DNA, 537 bp, Homo sapiens
catctactgcttccaatcctgcctctgcccttattatccatgtaacccacagtgtgtgcctcaatgtgactgtaaactaggggtaaaaataacaggaccgtgctcatagaggtgtgtgagaattaagtgaggtaatatggtacatctggctcataagtgtgcaatgcatattaaatgttattattatcatcctgacccttaagttctacctaaaaccctttatgacatcrctaagcacacacttggccagccgagataatccttggctggttgcatcccctcttagcatcccctcccattttcttaggttagtgccgtttagtgtttgagcagcatcacacggtgggccggcctgggcctcctccctcccgtctctctcgttttgaatgggcttctgagttccgattcccaagctgtgagcacatgttggggatggcggggagggttaatgggtctagttagcagcaccaccttctgggaactgcaccttccaagaatttcttggaacgagcctcctaaacaccctagaatgtgatg

SEQ ID NO: 483122 - DNA, 636 bp, Homo sapiens
tgccacgcgatgccctgaagtctgactctgcccctgttttgccatctgtgagttgctcctgtgcttttccagtaccatttgattcttttttttgagaggttgggggtggatttggttatgccatttgcaagtaaaagagtccccaatgaaacaaggagttacagtaaaaagacatgacaaaatccttgctggaagacaaaggggagcaagtgggggctttcctgcaccctttctcatttaatcttmctgccattttacaactgaggaaatggagcctcagaatggttaaaaaccttctcaagttacatagctaagaaggggaacattatagtgatgttctggtaaactttgatgaataccatttttattataacaataactttctagtgactcaggtattcatattgcctccttttgggcaatgggagtgcaaatcgacactcctggaatctctggctcctcccaagaacttatcaactcatttctgtcaaagatcacttatcttctttccttattttaaaattaatgtttcttttatctactaactttaataactacttattttatttgaaaatatagttatatgttcatcatacaaaatttgaaaaacgggggaataggaagaaaagccaccat

SEQ ID NO: 483123 - DNA, 497 bp, Homo sapiens
tatttcatttagaataatgaaaacaattgatatcaaaaatgataaaagtttggccaggcgcggtggctcaygcctgtaatcccagaactttggaaggccaagtcaggtggatcatgaagtcaagagatcgagacaatcctgtccaacatggggaaaccctgtctctactaaatatacaaatattagctgggtgtggtggcacatgcctgtagtcccagctactcgggaggctgaggcaggagaatagcttgaacctgggaggtggaggttgcagtgagccaggattgtgccactgcactccagcctggtgacagagtaagactccgtctcaaaacaaacaacaacaaaaaaatggtaaaagttcaagtcctatatggtatgagaacaggacagatttcacttatctaggcattttcaaatctgtgtatttcaacaacagtagctcattaaacttcttttccatgacaatcaatgtgaatttaaatgtcatcaacaca

SEQ ID NO: 483124 - DNA, 546 bp, Homo sapiens
tttaatattcacattagttgaggctccttttttgataggtgatataattctaatatagtctcatttagaaatttacagtaaaagagcacaccacaacttcttgagaacaacttgggagatatcatagaatattatactttttaaaaatattcttgaaaaaagtaaagagtctaattttaacgtggggtgaggagtgagaaaagaacaagtaatatcttaccactgaaattcagaaacatattaatttttttattcctgtagtagtaaactaaaaagtagaaaagcaaatattgttasacatattctaaaagttttaaaaatcaattttattatgcaatcattaaattacatccttatttttctataaaattaggcatctattttgctttaaaatttttaagtacatataagttctaattactaaagatattgtcctaaatattctattgttaagagaatcaatatctttccatttctgtggataaaaagcacggacagaaacactgcaccaataagaaatcacagaggaatataagctttcaggat

SEQ ID NO: 483125 - DNA, 650 bp, Homo sapiens
ccatttcttgagcggttacaatatgctaggaactacgcaaaacacaacataaatgatttcattttatcacagcaactacattggtatcattccacacattttacagccaaaatctaagtacactgtccaagtcacccagtgtgtgctgtaaggcaacctgacaacaatttaaccaaacccatgctgtcatccatctgccagggtttcccataccatgagccatgcaccctggtgagaccaggatgattctagagtgtacagcgtcaagttggatgataaagrattttttaagaaaaaaaaaaataaaagtgtacagcaaacattccaaaacactgaaccacacattaagaaagcagtcccctttcaaatctttcagttccacttaaatcaaaaagaaaagacttcaaccagtaaaagaatgccttcaacacctctttaccatgcatttctccttttgcgccatagagggaacagggccttaagcccacaggcttctgtaggaatctgtgtaccacagaatttaataccaatgtgtactttttattatctatatttttatatctaacttctatctatatcaagagatactggttttttcatgtagagtggcaaagtttccttttaaaatatacttacttagaaaatatgaa

SEQ ID NO: 483126 - DNA, 650 bp, Homo sapiens
ccatttcttgagcggttacaatatgctaggaactacgcaaaacacaacataaatgatttcattttatcacagcaactacattggtatcattccacacattttacagccaaaatctaagtacactgtccaagtcacccagtgtgtgctgtaaggcaacctgacaacaatttaaccaaacccatgctgtcatccatctgccagggtttcccataccatgagccatgcaccctggtgagaccaggatgattctagagtgtacagcgtcaagttggatgataaaggattttttaagaaaaaaaaaaataaaagtgtacagcaaacattccaaaacactgaaccacacattaagaaagcagtcccctttcaaatctttcagttccacttaaatcraaaagaaaagacttcaaccagtaaaagaatgccttcaacacctctttaccatgcatttctccttttgcgccatagagggaacagggccttaagcccacaggcttctgtaggaatctgtgtaccacagaatttaataccaatgtgtactttttattatctatatttttatatctaacttctatctatatcaagagatactggttttttcatgtagagtggcaaagtttccttttaaaatatacttacttagaaaatatgaa

SEQ ID NO: 483127 - DNA, 650 bp, Homo sapiens
ccatttcttgagcggttacaatatgctaggaactacgcaaaacacaacataaatgatttcattttatcacagcaactacattggtatcattccacacattttacagccaaaatctaagtacactgtccaagtcacccagtgtgtgctgtaaggcaacctgacaacaatttaaccaaacccatgctgtcatccatctgccagggtttcccataccatgagccatgcaccctggtgagaccaggatgattctagagtgtacagcgtcaagttggatgataaaggattttttaagaaaaaaaaaaataaaagtgtacagcaaacattccaaaacactgaaccacacattaagaaagcagtcccctttcaaatctttcagttccacttaaatcaaaaagaaaagacttcaaccagtaaaagaatgccttcaacacctctttaccatgcatttctccttttgcgccatagagggaacagggccttaagcccacaggcttctgtaggaatctgtrtaccacagaatttaataccaatgtgtactttttattatctatatttttatatctaacttctatctatatcaagagatactggttttttcatgtagagtggcaaagtttccttttaaaatatacttacttagaaaatatgaa

SEQ ID NO: 483128 - DNA, 582 bp, Homo sapiens
taatacatcagtataattatggtcgatgaatgatatttatatattttamtaatttttcataattacatatttgcatgtataattattatttactgggataatatacttaggtgtcaattacctcttcttaccttttcctaagtcacatgaaaaccactaccttagctttacattaaaatacactaaacttcttatagaaaggaatcctaactatgtaacgcattagtaattctgtttcagagttttatctctaaactttattaatggttaaaatatcttaagatttagataacttgaagccctatgatgtaatcagtaagtctatcttagcacattttctgctaatgtctgcagctaattctgtattcaaaataatgatataattggtaaataaaatttaacagataaattctgttacttccacatcacaaaagattttaacactgtataaaatgattgtatgtgatagctatatttaacattaaatagtgtaagtggtaaccaagtaattggaaatagttcaggtaaaaaggaggaagttgtagaagaataagatgactcatgtaattgaagagaggacaa

SEQ ID NO: 483129 - DNA, 534 bp, Homo sapiens
gaaacttattaagtggtcttttaactccactttcacaccatttccaaggtacttgatgccaccaattcctcatacttttaaggctagaggaaatatttagtgttatgtaaatcagaatgcttctttcccctttgctggcttagggctccttgttttgggcctgccagatccgtcaccactgattcatgtgcttcccaacttccgaaatcgtgtccctgttttctcctcttctgttctcttctcttctgttctcttcgactgttttgatttcttgtccctttttttaaaaaagaaaatctttttactaccatttcagaggagtttttggagacagtgagatagaatgtatatgtycagtgaaatacctttttggaaatctgattcatctttcaattaactggattcagttttttatttcccttttcaccccccaaaaaagatgtgggtgctagattgttgagatccttggggcttgacaaaatttgtcagttgtctttatatttatatactttatttttttgctgatttcacttc

SEQ ID NO: 483130 - DNA, 619 bp, Homo sapiens
gttatgtgtcattcaccagccggctgtatttaacttgcctactgaggtggactactggccaggggaaaggccaatggtaagatcgaggtacaattccttggacattcttttcaaagtactgaaatggcctgtaccaccacaccctggccaggaggttcatctgggaagcttcctttagcacctaggataacaaagaaacataaacacatttcttacaatctttcactttaagttcaaatacttgccacgctaaaattcccaaaggactccatacctgccctgcgtgtccacccacatatcccagcttctctctctcatcaccattctacactccacattcatctacaaactgagccacatcccagtagaaaaacaacgccaattctgggagggcaaggagaacttatggctcactcatctcttgcttataaataaacacctcagttagcwttttaggtattcctcttctatgctaaaaatgttaacacttaattaaatgttaaatattaagcttgtgatgtgccccgggtagggagaagaggataggaaagcaaatcaagcaaggagggacacaagcttagaaaatatttttcatttttcaaggacaatgaaagtgcgt

SEQ ID NO: 483131 - DNA, 546 bp, Homo sapiens
gcagattgtgtatgtaaatgtggtcatgtgttagaagcctgtgaatcaaacagagagggtacaaaataatacttcttttttgtttctagttttgcgttggtgagctgatgatattttatgccactcaacaatggcacttgatttaacattagtgtttccacctattacgtggacttgaatgatctacctcatgtgtttcatcattctgtttagctgccagaattgttgccaacacagtaacattctttttgaaccactttagctaacttgaccaccacctttaaggaacttaaaacttgggttagcactatttatttctcattggtgattaaaatctgaatttgaatgttaaagcagatgccttccctgcctttagaatgaaacactccttggtagagctaagccaataattatatcttaaaggattctagattttataatggttcacacttaatctgtaataatcctgaaaactcagtaatgaggctctcatggcacaatagcaagccrtttgccacatcttcacataacggggtccctgttttt

SEQ ID NO: 483132 - DNA, 601 bp, Homo sapiens
gcataatgtgtcacctttcctagtctacatttgagggtccataactgaacaataatggggtgagaattgagaagattccaagcgcccatcaaaacaactgactcctacagacaggaacaagactcaatactcccctggggtgagatgaagatacagtcactgtgaatattttaacttgtgcacatattttatttctgtctggaatgatcctctcatgaatccaattagataggataagctaactgttcttctccacactacaccccygaaaatttactcatgtaaacatactctacccattttacagaggaggaaacagacaccaattttcagaacacataagggtggttaaaagtgagcatgattcagcaatggtattcaaggatgtaagcccaagtctccagactcctagacaagagcttttgcctctcaccaaattctaattgtctacatcatcttgacctgaaccttggcatggcagcctctgaggatatgaaagtctatgcgttcactccttactagcaattgatggagcaaagctatgtcctctgtctcttaacaccccatcacagagggaaaaactaatcagcacaaagtaaag

SEQ ID NO: 483133 - DNA, 601 bp, Homo sapiens
gcataatgtgtcacctttcctagtctacatttgagggtccataactgaacaataatggggtgagaattgagaagattccaagcgcccatcaaaacaactgactcctacagacaggaacaagactcaatactcccctggggtgagatgaagatacagtcactgtgaatattttaacttgtgcacatattttatttctgtctggaatgatcctctcatgaatccaattagataggataagctaactgttcttctccacactacacccctgaaaatttactcatgtaaacatactctacccattttacagaggaggaaacagacaccaattttcagaacacataagggtggttaaaagtgagcatgattcagcaatggtattcaaggatgtaagcccaagtctccagactcctagacaagagcttttgcctctcaccaaattmtaattgtctacatcatcttgacctgaaccttggcatggcagcctctgaggatatgaaagtctatgcgttcactccttactagcaattgatggagcaaagctatgtcctctgtctcttaacaccccatcacagagggaaaaactaatcagcacaaagtaaag

SEQ ID NO: 483134 - DNA, 517 bp, Homo sapiens
atttacctactataatgttcaacccaatgcaatatattttaagacaccctttacagatttaaattttattttaaaagcattatatatattttaaaataatttagggggcatgtgaaaaagtaatatcttgaatacattcaacataaaagtctattgtattcatactgtttctgttctattcaaaaaatcactcatattttctcctaatgttgactttccacctttcagctgagcgtagttttgactctcttaattaaaaagctgccttaatttggggcattttctatacctgcaataaagttagcttcttgatgtcttcttcctttccatacataattgcaattggattttaacaccacttttggttgctaagtaatttaatcatgaagattagtatgatgggaatatagcaaagttattaaaaattgagmctttggggtcagttggaacaaggtttgaattttaattccacctcttataagccatggggcttgaagttatttaatctctcaaagtc

SEQ ID NO: 483135 - DNA, 458 bp, Homo sapiens
ctggagtccaactacctgggttcaaatcccacttcttccacttactagctgcatgaccttgggcaagttactttagcttgtttatacttcaatttcttcggctgttcaatgtggatactaacargaagagctgcttcttcattgaataggtgtgaagatccagtaagttaatacatgtgtactgctcttcacagtacctagaaaatagctagtcttcaatcatgttagataaaatggcagtagtaattataaatgatacaaatagcaacaataatagtaaactcacttaacagctaattttaagggctttatgactttgctgttatatcctaaaacatcttttttaacaaaatgtgtatatttatagcctaaaacatctttgttaacaaaatttgtatatactcattttatgctaaaaatgtcatgtttaagtggccaaagaacttaaatagacatgt

SEQ ID NO: 483136 - DNA, 606 bp, Homo sapiens
ctcaaataaaaattctgaacycatggttatacgtttgattatgggctactttgcagcacagggttttgttttcataagaatttttaaaacaacatggacatcctttaaaggatctctctcttcaatcaatttcttcttatttatttaactacttcttaatgcttatatatgtttcccttattgcttctcttgcattctaggacattatgtcaacaagagtgaaagaataaaggtaaatagattttctagattgagggagcaatatgagaaaaaggagataagtaaaggtaacagtgtgttcttcagattcttcacatatgtatgtttaattcctttctctgatggagattaaaattttcttaatggcaggaaggggccgtatcttttcagtggaatattggttcatctgcttctataacagtgcaatgacgagtatacaataggtgttgaatatttttgaacaacagcagcagcaacacagcttgtttaaatgggcatatattttcattcacctgttgaagtaattaaggtattggagatttgttcaatgtgtgacatcattcctacatagaaatattgtcaaacagacatttacatgatatgata

SEQ ID NO: 483137 - DNA, 593 bp, Homo sapiens
aatcaagatttgtgaatcctagtgcctatgaagacagttcagctyaacttacatacttagtcacagacacataaattggtacagagagggagagagtgcatattaccctccccttcatagagactctgctcagttgggctcaacaaatgggacctagaagctgaagagaagggaaagtaaaagccacggtgccagataaaagaagatccataagtcatgactcacactttgtgtgttgggctttcatcaattagactggatgctactgttctcctggagaagagttaaaaggggatatagataaatttgaagcagtccttccacaaaaaaatttattagaagtaataaatatgttcagcaaggtggcagaatacaagatcaatatacaaaagccaattgtagttctataaactggcaaagaaatatctgaaaatataagaaaatgaaacaatcctgactgtaatagcaaccaaaacaataaaatagttcggaataagcttagcaaaagaagtgcaaggcttgttcactgaaaactacagaacattactgaaagaagttaaagaagacctaaataaatggaaagatataccatg

SEQ ID NO: 483138 - DNA, 206 bp, Homo sapiens
tgccattgccagaaagctgtttaaataactatgcaagtctatgatatctgtgatgtgaacagtgaccccttagatgtggaatgcacrttagcataatcatacaagggagtcttaatatgggtatttcaggtattccaggtctctccaggaatttggaatcacatctggctcccaaccccaccttcactctgagggaatccttgagg

SEQ ID NO: 483139 - DNA, 362 bp, Homo sapiens
tccctcgcggatagacatgagctctctggttctcctcaatctcaccattccctgttgccgccagtcctggtgaccaatgatctgtacttttcatcacactacactgctgcttttctccacccatctgtatcacaccctggattctcgaggcatttgaatttgtgtcttcaagtctggaggcagcatcctggctctatccayttctagccatttgaatgtgggcagattactttccatgttaaggcttccatttctatttccattctgtaaaatagggatgatggtggtggaatgtagtggatatctgtttgttgtttttgtttttgttttcccagcattaatcctttccttggaagttcccc

SEQ ID NO: 483140 - DNA, 658 bp, Homo sapiens
ttgccgccagtcctggtgaccaatgatctgtacttttcatcacactacactgctgcttttctccacccatctgtatcacaccctggattctcgaggcatttgaatttgtgtcttcaagtctggaggcagcatcctggctctatccatttctagccatttgaatgtgggcagattactttccatgttaaggcttccatttctatttccattctgtaaaatagggatgatggtggtggaatgtagtggatatctgtttgttgtttttgtttttgttttcccagcattaatcctttccttggaagttcccctcttatgggaatargaagacccgcttgttttttctctagggtgagtgaccctggctactccaatcaaatgtagataaaccagacttagaattaagagttagtgacccaaacaaacatgcatatgtggttcaggttgcaagatctacatcaagtttctagggacggccctggcagatgcatcagtggttgataccattcaaaattcattatcagtacattggtggcttgaactgtaatgcttatgcctaatgtaggaagtaactaggcttccccaactccctggtatgatgtcagcgagtatctctggttgtgaaacttctttgcctggttccctggcccttccagagatt

SEQ ID NO: 483141 - DNA, 528 bp, Homo sapiens
gggccctcagacacagtccactttgcatcccacttcttgggaaaatttttcttaatgttcactagcgctaagatcattctgaaacctctccctgcaccactgcaagactagtgcattcttaaaccctgcagcccaaccgttacctgtgatttattttattgtcatttattcccacagacaatacacataaaaataaaggtagtaagtgtaagagcattttaattgccatcccactagtcttaaatgtccactgtttttatatctccccctcctaccctagaaaatttcagaatagagaagatcaatttatcatcttatcctcgtttcctgatctcaaattggaagatggacagtttttatgttaatagagagtcgtttmgagtcagggaatttttcgaaggaaagtcgagatagatggatgaataggtgggtgggtgtgtgtgtgtattatatatattaatattaatagagaggcttcttttgtggcctcatgcagaatgcttaaagatcctagaatgttgctgtagg

SEQ ID NO: 483142 - DNA, 548 bp, Homo sapiens
cctatatgaaaagatgctaaacttcataattaaatatatataaattagacattttttaactaccagtgtggcaaatgtcacattttagaaacaycccactactcaccagcttttctggaaatgtctgtacagatccatgtacattccattccattgtaccttccaataacctttatattaggtaattttcaatatttcataagcttttaatttgtataccattagtcctagtaactctgtagccaagaatttgctttcagaggcactttcctgtatacatgaagatactcatggtagcctgtttgacagagaagaagaattagaaataatatgcacataaatttataaggaactagtgaaatatgttatggaaccttacaaaatagagtattattcttctaggtaaaagaaacaaggttaatttatacatacagacatgggagcatactgttgatatactatctgtagagaaaagaaatcacagatcaatatatggaacatatttcatttgtgaagattcatattgtgtgcattgtgtagggttagag

SEQ ID NO: 483143 - DNA, 548 bp, Homo sapiens
cctatatgaaaagatgctaaacttcataattaaatatatataaattagacattttttaactaccagtgtggcaaatgtcacattttagaaacatcccactactcaccagcttttctggaaatgtctgtacagatccatgtacattccattccattgtaccttccaataacctttatattaggtaattttcaatatttcataagcttttaatttgtataccattagtcctagtaactctgtagccaagaatttgctttcagaggcactttcctgtatacatgaagatactcatggtagcctgtttgacagagaagaagaattagaaataatatgcacataaatttataaggaactagtgaaatatgttatggaaccttacaaaatagagtattattcttctaggtaaaagaaacaaggttaatttatacatacagacatgggagcataytgttgatatactatctgtagagaaaagaaatcacagatcaatatatggaacatatttcatttgtgaagattcatattgtgtgcattgtgtagggttagag

SEQ ID NO: 483144 - DNA, 354 bp, Homo sapiens
gagtggaaccaggagaagtgaattctcactccaagggcaaaggtagggccagaaatggggactaagccaagagggtcagcagttctagtcaggcaaccactagagtggcagtttctaaaggcctccggagragaaaagggtcctacacaataacctagaacagagagggactcagccgtggtacttgggtatgtcatcttgttaaaaggcacaggattcatttgggctgataattcaacattgattctaaagacctgcaacagtcgtcttaagatttgctgtgcagctactgctttctttgtaaaacagacctttaacattttgatgagaaatttctgaattgaaatactagca

SEQ ID NO: 483145 - DNA, 561 bp, Homo sapiens
  misc_feature (1)...(561): n = A,T,C or G
nnnnnnntgggaacgcctcaaagccccaggtttgaacctcacgctggaggctactcagggccaaaggaggattttaggtggctgagtgaaatcagcagatgyggggtggggaggattttagaactggaggagcaagagacaggagggacagaaatctagttagcacctctccccaagacgtgagtaaacagcggagaaagagcagatcctggaggcatatttatgaggtcaaactgacaggagagaaaagaggaaaagagtgaagtgaggagtggacacaaggctaaggcagagtggggcccagagtatcccgaccaccatctagactgctcaggaccatctatgatgagggatgtgaactacagcaactctgctcaagtattttggaataggagacagtttgagtggctggagggcaagattttacatgaggtttgaagtctctttcaatgtttatattattacctggattccagctattttctcaggctgatccaaccaaagcctaagccatgatgccacctgttaagataataaatgacatcttactagataagtggg

SEQ ID NO: 483146 - DNA, 622 bp, Homo sapiens
ggaacgcctcaaagccccaggtttgaacctcacgctggaggctactcagggccaaaggaggattttaggtggctgagtgaaatcagcagatgcggggtggggaggattttagaactggaggagcaagagacaggagggacagaaatctagttagcacctctccmcaagacgtgagtaaacagcggagaaagagcagatcctggaggcatatttatgaggtcaaactgacaggagagaaaagaggaaaagagtgaagtgaggagtggacacaaggctaaggcagagtggggcccagagtatcccgaccaccatctagactgctcaggaccatctatgatgagggatgtgaactacagcaactctgctcaagtattttggaataggagacagtttgagtggctggagggcaagattttacatgaggtttgaagtctctttcaatgtttatattattacctggattccagctattttctcaggctgatccaaccaaagcctaagccatgatgccacctgttaagataataaatgacatcttactagataagtgggatggggggctggaaggaccttctaccatcattaagagatagctaagtgcaaagggcaccaggaatgaatg

SEQ ID NO: 483147 - DNA, 637 bp, Homo sapiens
gctgctgcccaagcaaaacctccaaagagaattagaaagagtaagagagagagcaagagagagagcgagggaaagacaagataggaatacagaactcctcagcgtagagaagtcaaatgatacctggagagttcaaaaaaaggcactgttaagctctgtggagcagggagtatgacggcgggtggggaaccaacattaaacaactgagtttcatagttcacacttccaaagcaaatagttctaaaaagttctaaatagctctaaaaaggattctatcttactttgattttttaacaatattgttctttaatctatgcagatacattttccaagtgaccrgagagtcagtgttgacagagtgataagaagttttttgatttgaggatttttgctactggtatcagaagaattatggccaaagaatgtaggggaaaaccagcttgcagccatagggctatgcctggcagtgttcagtacaatttgctcttcctgccagtctaaaagtttgagcctcttcctcactaaagaagtgtcagtttgctgtaacttatgattaaactaatacctgcccaactcagtttaagctgattgctattggcatgagaaaatcatgttattttagctacaattaatttga

SEQ ID NO: 483148 - DNA, 530 bp, Homo sapiens
tccttatattttcaggacttgaattttttccatataaatcaactggaaaactttcacggcttcacaagatgctttctctctggttgctcatattaggtctattaacctccttgagaagcacattattctctgaaaagctatagcaagagccttgaaatcatcagccctacttagctgtgacagtgttgaaaccctttaatagcaacaggttccacttccctacttccctttctataggtatatggagaaaacttccagagaaaagaaggaaaagttttacctaactctacccattgttaagcatgctccctttggaccagcatccaaacaagccacgcttgatggagtggacgtgcaacagctcactgtcttaaatatctactacacaggcyatcttaccaacaggcccttgcctatattaaattactcatgcaaaaggcagggtccatatcttctgcaccattcacattgcacttaggcttcatgggttatttctccccttgcatattgtaagattaaggagcctgaaa

SEQ ID NO: 483149 - DNA, 629 bp, Homo sapiens
atcagtcactaacactgagggctaggcctatgggatggcaatgaggactcaaggatggtagcatttacctttagcctatgggatgaccttaaccagatcattcgaaggccttggtctgttcccagttggacattagaaacttccagcaacacttatgtccagagtacgctcttctggtttccctgctactgctttggctatttctcagtattttttgctggcttctcttccttcttcaggccccagtcttgacccttctcatgctatcctcttctctagactattttaggtgaaattttaataactttcatgtgtattgttccactttacctcttatctgagctatagacccaaatatccataagccaaccagatatccatatgcccacttgmcttctttactttggactctcacaatcatcttggacttaacatgtccaacctaagcatttgacctttcccaaaactcttcctcctccaatattatccatctcagaaaatgatacctccatccccctggttgctcatgttagaaacatgggaatccttgccaccttcttatcacttggccccacatccaatgcaatatttagtcctgtcaactctacctacagaataaatgcataatg

SEQ ID NO: 483150 - DNA, 560 bp, Homo sapiens
attttaggctttgctggtcatacagtcattgttgcaactactcagcatgaccattgtagtgtgaaagcacacatatatattataataatactctcatttgaaaacaaaattagtgactgtgctccaataaagctttatttacaacaacaggcagcaggctggatttagcccatgggctgtagtgtgccaacctctgttctatagactgttaaccaaatcctactgaagtcagagttcctggctgtctgctaatgccatcatattttcctcaggcactttgatctttgtggagacacactatagagtctatgatgctttcaccaaggttgcttgacaacrtgctttcccaggggttaacactgcaaaaggaagaaggctgtgctagagtcaaagctgatgctttgtcaaagaaaatatttaggcatcaggacttgaaattacgtgtacaaccctggctatgttggaagcaaacttctggggaaattgtcagagcataaaattaggtctagttgagaaggaatgcaagccccaaggtatggctaagctgagacagcaggatg

SEQ ID NO: 483151 - DNA, 607 bp, Homo sapiens
accaacatggcatatgtatacatatgtaacaaacctgcatgttgtgcacatgtaccctaaaacttaaagtataataataattaaaaaataaataaataaataaaatgaactttgtaaaagcctttgtaataaattggtaatagtacgtaaaccattttcctgggctctgtaagctgctttagcaaattgtttaactcaggaggggattatgggaacctctgatttgtagtcaagctagacagaagttgtggggaacctgaggacctaccacttgtgattgaatctgaagttgggggcagtctggtggggctacagccttaacctgtgcagatactaattccagttagtgtcagagttgaattgaatcataggtcatctagctggtacaggagaattgtacagtgtgggaaaaaaaatccatatctgactacagtagtgtagagtgtgagtayagagaaaaacagttgatttttcctatacattttatgtcagaagtgaagcacgtattgagaatggtgtgagtatagaaggaaaagcagtttgtgtttctctatatacaagcccaggccacatggagagatatgtgcaggtattctagccgacaacc

SEQ ID NO: 483152 - DNA, 564 bp, Homo sapiens
ctcccttggggctcctgctctcggggctgggctggaggggcctgggagtcccagcgggcgaggaagccgggcccaggggagagcagcatgctgggtcaggagaccggtcgggggctcggccgggcctggagtccagcgggcaggggctggcagggagtgggcagggtgcccgccaccccgagggcyaccagggaagaccatctggattgggtttgcggtggaggctcgccagcagtgttttgactccaggcaggtttcagagtgtgaacggcccccgtgtcatctgctgggtccctctgccagagggtttctgaaagacagatggccacacgcggaagctgtcggcggcgtgtgggcccagcgatgacgggggtgcgaatcctgctcttcctccctcggcagccagcggtctctcagtcctctcccgtgttctcactgtaccctagaaagcaaagcccgagctcctcagcatgctgtgggggcgagtgggcagagccaggcgtcctgcgggcacacatggctgtccctgtgcctccatgagcggggaggggcgctggcgggagc

SEQ ID NO: 483153 - DNA, 564 bp, Homo sapiens
ctcccttggggctcctgctctcggggctgggctggaggggcctgggagtcccagcgggcgaggaagccgggcccaggggagagcagcatgctgggtcaggagaccggtcgggggctcggccgggcctggagtccagcgggcaggggctggcagggagtgggcagggtgcccgccaccccgagggccaccagggaagaccatctggattgggtttgcggtggaggctcgccagcagtgttttgactccaggcaggtttcagagtgtgaacggcccccgtgtcatctgctgggtccctctgccagagggtttctgaaagacagatggccacacgcggaagctgtcggcggcgtgtgggcccagcgatgacgggggtgcgaatcctgctcttcctccctcggcagccagcggtctctcagtcctctcccgtgttctcactgtaccctagaaagcaaagcccgagctcctcagcaygctgtgggggcgagtgggcagagccaggcgtcctgcgggcacacatggctgtccctgtgcctccatgagcggggaggggcgctggcgggagc

SEQ ID NO: 483154 - DNA, 473 bp, Homo sapiens
tcacaactaaattcttaaaaaccatrtaaatttacacaatacataataaaaagctaatttattgatttcttcttgtctctcacattgtctcttgcagcttttgaaaaagcaagcaattttttggtgttaatgacactgactaaaataaagatatataccacaggcccatagcagtttgattatggaactctctgggtagttttggggtttttgtagtttttattttttaaatcaatacaatgaacaaaatttaaaatagtttgtttcacaataacttgaatgcattccttagcaaacctgccttgccatttaatgtatttttaaaaaataaatatttgaaaagtgtatccacaatgttcctaagaaatggttttgaattccagagtccaaggaaatgaattggctgtcagataacaatgtgcttccatcagatggatttggcagttgtaaacaaaaggaattttctcagcttt

SEQ ID NO: 483155 - DNA, 637 bp, Homo sapiens
agtgattttgaaaacctttcatgtgcttgtcagccacttgaatacattttcagagaaatgtctattcaaactttttgcccatttttattattatcttttgtaaaattactgtgttgtatgagttctttaaatattctggatggtaaccctttatgatatatcttctttgcaaatgttttcttcctttccatrtattgcctttttgattgcatactttgatgcagttgtttttttaaattttgatgtagttcgatttatctatttttactttcttgcctgtgcttttattatatccaagaaaattatccaatccaagtttataggtttccccctttgttttcttctaggtgtttaatagtttagctcttagatataggtattctatccattttagttaattttatacgtggtgtaaagtaaaggtccaacttcattttctgcatgtgcatatccagttttcccggtaccatttgttgacagaactgttctttcctctttgaatggtcttcatactcttttcaaaaataatttgaccatatttgagaagaatatagaaatgatttttaaatccattataaagaaggagaaaatatgcattaatactgtatcttatacttacgtaattacttttactggt

SEQ ID NO: 483156 - DNA, 610 bp, Homo sapiens
ctggtgtggtagtatagcatagtggttaagaatatggatgctgcagcagctctatcacttagtattgtgcaacctggggcaagttatctcacctctaagtgtcctgtttccacatctgtgaaaagggaattataacaatgcctctctcaaggtcattgtgaaggttaaattaatggttatatgtaaagccagaatgtaataggtaacacagaactgtttctccttattaccattatcattttcgtagaagtataggaagtaaactcacatctctgatgttaacatggagcagagtactgatatacgttggtaggtatgttaggatgatggtgcayaaccagaaatggctgaaaaaacccaggaaaatggcccaaagtggtaggcatgtgaccatcgcctttatggggacagctcgtccaggagaactgggctgaaaagaaagatctaatcagcatgagtattagagcagccaagatggtgcctctcagaggagatccacaccctgccctagagacctctgcatgggccacaggtacaaggtgtgcactgtacctgttgagccagtgaggacaggatgtgctccttttccctaacacttatgcacgggtga

SEQ ID NO: 483157 - DNA, 565 bp, Homo sapiens
aggtcaaggatgaagagacaagatggagagacactggaaatcctattaacaaggggtgtgtgtgtgtgtgtgtgtgtgtgtgtgtgtggtgcatttggtaacattactgaaggagaggagtgcagatggacatattcacctacccagcaaacayatattaagtatctatgatatgccagacatgaaaaatatagacatcaaaagtgtggtcccttcctcccctaagaagataacactttagctgtaatacattataaggaataatttcaacctgctatgattacagcagatatgtaacaaatacctacacaagtgagctgataagcacaggagaactagaaggggaagaaaaactcagccaagaatatcctagaaaattcccaactgtgctacaatacagtaaaaggtttttttaatttttaatttttgttattgacagggtcttgctatgttgcccaggctggactcgaactcttggactcaagcaatcctccagcctcagcctcctgagtagctggaacttcaggcacatatcactgtgaccagccaataaaagattaaaaaa

SEQ ID NO: 483158 - DNA, 635 bp, Homo sapiens
tgaaatagcttaagtcaatgctcaacctttctttatctaaaaaattctataacttaaggccaggcacggtggctcatgcctgtaatcccagcactttgggaggccgaggccaatggattacctgagatcaggagtttgagaccagcctgggcaacatggtgaaatcccgtctctactaaaaacacaaaaactagccgggcatggtggctggcgcctgtaatcccagctactcaggaggctgaggcaggagaatcactggaacctgggaggcggaggttgccgtgagacaagatagtgccattgtactccagcctgggcaacagagtgagactccatctcaaaacaaaacaaaacaaaacaaacaaaaaaaactataacttaaagatagaatgttatttccctggtatgataaagaataacaaattgtaaataatatccaacattataattaatagcaaaacactaaataaatccccattaaaattggtacaaaacaaggrtgcttgctttcaccattctaactttaacaatgttctgggaaattccgttgatttgtcctcttatctttgaacttcctcttgttttattttattcatgttcttatcacagtcttccaaaaacaggaattcatggag

SEQ ID NO: 483159 - DNA, 604 bp, Homo sapiens
gaatttgctgcagaatgggtagggctgaaaggagaccactgtgaattagagttagaacatcaagactgatctttatttcacccagaggcagagtgataaaatggcattcttctctatttaaattctatcccatctttcttcttgtccttcctctcaaggttgctggcagaggtggttggggctatgtgcctggagtgaagattctgcccattggtcaagagacctccctctcagatgctggctctgcccctgcctttgggggtcgacccttgtactcgcaggaccttaggtgactctgtaagtatagtaaaacgcagttaatatgatgttatcattcaatcatttttaaaaagtggagcaaccagttgacaaggtaagactttttcctgacatctgtggttgtttatttaaaagaacagacaatatttaaaatgaaagacaaactcagaggttcaaatgcatccaataacttgaagcagcagtgacatatacatccaaagatgattgtagctatttaaagccatatcttgtttttctaggcaaaagtacaacattggttataaagcatatacyttctttgcactatagggcaatgaaaggcaat

SEQ ID NO: 483160 - DNA, 627 bp, Homo sapiens
tataagaattttttttcttttagaggcagggtcttgttctgttgcccaggctggaatgcagtggcatggtcatagcttactgcatcattgaactcatgtgcttgtcatccttccacatcaacctcccaagtagctgggactagtggcatgcaccaccacacccagctaagttttattatttttttttgtacagatgggttctcactatattgtccaggctggtctcaaactcctggcctcaagggatcctcctgtctttgtctcccaatgcacagggattacaggtgtgagccactgcagccactgcacgtggccaagaatgggtataatattaactcaggttttactcttctttttgctgtggtcacaagcaatgtggcttccccccatgacccatgatggtgcaatgtgttaaactggtgcaaaagtaattgcagcttttgccattaaatgtaaayggcaaaaaccgcaattacttttgcactaccacctaataggttttggtgaaagaagaccattgggtcattcttgtaaatgtatgatggcttggatgactgtagtcattccacagcacaaattctacttaacaaatgacccactacacaatctcattcccttggaatgggg

SEQ ID NO: 483161 - DNA, 123 bp, Homo sapiens
cctctcctaatcaccttctataattatttggaatttgaaaataggygttaaggagaaagggtgaaagggctggtttcccatcaacacgtgattttcaagatatctacatgtcacaattaatat

SEQ ID NO: 483162 - DNA, 123 bp, Homo sapiens
cctctcctaatcaccttctataattatttggaatttgaaaataggcgttaaggagaaagggtgaaagggctggtttcccatcaacacgtgmttttcaagatatctacatgtcacaattaatat

SEQ ID NO: 483163 - DNA, 564 bp, Homo sapiens
ctggcactggatctagtagtgtgctgtgccaagtgtggagcttgtggtggctccaggtttggaggggatgttttgtgtctcatcagctcagacagctaggattcatgacattagcaactgtgtgatcctaggcagcaatagctgtaggagtttcatggtggcagctaggattgttggggacctcagtagcttctccaggttcagcaataagggatgggagcaggcagcaggaatgggggcttgggcyggcagtatgcatgtgcttggctttagaagttgggtgcagacttgtgcatagtgacagaagctagctgtggacacacatgtgtcacatgtgtgtcagggctaggggaggggctggggccaactgtggacacattcattactgggagttgacagtgtatgtcatacagttataggagttagagttggtggtgtctatgtgtgtggctgcagggctaattgcagatttgctcacagcagtgaaggctggtgacaggtgtcaggctgcaggggtccaccatgggtgcaagcacagtggtgagtgcaggcaatggggggcag

SEQ ID NO: 483164 - DNA, 543 bp, Homo sapiens
tgtacagtggataccataattagccctattttattatgggacactgaggcagaaaagttaaatgacttacctaaagtcacaaagctaggaagaggtgaagtcagagttaggttggcattcctaacaactattgcaaaagagtgctgaaaatttttaacrtggtatacaagactttaaactatttaactgccccatggcttataaagatatcccaagcaagccatgctccagctagtctcgattgtatagtattcccccaagtcattcacacccttgcctctatgcttttgttcattctgtctttcacaatgcagctaaatgaacacattttcctaaaggcttgcgtgactcctcatcttctgaaggcagaatgtatcatgaactcctctggacttttagaatgctctgttcacagttcagtgaaattaattatgatttgtgtgtgcatgtgtgtgtgtgtgaatgtgtctatccccttcctctcccacatctacacagagattgtaaaaacctcaagggcatcagcacttttctttgtctgac

SEQ ID NO: 483165 - DNA, 543 bp, Homo sapiens
tgtacagtggataccataattagccctattttattatgggacactgaggcagaaaagttaaatgacttacctaaagtcacaaagctaggaagaggtgaagtcagagttaggttggcattcctaacaactattgcaaaagagtgctgaaaatttttaacatggtatacaagactttaaactatttaactgccccrtggcttataaagatatcccaagcaagccatgctccagctagtctcgattgtatagtattcccccaagtcattcacacccttgcctctatgcttttgttcattctgtctttcacaatgcagctaaatgaacacattttcctaaaggcttgcgtgactcctcatcttctgaaggcagaatgtatcatgaactcctctggacttttagaatgctctgttcacagttcagtgaaattaattatgatttgtgtgtgcatgtgtgtgtgtgtgaatgtgtctatccccttcctctcccacatctacacagagattgtaaaaacctcaagggcatcagcacttttctttgtctgac

SEQ ID NO: 483166 - DNA, 543 bp, Homo sapiens
tgtacagtggataccataattagccctattttattatgggacactgaggcagaaaagttaaatgacttacctaaagtcacaaagctaggaagaggtgaagtcagagttaggttggcattcctaacaactattgcaaaagagtgctgaaaatttttaacatggtatacaagactttaaactatttaactgccccatggcttataaagatatcccaagcaagccatgctccagctagtctcgattgtatagtattcccccaagtcattcacacccttgcctctatgcttttgttcattctgtctttcacaatgcagctaaatgaacacattttcctaaaggcttgcgtgactcctcatcttctgaaggcagaatgtatcatgaactcctctggacttttagaatgctctgttcacagttcagtgaaattaattatgatttgtgtgtgcatgtgtgtgtgtgtgaatgkgtctatccccttcctctcccacatctacacagagattgtaaaaacctcaagggcatcagcacttttctttgtctgac

SEQ ID NO: 483167 - DNA, 418 bp, Homo sapiens
aaaaagtcaggcgttgtggctaaatttactccattgtcctcaacagaagaaagattgtcaaatacgtttccaaattccttggcctggtatgcaagaccatttaagagtcagatgcaacctgacttttctgccttctctctttttttctctcacaccaactttctcctacaaccaaacaagctttggttggcagaccaaagcttgtttgctgaaacctttatgtccttcttcagacattcccactcctcttctgtgcccggctggtggcatcctatttggcattttttgaaatctttccagatggcccttatgtccagggtgggttgagaatcactgacctatccgatgctcacaccaaatctgacttcatccctgatgcctgcccacrctactctgggatgccaggtgtgtctctctc

SEQ ID NO: 483168 - DNA, 637 bp, Homo sapiens
attccccaattagaggcagaaattgtgagaattgagtcccactgtgccttccatttagttaggggtcaataaatatttttgattgcctgaaaggggccagaggcactaaagcaaagccaaaccattattttatccatgacagccacagatgaactttgtgggaaagttgtgtgccctgtggtaccatggggcagggctctcagggtctgaggccttgtgccaggttaaatatatgccagcatctggaacatttcagtacattttctcaatcagtcttagcacagatgagccaagtatttgtatcaggtaaaytctggcgtcacctttggaatatactggcttaattgctcctggtaccaaatctcgaaggaatgttgcaacaatctgaaaaagttcaataggcaatagaagtcactgtgatccaatatgcaaaacctgatgaaagacaagctgcttggttcaattctgcacaagggtgaggactgctggatctttgggtggtcctcatccattcccttgggaaacaagtcagacaaataagtggtatagaaccattctcactggctgaatatgcttcccagcaatgactagtgagtatctgagagtaaatgaaagggaaacactatttaataaattg

SEQ ID NO: 483169 - DNA, 571 bp, Homo sapiens
aggtgaaattagcactcttcaggcttgccagaaattgccagagcatgggggaataagcatataaaacaagggaatatagttaatgcctccgtctggtgacaacgtagaacctctaaccaaatctttcaggaggatcacccataacaagaaacctttgagaaactgggtccctcaaccagccagacagattaaaccccgctccctaacctatatgaatagaattcacagaatgagccagatgagcagtgattcattctctcaagaaaatatttactgagtatctagtatttgacaagaactgttattggcaaagggatagaacaggaaactagacacaggttctgcttttcattcatcaagaragacaggtaataaatgaaaaaatagatacacaaaatgagacgaaatgtattttaaaataacacaggacagcaaacttacttcaacagggaattataaaaaaaatggcttcccttaagatggcccacccctcccaagagtaagtccacagaagaagcaaaagagaggcaaagaagatgagagagaaagttataatccaaaacaaaagttc

SEQ ID NO: 483170 - DNA, 571 bp, Homo sapiens
aggtgaaattagcactcttcaggcttgccagaaattgccagagcatgggggaataagcatataaaacaagggaatatagttaatgcctccgtctggtgacaacgtagaacctctaaccaaatctttcaggaggatcacccataacaagaaacctttgagaaactgggtccctcaaccagccagacagattaaaccccgctccctaacctatatgaatagaattcacagaatgagccagatgagcagtgattcattctctcaagaaaatatttactgagtatctagtatttgacaagaactgttattggcaaagggatagaacaggaaactagacacaggttctgcttttcattcatcaagaaagacaggtaataaatgaamaaatagatacacaaaatgagacgaaatgtattttaaaataacacaggacagcaaacttacttcaacagggaattataaaaaaaatggcttcccttaagatggcccacccctcccaagagtaagtccacagaagaagcaaaagagaggcaaagaagatgagagagaaagttataatccaaaacaaaagttc

SEQ ID NO: 483171 - DNA, 571 bp, Homo sapiens
aggtgaaattagcactcttcaggcttgccagaaattgccagagcatgggggaataagcatataaaacaagggaatatagttaatgcctccgtctggtgacaacgtagaacctctaaccaaatctttcaggaggatcacccataacaagaaacctttgagaaactgggtccctcaaccagccagacagattaaaccccgctccctaacctatatgaatagaattcacagaatgagccagatgagcagtgattcattctctcaagaaaatatttactgagtatctagtatttgacaagaactgttattggcaaagggatagaacaggaaactagacacaggttctgcttttcattcatcaagaaagacaggtaataaatgaaaaaatagatacayaaaatgagacgaaatgtattttaaaataacacaggacagcaaacttacttcaacagggaattataaaaaaaatggcttcccttaagatggcccacccctcccaagagtaagtccacagaagaagcaaaagagaggcaaagaagatgagagagaaagttataatccaaaacaaaagttc

SEQ ID NO: 483172 - DNA, 560 bp, Homo sapiens
agggtgggattctgttgctttgggggacttcttgtctgtgcaggcctctcctttctgactctttgcctgaatactctagcctcttggacatttccaaagtcacaaatcttgtctgttctactttgggagataactgggcaattcctgcattttccttccctgtgcagaggcctggaaacctttgctggggtaatcatggggatcatctaattttgtatccattctcttggagatcactgcactgtttgatgtctaatgtctgaaaactattgttcrttatattttatcttttttaaaaggcagttttttaggtgggagggtaaatatagtcctagtttctacatctctgtgaaaatgaaaatcatgttaatttttaatagagaaaagattcttcaattttagataattaaacattatttggagggagggcttttaactcctggtctctacttcatagagatctacttaatcaggctgtctggcaaaatttgggtattggcatttttacatgacttcctgaagtcctggtgcagattgtcaaagtattaaaatttaagaaa

SEQ ID NO: 483173 - DNA, 564 bp, Homo sapiens
agttttgaggtcagagagtagttaagggaggagtctggggacagaggacttgcctgttttctcagttcctctttaagaggcaccagagttacaaaaggtcactaggtgtatttggcaagagactaggtgtactttaaattgatttggcatttcctaggatattttaaaggatgacttgatcaaacttttgaacttacagattttttaaattaaatgaaacaaaaaggattaccccctcaaaaaatttcagycattggctcattttctcaccgttcgacgtttggatgaattagacccaaacattaatttaattcaataactacctttgggatccaagaagttattctgcacctttagttgaaaattctaattttgtccaaataatgatatttcaggagtatttaacacactgaatacttgcctactttttgttttattttccaccaaactataagggtcagaaaggttctacagtcttttcagtgtgctcaatcaaccttcctcaagctacttctgaaaaatggagggcaaagtttaacccttcaacaacagcatattttttag

SEQ ID NO: 483174 - DNA, 621 bp, Homo sapiens
tctgtgtatgtcataactctactctttgatctgattagattgtgtcaagagtgaccagtgatagggaaaacactacatatagaggttaccacccaatgaccctaacccgatttccttaaaaaaatttaaaaaaagaaaaaaacaggcagcacatttcttgtgatggatccatctgagccactgtgcagttttctgattaaatttttgttttaaaaagatgcttgaaatcttaaatattacagttttactaattgatataatttaaagactatctccctccgatggggctgggaagatttagtaatgtaattgttttctttttatgtgaactaagctttatcttcaccctggaatcaaattaccatctgattgttcataaattttgtttccttttgcaaaacagtgaatagatagtatgtaaagatggaaattgacaaaacaaatctttraggaattaaacacattacaaatacattattggtcattcttgttctaaaaactgaaagcaggagcttcagattaaagcagttttctaaaacatgttttcttggtgtttcagggagactctggtgggccactagtatgtagacatgaaaatggtccctttgtcctctatggcat

SEQ ID NO: 483175 - DNA, 548 bp, Homo sapiens
ctgctcgggaggctgaggcaggagaatggcgtgaacccagaaggaggagcttgtggtgagccgagatcgcgccactgcactccagcctggacgacagagcgagactccgtctcaaaaaaaaagtggtttttaagagacaggttctcgctatgttgtctaggctcaagtgcagtgactattcatagatatgatcgtagtgtattcagccttgaactcctgggctcaagcaatcctgttcctcagcctccccagtagctgggactacaggctcacgccacgggtctggctgttctaagaaatactgtctaaaatgtttcattttgaccaactaatgggtttgacttgtgtggcaattactgcaacttgcctrttataaatttggccactgtggataaatgaaggttatatgtagctaaagctcaaatatacttgctaaaaatattatatttcagtttggtgacagcaataactttttagttccctgaggacccagtcttagaccatgtcaccttttcttacaacatatagtttttaaaagatgtacctaa

SEQ ID NO: 483176 - DNA, 566 bp, Homo sapiens
gactattatctgtaactaatgcaatgaacgattcgccatcattcatttattcattcatccattcattttataagcatttatggcgaacatcctatgtgtcakatcccctgctaggcactgggaatacagtaatgaaccaagaagacaaaaattcctgttcttatggtgctagtaggaggagatatattaatacaaggaggaggaggaggagatatattaatacaaggaggaggaggagttgatatattaatacaaacatacatacatgaatgtttaatgcatgcatatgtgcatatgtatatgtataaaatatattagctggtgataagtgctaaggagaaaaaagagaaagaagattggaatgccaggcaataagggctaaagttttaaattcaggtggttaggaaaggcctcagttacaaagtagtatttgagaagagacctgaaggagtgagccatgtggcgaaatagggaaagagcacaagcacgtgcagaggccctaaggtttgagcacgcctgttgtttaaagtgaggaggcagcgtggcaaggagagagcaaagaaaag

SEQ ID NO: 483177 - DNA, 382 bp, Homo sapiens
tgtgccatggttccattttacaaggaacagtactagccccctgaggacaccaggaaatgrtaacctcacaccctgcattagtagaattgaaaatctgtttttctgccatttatccttacagtataactctcctctttcacattctgcaactgatctagtgcttaaaacaaatggagtcttcaaaagcaccaatagacaaggataaaattacacatacagacagagtttccatatgagaacattaatgtaaaactgggcagagggtcagtttcttagtctcttcattctctgagagagttttgtgatggatcagaatgtaattgctccctctttcccacccccagggaaaatatgtgtctgcaagagcttattatgagagagc

SEQ ID NO: 483178 - DNA, 621 bp, Homo sapiens
ctgatcatttaccaactttattttaccaaattctgagcttgtgatatgatcatttgatcatttaccaacttgattttaccaaattctctatcaactagaaagaaaatacactgtagcaggctttgtctcagtcaaactgctataccaaggcatgtttaggatcgtgccagagtgaaatatgcttgttcctaatgggaactcatttaactccactgtcttgaaaaccctcaaatgtcattcagctactgctgtgtgcagatgaccttccttttaaagtgcacctgtaagacaactgaaagagtttatcagaagcattgctgtatcagcacaatgctattaactgctgataagcctgacaataatttgagtcatggacagacctgcaccagggacttagagagaaaggccaaagaccttaattgacataatygagccccacattctcacagaaacttctatagtagacagtattttgctcaggtttttactgattagagataacaaaattaaattgaaaacttatattttctagagaaacttttgggagctactagtggcaaatgtacttgggcctctctaaaagaccctcctgaaaccattagagatattaatatttgtttt

SEQ ID NO: 483179 - DNA, 621 bp, Homo sapiens
ctgatcatttaccaactttattttaccaaattctgagcttgtgatatgatcatttgatcatttaccaacttgattttaccaaattctctatcaactagaaagaaaatacactgtagcaggctttgtctcagtcaaactgctataccaaggcatgtttaggatcgtgccagagtgaaatatgcttgttcctaatgggaactcatttaactccactgtcttgaaaaccctcaaatgtcattcagctactgctgtgtgcagatgaccttccttttaaagtgcacctgtaagacaactgaaagagtttatcagaagcattgctgtatcagcacaatgctattaactgctgataagcctgacaataatttgagtcatggacagacctgcaccagggacttagagagaaaggccaaagaccttaattgacataatcgagccccacattctcacagaaacttctatagtagacagtattttgctcaggtttttactgattagagataacaaaattaaattgaaaacttatattttctagagaaacttttgggagctactagtggcaaatgtacttgggcctctctaaaagaccctcctgaaaccattaragatattaatatttgtttt

SEQ ID NO: 483180 - DNA, 586 bp, Homo sapiens
tggtttactgctctgttctgtcaatgatctgcaggaaaagaactccacttttctatgattcctactttcagtctggcagtggtgctgtagcaaggayatggcggtgacgttattaacagcaatagcagtagtggtgatggaaaccctggtggcagtagtgatgatgacagcactctggtggcaggaatggtggcaatcaagaaagcagcagcagccagtgaatgcaggcttctggattctttcttagtcacccaagtctccaagagagctgacttagtgttacagtgacttgggctctgggtagcaccatcctattgctctttccagaaatgtgaaaccttccgcaataattaatttgtatttaactttacttagttccttcttgcctccaatcatttcaaacttggaaaaaaaaaaaacaaataaaaaaacacggaacacacaactcaagctgtttcattttttttttctgtttgtatgctgtcttaacttacatagcaaagagagaaattcttgtgcatgtgtagctgaggatagacacaagaatgctcattgcagccctgttaacattaccaaagacctgtgg

SEQ ID NO: 483181 - DNA, 586 bp, Homo sapiens
tggtttactgctctgttctgtcaatgatctgcaggaaaagaactccacttttctatgattcctactttcagtctggcagtggtgctgtagcaaggatatggcggtgacgttattaacagcaatagcagtagtggtgatggaaaccctggtggcagtagtgatgatgacagcactctggtggcaggaatggtggcaatcaagaaagcagcagcagccagtgaatgcaggcttctggattctttcttagtcacccaagtctccaagagagctgacttagtgttacrgtgacttgggctctgggtagcaccatcctattgctctttccagaaatgtgaaaccttccgcaataattaatttgtatttaactttacttagttccttcttgcctccaatcatttcaaacttggaaaaaaaaaaaacaaataaaaaaacacggaacacacaactcaagctgtttcattttttttttctgtttgtatgctgtcttaacttacatagcaaagagagaaattcttgtgcatgtgtagctgaggatagacacaagaatgctcattgcagccctgttaacattaccaaagacctgtgg

SEQ ID NO: 483182 - DNA, 586 bp, Homo sapiens
tggtttactgctctgttctgtcaatgatctgcaggaaaagaactccacttttctatgattcctactttcagtctggcagtggtgctgtagcaaggatatggcggtgacgttattaacagcaatagcagtagtggtgatggaaaccctggtggcagtagtgatgatgacagcactctggtggcaggaatggtggcaatcaagaaagcagcagcagccagtgaatgcaggcttctggattctttcttagtcacccaagtctccaagagagctgacttagtgttacagtgacttgggctctgggtagcaccatcctattgctctttccagaaatgtgaaascttccgcaataattaatttgtatttaactttacttagttccttcttgcctccaatcatttcaaacttggaaaaaaaaaaaacaaataaaaaaacacggaacacacaactcaagctgtttcattttttttttctgtttgtatgctgtcttaacttacatagcaaagagagaaattcttgtgcatgtgtagctgaggatagacacaagaatgctcattgcagccctgttaacattaccaaagacctgtgg

SEQ ID NO: 483183 - DNA, 644 bp, Homo sapiens
gacacattcactattggaggttgtgcctaagttgccaaagtcttgggaaagtttacctgtgaactcaaattggtgttcaaatataaacaagyggtgtcagacacaattaacaggtttatttggagaagaaagaaagagcaaaatgactctgtcagtagaaggagggaacattggctaatgtgtgagtgaaagaaggaaagcagaaaagaaaggaagaaagaaacctaaaatgggttattttgttattcaccatgagaatggtcttttttatgttagatgaaagcattttccctggtctaggaaaattctaggtggttccaaacttcctgaagattggccttgtagtattgagaacaccaaatacggaatgccatagaaccacgttcactgtttctgttgagttacaggacatcctgcaagttgtccaggcttctgacttataacttggatgcacagattggggtatacattaaggccaagtggatttcctccagggttctacccttccaaagggtgaaaagaagttttttgagaaagcactctttgtgaagacttttaaagtctcttatttcttaaaattagagtttgacatgagaagtatataacccaaagataagtgtgatgttatcacacttctccatatt

SEQ ID NO: 483184 - DNA, 560 bp, Homo sapiens
ggggaaaaaaaagtatcaagctacaaatttatttttctcaatcttccttaatgccaagggatggctatgatatatagtctggtagatgtgctgccattataaattgtttagtattattttcatgaaagcgtctaggaaagaggaaattggctagtaattgatagtccactattcttcctcctgcaagggggtcattggtgatttttgaaattgagtcagccattttgcatttacaaaagaaggtctagacaatcaaagatactcagacttttatattggatacattgtacctatgctcatttatttatttctttatttttttgagaaggagtcttgctctgttgcccaggctgtaatgcagtagcgcaatctcrgctctctgcaagggactacaggtgtccgccaccatgcatggctaaatttttttgtatttttttagtagagacgggttttcaccgtgttagccaagatggtctcgatttcctgacctcgcgatccgcccgcctcagcctcccaaagtgctaggatcacaggtgtgagccaccgcacccggcccctat

SEQ ID NO: 483185 - DNA, 560 bp, Homo sapiens
ggggaaaaaaaagtatcaagctacaaatttatttttctcaatcttccttaatgccaagggatggctatgatatatagtctggtagatgtgctgccattataaattgtttagtattattttcatgaaagcgtctaggaaagaggaaattggctagtaattgatagtccactattcttcctcctgcaagggggtcattggtgatttttgaaattgagtcagccattttgcatttacaaaagaaggtctagacaatcaaagatactcagacttttatattggatacattgtacctatgctcatttatttatttctttatttttttgagaaggagtcttgctctgttgcccaggctgtaatgcagtagcgcaatctcagctctctgcaagggactacaggtgtccgccaccatgcatggctaaatttttttgtatttttttagtagagacgggttttcaccrtgttagccaagatggtctcgatttcctgacctcgcgatccgcccgcctcagcctcccaaagtgctaggatcacaggtgtgagccaccgcacccggcccctat

SEQ ID NO: 483186 - DNA, 517 bp, Homo sapiens
tgtgccaggcactgtgttcacagagtacacaacaagaccctgatctttgaggagctctccagtgatgaggaaggcagctgcaaacaaawccatagaattccacaggataatcttgggtgcaatgggatatatatgtatagggagtcaagagtcaaatgggggaaataacctattatgcaaataagtgcagcttattaaataccctaataaaattatatgctaaagaagaagtatccaatatttttaaaacatgatttttctttttaaaaaatgtagagttatcttttacttttacttttacttctacctcagctagttttacaattttgatctgtggccattttttttttcttgttgacaatccttcatccctactttcataagtacagcagagacctcattacattttgaggaactgtcctcccactttcagaccatggggaggagtgagcttgacctgctccccgtgctaattctgaattgggcatgtgccgcagactttgatgagtaaagccca

SEQ ID NO: 483187 - DNA, 561 bp, Homo sapiens
aaggaagccccagctctcctccatatctctcacagcgttttatgtattactcagttttaatttaatgagagaaatgtcttgggaatgtttctgaggatactaattataatttgtttttatgtttatagctatattatcttttcccctagagtcagtctctttggtcatcttgggccttctcttatgtgctaatggtttttactcaagagaattgtgttcctgcttgtccagttgtgtttatgaatgaaagattacattagaataggttactggcaaaagatattagcacaggttacaggaaygctttccaaacaatctctcttttgaataagagtgtgaaccatctctttataaatggagctgacatttcaacaggtaaagctcactagaagaaatctgggaaagaagcagggagtgtgagtgtggactccaactgccaaataaatgggattttactctggaaatgtgaagtaatttcatttattttacttatctgcctatttgtccctgccccttactccaccatctcactatatatttttttctttttttctgtttaag

SEQ ID NO: 483188 - DNA, 561 bp, Homo sapiens
aaggaagccccagctctcctccatatctctcacagcgttttatgtattactcagttttaatttaatgagagaaatgtcttgggaatgtttctgaggatactaattataatttgtttttatgtttatagctatattatcttttcccctagagtcagtctctttggtcatcttgggccttctcttatgtgctaatggtttttactcaagagaattgtgttcctgcttgtccagttgtgtttatgaatgaaagattacattagaataggttactggcaaaagatattagcacaggttacaggaacgytttccaaacaatctctcttttgaataagagtgtgaaccatctctttataaatggagctgacatttcaacaggtaaagctcactagaagaaatctgggaaagaagcagggagtgtgagtgtggactccaactgccaaataaatgggattttactctggaaatgtgaagtaatttcatttattttacttatctgcctatttgtccctgccccttactccaccatctcactatatatttttttctttttttctgtttaag

SEQ ID NO: 483189 - DNA, 628 bp, Homo sapiens
acctttagagaagggacaaaaaaaaatagtatattttgatccttcctctgcaaaagtttgacaagcaatacctgtctgctggcaagggcactggcttttatactatacatttcatgatctgagacctcttaaaacatgttggatactaccactgaataaacaggtaattgggatccatattttctyacctaactaggcggcatttcttttaaaatgtgccctgcatatcaaaagatgtcatagatgtacggcttggaaagtcatgtttggctgttaaagagggacagcaagaacctgcttattactgaaccctcagttctcatactttctggcacctgcttattaaattgaaatcactgtccaactgtttcatggagtcgggctcatagtcaatatctgcatgatcctagtgttcatagcttgaaacagtggattgttttatttatttcaatatttgaagaaattgagaatttccttattggcctctatctgatttctagtgtccagagaagctttacttcatgtatatctaatcgacacacactcacttaatgcattacattttttatatctgtaatggaattgaaatcttagactaattccttaccacatttgcattttctttcca

SEQ ID NO: 483190 - DNA, 586 bp, Homo sapiens
ttcctctgcaaaagtttgacaagcaatacctgtctgctggcaagggcactggcttttatactatacatttcatgatctgagacctcttaaaacatgttggatactaccactgaataaacaggtaattgggatccatattttctcacctaactaggcggcatttcttttaaaatgtgccctgcatatcaaaagatgtcatagatgtacggcttggaaagtcatgtttggctgttaaagagggacagcaagaacctgcttattactgaaccctcagttctcatactttctggcacctgcttattaaattgaaatcactgtccaactgtttcatggagtcgggctcatagtcaatatctgcatgatcctagtgttcatagcttgaaayagtggattgttttatttatttcaatatttgaagaaattgagaatttccttattggcctctatctgatttctagtgtccagagaagctttacttcatgtatatctaatcgacacacactcacttaatgcattacattttttatatctgtaatggaattgaaatcttagactaattccttaccacatttgcattttctttcca

SEQ ID NO: 483191 - DNA, 626 bp, Homo sapiens
acctttagagaagggacaaaaaaaaatagtatattttgatccttcctctgcaaaagtttgacaagcaatacctgtctgctggcaagggcactggcttttatactatacatttcatgatctgagacctcttaaaacatgttggatactaccactgaataaacaggtaattgggatccatattttctcacctaactaggcggcatttcttttaaaatgtgccctgcatatcaaaagatgtcatagatgtacggcttggaaagtcatgtttggctgttaaagagggacagcaagaacctgcttattactgaaccctcagttctcatactttctggcacctgcttattaaattgaaatcactgtccaactgtttcatggagtcgggctcatagtcaatatctgcatgatcctagtgttcatagcttgaaacagtggattgttttatttatttcaatatttgaagaaattgagaatttccttattggcctctatctgatttctagtgtccagagaagctttacttcatktatatctaatcgacacacactcacttaatgcattacattttttatatctgtaatggaattgaaatcttagactaattccttaccacatttgcattttctttc

SEQ ID NO: 483192 - DNA, 647 bp, Homo sapiens
cagctgtctgggaagcagaagcaggaggatcacttgagcctgcaatattgaggctaacaagtgagccatgctcgtgccactgcactcaagcctgggcaacagtgagactctgtctcaaacaaacaaacaaacaaacaaacaaacaaaaggtttctgtgtacaataatccccttggggatgccgagtaaactacgtattgtacccctaccttttgaatgtaacccatcacatgaggtcagatatggaattttccatttgtgatatcatgttggtcctcaaaacgtcttagattttggagcattttggatttcaggtttttgaattagagatacccaacytgtagtattattacaaatgaaaaaaaaaaatgcaagctgagaagagataacgaatttctctaagaatcaaaaactgtaaatagtagagttggaaaaaaaatgaggtttgagtccaaagccaatttcctttatattcattaaactacctcttaattcttcctctaaaattggaaatggatacaaccattatgactgagagaatctagctattcaaacttcctcagaacatgtcttaatatagctgagcaggcaagtgtagccagtttcatgggcctaaggaaaatagataaaatacatttctcagtttat

SEQ ID NO: 483193 - DNA, 611 bp, Homo sapiens
tggaaaaatcatcttaattttacttttttattctgcttatctgaaggtagggttcatcttggttaatactttcactaagaattaattggtgaaattgtactaccttcattggtgcttttggttacgtgtttccatttttttcatgagatgattatatgtaaagttttatataataaatacactatttgcaagttctccttgaagacttcatgggacatctgactaacttagagttagcacaattccaggcttaaaccgacttgatgtctaacttacttgctaatgaytctgtaatattaataaacatttttttccatcctctaaattcttccttctgtttttcagtattctttcactctactttttttcttctcaggaactctaagttttctggttgaatttgtatttaatctctggtaaaattatcagcatcctagaagatatttttcaaaacaatatttttctatgttttagttttacttcaaccaccccaaagctgattctgctttcagatacctggacttagatggagttaagattcagggaactaggatagaactgagaagctcaaaaagggaaaaaaatgaagtggttgtaaaaaggaacaccac

SEQ ID NO: 483194 - DNA, 647 bp, Homo sapiens
cagctgtctgggaagcagaagcaggaggatcacttgagcctgcaatattgaggctaacaagtgagccatgctcgtgccactgcactcaagcctgggcaacagtgagactctgtctcaaacaaacaaacaaacaaacaaacaaacaaaaggtttctgtgtacaataatccccttggggatgccgagtaaactacgtattgtacccctaccttttgaatgtaacccatcacatgaggtcagatatggaattttccatttgtgatatcatgttggtcctcaaaacgtcttagattttggagcattttggatttcaggtttttgaattagagatacccaacctgtagtattattacaaatgaaaaaaaaaaatgcaagctgagaagagataaygaatttctctaagaatcaaaaactgtaaatagtagagttggaaaaaaaatgaggtttgagtccaaagccaatttcctttatattcattaaactacctcttaattcttcctctaaaattggaaatggatacaaccattatgactgagagaatctagctattcaaacttcctcagaacatgtcttaatatagctgagcaggcaagtgtagccagtttcatgggcctaaggaaaatagataaaatacatttctcagtttat

SEQ ID NO: 483195 - DNA, 647 bp, Homo sapiens
cagctgtctgggaagcagaagcaggaggatcacttgagcctgcaatattgaggctaacaagtgagccatgctcgtgccactgcactcaagcctgggcaacagtgagactctgtctcaaacaaacaaacaaacaaacaaacaaacaaaaggtttctgtgtacaataatccccttggggatgccgagtaaactacgtattgtacccctaccttttgaatgtaacccatcacatgaggtcagatatggaattttccatttgtgatatcatgttggtcctcaaaacgtcttagattttggagcattttggatttcaggtttttgaattagagatacccaacctgtagtattattacaaatgaaaaaaaaaaatgcaagctgagaagagataacgaatttctctaagaatcaaaaactgtaaatagtagarttggaaaaaaaatgaggtttgagtccaaagccaatttcctttatattcattaaactacctcttaattcttcctctaaaattggaaatggatacaaccattatgactgagagaatctagctattcaaacttcctcagaacatgtcttaatatagctgagcaggcaagtgtagccagtttcatgggcctaaggaaaatagataaaatacatttctcagtttat

SEQ ID NO: 483196 - DNA, 567 bp, Homo sapiens
ttaatgtcattaatactagtgtttcagtagcagtctgatttctcaatcttaccatccacttagaggaaaaggccattctcttctctcactacatctcttatcctggatcaatgtatacatcatgaaatatggccactttggctccatgctctgatcttccagaaaaaggataatgcttcaacttaatgggtaaatcaaagataacagaaaatctcaacccatttcaagtggcccatgggagaaagggcttgctttgtaattgcgttcttgctctctctctgcatcttgtcccactcttctgcatattctcagctccatatggcctaaaaccatgcccttacatgtcatgggacccaataacaatgacttaaactagattttctaatttacatctcatgagaagtttacccatattrttttacactttcccaaatgaacttttaaaaattattataatatcattggctttgactttaaatggtattctcgcaaaccatgatgagtagggaaacattgcatagctccaggatatttaacttttgttccaaattcttatccatgtttcat

SEQ ID NO: 483197 - DNA, 410 bp, Homo sapiens
ggtgggaatggttttattcatatgcattcttggtgggaaaatgacaccttagatactaaatgttacttgcaaccaccacctatatttctcatccttccttccctttatggttgttttttctttagttattaggaaaccatcactgttccactataacagttgttagagctttaccttatctgcttactgtcttccaggagcttattatttcattgkttagtgcttactagcatgtggattacacatttatcctttctctcctagacaagccataacatagtctctgcaactggcatctagtaaaagcatgaggtgaaaaattcagggaagagtatcttcccaggatttgtagaaagtaaaataccctttaaacctgccaatctggttctcttaacagtatctcagcaatg

SEQ ID NO: 483198 - DNA, 410 bp, Homo sapiens
ggtgggaatggttttattcatatgcattcttggtgggaaaatgacaccttagatactaaatgttacttgcaaccaccacctatatttctcatccttccttccctttatggttgttttttctttagttattaggaaaccatcactgttccactataacagttgttagagctttaccttatctgcttactgtcttccaggagcttattatttcattgtttagtgcttactagcatgtggattacayatttatcctttctctcctagacaagccataacatagtctctgcaactggcatctagtaaaagcatgaggtgaaaaattcagggaagagtatcttcccaggatttgtagaaagtaaaataccctttaaacctgccaatctggttctcttaacagtatctcagcaatg

SEQ ID NO: 483199 - DNA, 627 bp, Homo sapiens
tggtttaatccctagttgccattcctgaatacatttcctggtttttagcttgcattaatttggaagtttccattacttatctatatctgttgggaagacagtcttgtcattatacaaatgtattttactttataaaatgatgtgtttctgaaacttcaggtatcaaccaaccttttaagactcaattatattttaaatacatgagatctatctttttaaagcattaagcagaaagtattttttctgtgtgtgaattgaatcatcattttgtaagacatcttaccttactcatttataatggaattcaagaattttcaattatatctgtacttttaatttatgtaaggttattattattactrtctttactgcatttgtttcaaacctaaaatgttcatgatcccaattgttttattctaagaaactctaaatagatggcctttgcttcatgattatctctagaagttcaggataaacttgaggagtttgaattaaggttgacctaaagtattagcatacatttaatgctggaaggagcaatttgggacttcttaggtgatattagaaaaaaagagaaaaataatttcttcttttgtttttgagaatggagtttaaaacgtgattgga

SEQ ID NO: 483200 - DNA, 356 bp, Homo sapiens
gcacatctgattccagagaacatagggagcagctagtcaccttgttccctcaaccaaattgagattatgttagttagaaaacaagaaaaaagcagatattgggtaggcaactartagtatcaacaacagaagattactatgaaaggaaaaccaaaataaacaaaaagagttattgttagtgtagattacttatggcctagtaattgtgagaccttataattctcaccaggtttttctatcttagcaaataaaatgttattttgactacataatacaaaagcagccctggtttccaaataacataaaatgtatctcttagtgtctaggagaactcactaaaatagggtggggcatgg

SEQ ID NO: 483201 - DNA, 554 bp, Homo sapiens
tccaattgttccatgacttttaaatctgctgttttagatattcttaatacaaaagtactgatttgttttaattgttttgagccttccttatgagtgaatgattatactgtggattgtcttttgaaccaggtaaatactgccccaaaatagcctagtttcaaatatcaggctttagatcattttgttttgctttttaaatgaatctttctctgctgagccatagaggtcaggatagaatagctatttgaaccagctattctgaatagctatttgaatagcttyagaactaatgtgctttttctaacatctttagggaagcagtgtattttactccctgcatgtggtatgctattgtgcactgtgaaggcctggattacaattcctggttctcacagtgcacaataatatttgcacaccggaattcatcgtatgtggggcacaaaacagccaaagaacttggcagataccatccaacttgtgaaatagaaagaaaaatcaatgtaaaacactccagactatttgttttctcccatcccccaacatatgattgatcc

SEQ ID NO: 483202 - DNA, 554 bp, Homo sapiens
tccaattgttccatgacttttaaatctgctgttttagatattcttaatacaaaagtactgatttgttttaattgttttgagccttccttatgagtgaatgattatactgtggattgtcttttgaaccaggtaaatactgccccaaaatagcctagtttcaaatatcaggctttagatcattttgttttgctttttaaatgaatctttctctgctgagccatagaggtcaggatagaatagctatttgaaccagctattctgaatagctatttgaatagctttagaactaatgtgctttttctaacatctttagggaagcagtgtattttactccctgcatgtggtatgctattgtgcactgtgaaggcctggattacaattcctggttctcacagtgcacaataatatttgcacaccggaattcatcrtatgtggggcacaaaacagccaaagaacttggcagataccatccaacttgtgaaatagaaagaaaaatcaatgtaaaacactccagactatttgttttctcccatcccccaacatatgattgatcc

SEQ ID NO: 483203 - DNA, 534 bp, Homo sapiens
tggtcccattctgctctcctcgcttcaggaaaagatgtctctatttctgagtgtctgctcatagttcccatacattctcccatcttgataatctggactggatcatgaagaaacatgaagatccttgaacacttttcttggtgcaggtgttcacaattcaacagctttgagggtcaaagtaggtaatgtaattgtgtgcagaagcccaagtataagaacatttaacttccagaaatagaatcaaacagtctttatttttactaaattagaactaaattagaagtgcatggcataatgtaagcagatatgatattttggattatatattaaattcaaaataaaaagattaactgaaaattttcaaactccaattattctgatttataattagaaaactaacatmttttttctatataacatggattagactttgtattcctctttaaaatagatgtacagaatttggccttgaatcccttaaatgagaacaatattttgttttattttagctcataacggagaacacatgctttt

SEQ ID NO: 483204 - DNA, 534 bp, Homo sapiens
tggtcccattctgctctcctcgcttcaggaaaagatgtctctatttctgagtgtctgctcatagttcccatacattctcccatcttgataatctggactggatcatgaagaaacatgaagatccttgaacacttttcttggtgcaggtgttcacaattcaacagctttgagggtcaaagtaggtaatgtaattgtgtgcagaagcccaagtataagaacatttaacttccagaaatagaatcaaacagtctttatttttactaaattagaactaaattagaagtgcatggcataatgtaagcagatatgatattttggattatatattaaattcaaaataaaaagattaactgaaaattttcaaactccaattattctgatttataattagaaaactaacatcttttttctatataacatggattagactttgtattcctctttaaaatagatgtacagaatttggccttgaatcccttaaatgagaacaatattttsttttattttagctcataacggagaacacatgctttt

SEQ ID NO: 483205 - DNA, 625 bp, Homo sapiens
ggtttgtttttaaagtaaacagataagacagattcaaaattactattgaaaataccagtcatgggccgggcgtggtggctcacacctgtaatcccagcactttgggaggccaaggctggcagaacacgaggtcaggagatcaagaccatcctggctaacatggtgaaacgctgtctctactaaaaatccaaaaaattagcagggcgtagtggcgggcacctgtaatcccagtyacagggaggctgaggcaggagaatcacttgaacccgagaggtggaggttgcagtgagctgagatctcgccactgcactccagtctgggtgacagagtgagactccatctcaaaaaaataaataaataaaaataaaaaaagaaaataccagtcatgtctatggccataccatgctgaacatgcctgatctatgggatccacaaaataccagtcactacccagaaattgtaataaacgctgttttttatatatagtgccttcttttagagtgtccatcatggttagttttttctccatttttagaacagatttctatttatttggctgcattatagatatagttattgacttgtaatttaaaggctatttatatataaaaaattgtttttaaat

SEQ ID NO: 483206 - DNA, 649 bp, Homo sapiens
atcaaaacatttgttgatcatttattgttaatcctggactttttaactattctgaaggtgtcaaaaaggtctgtgccaaccatgcatgcctttttaaattttatttttattttagtatcttcatttcctcaacctcccaggctcaggtgatcctctcacttcagcctccgacgtagctwggactacaggcatgtaccgccacgtctggtgagttttttgtttgtattttttgtagagatgggtttccccatgttgcccaggctggtttcaagctcctgggctcaagtgacccacctgcctcagcctcccaaagtgctgggattactagcgtgagccactgcacccggtcaagcgtaattttttttttttttttttttttttgagacagagtctcattctgtcgccaggctggagtgcagtggcgtgatctcggctcactacaacctccgcctcctgggttcaagtgattctcctgcctcagcctctggagtaactgggactacaagtgtgcaccaccacgcccagcttatttttgtatttttagtagagatggggtttcaccatgttggccaggatggtctcgatctcttgacctcgtgatccgcccgcctcggcctcccaaaatgctctcagattactggtgtgagcc

SEQ ID NO: 483207 - DNA, 649 bp, Homo sapiens
atcaaaacatttgttgatcatttattgttaatcctggactttttaactattctgaaggtgtcaaaaaggtctgtgccaaccatgcatgcctttttaaattttatttttattttagtatcttcatttcctcaacctcccaggctcaggtgatcctctcacttcagcctccgacgtagctaggactacaggcatgtaccgccacgtctggtgagttttttgtttgtattttttgtagagatgggtttccccatgttgcccaggctggtttcaagctcctgggctcaagtgacccacctgcctcagcctcccaaagtgctgggattactagcgtgagccactgcacccggtcaagcgtaattttttttttttttttttttttttgagacagagtctcattctgtcgccaggctggagtgcagtggcgtgatctcggctcactacaacctccgcctcctgggttcaagtgattctcctgcctcagcctctggagtaactgggactacaagtgygcaccaccacgcccagcttatttttgtatttttagtagagatggggtttcaccatgttggccaggatggtctcgatctcttgacctcgtgatccgcccgcctcggcctcccaaaatgctctcagattactggtgtgagcc

SEQ ID NO: 483208 - DNA, 478 bp, Homo sapiens
ccatacaatctcatccttaaccatgtgtttggggaaagaagaggaaaattaagctgtgagataaagccaaaaatcaagaaaaacttaaaatactgattatgaactgtcattcgtcttctaaaattaaatagtggtatggttgcaaaattctgagtatactaaaagccactgaattgtacacattacaagagtgaatcttatggtatataaatgagtgaattttatggtacgtgaaagatctcagtaagcctgtttttgagatatttaaaaataaaaataactgagttaggaattcacttgtctttatcatctttgtaaactcatcatctcggatgccagtctcatactagctgtgtcaacccaaattgagagaccaagatgggaatctcaatcaaacaaagtttatcaggccgagcttgaggatgtgcgcccaggaagcacaggttccaayaggttataacctgtgtttcaaagcaga

SEQ ID NO: 483209 - DNA, 658 bp, Homo sapiens
gctggcagttgtatattagacagtcagatctggcatgattatagctgaaagccttgctacatcctagaccagcctgtttgtgtccgttttctgaatgttggttctcaaaccttccaagtagatcttttaggaaattcctcctttgtcagtttggaaaagttgattcttctctttagtggttaagaacctgactgatagggttcccatcyggagctcctatatacacttatttccagtgagaataggttgagaggaaaataattatacatctaatactcttgaatatgcagaaacatcacatctccctgactaaattcacaaagtataaaataaagaacaggacatatgttcccagtaaattgatagggtgtagattttgatatgaaaccaaatgtatttttaattaagaatcgaaatttactactcagtttctgatactataatttgctttttgtcagtcaatagaaaatgaaacttagcatgacaaaagaggaatataaaatttacaaataggaatagaaatatagaataaaagtatatattttaactgtaaagaggaaaacaggaagaaaggaaggtaaatggaaggtgaggataaaaagttaatggaaacctatttataattttgctgatatacctcttacctgaatggtaaaat

SEQ ID NO: 483210 - DNA, 658 bp, Homo sapiens
gctggcagttgtatattagacagtcagatctggcatgattatagctgaaagccttgctacatcctagaccagcctgtttgtgtccgttttctgaatgttggttctcaaaccttccaagtagatcttttaggaaattcctcctttgtcagtttggaaaagttgattcttctctttagtggttaagaacctgactgatagggttcccatctggagctcctatatacacttatttccagtgagaataggttgagaggaaaataattatacatctaatactcttgaatatgcagaaacrtcacatctccctgactaaattcacaaagtataaaataaagaacaggacatatgttcccagtaaattgatagggtgtagattttgatatgaaaccaaatgtatttttaattaagaatcgaaatttactactcagtttctgatactataatttgctttttgtcagtcaatagaaaatgaaacttagcatgacaaaagaggaatataaaatttacaaataggaatagaaatatagaataaaagtatatattttaactgtaaagaggaaaacaggaagaaaggaaggtaaatggaaggtgaggataaaaagttaatggaaacctatttataattttgctgatatacctcttacctgaatggtaaaat

SEQ ID NO: 483211 - DNA, 549 bp, Homo sapiens
ttatattaataaaaccctctttttgttttatatattggggctcaaaatttaagattttatttggatatttattttgttgccaaagaagagtttaaaactggtttatcctgtacatataaaagaatcataaaatagaatctgtttaattcttacaaatttaaacattttctcccttagctcagttaatgacawtagctgagcccttttcctctgtcttctgcaaatacttcttcaaaaatttctcacctttaagctccccatggccaagacgcccaagtcgcccgattacaactctccagggtagagatgtcatttggacaatccctatgcaccactcccataacttctgtagtccaattttacgtgcagatactttactcctccgtgacctaacaaataaagaaatggggaaggggaaggggtccctagataaatcagagttatttatcacttataagacaaacactagaaattccaaagaacctatccatgctgtacccacttcatttacatagaaaactggaaatattcatatttgaggaacggtac

SEQ ID NO: 483212 - DNA, 549 bp, Homo sapiens
ttatattaataaaaccctctttttgttttatatattggggctcaaaatttaagattttatttggatatttattttgttgccaaagaagagtttaaaactggtttatcctgtacatataaaagaatcataaaatagaatctgtttaattcttacaaatttaaacattttctcccttagctcagttaatgacaayagctgagcccttttcctctgtcttctgcaaatacttcttcaaaaatttctcacctttaagctccccatggccaagacgcccaagtcgcccgattacaactctccagggtagagatgtcatttggacaatccctatgcaccactcccataacttctgtagtccaattttacgtgcagatactttactcctccgtgacctaacaaataaagaaatggggaaggggaaggggtccctagataaatcagagttatttatcacttataagacaaacactagaaattccaaagaacctatccatgctgtacccacttcatttacatagaaaactggaaatattcatatttgaggaacggtac

SEQ ID NO: 483213 - DNA, 360 bp, Homo sapiens
gctgtcaaagtttctgtctttaaagatattcatcacggaatcggagagaatcagggtaacatagaggctgtgggcttcgggaattggctgcatggtggcgggctccacagagttgaggggccgtgtagtagagggggtggaggctggtgatccttgatcggtgctatcatacttaacagacccttgaccactggcagtgcccccacctctgggagttcttggggtcctgggggttcgtggtgtggggacagagaagcgaggggttgctggagatggtaggactcctgccccactattgctggctggggcagcgctgttcarcgtcacgggtgtgttcatctgtggtgtgttcagatagtc

SEQ ID NO: 483214 - DNA, 631 bp, Homo sapiens
ctgctctggtttctagttataatccccagtccccaaaaagctacacactatctcatctccatgcatttgcccaagcccttccttccttcctttctcttgtgaaaacttctcttcccttccccacgtatgggagtcctgcccatccttcaagactcaactcaggtatctccaccccagggaagtttcccttaaagaggaaggagcttcccctctggttagggacatgctgactgtgtgcatggctacgtcctctgctccaggttaagacacaggctctagctgcatatgcctcagtccaaatccactctgggtgactctgaacaaatcatatgtcctcacagagccttgatttcttgaaagacttcccagagctattgcaggcattaaacaacagcaaacaaaaggatgtaaagcccagtgyctggcctcagcaagcccttgacaaacagtagctggtatttttactaaggataaggcccatttctccacctccaccccaccacacacacacacagaacatttaaaagagacctttgagttcagcatacacttactggtgaatggctggtgacagaagaaagcagagggtgaatcacagggggtgacctgtcagtaggtgtgacagttctca

SEQ ID NO: 483215 - DNA, 644 bp, Homo sapiens
ttttaatggaaggatgcacaagaaactagtaatatttgttgtctcaaagtgggaaaaatgggtatctggaggagagacagctttcactgtattctcttttttaccattgacattttgagccaaatagtacctctctgaaaatattaaaaatttaaacaataattttaaagcagtgtctgattatcctaaaaactttggaaaagagatacatataaaatgatttagtactgacatccagctattcattcattcaacaatttttttcttttttttttttttagaaaagttctcactctgtccctcagagggagtgcattggtgtgatcatggctcactgcagtcttgacctcctgagctccacactcagctaacttttgtaaagatggggttttgccatgctgcccaggctggtctcaaactcctgggctcaggccattcgcccacctgggcctcccaaartgctgggattacagcatgagtgatatgttagctaccccgcccgaccagcaaatgtttttgagtgtttactgtgtagcagtcagagtaggcacttaaccaatgttagcaatttgatgtacaaaatttatttcctgtacttttttctgtatggatatctggaagcagttttagcaaaaattactact

SEQ ID NO: 483216 - DNA, 468 bp, Homo sapiens
ttaggagttcgagatcagcctgaccaacatggtgaaaccctgtctctactaaaaatacaaaaaaaaaattagccaggcatggtggcgggcgcctgtaatcccarctactcaggaggctgaggcaggagaattgctcaaatctgggaggcagaggttgcagtgagccaagattgcaccactgtattccagcctgggtgacagagcaagactccatctcaaaaagaacaaacaaacaaaaaagaattcctgataaatacctaatcttctaaatattggaccatgttgcaggtttgcatgaactcagaaatgagtgaaatcttactgcagattagattcagacattttttcttacctgaattcttctctgtagttattcctaatatactcagctagagtcctgctgtgccgcagacagctcttgaggatgtaaaattgctggtacaacagaactgcttggcagggacttag

SEQ ID NO: 483217 - DNA, 468 bp, Homo sapiens
ttaggagttcgagatcagcctgaccaacatggtgaaaccctgtctctactaaaaatacaaaaaaaaaattagccaggcatggtggcgggcgcctgtaatcccaactactcaggaggctgaggcaggagaattgctcraatctgggaggcagaggttgcagtgagccaagattgcaccactgtattccagcctgggtgacagagcaagactccatctcaaaaagaacaaacaaacaaaaaagaattcctgataaatacctaatcttctaaatattggaccatgttgcaggtttgcatgaactcagaaatgagtgaaatcttactgcagattagattcagacattttttcttacctgaattcttctctgtagttattcctaatatactcagctagagtcctgctgtgccgcagacagctcttgaggatgtaaaattgctggtacaacagaactgcttggcagggacttag

SEQ ID NO: 483218 - DNA, 468 bp, Homo sapiens
ttaggagttcgagatcagcctgaccaacatggtgaaaccctgtctctactaaaaatacaaaaaaaaaattagccaggcatggtggcgggcgcctgtaatcccaactactcaggaggctgaggcaggagaattgctcaaatctgggaggcagaggttgcagtgagccaagattgcaccactgtattccagcctgggtgacagagcaagactccatctcaaaaagaacaaacaaacaaaaaagaattccygataaatacctaatcttctaaatattggaccatgttgcaggtttgcatgaactcagaaatgagtgaaatcttactgcagattagattcagacattttttcttacctgaattcttctctgtagttattcctaatatactcagctagagtcctgctgtgccgcagacagctcttgaggatgtaaaattgctggtacaacagaactgcttggcagggacttag

SEQ ID NO: 483219 - DNA, 549 bp, Homo sapiens
  misc_feature (1)...(549): n = A,T,C or G
aaaacacatttttaagtcagtagaacaatttgaaaatggtctgagtctggccgggcgaggtggctcacgcctgtaatcccagcactttgggaggctgaggcgggcagatcgtttgaggtcaggagttcaagaccagcctggccaacatggkgaaatcccatctctactaanataaaaaataaaaaaattagcccgggtgtggtggcgggcacctgcaatcccagctactcgggaggctgaggcaggagaattgcttgaacctgggaggtagaagttgcagtgagctgagattgtgccacggcactccagcctgggtgacagagcaagactccgtctcaaaaaaaaaaaaaaaaaaaggactgactatcagcaataccaaagaatgtttgataattttgtagggtgtgataatcattttgtaagaaagtattcattttatttagagatacattctgaggtatgtaagaattaagtgacataatatttaggatttcttttttaaaaagttatatggatagcttaaaatttctataggttttcatacgttta

SEQ ID NO: 483220 - DNA, 549 bp, Homo sapiens
  misc_feature (1)...(549): n = A,T,C or G
aaaacacatttttaagtcagtagaacaatttgaaaatggtctgagtctggccgggcgaggtggctcacgcctgtaatcccagcactttgggaggctgaggcgggcagatcgtttgaggtcaggagttcaagaccagcctggccaacatggggaaatcccatctctactaanataaaaaataaaaaaattagcccgggtgtggtggcgggcacctgcaatcccagctactygggaggctgaggcaggagaattgcttgaacctgggaggtagaagttgcagtgagctgagattgtgccacggcactccagcctgggtgacagagcaagactccgtctcaaaaaaaaaaaaaaaaaaaggactgactatcagcaataccaaagaatgtttgataattttgtagggtgtgataatcattttgtaagaaagtattcattttatttagagatacattctgaggtatgtaagaattaagtgacataatatttaggatttcttttttaaaaagttatatggatagcttaaaatttctataggttttcatacgttta

SEQ ID NO: 483221 - DNA, 549 bp, Homo sapiens
  misc_feature (1)...(549): n = A,T,C or G
aaaacacatttttaagtcagtagaacaatttgaaaatggtctgagtctggccgggcgaggtggctcacgcctgtaatcccagcactttgggaggctgaggcgggcagatcgtttgaggtcaggagttcaagaccagcctggccaacatggggaaatcccatctctactaanataaaaaataaaaaaattagcccgggtgtggtggcgggcacctgcaatcccagctactcgggaggctgaggyaggagaattgcttgaacctgggaggtagaagttgcagtgagctgagattgtgccacggcactccagcctgggtgacagagcaagactccgtctcaaaaaaaaaaaaaaaaaaaggactgactatcagcaataccaaagaatgtttgataattttgtagggtgtgataatcattttgtaagaaagtattcattttatttagagatacattctgaggtatgtaagaattaagtgacataatatttaggatttcttttttaaaaagttatatggatagcttaaaatttctataggttttcatacgttta

SEQ ID NO: 483222 - DNA, 549 bp, Homo sapiens
  misc_feature (1)...(549): n = A,T,C or G
aaaacacatttttaagtcagtagaacaatttgaaaatggtctgagtctggccgggcgaggtggctcacgcctgtaatcccagcactttgggaggctgaggcgggcagatcgtttgaggtcaggagttcaagaccagcctggccaacatggggaaatcccatctctactaanataaaaaataaaaaaattagcccgggtgtggtggcgggcacctgcaatcccagctactcgggaggctgaggcaggagaattgcttgaacctgggaggtagaagttgcagtgagcygagattgtgccacggcactccagcctgggtgacagagcaagactccgtctcaaaaaaaaaaaaaaaaaaaggactgactatcagcaataccaaagaatgtttgataattttgtagggtgtgataatcattttgtaagaaagtattcattttatttagagatacattctgaggtatgtaagaattaagtgacataatatttaggatttcttttttaaaaagttatatggatagcttaaaatttctataggttttcatacgttta

SEQ ID NO: 483223 - DNA, 608 bp, Homo sapiens
tggctgttctactgacaaatgtaccctctggccccagccagctttgtgtaaacatatgtcatagggatctgacaagasagtctagatcccatagaacagacccaacatcactctagagaaacagcaggggaccactgatggtccaacagatgcgtgtccatatatggaaagagaacaggccgggcacagtggctcatgcctgtaatagcaatttgggaggccaaggtggatgatcacctgaggtcaggagttccagaccagcctgggcaacatggcgaaaccccgtctgtactaaaaaatacaaaatttagccgggtatggtggcaggtgcctgtaatcccagctacttgggaggctgaggcaggagaattgcttgaatctgggaggtggaggttgcagtgagctgagatcgcagaactactgcactccagcctgggcaacagagcaagactctgtctcaaaaaaaaaaaaaaaaaaaaaagaacatattacctcgtgtccatcagcaatggaaatttagtttagattactcttttgaagagatttccaattaagtgtttgttgactgaatgcataagtttgaggaggtgggaagagattaagggata

SEQ ID NO: 483224 - DNA, 608 bp, Homo sapiens
tggctgttctactgacaaatgtaccctctggccccagccagctttgtgtaaacatatgtcatagggatctgacaagacagtctagatcccatagaacagacccaacatcactctagagaaacagcaggggaccactgatggtccaacagatgcgtgtccatatatggaaagagaacaggccgggcacagtggctcatgcctgtaatagcaatttgggaggccaaggtggatgatcacctgaggtcaggagttccagaccagcctgggcaacatggcgaaaccccgtctgtactaaaaaatacaaaatttagccgggtatggtggcaggygcctgtaatcccagctacttgggaggctgaggcaggagaattgcttgaatctgggaggtggaggttgcagtgagctgagatcgcagaactactgcactccagcctgggcaacagagcaagactctgtctcaaaaaaaaaaaaaaaaaaaaaagaacatattacctcgtgtccatcagcaatggaaatttagtttagattactcttttgaagagatttccaattaagtgtttgttgactgaatgcataagtttgaggaggtgggaagagattaagggata

SEQ ID NO: 483225 - DNA, 608 bp, Homo sapiens
tggctgttctactgacaaatgtaccctctggccccagccagctttgtgtaaacatatgtcatagggatctgacaagacagtctagatcccatagaacagacccaacatcactctagagaaacagcaggggaccactgatggtccaacagatgcgtgtccatatatggaaagagaacaggccgggcacagtggctcatgcctgtaatagcaatttgggaggccaaggtggatgatcacctgaggtcaggagttccagaccagcctgggcaacatggcgaaaccccgtctgtactaaaaaatacaaaatttagccgggtatggtggcaggtgcctgtaatcccagctacttgggaggctgaggcaggagaattgcttgaatctgggaggtggaggttgcagtgagctgagatcgcagmactactgcactccagcctgggcaacagagcaagactctgtctcaaaaaaaaaaaaaaaaaaaaaagaacatattacctcgtgtccatcagcaatggaaatttagtttagattactcttttgaagagatttccaattaagtgtttgttgactgaatgcataagtttgaggaggtgggaagagattaagggata

SEQ ID NO: 483226 - DNA, 632 bp, Homo sapiens
tctctgcctcattgattctgcctgctggttatgggctgaacgaagttctgtaacagtagactagaatggcagggagagtccttcctgtacagaccacacagagctttcttgctcagtttctcttctgagaagcgcctagtggctgccaggcctgatacatgctccttctccagaagcctacatcaagcgcttacactcttcctaaagatccacagcacctgcagaggctgcggaaatcacctcagcaagtgatcccactgtaaaggcaggggaagtacttgtatttatggagcatattatatgttccaggcactatggtagatgatctacaggcctgagtgcatttgatcacttcattgttaatgaaacggacgcttctcacacagccctgttttggctgctggtgaaaaagaaaatgctggttatcaactaaacaattagaaaaaaaaaatcacaagtgtatctagaatttttaaaaaaaatctatttaagtactaattaaaaggattatggttaagagagtccacactaggttggacattataagagagaaaccgattatcatgtgaaatgtygttattcatgtgaaaaacacacattgcttttcatctattatctgcattttacatcaa

SEQ ID NO: 483227 - DNA, 629 bp, Homo sapiens
  misc_feature (1)...(629): n = A,T,C or G
ggataggataggtacacgagtaactaactacaatgagtgaaatgggattaatgtgatactaggagtgtgaaaaaactgcagtgggagaggggctgcatttgttggtggaattagggaaagatctgaggaggtttttctgctaagccagcttttccttaggtgtggaagacacgtggttcagtaatgggagatgattccaggtggtactctgacatggcatgaaacaactttgaattccatggtggaaatatgtgattcctttttccagctaggctgatctcatcagggagaacctctcagcttgggrccactagtgatagttcttgaacacatgctcatctgccctttcctcacagagaagccagctacaggctcagaaaatgcagcattaacttagaatntatgttgctttcatgccatttacaccaagtgatactggttttccctggaaagtgacacaacattttctttataaacttcttaaaaaaaaaagctagttgattgaaagaaaaatattacataaaggctcatggattatggtaaatgaaagagggacagaaatttaccagggacagtgagagtattcctggtataggaacagcttgagttaaggggcacgggcaaaaaag

SEQ ID NO: 483228 - DNA, 629 bp, Homo sapiens
  misc_feature (1)...(629): n = A,T,C or G
ggataggataggtacacgagtaactaactacaatgagtgaaatgggattaatgtgatactaggagtgtgaaaaaactgcagtgggagaggggctgcatttgttggtggaattagggaaagatctgaggaggtttttctgctaagccagcttttccttaggtgtggaagacacgtggttcagtaatgggagatgattccaggtggtactctgacatggcatgaaacaactttgaattccatggtggaaatatgtgattcctttttccagctaggctgatctcatcagggagaacctctcagcttggggccactagtgatagttcttgaacacatgctcatctgccctttcctcacagagaagccagctacaggctcagaamatgcagcattaacttagaatntatgttgctttcatgccatttacaccaagtgatactggttttccctggaaagtgacacaacattttctttataaacttcttaaaaaaaaaagctagttgattgaaagaaaaatattacataaaggctcatggattatggtaaatgaaagagggacagaaatttaccagggacagtgagagtattcctggtataggaacagcttgagttaaggggcacgggcaaaaaag

SEQ ID NO: 483229 - DNA, 571 bp, Homo sapiens
agctgttatgaagacctggcctgccacagacttacagttccacatggctgggaggcctcaggaaacttacaatcatgacagaaggcgaaggggaagcaaggcatgtcttacatggcaacaggagagagagagagaatgtgcaggggaaactgccacttttaaaccatcagatctcatgaggactccctcaccatcgtgaaaacagcatgcatgatcyaatcacctcccaccaggaccctccctcgacagtggggattacaattcaagatgagatttgggtgggaacacagaaccagaacatatcaggctaccatctggataaggtgggcactgggaaaatgaatccagatgtagatgctcatggaaaaggcacagtgcccaaaggtgagagtgatctctacataagagtgagcaaaatgaaatatcaggatattttagcatgtgggtgaattacaactggatgtctgcacaaacatttggcaccaggaagatctgcttgtttagggtgtgggaacagggttttatggaatgtgaggacataaagattgtcaagagtaaagccagcagttag

SEQ ID NO: 483230 - DNA, 727 bp, Homo sapiens
agctgctgtgcttttagcacctggaacagaacctagcacatagtagatgctgaatagatgtttgctgaataaatgagtgaatagttgtgttccaggttgaaaatttgtacttaatttggtaagcagtggggaaccatgaaaagttttgaaccaggagtatcatgttctcatcttagactaattactgtggcactgtgtgtgcaatgggatggtgaagggagaggttacaggagaaaaggttagtttagcaggctatgatggtagcctaataggcagaaggagggcctcatggttgcaagacagtgggataggagatgctgacaagaagtctataagtcttgtcaacaggatggcaggaataatgagaggttgctgtcaaagatgatacttaggttttgcccctcyaatgataatattgtttacagaattgaaaagacaagagggactgaagaggaactggtttagaaggaaggtagtaagctaaaattggggcaagttgagtgtgagttgctagcagattttcgagtaaagatttagcaggcatttggaaatgggggtctagagttcagacgaaaggccagaaataaaacaacttggaagtagactcatacagttttatggtttaaaaactaaaatgtcattgttctttaataaaacagcaattgatttttcaccttgtaggaaaagggggggaggtggaaatatttatatatacctattctgaagg

SEQ ID NO: 483231 - DNA, 724 bp, Homo sapiens
tgctgtgcttttagcacctggaacagaacctagcacatagtagatgctgaatagatgtttgctgaataaatgagtgaatagttgtgttccaggttgaaaatttgtacttaatttggtaagcagtggggaaccatgaaaagttttgaaccaggagtatcatgttctcatcttagactaattactgtggcactgtgtgtgcaatgggatggtgaagggagaggttacaggagaaaaggttagtttagcaggctatgatggtagcctaataggcagaaggagggcctcatggttgcaagacagtgggataggagatgctgacaagaagtctataagtcttgtcaacaggatggcaggaataatgagaggttgctgtcaaagatgatacttaggttttgcccctctaatgataatattgtttacagaattgaaaagacaagagggactgaagaggaactggtttagaaggaaggtagtaagctaaaattggggcaagttgagtgtgagttgctagcakattttcgagtaaagatttagcaggcatttggaaatgggggtctagagttcagacgaaaggccagaaataaaacaacttggaagtagactcatacagttttatggtttaaaaactaaaatgtcattgttctttaataaaacagcaattgatttttcaccttgtaggaaaagggggggaggtggaaatatttatatatacctattctgaagg

SEQ ID NO: 483232 - DNA, 615 bp, Homo sapiens
tcaccttgtaggaaaagggggggaggtggaaatatttatatatacctattctgaaggaaattagcatgtattgagcaactactgtgtgccagacactatgcaagaccctcttcttggttacctggtttgaagtacaggtataaatagtgcaccttttatagagtcccagagaagtggaacactttgcttagagtcatacagcttagctctgtgacttcagagcccatattcttttgtgtatgcatcattgcttgttattaaaaattgagatgttttttatctagtccagataaataatttctctttgctgatcattttgtaagtcaataaattagttcttcagaagacctaggaagcatttactacatcctcttgctaggaatacgagttgtgtgctacctacaaccacatacatacatagtctttctgagcataagatggttgggtaaaaattattatgttactattctttctttctttttcttttcttttytttttttttttttgagtttgtctcgctctgttgcccaggcgggagtgcagtgacatgatctcagcaaactgcaacctctacctccagggctcagcgaccttcccaccccagcccaccaagca

SEQ ID NO: 483233 - DNA, 665 bp, Homo sapiens
tttgggtaaaaagaaaggaggattacttgaagttagtgcaaaatcatccactgagccgagatagcagagaaacacactactccatttcagagtgttaaatgtcttgtcacaggcagagaatgtaagagctggaagagaacttggagaacatctagtcccacccttccacctagcagaggaagcccaggaagaaacagatgtggcctggaaagggggcctgacttgcttgaagtcaaatagctggtcatttggctctgtcagaacctggaataaaatgtcctagtaattatctccactgcccaacacaggcgaatctggcttaggaactctttctttggaagtagatttttctctgatcctccctcaagtcataataagttgaatggagagtccagttcctatgttcttagaagtccaaattcaacacctcacggtgatgccaaagttaagtatttgtggaattaaattagtttatggcataaaatrtagtaaagacaagtttttaaatggttgtgggagagccataactgctcgtagacaatttatctttcatagagactctatgggactacacaaattagcccacagatgcctgaaacagagtggcaccatgcacttaattttgttgaagtccaagcttctttctctatgataaaagaggaagt

SEQ ID NO: 483234 - DNA, 613 bp, Homo sapiens
gcaaacattaactaaaaacctcttttatttttctaaattggaggaaaacaatggaactctcaaagtatcccagaaatgtggggaattacatgctgaaatgaagacttgactatgggagcatgtggatgcctattcctagaactgcccctccytcaatccttccaattacaaagaccatgttaagaatttcactcagtgccctgctacaaggcagagccctccccgcagaagctcataagtcacattcttcagggcaataatggaaatacataaactctgtccaaacatggtttattattacatggatttagagcaaatcacactcccacaagccaatattatgcaagccaggctaggttgtaaagaatatgattattcattcaacaaatattaagcacctagtatgtaccaagcactgggccaacactagaaatatatcagtgcacaagaatatctaggtcccagctctcatggagcttgcattctagtgggaagacagacaataagcaatgaacatgtagttataacttacaaaagtgcaattgaaatcaacaaagcagtctgataaagaaaacttgtgtgtgtttgttgacgggtggcatacttcaaacta

SEQ ID NO: 483235 - DNA, 613 bp, Homo sapiens
gcaaacattaactaaaaacctcttttatttttctaaattggaggaaaacaatggaactctcaaagtatcccagaaatgtggggaattacatgctgaaatgaagacttgactatgggagcatgtggatgcctattcctagaactgcccctccttcaatccttccaattacaaagaccatgttaagaatttcactcagtgccctgctacaaggcagagccctccccgcagaagctcataagtcacattcttcagggcaataatggaaatacataaactctgtccaaacrtggtttattattacatggatttagagcaaatcacactcccacaagccaatattatgcaagccaggctaggttgtaaagaatatgattattcattcaacaaatattaagcacctagtatgtaccaagcactgggccaacactagaaatatatcagtgcacaagaatatctaggtcccagctctcatggagcttgcattctagtgggaagacagacaataagcaatgaacatgtagttataacttacaaaagtgcaattgaaatcaacaaagcagtctgataaagaaaacttgtgtgtgtttgttgacgggtggcatacttcaaacta

SEQ ID NO: 483236 - DNA, 633 bp, Homo sapiens
acattgtagatgctcaacgaatgtttcctgaataaattttaaaaattaattaggcatgtgtatctaatataaaggatgaagttttaaatgccatccttttttttgagacagagtctcgctctgttgcccaggctgtagtgcagggacatgatctcggctcactgcagcctccacctcccgggttcaagcgattcttttgcctcagcctcccgagtagctgggattacaggcttgtgccaccacacccagcccgccatgtaaaaatcttaatatttgggacctgccattcaaatgtaagctgtgacgcaggagagatatatctactgaaaaagggagattgaaccttgtgcttagattaagaacctgagtgttctaaccagaagagaaccagagttttgagtccctagcgatcaaytgtatatcagcttaattcatccaacaaacaattactggtatagatactactggtatagacactaaaattagggactggagatgttataagtataatggtccccatcagagtctaggggcaagagaggagagtatgtgaaaaataattactaaataaaagaatgttaacacagtgtgaccttttcatttacgtgtatatcttaggccttctacccaccc

SEQ ID NO: 483237 - DNA, 486 bp, Homo sapiens
atcattgcccaattttatgggagccctagctttgctcacatagaaccagacatttatttaaaggtaatgttttccaccaacaaatgcttaatgggcaaggcagagtatctttatcaccacagcagaatcaraagtgcacattcctggaagaagcgtgtctgtacagcttattaataaacagcattggctctagagagcctgctcttcaacaccaccccctctacctaaccttgggaatatctgaaatggaaaaaataaggacaaattcttcagcaggcttagctgtacaatctttaggtcttatggaaactatacaagattccttttacaaagaaactcaaaccaggtttaacagcctatatttaagaagcttccatttctgcggaaatctgagggcagccaatggttattcagcccactgctatgacctgagaattggggaattggtggatgtatgacaggaagatatacaccctgacacctacc

SEQ ID NO: 483238 - DNA, 635 bp, Homo sapiens
tttagatgtgtcttttataagcagcatataattgggttttatgaaaatttctgtcttttgtttgatatattagggccatttacatttaatgtaaattattgatgcactggatttaattctaccatcttgcttttactatttttttttttttttggtcccatctgttgtgtatttcttttcctctttttttgttgccttcttttggagaaatcaagtatttttaacattattatattttttatttttgttgaagtgaaattyatctaacataaaattaaccattttaaagtgaacaacccatggcacttcacaatgttgtataaccaacacgtctatctaatttcaagacattttcgtcattccagaaggaaatcccatatccgttaagcagttgctccacaattttccctttcccctgtccctggtaaccacaaatctgcattttgtctttttggattatggacaaatcaagtattttaataattccatttcctcctctaaccacttgttagtcatacattattttactgttcttttagtgattacctcagaaattacaacacacattcatgatttcactgtaagttagtacttttattgcttctagggcaaagaaagcatttagcacacactcc

SEQ ID NO: 483239 - DNA, 456 bp, Homo sapiens
tccacacccagggggcacctgagtcctacccagggcagacgcttccacaccctgggggctgggggactgcacctggctcctgtctgggccccagcttcattccactgccctgggccctgggagctcggccgagcggggtccccaagaccttgctgcatttctgggccttgggctggggtgagggccgggaggaaggagcccagcctggagcctggcacgcagggagtgcatggccagaaccggtgacaggcrgggctgcctgctggcgtggaagaagtgtccatggcacccccaggcctggttcacagtgggatgggcggggagccggggggctctggggtcctcggctgacctgcccccacccctgccctggcttgtcagctcccagcagcagccactcttgatggattttccagaaaatgaggtgtggccaaacatcttcaggcttttccttct

SEQ ID NO: 483240 - DNA, 483 bp, Homo sapiens
tgccttcccagcctgagttggcagttgtgacttttgccagagtcctttgcctcccagcaggaaaggcttctgtatgggtagaaggcagcccatcacctctgtcctgtcccacacacaatgtgacacctagggctctgacttgctgggggattggggggtgatgttttccccactgctgaaagcagtgaggcctggaggcacccgaacagcaggtttctcctggggggagcacaacagaattggaggaggcrtctgtactgtgagacttggtgtgtggtggttgtgacccctcatcttgccctcaggtctcggtccagctcgacttccagctcaggctccagcaccagcactggctcaagcagtggctccagctcttcctcagcatccagccgctcaggaagctccagcacctcccgcagctccagctctagcagctcttctggctctccaagtccttctcggcgcagacacgacaacaggagg

SEQ ID NO: 483241 - DNA, 642 bp, Homo sapiens
tagctttgaagatatagaaatgaaaacatatggcttatctagatatgtttacaaaattgtatacattacaaatagcaatgagcatttagataaattcttgtggcaaaagaaattctcacatgaaggccctgagctagattgagacatgttcaaaatgaaagagaatccatatcccccagattgaagtaaggtttaataaatagagaaacaaatggaaacaatttataagtcccaggtttagatgttcagcagtttacatgttcagtgtagggcaggttacaataaattatcatgaaaattaagccaatcctaccaaaaaatgttcatatcattgatttgcagaggtgctatacctcatctcatgaataatgcttttttattaggattgtgctgatactgtttttccatgcagagggatactgctaggacctttcctaggctagtctcacaggctgagtggctctcccctctcatttctccyagttctacattttcacatcttcataagccagctaatctcttgcacacacttttcactccataattagtctgtaggtcatctcatctgctattttgtattatcctatagttactttccaataacacttgccttacttcttggtatttcattttattaaatct

SEQ ID NO: 483242 - DNA, 648 bp, Homo sapiens
gggtcacatggtaggtgcatattaactgttaaaaagaaactttcaaatacttacccagagtggctacatcattttacatttccaccaacaatatatgaatggtccaatttctcttcatgttcattggcattttgggttgccacttaaaaatatttttgttttcattttagctattctggtaagaatgtagtgataacttttgtgattttgattttcatgtcccaaatagctgatgatactaaaaatattttcatttgattatttcccttctatgcctcctcttcagtgaaatgaattttgataacgtttgcccattttttgaattgaattatttatttattttactactccatttggagaattctttgtatattctagacattagacctttaccagatacgtggtttgctaatatattatccaactctgtagcatgttttgaaagcaaatattgagtaggtcttctcaattttttttaaatatgggaaaactgaggcctggggaggtataatatcttctcaacatacaagataaggaagtgactgagatgtggtttgaattcagtttattgtgctattcacctcacagtgcttccttaaccagaagtcctttrttaaacaatagatgcagagaatctactttccacca

SEQ ID NO: 483243 - DNA, 572 bp, Homo sapiens
gggacaggacaccccaacttctcaacaagccttctatggggacaccggactctaagctcttgccctgctctatcactgctccatcttggccagctctttgttcctcagtaaaatcaggctttgcctatctcgaccacggccaggcggtcaggggccctcactccatgtctgactcacagctctatttccaatgcagaccttccttctggctggaaatccacctgcccagcagccagcgagagacctggaggaactggggaccatgacaaggcacacccatatgccaaggttctttggtgtacatcagctcatktaagaggacagagctatctcaggaaagacaaaaacagacctcagaacccctctccacagtggggaaggacctgtttttaatacagtctgaaagataaaaggattctgtctccaccgctgtccactgaggcttcgactcaaatacatactgctcaaccagaccctaaaacatccagaatagagaacagtaattctcgtcaacagaccagaatatttcttcatcacaccaagttctcattaaaaagcaactttctggatga

SEQ ID NO: 483244 - DNA, 535 bp, Homo sapiens
gttttcatatggccaccatccacacatgaggtctgcatcaactggggacctggtgacgatgctcccagtgtgcacgtgggaagcacagcccagtggtagctgttgtcctccttcctatgctggttaccaaaaatgagacttaccttgtcatagggccagatgtctatggcatycgccacccaatcattgcataaccatgtttaatgcgctccccaaagcagatctggtgggctgagcagcttgcaggggacagcctggatgaattgcctggagaactagagttgggagcttgctttatgttgctgctttatgactgcaagactcgtgagttcctaaatagaaagcaacagggtccctttgaactccgggcagagtccaacttttaatggccttgttttgatcctgcgccattcaattgtaaaatcttgcctgattagagtcccatcaggcaaggccagtaccgtctaggtatggccatgttcataccaactctaaggacacaaacattcattttactgattaacagttgaaatac

SEQ ID NO: 483245 - DNA, 535 bp, Homo sapiens
gttttcatatggccaccatccacacatgaggtctgcatcaactggggacctggtgacgatgctcccagtgtgcacgtgggaagcacagcccagtggtagctgttgtcctccttcctatgctggttaccaaaaatgagacttaccttgtcatagggccagatgtctatggcatccgccacccaatcattgcataaccatgtttaatgcgctccccaaagcagatctggtgggctgagcagcttgcaggggacagcctggatgaattgcctggagaactagagttgggagcttgctttatgttgctgctttatgactgcaagactcgtgagttcctaaatagaaagcaacagggtccctttraactccgggcagagtccaacttttaatggccttgttttgatcctgcgccattcaattgtaaaatcttgcctgattagagtcccatcaggcaaggccagtaccgtctaggtatggccatgttcataccaactctaaggacacaaacattcattttactgattaacagttgaaatac

SEQ ID NO: 483246 - DNA, 678 bp, Homo sapiens
ctggtaacaggttcttctgggctgggcagtaccctgaatttacaaggcgccttcctagtttctcaccctcagcccacggcccagccccaggtctgcctatttggcagtccgggacataggcccaaaaatggccagagacacagtgaatctctggcctcaggcaagagatccatctgagaacgcgtccccagcctgctccagactcacgccgagaaggtcctcgtccggcgagtgggcagtgggcttgggaccacgttgccccgcagaggggatggtgagcgctcacggctccgaggggtgtccagcagcccgactgaagcttgatgggtggggggctgtggtggtgggggaggctcagatgacatggctgacctggaaagagaagaggctgtcaggggctcgtgccttgcaaggtagggaccctgtgcttacccccatgtccaygtctgacagtccagtatctgaggctcattcctctcgggcacctcagcaccattgtcaccttgtctgggagcacgcctggcagggtcagatgcctactctgggctcctgaagcaaccgtggggccccctcgatcatagctcttcatgaaaatgccacatcctcccccatgaccaggatggcatcggtcccctctgtgtccccagcacaaggcatggatcccggcacatttgggac

SEQ ID NO: 483247 - DNA, 606 bp, Homo sapiens
ccatgaccaggatggcatcggtcccctctgtgtccccagcacaaggcatggatcccggcacatttgggacacatagtatttgtgggagggaaggaggaaggtgagcagaaaacccaaagccaggggccgggcgcagtggctcacacctgcaatcccagcactctgggaggccgaggcaggcggatcacttaatgtcaggagttcgagactagcctggccaacatggggaaacccagtctctaatacgaatacaaaaattagctgggcatggcggcaggcacctgtaatcccatctacttgaaggctgaggcatgagaattgcttgaacctgggaggcggaggttccagtgagctgagatcgcaccactgcactccagcctgggctacagagcaagactgtctcaaaaaagaaaacycaaagccagggagattttaatgccaaccacctagatccaaactcagccactccacggaccctccctgacgctgctgggagccagacaccacagggaagcaggggcaaaaactgaccctcacgcagtgtccgcctccagggaactgtggaacacatcgcagagagctcaagcgccacgtttggatccctga

SEQ ID NO: 483248 - DNA, 543 bp, Homo sapiens
tgccacacctggcccccagttaactcaacttagtaagtgaagcatattcctaactgcaaaaaaagttcaaatccctttaaaaakactgactaaagcctattacagatgacacaatcctaagaacctgcacatctctttgctaaatcatggtgaagttccacacgatggaatattattctgcaagaaaagggaacgactactggctacgatgtggatgaaccttgaggatattaagctaagtaaaagcagccaaaaacaagcatggacaacacagcgataaaagcagcaaaaacaagcatggaaaacacagcgaaaccccgtctctagaaaaaaaatacaaaacttagccaggcgtggtggcgtgtgcctgcagttccagctactcgggaggctgatgggagaggatggctttggcccaggagcttaaggctgcaatgagctatgatcaaaccacggcactccagcctgggtgacaagatcttgtctcccaaaggggaaaaaaaaaagcttacacagtctatgaaatgtctagaataggcaaat

SEQ ID NO: 483249 - DNA, 650 bp, Homo sapiens
ttgatgtcagctcataccaaaccctttcaatttacaagtcacaaataactagggcagacctgcttccaattacttcatttggggaaaccctggtaaagtgagttatctgtmggtttatttattcgattttttaaaaaatgtattaaattcctgttactcacaagggtgctgagactatgaggctgagattaaaaccttgcaggacaatcagcaccccaaataagttgaatttgtacaaaaattatttacagacccagaagagcactttttgtttttaagtacaaatcatttctaaattcagaataacaaataagactacagccaataagtatgcaaagaagactcttcctgcagaagagtctaacctctaagaagatgaaactacctggggatttgagaaatggtccattggccattctcagttctaaagaaatttcacaaactatagacatatgcaaaaaataagggtatttggctaagaaaattatatctattaatgggccaatgttgaatgcaatgggaggaatatccaaaaaaaaatttacattggcattaatttccggaaaatatagtgaaattatgcaatggctttatgctggaatgctgacattaatggggacaatgatatttgttgagtggatgaatctgcc

SEQ ID NO: 483250 - DNA, 530 bp, Homo sapiens
acacattttgcaaacagcccagccrtgcacataaaccgcattattagcctataaatcaattagtgcatttgggtccaggctgcacagtgctgctctgacagatggccatcagtctgtctccatctccttagctagatcccaagaggaggggagagaagaaagagcttccaggaaggtgttgaacccactagctctcttgtagcagggaatagggaattccgaagtggctgtgcaagggccaggctgttctctggaagtcatttgaagaatgaaattgaatttggtgactccaggaacttggttggagtgagaaatacatgactctcaggtaggaaacacatgagcattttggagaagacgctgcagttggtagaagtagggggaaggacacatagttgggaacatgcaggacttggattccatttccagctttgcatgaccttgggcaagccataagaacttcttagcctcagtttccttatctgaaaaaaaaaatgggggtggggggggaatcttaaaatagatcctga

SEQ ID NO: 483251 - DNA, 646 bp, Homo sapiens
ctggagatggcatcgggcatatcctgctgcgttcccggaggctcatgcatcctctgagctaagccgagctgtggccacctggaaacttgccttgttgattccagcctccctgtgggagtgcaccccccaaacgcacttccccaattcccaggcctgctttatttctccctttggtacactgtgctgtggacttaccctcacaatcagcccaaaattctgggttgtgaagccagacyctatgacggtagtaactctcccgctagttattatcatggttgtaccttgtattccacacagagcaggaaggatatcagtgtgcattcagcttggtgttactgatcacgtcctatctggagacaagatgctctgcccagtgtgcagtgggtgcttttcgtttatcctgcaaaggccacactggaggttcatttcaccgtcatcttgcattttgtctgaagaccttttccctagaccgcctctctctgcatccctcctccttaattttcctctgtgtgttttccaaggcattctctgcactgccagggacggcctaagatttaccagccctgccgaagaagatgaaatgctcaggggtcactgggcaggacgaggtaataagaaaagcaaacggtcaacagcaggcccagcc

SEQ ID NO: 483252 - DNA, 605 bp, Homo sapiens
aattaccaagtttcttctcaattttgagattgcaatggggagagcagagatggctatggcgaaacataaattatgtcatctctgtgctatcaaaggttctgagcattccttcctgctgtccttttcattttggctccgtaaatactgtgtccttttaaaaagagtcattgttcatgtccgttcaaaggtgacaggaaaaccgcaagtttagcgttctgtgggtgagtgtcttaaaggaactgtctgttgctgagtcagtgggtgagtaaaggaaggacgatgtcttggccaggtgtagagagtttctgaaccctacaacattggctggagagcagaggctccatcattagaggcacccgaattaaaagctccagcccaccacttacgagccatatgagttagggctgtttcccttctctgtttttaaaatyggggacaatgagaggatctacatcatggggtgtgataaggatcaattggcattatatgttaaaagtactgagaacagcctgcagagtgatcagaatgatccttagtaaaagttaaccgggtttttccccctcttattattcataatattgcagggaaagcttccttatcttcca

SEQ ID NO: 483253 - DNA, 639 bp, Homo sapiens
aagggcactgaaggtgactcttcattgtggggatgataatgataacagtgatggtggtggtggttatagcggcagcagtgagaacagccagcagttattaatgctcactgtatgctaggcactgagcaatgtattgtatataaattacctcttttattccttccaatgaacttaggagaatgagtattaatgtagacttcatttaacagatgagaaaacsaaggctcagaagagtttatgggacccactcagggccatatggctagtaggcaaagttggtatttgattctatgcaatttgccttctgaaccagcggtccagcaaagatgggggaagcaggcttgaaaacccccttgggttaaagtctacgttgctcaacgcaatcttctcctgataaatgttgctgatacactttggagaaacttcgtgactatgcctgattcccggcactaatgtagcttgacttagggctgatatcccacttacctcaccggaatgacaatcggggtcgaaaaaaaagagttattgcaattctggcttcctctgttgagctatgaataaatgatgatagctgtgaaatggtgtggtgtttagatcgtttctggtaaactaaaaaaactaaaaattgaataaagtggt

SEQ ID NO: 483254 - DNA, 612 bp, Homo sapiens
ctggacatgtggatgaagggcactgaaggtgactcttcattgtggggatgataatgataacagtgatggtggtggtggttatagcggcagcagtgagaacagccagcagttattaatgctcactgtatgctaggcactgagcaatgtattgtatataaattacctcttttattccttccaatgaacttaggagaatgagtattaatgtagacttcatttaacagatgagaaaaccaaggctcagaagagtttatgggacccactcagggccatatggctagtaggcaaagttggtatttgattctatgcaatttgccttctgaaccagcggtccagcaaagatgggggaagcaggsttgaaaacccccttgggttaaagtctacgttgctcaacgcaatcttctcctgataaatgttgctgatacactttggagaaacttcgtgactatgcctgattcccggcactaatgtagcttgacttagggctgatatcccacttacctcaccggaatgacaatcggggtcgaaaaaaaagagttattgcaattctggcttcctctgttgagctatgaataaatgatgatagctgtgaaatggtgtggtgtttagatc

SEQ ID NO: 483255 - DNA, 612 bp, Homo sapiens
ctggacatgtggatgaagggcactgaaggtgactcttcattgtggggatgataatgataacagtgatggtggtggtggttatagcggcagcagtgagaacagccagcagttattaatgctcactgtatgctaggcactgagcaatgtattgtatataaattacctcttttattccttccaatgaacttaggagaatgagtattaatgtagacttcatttaacagatgagaaaaccaaggctcagaagagtttatgggacccactcagggccatatggctagtaggcaaagttggtatttgattctatgcaatttgccttctgaaccagcggtccagcaaagatgggggaagcaggcttgaaaacccccttgggttaaagtctacgttgctcaacgcaatcttctcctgataaatgttgctgatacactttggagaaacttcgtgactatgcctgattcccggcactaatgtagcttgacttasggctgatatcccacttacctcaccggaatgacaatcggggtcgaaaaaaaagagttattgcaattctggcttcctctgttgagctatgaataaatgatgatagctgtgaaatggtgtggtgtttagatc

SEQ ID NO: 483256 - DNA, 271 bp, Homo sapiens
atcacaggttaagggtgagggatagsttggtagaaataccacagaagtaataaagaatctacaagacagcatctcctcttgtcttcttttggcctgtgttattttcctgacttcagggagatgaggcggagagctgctcatggttgaaggaaggaaacgtttctcttggtccatctaggtcaagatgggatgctgcccagaggacctccacagaaattcattaactgagagaaaccacgctatgggagtgaaggttggtagctgaattgcc

SEQ ID NO: 483257 - DNA, 271 bp, Homo sapiens
atcacaggttaagggtgagggatagcttgrtagaaataccacagaagtaataaagaatctacaagacagcatctcctcttgtcttcttttggcctgtgttattttcctgacttcagggagatgaggcggagagctgctcatggttgaaggaaggaaacgtttctcttggtccatctaggtcaagatgggatgctgcccagaggacctccacagaaattcattaactgagagaaaccacgctatgggagtgaaggttggtagctgaattgcc

SEQ ID NO: 483258 - DNA, 271 bp, Homo sapiens
atcacaggttaagggtgagggatagcttggtagaaataccacagaagtaataaagaatctacaagacagcatctcctcttgtcttcttttggcctgtgttattttcctgacttcagggagatgaggcggagagctgctcatggttgaaggaaggaaacgtttctcttggtccatctaggtcaagatgggatgctgcccagaggacctccacagaamttcattaactgagagaaaccacgctatgggagtgaaggttggtagctgaattgcc

SEQ ID NO: 483259 - DNA, 565 bp, Homo sapiens
ggaaaacaaccttgtaggaaaacaaatttcttttctgtgattattctcagtgtgcgagttaatttttgaggcagtaatatacttagcagtcatcgggcagttacttgaaaagcagagacatatgtgtctcgacacaggcgcgggagctggggtgcatgcacgcggggatgagtggggtttggttactttggggaatgaggttgaaaggctaactaggcacacacaaaaaaataccaatgtgatccgtggttgctaaagagttgagatttacaaagagcaagatgtaatggcaggcacaatgtgcctttgatagagatgaaccatctggtgggtttatccaacaacataggttttttgtgttgtttgtttgttttattcctatgctgacaggcacagagagtgaaccgggtgccaaaattatcgcctagcatcattaaaaatcagaatgttcagttttgctggytatggaagttgtgtatgcagggcagctctatattaggtgaggaaatggagcataaaggaaagcgaattcccctctcccccggagggttggacgtgtgtgctt

SEQ ID NO: 483260 - DNA, 630 bp, Homo sapiens
cctcatctttaatatgaagctgttaatgcctattctttagaattgtatttcagggttggagatccaaaatgtaagcttctatgtgggttggtggccctgccagaaacagaagacatgtattgatgggataattgagaagagttgaacaaaggaattgtttatcaaaaggttaaaggaaacagataagatgcagcaccctggggctagcaactgtggagagctgttaccacccctagggttccagggggaaggataaattagcagaactcagagggctataggaaaggttgcctgacatgaatgtggctttcagtaatgagtcaagtcataaccaacccatattctagcagagaggaagtcaagaggatgaagactcccatatctctctcctcccaccttctgctaccctgtaatgttttcctttggccaaactcagtagggaaggggatccatcaatatggtttcagggcacagaatagagtrgataaggacagagagtggatctggggggacaaatggagaaatctgtcctgcatagatcctagcacagtgttgatctctcagtgagtcaataaatggtaatgaacatgggtatcaggagctcacattcccattgggagtgaggaaaca

SEQ ID NO: 483261 - DNA, 630 bp, Homo sapiens
cctcatctttaatatgaagctgttaatgcctattctttagaattgtatttcagggttggagatccaaaatgtaagcttctatgtgggttggtggccctgccagaaacagaagacatgtattgatgggataattgagaagagttgaacaaaggaattgtttatcaaaaggttaaaggaaacagataagatgcagcaccctggggctagcaactgtggagagctgttaccacccctagggttccagggggaaggataaattagcagaactcagagggctataggaaaggttgcctgacatgaatgtggctttcagtaatgagtcaagtcataaccaacccatattctagcagagaggaagtcaagaggatgaagactcccatatctctctcctcccaccttctgctaccctgtaatgttttcctttggccaaactcagtagggaaggggatccatcaatatggtttcagggcacagaatagagtggataaggacagagagtggatctgggggsacaaatggagaaatctgtcctgcatagatcctagcacagtgttgatctctcagtgagtcaataaatggtaatgaacatgggtatcaggagctcacattcccattgggagtgaggaaaca

SEQ ID NO: 483262 - DNA, 614 bp, Homo sapiens
gcattattattccagtttgtccctgaggcttaaaaaaatgggagggcctctcatgtctttactagcagacctgccttccctgttacctacaattcarttctctcattttctgtctttcttcaccagccactggagggaggttttctctatccatttgtgcagttataacaaaatgatgagactgagtgaattattaagaatgacaatttattttctcacagttctggaggctgggaagtccaagatcaaggtgttggcatttggcgtctggtgagggccttcctcctgcatccccacatggtggatggggccaaaaagggtaacagggacaaatgctatgtactcacatgatggaaatggagaagagccagaaagggagccaaagctagttgcctccagccctgttacaagggatcaatctattcatgagggctgtgcttgccaaaggcccttacctcttaataccaacataatgaggatgaactttcaacaggaattttggagggagcaccagagttccaaccttagcagaggtgaacaagttgcaagtctgctttgctgttcaagggtgaaaaatcaagcccaagacagtgaaaccagctattggaagttca

SEQ ID NO: 483263 - DNA, 614 bp, Homo sapiens
gcattattattccagtttgtccctgaggcttaaaaaaatgggagggcctctcatgtctttactagcagacctgccttccctgttacctacaattcagttctctcattttctgtctttcttcaccagccactggagggaggttttctctatccatttgtgcagttataacaaaatgatgagactgagtgaattattaagaatgacaatttattttctcacagttctggaggctgggaagtccaagatcaaggtgttggcatttggcgtctggtgagggccttcctcctgcatccccacatggtggatggggccaaaaagggtaacagggacaaatgctatgtactcacatgatggaaatggagaagagccagaaagggagccaaagctagttgcctccagccctgttayaagggatcaatctattcatgagggctgtgcttgccaaaggcccttacctcttaataccaacataatgaggatgaactttcaacaggaattttggagggagcaccagagttccaaccttagcagaggtgaacaagttgcaagtctgctttgctgttcaagggtgaaaaatcaagcccaagacagtgaaaccagctattggaagttca

SEQ ID NO: 483264 - DNA, 267 bp, Homo sapiens
tcctcatccttcatctctgctacatccttaggcttggaggcactgggatttcagaagcaggcggaataccttctccccttggctacctattccttsaagctctcttcctccctcatctaggaagattctctaactgccagtacccgtcaattacaaaaccttccaggtactttggattcttactgtctgaagcagcacctctctacagaagtgacaaaaccgtcttctctccttgaccaaggatgacactgactgccaaaaccatgc

SEQ ID NO: 483265 - DNA, 267 bp, Homo sapiens
tcctcatccttcatctctgctacatccttaggcttggaggcactgggatttcagaagcaggcggaataccttctccccttggctacctattccttcaagctctcttcctccctcatctaggaagattctctaactgccagtacccgtcaattacaaaaccttccaggtactttggattcttactgkctgaagcagcacctctctacagaagtgacaaaaccgtcttctctccttgaccaaggatgacactgactgccaaaaccatgc

SEQ ID NO: 483266 - DNA, 582 bp, Homo sapiens
gggctggagatgccgacagggtgcctgcagtgatgggtcttgtgggctgtatttttttttttttttgagacggagtcttgctgtcacccaggctggagtacagtggcgcagtctgggctcactgcagctccgactcccgggttcgcgccattctcctgcctcagcctcagtagctgggactacaggcacccaccaccatgcccggctaattttttgtatttttagtagagttggggattcaccgtgttagccaggatggtctcgatctcctgacctcatgttctacccacctcggcctccaaaagtgctgggattacgggcgtgagccaccgcgcctggccaggtcttgtgggctgtattaagcgtatttgtctttatggtgaaagcagtagggtctttgawcagttttaagcaggagacaggtaaataaagatattcaataactttatccccattctgatcactagtaatgatacttcattagatcatcaccatccttagcattgttaccaatcattgagcagttgctgagccaggctgtgtgttaggaggtttctgtatctgactcaatggtgcctccag

SEQ ID NO: 483267 - DNA, 598 bp, Homo sapiens
cactttttcattcatcactcacctccgttagagagggttggcctttctgctggcctttatcgtcgcatcccactctgttgaggtaccttgcttacaagccaacatcccccaccagaccgggacctctggcagggaggggtgatgtctttgtcttcaggtgactttactgcacactcactgtgtctgagacattgcgcttctgcactataaatgcacttttgcattaaatatttctaccacctctaggaagtggttgttgctgtcattcccattttatagatggaggaagcagagctcatggggattaaaacacttgcccctggtccatactcaccccatagcctgactgcaaagttcattctcttaaccgccatgctacattgtcttattcagttctttgtcttcggcacatcacgtggaatagggcacagagacgtttgctaaaggaatcttactgtctttatataaatcctgcaaggggggaggcaggaacagatgacattggagaagaggtggggtgaggaaggaccatcccggtgaccccggccacgtggctggaccgtgccsggattgatcagcattagcagcaccagagctg

SEQ ID NO: 483268 - DNA, 610 bp, Homo sapiens
tgttttcattccacattacagtgtttcagatgttttgaaagtcttttatgccaggaggtggcaaactatttctgaaaaaggccaggtagtagatatattttggtgttgtgacctatatggtcgctgtctcaatgactcaactctaccatttggcatgaaagcagccacagataacatgtaaacaaatgggtgtggttgtgtgtcaagaaaactttatttacaaaagcaagagctgggccagatttggcttgcaggcaatagtttgctaacctctactttatgctcatctctgttgtgaagttactaatagttattagattcactgctgtgttttgttatttaacatattaattaaaatcacatccatatgctgtcctataaattttttatatgtgtattttaacacaagttccttttataattccaaatatattatttattcatttrttaacactattgtgagaagtggtagatagagttcatctgacttgtgaagggatccgtggcaggagcaagctaaggagccctgaatccttgaccaatagtgttggaaatgctagaatatctttgaaatattccagaaaacagttgtgtagcttcttctagtgca

SEQ ID NO: 483269 - DNA, 516 bp, Homo sapiens
ataccataagtctctatataaagctagctcagccaagcagggatatgaaaggtggcagcctttgaggagatggctgacagatttcatttgtcaaggatcagatcttgccctggtgccacatgtcatactttcccatcaccccttcggtgttgtacaggaaccttctccaggtgctgtcaggggaatatgcggaggctgccagctagagaccaggcgtgattaagtcaagtgtctgaaaagcagctattttctcctctctcttccggctctaaggttctgtctcccctgttgatttactaatcatgtagaaagaaagtgaagctaaactaaaagtttgacttttcttttmttttcctttttttctttctttctttctgtctagcctctctatgcctttttcttcctggttgttctcttttatattttctcttccttaactattatttagcccccccaacttttttaaattttatgtaatttatcctctctctcctagttcgtttgcctgatttctcc

SEQ ID NO: 483270 - DNA, 634 bp, Homo sapiens
  misc_feature (1)...(634): n = A,T,C or G
atacactttagacctccaatcaggcccttcaccatcatagaaatctgtaacttcatgcttttctgtcttttaacaatagtgatagctgtaattctgtatctatcatatgattatttgataggcttaccaagcataccatgttgaattggtactgagggagttcctgggaggtagactttccttctaaaacrgggacagtcccagaagaacaggaagagttatttttcctattatttaattaatatcaacatctgctttgacttttgttttctaagcttcataagtacacataacatattgttagagttgaccaatgacttgtttgttttacttatagtagaaactcaataaatatttttttaaaaactgtcttagagaaggccgagcaagatggctgaatagaaacccccagctatttttaccccaacaagaacaacaaattgaacaactctccacacaaaaagcaccctcataaaaaccaaacatctggtgagcaatcacagcacctggttttaacatcatattaagaaaaaaggcactgaaaattgtaggaaagacagacctgaatcacctagatttggtctatcatataaaccaaatggatctgatagttatttacannnnnnnnnnnnnn

SEQ ID NO: 483271 - DNA, 458 bp, Homo sapiens
aggaggagcagatgtccagaacaaagatgacatccacaytgagggtatgagcagtgtgaggactaaaactaggagacaaagaacacagcagtgcaattgaaggggaaaagatcacaggatggttattgcaaaaccaggaaacttcaggcatgtgaccccttcctgaaatttaccatctattggcaaacacatgtgtagctaatatttatatatgaatttgttcattgtttaataagcatatttccatcggccatggaagtattgttcatcttaggaaacctatacgaacagaaaaaaagggtaaaccagtttatgaattccaaaggtccaggtccaagtacaagtactgagacttaaatgtggacttctcaattgagaaaataccagttttttatttatccactgaacttatactgtttcaattgttgtgttattctactgacctctttttcccccag

SEQ ID NO: 483272 - DNA, 458 bp, Homo sapiens
aggaggagcagatgtccagaacaaagatgacatccacactgagggtatgagcagtgtgaggactaaaactaggagacaaagaacacagcagtgcaattgaaggggaaaagatcacaggatggttattgcaaaaccaggaaacttcaggcatgtgaccccttcctgaaatttaccatctattggcaaacacatgtgtagctaatatttatatatgaatttgttcattgtttaataagcatatttccaycggccatggaagtattgttcatcttaggaaacctatacgaacagaaaaaaagggtaaaccagtttatgaattccaaaggtccaggtccaagtacaagtactgagacttaaatgtggacttctcaattgagaaaataccagttttttatttatccactgaacttatactgtttcaattgttgtgttattctactgacctctttttcccccag

SEQ ID NO: 483273 - DNA, 640 bp, Homo sapiens
gagagtcagagactcagggtgaactcacattcataacttaccgataatgagcctcccagagaggttccttatagaagctcttccaactgtagcaatgtgatcaaggtaaatacttttgtcattcacacacagggagaaaatactgaatctattaagagaataaattagttatgaagacagattatgtgcatcatatgacaaagtatccatatggagcgcactacatcagaactcgggtagaactttaaacatgtgaatgatagaagataaaagtataacattctttaattttcaaccgtttcaatgggctgggagatcaaactttaggcattttatgtctaaactgagtgcagaaataggaggattcagaaagtgtactgaagttgatarctgaggacctgaatgaaaaaaatacctcaactttattttgtgacaacaaaaagaaactaagataaataaataagaacagaatttcatatttgagatatgattacctttcaatatctgtatagctctgtggagggtaaaaccctctcttgtgtctgctttctgtttagagagaaagcacagagagagtttcctctcaaatcatatcctaggtttctcaggaacaatgcctttaaaatgtgtcagtctcttg

SEQ ID NO: 483274 - DNA, 578 bp, Homo sapiens
tatggttctatactagaatgaatggaggagatgttccagggctccatgaggcttggagctattttgttccttgatggagaaagaaataaaaagaaagtccttgcttccttgtgcatgtccgtgtccatcttaagcgagagtgtttcatctctggtgggaatggtggtctcactgtggtagacattgctagctctcaccagtacctgttctcctttctttcctgtacatgtgcaagaccatgtttaccagatcctttggagttaggtggaaccatgctactcattcaggcttgaaatgatgtatattgcttctgggctgaagtgcgttagagatggagcatgcttctctctttctttcctagctgtagcagataaggaggtcacatatccagatctacaagctggtggggcctcctacagcctggaggtctgagtgactatgtagagcagaatgccctgctgaytcagtggttcatgtagtataattgagaaataaaattttcttgtgttaaactacggagatttgagggctgtttgttactggactaaaacctggctcatcctgactgactgaggcat

SEQ ID NO: 483275 - DNA, 567 bp, Homo sapiens
tatctgctcatggtggtgaccaaccaaggacatatcctttatgtatttctctccttctctgttccaccagtccttgtcctgcattcctgtcccctgggatcacttccccaagcaaactgcctgccccaaactcttgcctcaggggttactttccatggtgggaaccctggctaaggcaactcttctstagactagatcctatgcaaagaattttatgcataataactcattcaatcctcacaacaccctatgaggtaggtgctattatatccattttacagatgtggaaatagagactcagagacgtaaaatgactcagctcagccaacgacacactgccaggaagtgtcagggttgagtttgagccctggtcagtataacttcaaaggcattgttctgactccactgtcctatctacaatcacatatcatcatcagaacccagtgggttccagtttgtgccacgggttttcccttctctgggtggtggaggactctctcaccaagggtgttgcaggtgagcactgtctttgttctgcgcctatggtctgtgtccacccctgggaac

SEQ ID NO: 483276 - DNA, 567 bp, Homo sapiens
tatctgctcatggtggtgaccaaccaaggacatatcctttatgtatttctctccttctctgttccaccagtccttgtcctgcattcctgtcccctgggatcacttccccaagcaaactgcctgccccaaactcttgcctcaggggttactttccatggtgggaaccctggctaaggcaactcttctgtagactagatcctatgcaaagaattttatgcataataactcattcaatcctcacaacaccctatgaggtaggtgctattatatccattttacagatgtggaaatagagactcagagacgtaaaatgactcagctcagccaacgacacactgccaggaagtgtcagggttgagtttgagccctggtcagtataacttcaaaggcattgttctgactccactgtcctatctacaatcacatatcrtcatcagaacccagtgggttccagtttgtgccacgggttttcccttctctgggtggtggaggactctctcaccaagggtgttgcaggtgagcactgtctttgttctgcgcctatggtctgtgtccacccctgggaac

SEQ ID NO: 483277 - DNA, 567 bp, Homo sapiens
tatctgctcatggtggtgaccaaccaaggacatatcctttatgtatttctctccttctctgttccaccagtccttgtcctgcattcctgtcccctgggatcacttccccaagcaaactgcctgccccaaactcttgcctcaggggttactttccatggtgggaaccctggctaaggcaactcttctgtagactagatcctatgcaaagaattttatgcataataactcattcaatcctcacaacaccctatgaggtaggtgctattatatccattttacagatgtggaaatagagactcagagacgtaaaatgactcagctcagccaacgacacactgccaggaagtgtcagggttgagtttgagccctggtcagtataacttcaaaggcattgttctgactccactgtcctatctacaatcacatatcatcatcagaacccagtgggttccagtttgtgccacgggttttcccttctctgggtggtggaggacyctctcaccaagggtgttgcaggtgagcactgtctttgttctgcgcctatggtctgtgtccacccctgggaac

SEQ ID NO: 483278 - DNA, 567 bp, Homo sapiens
tatctgctcatggtggtgaccaaccaaggacatatcctttatgtatttctctccttctctgttccaccagtccttgtcctgcattcctgtcccctgggatcacttccccaagcaaactgcctgccccaaactcttgcctcaggggttactttccatggtgggaaccctggctaaggcaactcttctgtagactagatcctatgcaaagaattttatgcataataactcattcaatcctcacaacaccctatgaggtaggtgctattatatccattttacagatgtggaaatagagactcagagacgtaaaatgactcagctcagccaacgacacactgccaggaagtgtcagggttgagtttgagccctggtcagtataacttcaaaggcattgttctgactccactgtcctatctacaatcacatatcatcatcagaacccagtgggttccagtttgtgccacgggttttcccttctctgggtggtggaggactctctcaccaagggtgttgcaggtgagcactgtctttgttctgcrcctatggtctgtgtccacccctgggaac

SEQ ID NO: 483279 - DNA, 611 bp, Homo sapiens
ggaggttgtctctgttttcgtgaaaactgcagcctatttggaggagccagcattaaacaaacaagtaaaaagtaattaaaactatgaatgtgataggttctacaaaggaaaagcttactaggagtgcctccaaatttccttgtatcactgtagtccagtggttctcagcagagggcaactttgcctgccagggaatatttggcagtgtctgaagatattttgggggaataggtgctcctggcatctggtgagatgaggcagagctgctgctaaatacagtgtataggaccgcacaggaccacaatgatctggccccagatgttcacagtgtggagattgggagaccctgctgtaacccccttccccagcataatgtcctgtaacagatacaccaaaaatgcttgctgaataaatgggtgaagaaaggaagtcattcagttgtggtggccagagatgccagtgcttcttagatgagcacctgtgaatgatttctccaatctttgcakggtggggcaggacttgtgtcatcgcaggtatggggctgggtcgcttgcacaaatacccatgctcagaaaggccccagcttggttgaatgctctgcaaaggccatc

SEQ ID NO: 483280 - DNA, 523 bp, Homo sapiens
aggaccaattgatccttaatgaccaacatttaactttcttctgttagttggttccttgacccagttaaaaggaaagttaattctgaaacttttaggcacttacatagtgcctaattgtgttttaatatttgatgtgcttagaaacgtatgaggaattagtgctaattctgagatgattagcatattctggcgtgtcttatagtatgtgaactgtggtcttcaggacattcttgaacttttgcttctaattatccccacgtggatatgaacartgctgctattcaaggagcatgtcagagcttcatttttaaaaaagaattagcagcaactggatctgttttttctgaagatattggctgaatgactagttggtggtattctattgcttattgagtggtgaacctctgcccagatttaatttggatggcaggatcaacttcagtcaaaattttgttttctagtttttaaaaattaagtttttttcggatggggcagggcattttagattcacatccagttgtaa

SEQ ID NO: 483281 - DNA, 497 bp, Homo sapiens
cgggaggggcccctttagtgtcccagggaggccattcttccacggcgaaggggccagctgtcaggtttatcacaaaatctccccgaattcccaccaaataagatgcaaacacatcagcacctgggcccaggggcttgttgacaacggaacgaacgaacctgccggcctggcccagtccagcccagaaacttacagaagcaggtgctgtctgrccccgaaggacagaagactctagaaacatcagatctgtcgccacagcagcggacacgtttaatggcaggcgcctctacagttacaaaacatgcctgaggtcagttcgcccccttagggggcactccccgagctaaacacagatgacagcgacccagggtgctggaggcccggggtcacctgaggactgcagaagtcccgcgctccgctaactgtgtggacacgcggctgccaggggcacaggtaggcaacatggatgggaagagagcccaggccgcccccgtctc

SEQ ID NO: 483282 - DNA, 497 bp, Homo sapiens
cgggaggggcccctttagtgtcccagggaggccattcttccacggcgaaggggccagctgtcaggtttatcacaaaatctccccgaattcccaccaaataagatgcaaacacatcagcacctgggcccaggggcttgttgacaacggaacgaacgaacctgccggcctggcccagtccagcccagaaacttacagaagcaggtgctgtctgaccccgaaggacagaagactctagaaacatcagatctgtcgccacagcagcggacacgtttaatggcaggcgcctctacagttacaaracatgcctgaggtcagttcgcccccttagggggcactccccgagctaaacacagatgacagcgacccagggtgctggaggcccggggtcacctgaggactgcagaagtcccgcgctccgctaactgtgtggacacgcggctgccaggggcacaggtaggcaacatggatgggaagagagcccaggccgcccccgtctc

SEQ ID NO: 483283 - DNA, 497 bp, Homo sapiens
cgggaggggcccctttagtgtcccagggaggccattcttccacggcgaaggggccagctgtcaggtttatcacaaaatctccccgaattcccaccaaataagatgcaaacacatcagcacctgggcccaggggcttgttgacaacggaacgaacgaacctgccggcctggcccagtccagcccagaaacttacagaagcaggtgctgtctgaccccgaaggacagaagactctagaaacatcagatctgtcgccacagcagcggacacgtttaatggcaggcgcctctacagttacaaaacatgcctgaggtcagttcgcccccttagggggcactccccgagctaaacacagatgacagcgacccagggtgctggaggcccggggtcacctgaggactgcagaagtccygcgctccgctaactgtgtggacacgcggctgccaggggcacaggtaggcaacatggatgggaagagagcccaggccgcccccgtctc

SEQ ID NO: 483284 - DNA, 508 bp, Homo sapiens
tcttaaaggagaggaaaaaatataaaaatagttttcatgcatttttcatttgagcctcagtgaagcaataatattctaaaattttttaaattttgtcacgttttagtaaattaatttttgcagaaagctacataaggttaagcaaacagtgtcagccttgccaggacacaacaggcttctcataagccaygatgcttcaaaatacaagcctaaaagagtggaattgcttcacgctcgtgaaattaagtctcccttgttgtgtacggaatttgtttcttccattttttatagcagttctgtgaaattggcttgctcttaacaataggattgacttgtcaatatattttggatgtacacgaacagaaataaggactagaaatgctagcttgcccttgccgcttgatgcagaagtcaagggtgagcgaacaagggtcagagctgaaatagctcacatgtctggctaaagaaacggtagttggctacatggtcagctccccagagcatgcca

SEQ ID NO: 483285 - DNA, 562 bp, Homo sapiens
ggccgccgcgagagcccgggacccagcgggtgagcgcagggcggctgccgaggcgttgcggctgctgcggccggagcaggtsctgaagcgcctcgcggtgtgcgtggacacaggtgcggcggagggcacgggcgatactcggggtaggaaaggcctttctccgccaggcggcgccctctgtccgactgggcggggcgcgcgtgccgaggggcctggggccgggcccgcctcccagtcgggggtttgtgccgaatggagactccccggtccggccacccgcccaggtagggcgctcgcgagggtggaaggaagcagtgaccgcgctcctctcccccggtcccagccatcctggaagacgccggtgccgacgtcctgatggaggccctggaggccctgggctgcgagtgccgcatcgagccccagcgcccggcccgcagcctgcggtggacccgagcgagtcccgacccctgcccccgcagcgtgagtggtcgcgggttcccgagggccagccgcgagttggctgttttgcttccatgatttcagccctggagctgtccctgag

SEQ ID NO: 483286 - DNA, 645 bp, Homo sapiens
tgtctgaattcctaattgagaaaatacagtcacttcagtgattgacatgttcttgggagaaacaggtttctggttgatctgtgaagtctggtttaattcttctattatccgcttgtgctagagggtattttagtgcttaactctgatcatctttaagtagttccattgggtacgtgaaacacatcatgattcactgccacctttgccctcccttatctgttttgggatttttttgtttttgaaacggaggagtctcactctgtcrcccaggctggagtgcagtggtgtgatcttggctcactgcaagctctacctcccgggttcacaccattctcctgcctcagcctcacgagtagctgggactacaggtgcccgccaacacgccccagctaattttttgtatatttagtagagatggggtttcaccgtgttagccaggatggtctcgatcttctgacctcgtgatctgcccgcctcggcctcccaaaatgctgggattacaggcgtgagccaccgtggcccagccaatccattttgtctaaagacgcaagtgcagcgaccgccgagtcagctatcaccccataagcccctgagccactggctggtgggtttatatcatattgccagcatctaacctacggtgct

SEQ ID NO: 483287 - DNA, 645 bp, Homo sapiens
tgtctgaattcctaattgagaaaatacagtcacttcagtgattgacatgttcttgggagaaacaggtttctggttgatctgtgaagtctggtttaattcttctattatccgcttgtgctagagggtattttagtgcttaactctgatcatctttaagtagttccattgggtacgtgaaacacatcatgattcactgccacctttgccctcccttatctgttttgggatttttttgtttttgaaacggaggagtctcactctgtcacccaggctggagtgcagtggtgtgatcttggctcactgcaagctctacctcccgggttcacaccattctcctgcctcagcctcacgagtagctgggactacaggtgcccgccaacacgccccagctaattttttgtatatttagtagagatggggtttcaccgtgttagccaggatggtctcgatcttctgacctcgtgatctgcccgcctcggcctcccaaaatrctgggattacaggcgtgagccaccgtggcccagccaatccattttgtctaaagacgcaagtgcagcgaccgccgagtcagctatcaccccataagcccctgagccactggctggtgggtttatatcatattgccagcatctaacctacggtgct

SEQ ID NO: 483288 - DNA, 548 bp, Homo sapiens
gcctggctctgggatgtcactagtggtctttcagtttacaattcttcctcattgagcagatgccttttataaaatgtctccagccaggtgcggtggctcacacctataatcccaacattttgggaggctgaggcggactgatcacctgaggtcaggagttcgagaccagcctggccaacatggtaaaatcccatctctactaaaaaatacaaaaattagccgggcgtggtgacgcatacctgtagtcccagctattccagaggctgaggcacgagaatcgcttgaacccgggaagcaaaggttgcagtgagccgagattgcgccacttcactccagcctgggcgatagagggagacttygtctcaaaaaaaaaaaaaaaaagtttctattttagagaaagaagtaaggccagttctgcacatgaagagggatgttgactgctgtggtacacacagttcagaaggtcttgccccttgctgaccttccctttatacctgctgtggcttctacccttagccacttgctcctttgttatttctggcctttcc

SEQ ID NO: 483289 - DNA, 528 bp, Homo sapiens
cagtccctgggtctgcgaagtccccagaggtctctgtaagtacaggactcccatcccagctctgaatttgtgctttctccccctgaacttcagaattcttggccggaaaggtcagattctgactgtggtgggacagtaagtcagaagcattctggtgataaacccagcatgtggcatgcattctgggggctaggaacagctaagatctgtaaccctttattttagaccttcagtggaaagcattttaaatgggggttgagagccacktattggccttggggaaggggagccggaatttgggggccatgttttggtggggtggcagaagaggcttgggcctgaccttgggacagatgtctcctgctctcttagacagtagctgcctgtgcttttgaccagggcaggtgttttaggatctgggtcacgggattctactcaaggatgtgcagatggctaaggaggtagggtgttcatattctctccacctggagacctgccctaacaggagctctgaagtgacgtgggtca

SEQ ID NO: 483290 - DNA, 615 bp, Homo sapiens
tcatgtttggttaatgtggaaaatgcatttgctgcattgtgatgcagtgctgtggccacagattgtaacaccagttgtgaagctggtcccttaactgagcagcaggaatttgcacatgccatgatgctaaaataaatggtagttaaaagattttatacagcagcagacagattctgccattttagtctacagtatgtgtagatacaacatacagaagcatctcggatcattgtgcccttgtcaattgtactgtccttcaagcagaacagtaaattcgccatcttaaatgtttggcctcttagtagttaaaagattttgatactgtttaataactattcagattaattayagctttgaaaagaacagaggttatttgcatttcaggaatatacagccaatgaaactgtcactgacacaggaaaatgcagaccttttattaacatatgctcagctcaactgtcacttctttgcacaacatttaggggaaaatatatgatgtgtaagtaatgaatattcccattctactgcaatgatttttaaaagtgctcctcaggaagggatttttttcctccacgttttaacatataacctgaaaattgaagactacattaaaat

SEQ ID NO: 483291 - DNA, 534 bp, Homo sapiens
ctttggggactcgatggcaggggtggtgcttgagttaacatcgtcctagcagagtgcaccgcacaggaggtgcctcctaggtgggcagagtctgggggatggggaattcagagggtggcttgcagcctggcccattttccctccccaggagtatggggcacccatcgtggaccccattaacgacatccgcatcattgscgtggtctcggtcactgtgctgctggccatctccctggctggcatggagtgggagtccaaggtgaggaggccatggaggagggggacatggaggtggtcacgtggagaagcgggggttgccaggcctgggccctccctggtcctctgccttttctttttcttttctttttttttttttgagacagaatctcgctcgatgtccatgctggagtgcagtggtaccatctcggctcactgcaacctccatctcccaggttcaagagattctcctgcctcagcctcccgagtagctgggattacaggcacctgccaccacacctggctaatttttatatt

SEQ ID NO: 483292 - DNA, 329 bp, Homo sapiens
tgggcctccttccaggcctgtcctccttgtctaaggctgaggctgggggcagcaacctctgaccttggcccctcagagcccctgttccagcacagagaggaaggagcctcatgactgaggacccccagagagggatgaatacaaccaagatcacgggtcggagactccacccaaggccctgggaaatggaggcagagagaagaaattcaacagctccacgcctgcgccacagaggccacttggccagggtttgctgtgagggtggtaagggygggggcagggtggtgggctctggagtcggcctgcccgggttcacttccaggcggcca

SEQ ID NO: 483293 - DNA, 633 bp, Homo sapiens
tggtgctgggctcgattaactacctgtgaagcggcaagcaggtctccacagcgcatgcagtagtaaattagcgcccacacaggatggccttccacctctccatcctaaaagaggaacagttaagtgctcaaaataaacaaggaaargctgactgctttcatatgtgctaaaaccgagctaagcccctctcctttataatatgtcacttaatcttcagaacagctccctgcagtgagaaccattaacagccttttcctgttttacaaacaaggaaactgaggcatggaggggttaagtcatctgttcaagtaagctgttaagtggcaatatggctccagagcttttcctctgaagtgctttgtacccaacttgatccaaagccaccctgtggtttttccatggaatcccaggggcccatagtaactgggtgatgttcttttgtgataatatacacacatgcactcctacaatcccacaaagcaaaggctaaagatgtcactgaccagtaagagactatccttatagcactcaagtttataaaacgtcataaacattttactcagtatcttggtgtcaggtactgctgggcactggggatctgagagacagctccgttcccactctctgaatact

SEQ ID NO: 483294 - DNA, 570 bp, Homo sapiens
ggcctggcccttggctctgccctgaagacaactcactcaggtgcatccgccccctgtgctgccgggttggaccctctggcacaagcaggctctgaccccagagtggggacaccattcattgccccgtttcacccgatctctcaccagcccccacccacccgttgctccagccacaggaacttcttgcagttccctcaaactggccaggctgtctccagcctctccaggtccargcctttttgtttcttttttctttcttttcttttctttttttttttttttttttttttttttttttttttttggagacagggtcttgctctgtcaccaaggctggagtgcagtggcgtgatcactgcttatgcagccttgacctcccaggctccagtgatcttcccgcctcagcctcccaaatagctgggactacaggcatgccaccacatccagctaattattttattttttgtagagatggggtttcaccatgttgcccaggctggtctcgaactcctgagctaaagtgatccacctgccttggcctcccaaagtgttgggattaaaggcacgagc

SEQ ID NO: 483295 - DNA, 554 bp, Homo sapiens
aggcgagacaacccacagatttatgggaaatcataaattattgtatagataattaagcaatattcattcattttcttttctattagatcatgcactccttaagggcaaagaccatatcaaattatatctgtattgccaattcctagacagagatctgaataaagtcatatatcaataygccagtggagtaagtctgtgagtagctaaggcagagcatttgaacacaaagctactgaatgaactattttggtctctttatgaagatactgtatatgcaaaatcaaatcccagtgtaggaatacattaatacagtctgacaacataagcaaggggaccccctttaaaaactctaaactcaacatcttgggcaaataggtcacttccaaaacagctctgctgcctgcaaccttcgaagacagaggcaacatgggtagcctgaagagggaaagtacagaatttggatttatggtaccaggttgaaattgcagagggaaacagatgggagataaaatgctctgtgaagtttacatttttctatacattcattcagtgat

SEQ ID NO: 483296 - DNA, 648 bp, Homo sapiens
tctattattgtgaaaacatataatttattcagtgtttatgatccaaaaccctagttccagcttccctccttccctttcaagaatcatcttcctttgaaatacttgagaaacatcagtttgtgttacatccactctgtaattaatttattagcagctatttccctgcatcataaactcctccctccctgaatcaatcaaaatatgtctggttgcaagtaacaacaaccaaaaaaagaaccccaaccagcgaagatttagactgtgaagacatttctggttttctcagtgagaacctggagctaggtaatgagtctaatcaggagcttatgcatggctgcagtctctgggagctcatctgtaaccattcacctggcctttctcttaggcttatcacctcaaggtcacaagatagctgctgcacctccagccttcatgccctctctcttttgtccccagcaggaaagaagacaatgaaaatgcaaaaatactcatagaaggctccagaaagatcttcttttgcayatcatttgttagaactgggtcacacggccacccttaggtgcaagggaggctgagaacatgagtatctggcaaaggggaataggatagcaatggttggcctacacaagtcatgatccattcttgaca

SEQ ID NO: 483297 - DNA, 529 bp, Homo sapiens
tgtggctagtttatgtggcttcctgmacctcaatctgaagccagagagagaaagaacttggcaatttttgtgtttttagattgcagtggaaaactggtgtgtgagtgcatatgaggttgctttttgaaagtaggaatggggtgcaggtgggaggctcagaggcattgtaattcaggaatacgtgtaaatgttccatatatgaatccactggaaacaataatccacaggcctgctgactagtggggaagggtctgggccacctggggtgggtgggaatgtttctcactgggtctggcctgagcagtgacaggtttttgttggtgttgctgcagtagaagggcttgcttctttcccattggctaactctaaagtagctgttactcaccaaaatggtgttggaatgagatactcatgatctgtgcagataagcaatgactaatggtgcttttgcaagttctggagtccctcccttggggagggaactagacttggaaccagactacgggttggcaaaattaagcataatttc

SEQ ID NO: 483298 - DNA, 597 bp, Homo sapiens
tggctagtttatgtggcttcctgcacctcaatctgaagccagagagagaaagaacttggcaatttttgtgtttttagattgcagtggaaaactggtgtgtgagtgcatatgaggttgctttttgaaagtaggaatggggtgcaggtgggaggctcagaggcattgtaattcaggaatacgtgtaaatgttccatatatgaatccactggaaacaataatccacaggcctgctgactagtggggaagggtctgggccacctggggtgggtgggaatgtttctcactgggtctggcctgagcagtgacaggtttttgttggtgttgctgcagtagaagggcttgcttctttcccattggctaactctraagtagctgttactcaccaaaatggtgttggaatgagatactcatgatctgtgcagataagcaatgactaatggtgcttttgcaagttctggagtccctcccttggggagggaactagacttggaaccagactacgggttggcaaaattaagcataatttctttctgtacgtgctccacttcagcagagatcatcccggaagtttcctagtatcctgacttcacagatcac

SEQ ID NO: 483299 - DNA, 647 bp, Homo sapiens
cggctcagtcctgctgaggtccttagaggaatgatgrtgaatcctctccaaacaggaggctccagagaagagcaatttatccatggaggcctccttcatctgtcaagggttgctgcatgggctgttagctcccttgcctttccaggtgtgtgaatgagtcagtgtggttcattcatgcagattcctacagtcctaccatctggagaaagcagaaaagcccggagacagagaatgaaagatacacaatgcaaccaaagggagatgctccccgtttatggctgtgcacacccaggcaccacagtgttggctagagtaaaaaagcagacctaagagggggtgagaagcatgtcttttgtgtgctatacatcctttatgacttacggttgatgtttcttttctttttttttcttttttttttttttgagacagggtcactctgtcacccaggctggagtacgatggcgcgatctcagctcactgcaacctccgcctcccaagttcaagcgattctcctgcctcagcctcccgaggtagctgggattacaggtgcccaccaccatgcccggcaaatttttgtatttttagtagagacgaagtttcgcaatgttggtcaggctggtcttgaactcctgacctcaggtgatcca

SEQ ID NO: 483300 - DNA, 647 bp, Homo sapiens
cggctcagtcctgctgaggtccttagaggaatgatgatgaatcctctccaaacaggaggctccagagaagagcaatttatccatggaggcctccttcatctgtcaagggttgctgcatgggctgttagctcccttgcctttccaggtgtgtgaatgagtcagtgtggttcattcatgcagattcctacagtcctaccatctggagaaagcagaaaagcccggagacagagaatgaaagatacacaatgcaaccaaagggagatgctccccgtttatggctgtgcacacccaggcaccacagtgttggctagagtaaaaaagcagacctaagagggggtgagaagcatgtcttttgtgtgctatmcatcctttatgacttacggttgatgtttcttttctttttttttcttttttttttttttgagacagggtcactctgtcacccaggctggagtacgatggcgcgatctcagctcactgcaacctccgcctcccaagttcaagcgattctcctgcctcagcctcccgaggtagctgggattacaggtgcccaccaccatgcccggcaaatttttgtatttttagtagagacgaagtttcgcaatgttggtcaggctggtcttgaactcctgacctcaggtgatcca

SEQ ID NO: 483301 - DNA, 621 bp, Homo sapiens
ccaaagtgctgggattacaggtgtgagccaccgcacctggctggtttttttttctttttaagttccacggtgcaggtgcaggacatgcagttttgttacataggtaaaggtgtgtcatggtggtttgctgcacctgtcaactcatcacctaggtattaagcccagcatgcattagctcttttccctaatgstctccccactgttggcgtttttatcatatatgaagatagctctttgtgattctaaatatcttcatccagtcctgatagtcacacagaagggtctaaagaagtatccctccaactccaaatcctgttccgtgctatccttgcctctggctctggaactcatgcttatctcattggagactttgttcactaaatatttcctacttccacaaatcttcagctagacttccatgacacctcaaagaagcgtggctttttctttctttcttttcattttctttcttttttttttaaagggtctcgctctgttgcccaggatggagtgcagtggtgcaatcttggctcacagcagcctcaacctcacaagcttaagcaatcctcccacctcagccccatgagtagctggaactacaggtgcatgccacaatgtcca

SEQ ID NO: 483302 - DNA, 438 bp, Homo sapiens
atgtgtgatcctgagaagaagttgctggtaagttaaacacttgtaaacaaaaccacatgggaagtgcaaygggggcagcccctctgttgaaaggagcctactggaaaggtggctatgggcctggtcctcggcagtatgcatgccatgtcctgatttccttactgatgagttctatgaacatttagtgtgccagctagtgtgcaggccactgggacaagatgataagaaagcagacctgactcttgtcctcatggagctcacgggcggtttttttttttttttttttttttttttttttttttttttttttttttttaaagagatgagcgtctcactctgtcacccaggctggagtgcaatggtgcaatcataactggctgcggactcgaactcctgggctccaaggaatcctctcacctcagcctcccaagtagctgg

SEQ ID NO: 483303 - DNA, 438 bp, Homo sapiens
atgtgtgatcctgagaagaagttgctggtaagttaaacacttgtaaacaaaaccacatgggaagtgcaacgggggcagcccctctgttgaaaggagcctactggaaaggtggctatggkcctggtcctcggcagtatgcatgccatgtcctgatttccttactgatgagttctatgaacatttagtgtgccagctagtgtgcaggccactgggacaagatgataagaaagcagacctgactcttgtcctcatggagctcacgggcggtttttttttttttttttttttttttttttttttttttttttttttttttaaagagatgagcgtctcactctgtcacccaggctggagtgcaatggtgcaatcataactggctgcggactcgaactcctgggctccaaggaatcctctcacctcagcctcccaagtagctgg

SEQ ID NO: 483304 - DNA, 602 bp, Homo sapiens
aagtgtacccttaaaatgggtgcattatgttgatgtaaattataagttaataaaattgatttaaaaaaaatgacacagaggatggccactcactttgtcctgtttcctccaatggtaacatttgaacatatagtgtaatagtatcccttatatgtggaaatayagaatgacatagtatctattatatgagggtattggcattgatgcaatccactaacctcaatcagatttccctaatttcacttgtgctcattgtatgtgtgtatatgtatgtataggcatgtgtgtgtgtgagtgtagtgttacacaagttatcccctgtgtaggttcattgtccaacaccacagttaagaaactgatcagttccagcatcacaaggatcctcatgttgcagttttatgaccacaccttcctccttcctgttcccaaccacccccacccctctctctatctctggctaccactaattcctcctccagttctaaaaatttatcatttcaaaaatattatataaatggaattatacagtatgtaaccttttgggattggctttttttttcagcaaagttctctggagagtcatccagtttgttatggatagt

SEQ ID NO: 483305 - DNA, 602 bp, Homo sapiens
aagtgtacccttaaaatgggtgcattatgttgatgtaaattataagttaataaaattgatttaaaaaaaatgacacagaggatggccactcactttgtcctgtttcctccaatggtaacatttgaacatatagtgtaatagtatcccttatatgtggaaatatagaatgacatagtatctattatatgagggtattggcattgatgcaatccactaacctcaatcagatttccctaatttcacttgtgctcattgtatgtgtgtatatgtatgtataggcatgtgtgtgtgtgagtgtagtgttacacaagttatcccctgtgtaggttcattrtccaacaccacagttaagaaactgatcagttccagcatcacaaggatcctcatgttgcagttttatgaccacaccttcctccttcctgttcccaaccacccccacccctctctctatctctggctaccactaattcctcctccagttctaaaaatttatcatttcaaaaatattatataaatggaattatacagtatgtaaccttttgggattggctttttttttcagcaaagttctctggagagtcatccagtttgttatggatagt

SEQ ID NO: 483306 - DNA, 545 bp, Homo sapiens
atagctcccgtctcataggatcattgtgaagattaaacagaacaatccaggtaacgcatgcaggagggtatcttgcacacaatatgcagtaaatgttagccattatgatggagattatagttgtctttgattaatgcaaattaacaaatttacttactaaatttaatttgacattctttgaaaatatgctctctctctctctctctctctctgtgtgtgtgtgtgtgtgtgtgtgtgtattgaaagacagagagagactggtgtttggtggtgaaagttttgggcccacgtaggccagcatccttttcagttgaagttgtgcttgtgggaggtgaaatgacttgcccaaggcaataccactaggaatagcccaggtaagtttaaatactatgttttttgactctcaacccagtgacttttccactatatctcatttccaggcattgctsgttcgtttttttcgaaaatcattccaaattatattccaattcgactttcttcaagttcatcccagaaaagcaaaggccgggcacttgaacaagaac

SEQ ID NO: 483307 - DNA, 651 bp, Homo sapiens
ccagtttttgcctagcaaatttgtttatatgtggttaatctcttgacagtgtgtcccattgcagaatgtaaaaacagtcttattcttcttctcactaggccttttagattacatttgcattctaattacagctttgaatttttctcagtgtttgttaactgaccacaaaaagccctagtaaactaaaatgtcaaaccagggagtgtgaatayaagttgttgctgcagctcccttagaaaatggcatcacatactacagtgattatgtacaaggcagtggattgcagctattgcttgtgagttttaaaattttggattgtgctaatattttttggttgaagttcaggcctattcatttggttatgataagtgcccccccgccaatcagttctccgaaaacaatgaaagtcattgttttaaaacagaagcatgccatttctctgcttaaaactcctaagatattgtctttaccaagggcttagtgttggctttatggcttctcattgtatagaaaacacttaaaatccaagctccttcagatgtccttcatgtcctggtctcgttgcctctctttctcacctcatatcttgctgctccactgcacaccgcccccctcctccatttcctccctttggctccagcaagaaggact

SEQ ID NO: 483308 - DNA, 607 bp, Homo sapiens
attcttaaatttatttatgtaaatggatgcaaaaatgtgagaaaaagaaatgatgaatcatggtctgcttgttctcactaaatcatttccctgaaccacaaaaatattggtctctcagtccagtgaattttcaccattctgagattggtctcatttcatattttaaagcaggtgctccattgttattataacagacattattttgtacatatttagcatgcgttagcttccaaacccttagacattattccataatttttgtttgaaattttgagtaaattatgtgtgtgtgtgtgtgtctgtgtctgtgcatgtgtgtgtgaattgaatgataaatttaaatacttggaataaattaatatttgatttttgatatagactaaaatagcacatttgatacaattaagaatttttataagattagctgtaaacrgttataaataagtaattatcctcttcatcaaatatacagtataattacttaaatttttccaattttgagacagttctactactaataggcggaattcaagccatttgctggtgaaaactttgtacaaattttaataatataataaaagacaggagctttttctgactttatgtt

SEQ ID NO: 483309 - DNA, 497 bp, Homo sapiens
ggatcggcctgccgcttgccagccgccccaaggctgacagagaggccctcgggagtccgcatctcagcccccaggaagaggaagacgatcgcccactcttccagcccttgcttggtcacaggttacacagatgccaagagaacccgggtggccagcagyagccaacgctccagtggctccaaggtcggcagacagccagggaagacgcgcaacaggtcagggatggcatgcaagaccaccgccaccatcagctctaagcgaatcgtccgtcgtccatccttaccgagtttgaagaaacccattatcctccgaagctctgggtgccaagtccccaccgtcctccgccgaggctatctccaactgttcaccgaagagtgtctcaagttctgcgcctccaagcaggaggccgaggagaaggcgctgaacgaggagaaggtggcctacgactgcagccccaacaagaacaggtacctgaacgtggtcctgaacaccctcaa

SEQ ID NO: 483310 - DNA, 497 bp, Homo sapiens
ggatcggcctgccgcttgccagccgccccaaggctgacagagaggccctcgggagtccgcatctcagcccccaggaagaggaagacgatcgcccactcttccagcccttgcttggtcacaggttacacagatgccaagagaacccgggtggccagcagtagccaacgctccmgtggctccaaggtcggcagacagccagggaagacgcgcaacaggtcagggatggcatgcaagaccaccgccaccatcagctctaagcgaatcgtccgtcgtccatccttaccgagtttgaagaaacccattatcctccgaagctctgggtgccaagtccccaccgtcctccgccgaggctatctccaactgttcaccgaagagtgtctcaagttctgcgcctccaagcaggaggccgaggagaaggcgctgaacgaggagaaggtggcctacgactgcagccccaacaagaacaggtacctgaacgtggtcctgaacaccctcaa

SEQ ID NO: 483311 - DNA, 497 bp, Homo sapiens
ggatcggcctgccgcttgccagccgccccaaggctgacagagaggccctcgggagtccgcatctcagcccccaggaagaggaagacgatcgcccactcttccagcccttgcttggtcacaggttacacagatgccaagagaacccgggtggccagcagtagccaacgctccagtggctccaaggtcggcagacagccagggaagackcgcaacaggtcagggatggcatgcaagaccaccgccaccatcagctctaagcgaatcgtccgtcgtccatccttaccgagtttgaagaaacccattatcctccgaagctctgggtgccaagtccccaccgtcctccgccgaggctatctccaactgttcaccgaagagtgtctcaagttctgcgcctccaagcaggaggccgaggagaaggcgctgaacgaggagaaggtggcctacgactgcagccccaacaagaacaggtacctgaacgtggtcctgaacaccctcaa

SEQ ID NO: 483312 - DNA, 497 bp, Homo sapiens
ggatcggcctgccgcttgccagccgccccaaggctgacagagaggccctcgggagtccgcatctcagcccccaggaagaggaagacgatcgcccactcttccagcccttgcttggtcacaggttacacagatgccaagagaacccgggtggccagcagtagccaacgctccagtggctccaaggtcggcagacagccagggaagacgcgcaacaggtcagggatggcatgcaagaccaccgccaccaycagctctaagcgaatcgtccgtcgtccatccttaccgagtttgaagaaacccattatcctccgaagctctgggtgccaagtccccaccgtcctccgccgaggctatctccaactgttcaccgaagagtgtctcaagttctgcgcctccaagcaggaggccgaggagaaggcgctgaacgaggagaaggtggcctacgactgcagccccaacaagaacaggtacctgaacgtggtcctgaacaccctcaa

SEQ ID NO: 483313 - DNA, 122 bp, Homo sapiens
ctttcgctttgcggcgaggtgggcagggtgagctctcgggacgratggcagttttggaagaggcctggggctaaggacaggccagggcggcgggagaggcggaccggtggcgtggctggatc

SEQ ID NO: 483314 - DNA, 122 bp, Homo sapiens
ctttcgctttgcggcgaggtgggcagggtgagctctcgggacgaatggcrgttttggaagaggcctggggctaaggacaggccagggcggcgggagaggcggaccggtggcgtggctggatc

SEQ ID NO: 483315 - DNA, 424 bp, Homo sapiens
cacacacatacatacacacacacaaactgttccagaacagtgacttagtgaaaaactggatttccactctgtcagacaaatttcggaaagcactgaagtagggcatttctgattgattttaccgttcccggaattttattttcctttatcacttagaccccttctgtggggatttaataaataaamgtcttttgtagtgtatgttatttcattttatttttataatttatatgaattttaattttaacttgacaaataaaaattatatatatttatggcatacaacatgatgtttcatacgtgtatacattgtggaatgacaaaatcaagctaattaacacactcgtttcctcacatactgattttaatgtgatgaggacatgtctaaaatctactcttatagcaattttcaagtatacaatac

SEQ ID NO: 483316 - DNA, 424 bp, Homo sapiens
cacacacatacatacacacacacaaactgttccagaacagtgacttagtgaaaaactggatttccactctgtcagacaaatttcggaaagcactgaagtagggcatttctgattgattttaccgttcccggaattttattttcctttatcacttagaccccttctgtggggatttaataaataaacgtcttttgtagtgtatgttatttcattttatttttataatttatatgaattttaattttaacttgacaaataaaaattatatatatttatggcatacaacatgatgtttcataygtgtatacattgtggaatgacaaaatcaagctaattaacacactcgtttcctcacatactgattttaatgtgatgaggacatgtctaaaatctactcttatagcaattttcaagtatacaatac

SEQ ID NO: 483317 - DNA, 617 bp, Homo sapiens
cttggctaatttttgtgtttcttttagagatggggtttcaccatgttgcccaggttcatctccaactcctgggctcaacgcttccacctgccttggcctcccaaagtactgggattacaggcatgagccaccgtgcctggcctttgctttctttcactcagtgtaccatcctctaggctcattcgtgttgccaatgagatgatttctttcttttttaaggctgaattgtgttctattgggtatatgtaccgcttttctttttaygtttaattttttttggttttttgagacagagtttcgctcgcgtcgcccaggctggagtgcagtggcgtgatttcgagtcactacaacctctgcctcccaggttgaagtgattctcctgcctcacctgagattagaggcatgtaccggcatgtccggctaattttgtgtttctagtagagatggggtttcaccatgttggccaggctggtcttgaactccaacaattctaattcaactaatttattttatagaaatatttatgtgtgagaaacaatattttcaagagtcaaagatttaaaactgcttaattgtacatcactaagtggctggctaataaattatagtacgttcat

SEQ ID NO: 483318 - DNA, 552 bp, Homo sapiens
tgatttcgagtcactacaacctctgcctcccaggttgaagtgattctcctgcctcacctgagattagaggcatgtaccggcatgtccggctaattttgtgtttctagtagagatggggtttcaccatgttggccaggctggtcttgaactccaacaattctaattcaactaatttattttatagaaatatttatgtgtgagaaacaatattttcaagagtcaaagatttaaaactgcttaattgtacatcactaagtggctggctaataaattatagtacgttcatccttacggaagaatactttgcagctaaaacagaacgaaagakaggaaactcttcaaaatgttaactgggaatgacgttcaagacttattgttaaataaaacaaattgagaagaagagtcgtttattggtactaaatttgtgtcagtaaaaatggattctatacgtgggatggtttataagtatgtggaaaaattctttgatggtttttccttgaaaaagtgaaacctaaatccactccgtttggatgtgggactatttacggttgt

SEQ ID NO: 483319 - DNA, 480 bp, Homo sapiens
cccactggtttccccaacaggctgcgtaagggaccctgagccacagtgagttggtcaaatgctcctgacagtgtggagaaaccaacagrcaaaacgtgggtgcaaaagtgatgagaccccacactttacactcgtggtgacaatgaagctattaagtaacagcttctcaacctatgctgtttcctgttggatgcacataatccatttgcactgcagacaattttaggatgtggtttacagtaaggtggatggtaccttatggcaaaaatctctcagaaatttatgtgtggttttaaagtcattccagtcctagcacgttgtgcttttcagagacgccatagctgtttttccctttgtaatatcaaagcagtaatatgttctctggaggcctgttgggtgaatttaatggaatcaagttaagtaggtgccagaaccattgctgttttccctccatagccctgccacccactgtaaaaaggt

SEQ ID NO: 483320 - DNA, 586 bp, Homo sapiens
ccactgtaaaaaggttgatgagattacttaatgatttccaattaagttgtatttccaaatatcatgatttccattttaatgtagttggtatggagctctgtgagtgtgtgcttcttttattatggatcacgttcagcttctttttatttgcctcctagtcataatagtaaaactctactcctctactccgaggagtccctaccacccatctcatcactttccagsccagcactcttcatgctcattcatttaaagcattcaacattgtgtaaatgaatcttggaaggcaaaagctactgaatttagcgaatttgtggaggcattgccacaaatcagccaggtgaagtttcacacaatcgaagactgcacaactcctagaaggcagcactatgctgcaaacccagacggccactcttctcacccctcgtccgtttgctgttctggataatgaggttcaaaagtcacctaggcaactgccaaaatagctgaaatggagaaagggcttcaggctggtgactagcagaggtccacctgacccccgtaagctgctgaacaagtagggctgccagaaatgtcccactaggga

SEQ ID NO: 483321 - DNA, 586 bp, Homo sapiens
ccactgtaaaaaggttgatgagattacttaatgatttccaattaagttgtatttccaaatatcatgatttccattttaatgtagttggtatggagctctgtgagtgtgtgcttcttttattatggatcacgttcagcttctttttatttgcctcctagtcataatagtaaaactctactcctctactccgaggagtccctaccacccatctcatcactttccagcccagcwctcttcatgctcattcatttaaagcattcaacattgtgtaaatgaatcttggaaggcaaaagctactgaatttagcgaatttgtggaggcattgccacaaatcagccaggtgaagtttcacacaatcgaagactgcacaactcctagaaggcagcactatgctgcaaacccagacggccactcttctcacccctcgtccgtttgctgttctggataatgaggttcaaaagtcacctaggcaactgccaaaatagctgaaatggagaaagggcttcaggctggtgactagcagaggtccacctgacccccgtaagctgctgaacaagtagggctgccagaaatgtcccactaggga

SEQ ID NO: 483322 - DNA, 586 bp, Homo sapiens
ccactgtaaaaaggttgatgagattacttaatgatttccaattaagttgtatttccaaatatcatgatttccattttaatgtagttggtatggagctctgtgagtgtgtgcttcttttattatggatcacgttcagcttctttttatttgcctcctagtcataatagtaaaactctactcctctactccgaggagtccctaccacccatctcatcactttccagcccagcactcttcatgctcattcatttaaagcattcaacattgtgtaaatgaatcttggaaggcraaagctactgaatttagcgaatttgtggaggcattgccacaaatcagccaggtgaagtttcacacaatcgaagactgcacaactcctagaaggcagcactatgctgcaaacccagacggccactcttctcacccctcgtccgtttgctgttctggataatgaggttcaaaagtcacctaggcaactgccaaaatagctgaaatggagaaagggcttcaggctggtgactagcagaggtccacctgacccccgtaagctgctgaacaagtagggctgccagaaatgtcccactaggga

SEQ ID NO: 483323 - DNA, 615 bp, Homo sapiens
cttcgggctctgggtgccccagatgcacaagcaggcctcagcatttgtggacatccaggcggagccccaraacaggggtccggcggtgcccccagcgtggcccaagatggtgacggagtcgtgctacttccctgcgcagaggggatcggcctgccgcttgccagccgccccaaggctgacagagaggccctcgggagtccgcatctcagcccccaggaagaggaagacgatcgcccactcttccagcccttgcttggtcacaggttacacagatgccaagagaacccgggtggccagcagcagccaacgctcccgtggctccaaggtcggcagacagccagggaagacgcgcaacaggtcagggatggcatgcaagaccaccgccaccaccagctctaagcgaatcgtccgtcgtgcatccttaccgagtttgagtttgaagaaacccattatcctccgaagctctgggtgccaagtccccaccgtcctccgccgaggctatctccaactgttcaccgaagagtgtctcaagttctgcgcctccaagcaggaggccgaggagaaggcgctgaacgaggagaaggtggcctacgactgcagccccaacaagaacag

SEQ ID NO: 483324 - DNA, 615 bp, Homo sapiens
cttcgggctctgggtgccccagatgcacaagcaggcctcagcatttgtggacatccaggcggagccccaaaacaggggtccggcggtgcccccagcgtggcccaagatggtgacggagtcgtgctacttccctgcgcagaggggatcggcctgccgcttgccagccgccccaaggctgacagagaggccctcgggagtccgcatctcagcccccaggaagaggaagacgatcgcccactcttccagcccttgcttggtcacaggttacacagatgccaagagaacccgggtggccagcagcagccaacgctcccgtggctccaaggtcggcagacagccagggaagacgcgcaacaggtcagggatggcatgcaagaccaccgccaccaccagctctaagcgaatcgtccgtcgtscatccttaccgagtttgagtttgaagaaacccattatcctccgaagctctgggtgccaagtccccaccgtcctccgccgaggctatctccaactgttcaccgaagagtgtctcaagttctgcgcctccaagcaggaggccgaggagaaggcgctgaacgaggagaaggtggcctacgactgcagccccaacaagaacag

SEQ ID NO: 483325 - DNA, 405 bp, Homo sapiens
ggtgtcctcctcgggccgctgtgtacgcgaccagttgtgttattatcactgggggcgggtccgctcgagccaggtggctggaggccgggttagccagtacacctgctgtgcagctgctcctggctctgtgggctgccaggtggcaaagcagcacgtgcgggayggccgcaaggagagcctcgatggcttcgtggagaccttcaagaaagagttgtccagagacgcttatccaggaatctacgccttggactgtgagatgtgctacaccacgcatggcctagagctgacccgcgtcaccgtggtggacgccgacatgcgagtggtgtacgacaccttcgtcaagcccgacaacgagatcgtggactacaacaccaggttttccggagtcaccgaggccgacgtcgc

SEQ ID NO: 483326 - DNA, 405 bp, Homo sapiens
ggtgtcctcctcgggccgctgtgtacgcgaccagttgtgttattatcactgggggcgggtccgctcgagccaggtggctggaggccgggttagccagtacacctgctgtgcagctgctcctggctctgtgggctgccaggtggcaaagcagcacgtgcgggacggccgcaaggagagyctcgatggcttcgtggagaccttcaagaaagagttgtccagagacgcttatccaggaatctacgccttggactgtgagatgtgctacaccacgcatggcctagagctgacccgcgtcaccgtggtggacgccgacatgcgagtggtgtacgacaccttcgtcaagcccgacaacgagatcgtggactacaacaccaggttttccggagtcaccgaggccgacgtcgc

SEQ ID NO: 483327 - DNA, 469 bp, Homo sapiens
cagccacgccaccggtccgcctctcccgccgccctggcctgtccttagccccaggcctcttccaaaaccgccatcagtcccgagagctcaccctgcccacctcgccgcaaagcgaaagaaactggagcagccggcggcaggagagggcaaaaagccaagagtaaccccaacccccsactcccggtcccccggaatccctgccgcggcccctcgggcctgtccacatccctctgcccctcccagacctctgtccttccaccaatcgcctcccgcagccccgagccgccactcccagtcccccgagtccctgccgcgcgccctcgcgcctgttcacatccctctgcccatccgagacctctgtctttacaccactagccaccccacgtgggacttccatggcttctgagtacaaggccagccccccggcccaccagctttcggaatgcctgcttacctctttttctgtaga

SEQ ID NO: 483328 - DNA, 469 bp, Homo sapiens
cagccacgccaccggtccgcctctcccgccgccctggcctgtccttagccccaggcctcttccaaaaccgccatcagtcccgagagctcaccctgcccacctcgccgcaaagcgaaagaaactggagcagccggcggcaggagagggcaaaaagccaagagtaaccccaaccccccactcccggtmccccggaatccctgccgcggcccctcgggcctgtccacatccctctgcccctcccagacctctgtccttccaccaatcgcctcccgcagccccgagccgccactcccagtcccccgagtccctgccgcgcgccctcgcgcctgttcacatccctctgcccatccgagacctctgtctttacaccactagccaccccacgtgggacttccatggcttctgagtacaaggccagccccccggcccaccagctttcggaatgcctgcttacctctttttctgtaga

SEQ ID NO: 483329 - DNA, 469 bp, Homo sapiens
cagccacgccaccggtccgcctctcccgccgccctggcctgtccttagccccaggcctcttccaaaaccgccatcagtcccgagagctcaccctgcccacctcgccgcaaagcgaaagaaactggagcagccggcggcaggagagggcaaaaagccaagagtaaccccaaccccccactcccggtcccccggaatccctgccgcggcccctcgggcctgtccacatccctctgcccctcccagacctctgtccttccaccaatcgcctcccgcagccccgagccgccactcccagtcccccgagtccctgccgcgcgccctcgcgcctgtycacatccctctgcccatccgagacctctgtctttacaccactagccaccccacgtgggacttccatggcttctgagtacaaggccagccccccggcccaccagctttcggaatgcctgcttacctctttttctgtaga

SEQ ID NO: 483330 - DNA, 469 bp, Homo sapiens
cagccacgccaccggtccgcctctcccgccgccctggcctgtccttagccccaggcctcttccaaaaccgccatcagtcccgagagctcaccctgcccacctcgccgcaaagcgaaagaaactggagcagccggcggcaggagagggcaaaaagccaagagtaaccccaaccccccactcccggtcccccggaatccctgccgcggcccctcgggcctgtccacatccctctgcccctcccagacctctgtccttccaccaatcgcctcccgcagccccgagccgccactcccagtcccccgagtccctgccgcgcgccctcgcgcctgttcacatccctctgcccatccgagacctctgtcyttacaccactagccaccccacgtgggacttccatggcttctgagtacaaggccagccccccggcccaccagctttcggaatgcctgcttacctctttttctgtaga

SEQ ID NO: 483331 - DNA, 593 bp, Homo sapiens
ggccgggcacagtggctcatgcctgtaatcccagcactttgggaggccgaggcgggtggatcatccaaggtcggaagttcgagaccagcctgaccaacacagagaaaccccatctctactaaaaatacaaaaaattagctgggcgtggtggcacacacctgtaatcccagctactcaggaggctgaggcaggagaatcgcttgaacccgggaggcagaggttgcagtgagcagaaatcgtgccattgcactccagcctgggcaacaagtgcgaaactccagctcaaaagtaaaaaaaaagaaaaaaaacccacagtccttattctatgggggccttttccccagagacaggtagaaatttagacgtacacaagccacacacacacacacacacacaaccttctatgctcacacctcagggatatacacttgygggtgcagattcagatacacaaacaccagctttctctaatacacgcgcgcgcgcacacacacacacacacacacacacacacacacacccttcttcctgcctcttcagcctcaggtagcctaagacataaccacttctataaaggggagcccagggtgacc

SEQ ID NO: 483332 - DNA, 558 bp, Homo sapiens
agctggtcaccgaggcaccgccgcttcacccaggccagtagccgccccctcgcgcaccccggccccgcctcacacgcgcgcccgagcgagccccgggctcccctcgggcccagcgtggcgcaggggtcagtggttctctcgggtctcgggacaggtgagcaccctgatgaaggccacggtcctgatgcggcagcctgggcgggtgcaggagatcgtgggcgccctccgcaagggcggcggagaccggttacaggtacctctggggcgtgcgggggccggccgggctgggggcggctggagaggcttcctgcccattgggccttcccgctttgctctgccgcggacccctcctagctctctgccccaagaaatggcygggagcttgaaggagagcgggttggttcgcctgtcctaaaacccaaatttcagatttctcaatatggtcatgctgcttcctctaattggacagaaggcgcccacaccagtacctagggccttatcctccccaagccagcggctccccagtaagttgaagatgtccagatgggccgtaatggt

SEQ ID NO: 483333 - DNA, 566 bp, Homo sapiens
caactgatgtgatacagctaaagcatttcttacccttgctaggaaacattcagcaggtagtggatgtagtacaaaatggccagggcactatctctgagaagaaaccaagtctagctcttctttctttctctctccttctcttgtcttctcttctcttctcttctcaagacrgaatctcgctctgtcgccaggctggagtgcagtggcgcaatctcagctcactgcaacctccacctcctgggttcaagcgattctcctgcctcagcctcccgagtaagctgggattacaggtgcccgccaccacacccggctaatttttgtatttttagtagagacagggtttcaccatgttggccagatggtctcaatctcttgaccttgtgatccgcccacctcggccttccaaagtgctgggattacaggcgcgagccaccgcgcccggccaagtctagctcatttttcacaatggtaaaagacttttggggtctgtctggtgactggtgttcttcatggtgactgggagttggctaggctgggacgcttgatcgttggcggccttcactgaa

SEQ ID NO: 483334 - DNA, 516 bp, Homo sapiens
ttattaatattggcaaaatgttttcatgataacatccagtatcatgaaagtccattcatggataaactaagggacaagtaaaacagaataatatttctgtggagcaaaatggagaaaggtgtcacagaccttaaagtggtcctatctgtagaccttttgattggacttagagaaatatatattaaaaacaaaaattaaaaatatgcccaagatttaaactcaaagttattaattgtggttttattaattaagaagaaaaatagagttaaatgcagtctaatgatctatagagtggatgccttaataagctatggtttcattgatgagattctakggagccattcataattattaaaagaaaacagaacagcataaaagaaaaatcctatagtaattgttaaagaaaaggcaagttataaaatacaatgatttcattttgtttttttttaagtataaatatatcaatgtaaaaaggtatttatatttaatccttatcaatatgctagttaaattcct

SEQ ID NO: 483335 - DNA, 565 bp, Homo sapiens
ttcttgtgctcattgaaacaccttcaccacctaacgtggaactccaattattctaaatgcccaataactattttataagtggctaactggctttttagaacaattgcatctatagttattgggagtgtaagcaatattgtggagggaaataggacagtaaagaatgaaactttcaaaaatgcttgtattatttgataaaccaattccttttataggaatttatccaaaagaggttgccaaaaatgtacaaaatatgtgtccctttaaaaatatcattataaaatgtaagcgagctcagtgtccaaaaacagaatacaatgtattttatataatattgatcagaaaatattaaatttatgtctcattcaawcaaatctttagaaagtcaaagttcagcttgccactagctccatctgtctggatgcactgtataattggccaagatgtctctcagacttaagggtggattttccaatgacctagtatattatcaactgcccagccacatcttaactatagagatattacaaataataactacctttttgttacacaaggaaagaga

SEQ ID NO: 483336 - DNA, 532 bp, Homo sapiens
tgtagatgtttgaggaaagtacatcccagggaaagggaacagcaagtacaaatgctgtgagctgaggcaatgcctgttttgttagataaacagcaatagggtragtgttactgagatcagagttacttccaaaaacctccaggcattaggacactgtaatccaaggcattaattagtaagcacctatattcacttgttgcatgctaaatattcctaacattagattaattataaatattcttctttataatatctaatgaaaatcatatcaatgcagatgtaagttcacatgagatatagaaattaaaaatgagaaaacagaattgagacttgggggaattagaaaggagtcaatgaaaaaaaggagccttaagaaaaactatcgtctgcctaaattccctggaagctttttgttagataataaaactatggtttatcctctcctctcccttcccttctctgccccttcttctcctccccgccccttttatccaatctatcccacccactgattccgatataagtaacctgc

SEQ ID NO: 483337 - DNA, 532 bp, Homo sapiens
tgtagatgtttgaggaaagtacatcccagggaaagggaacagcaagtacaaatgctgtgagctgaggcaatgcctgttttgttagataaacagcaatagggtaagtgttactgagatcagagttacttccaaaaacctccaggcattaggacactgtaatccaaggcattaattagtaagcacctatattcacttgytgcatgctaaatattcctaacattagattaattataaatattcttctttataatatctaatgaaaatcatatcaatgcagatgtaagttcacatgagatatagaaattaaaaatgagaaaacagaattgagacttgggggaattagaaaggagtcaatgaaaaaaaggagccttaagaaaaactatcgtctgcctaaattccctggaagctttttgttagataataaaactatggtttatcctctcctctcccttcccttctctgccccttcttctcctccccgccccttttatccaatctatcccacccactgattccgatataagtaacctgc

SEQ ID NO: 483338 - DNA, 532 bp, Homo sapiens
tgtagatgtttgaggaaagtacatcccagggaaagggaacagcaagtacaaatgctgtgagctgaggcaatgcctgttttgttagataaacagcaatagggtaagtgttactgagatcagagttacttccaaaaacctccaggcattaggacactgtaatccaaggcattaattagtaagcacctatattcacttgttgcatgctaaatattcctaacattagattaattataaatattcttctttataatatctaatgaaaatcatatcaatgyagatgtaagttcacatgagatatagaaattaaaaatgagaaaacagaattgagacttgggggaattagaaaggagtcaatgaaaaaaaggagccttaagaaaaactatcgtctgcctaaattccctggaagctttttgttagataataaaactatggtttatcctctcctctcccttcccttctctgccccttcttctcctccccgccccttttatccaatctatcccacccactgattccgatataagtaacctgc

SEQ ID NO: 483339 - DNA, 532 bp, Homo sapiens
tgtagatgtttgaggaaagtacatcccagggaaagggaacagcaagtacaaatgctgtgagctgaggcaatgcctgttttgttagataaacagcaatagggtaagtgttactgagatcagagttacttccaaaaacctccaggcattaggacactgtaatccaaggcattaattagtaagcacctatattcacttgttgcatgctaaatattcctaacattagattaattataaatattcttctttataatatctaatgaaaatcatatcaatgcagatgtaagttcacatgagatatagaaattaaaaatgagaaaacagaattgagacttgggggaattagaaaggagtcaatgaaaaaaaggagccttaagaaaaactatcgtctgcctaaattccctggaagctttttgttagataataaaactatggtttatcctctcytctcccttcccttctctgccccttcttctcctccccgccccttttatccaatctatcccacccactgattccgatataagtaacctgc

SEQ ID NO: 483340 - DNA, 515 bp, Homo sapiens
gaaaattgagagtgttaattccttggtatctatttttcctgcctctttgcacttatgatttgtgatggtaaacattaataatcagatgcatgggacaactgaagtaaagagagatgtgtatggcgtatacccagtgagaggttcctagaatgtagtaaatttattctaataaaagaatctgwcaattgaagaaaggaatgcaaactggcctatggcatagttaccgacttaccatttgtgccaacgaatccttgggtgacctcactgtaaggagctacatgagataaagatgggctcaatgtagaaatgaaaataataaatgccttcaatgggaggataggtcaacatatttgaagtattctggggtactactaagcctgggaaataatctagggacagaagaggtgggcactagtcttggcttccaggctttaattaaacacctatatatgggcagcatcagctgtagttaggaagcagttcattccatccagagacttggttaccgaaggccc

SEQ ID NO: 483341 - DNA, 550 bp, Homo sapiens
tgcattataatcttatgggaccattgttgtatatgtcatctgttattgaccaaaatgtcattatgcacccatgactgcatctggtaaacttcagtaaagsttggccactaaagagataatcatgtaagaaaaaatgttttgactaaaggagagacatcctaagattgaattagaaccaggtaaaaagttattgaatctatagcaacaggtcaaaaacccaacatctggcatgaggtcaatttatgaacaaataattctgtttagtcttctttaacttattcttgaaacaatttctctgatgttaatttaggcagtaaaaagcaaattttacatttaaacatttgttaaattttgtacttttgctgacgacaaaatcagccagcttgagaactattcaagcgttcgcaggacaaagcctgctcttggagaatgcatcgacctcaggacacccataccatagccataatttagttatgaagccttaggcacaatcaagacaatactgtgtgaggcatattagccctgtggttgttgatgaaggtaaaataca

SEQ ID NO: 483342 - DNA, 550 bp, Homo sapiens
tgcattataatcttatgggaccattgttgtatatgtcatctgttattgaccaaaatgtcattatgcacccatgactgcatctggtaaacttcagtaaaggttggccactaaagagataatcatgtaagaaaaaatgttttgactaaaggagagacatcctaagattgaattagaaccaggtaaaaagttattgaatctatagcaacaggtcaaaaacccaacatctggcatgaggtcaatttatgaacaaataattctgtttagtcttctttaacttattcttgaaacaatttctctgatgttaatttaggcagtaaaaagcaaattttacatttaaacatttgttaaattttgtacttttgctgacgacaaaatcagccagcttgagaactattcaagcgttcgcaggacaaagcctgctcttggagaatgcatcracctcaggacacccataccatagccataatttagttatgaagccttaggcacaatcaagacaatactgtgtgaggcatattagccctgtggttgttgatgaaggtaaaataca

SEQ ID NO: 483343 - DNA, 620 bp, Homo sapiens
tgttaattttgcttaaataagagctgcctgcaagttttcatttaaaatccactgcctgactgagaccttgtgatggcaagattcaaagacaatttttattgctaagttattagtcctttgaaagaaggaaaatttgatgtttaatatttaaacagtttctattttgcaaaattctttgatatctgaatgttaactgtgtaaccatttaaggtccatttccacagacttttccagacatttcaagcatacaggaatttatttgtaatgttcctgcatgaaaaattgccatctcttttctgccatggtggccactgccaacagatatgtccattacgaatgaaataaagaggcactttatattttgatgcatttcaatttgtccattacaccagactgttcttttcttgaggaaaggaacaaattcctttcatctttaaaatgttaccacttttycaagttttggaaaatttaacagaatttagcacagggaaattgcattgtctctgggcaaagagaataactgagcattttcatttcagtttttttcttgatttttggtttgatgttcaggagtcattaaaaaaactagcataaatgtgttcaggtgtagccctgactaa

SEQ ID NO: 483344 - DNA, 322 bp, Homo sapiens
taaagtgattttcaataatgagaagaggcataatatccaagaaaattttctaatacaaatattgtttagagagactaaataaaaggtgagactctccactgaaactggccaaaggaagatgcaaattaagaatttacccaaaatagagtaggaacccattttattagaagtaaagcaaaataaaggcttcaaccacccgaagtcrcataccagtgatttaattggaaaggtcttttcttataaagaggattaattccaattaacggaaaattcaaattatgtttataaacactaacaaaacattatcattccatagcatatt

SEQ ID NO: 483345 - DNA, 513 bp, Homo sapiens
ctgtgactcatttacacttcaaatatactttgaattggttattcctcaattaatcaaatagctggtgtatccctaaagtagtataaagtgacrcactgtgtgaaatcaatttttctttccaaaatcattaaatccagtagcctgtgactacatccctgctaattctggtaccagtcctttcctcctccattaactttggcacgcctaacagcctgtcaagaataatttcccaggacgtaaataattcagaaattaaaaattaataaataataacagagaactactgggaaataggctgggtcaattagtgcgctctgcattctgtttcttcacagcagggggaggcagccacattcgttacttgaatcttcctttcgattctgcagtctgatttacagctcttcattactggatccagtcagacgcaattacctccatcactatctcagttcctaacttcaaagaaacgaacgttttcttgtctgctttttttctccttgaagcaggctcagc

SEQ ID NO: 483346 - DNA, 542 bp, Homo sapiens
aaaataaaaaataaacatataggtaggtacagccatttgatataaatctgaactcatttcagtaaatgaaatggcaaaagacatggcactatctaagaagctgaactaattcatttcacatatcaaaaaataatactaaacgataaagtatataatgaaactgtgtgcacaatgtcagtaaagtaatacatagcattaaaagtgatccacttaattatgccaaccttgaaatgctttaccaactaagtatacgttgagaaaggcaatccaccatgggccctgagcatcctcacaacttcttgctgggtatgtaaagcatgcaaggccgtgactgatctttacccagaccattgctcaggatyatgcttgcagcaagcaaccttgaggaataagataatgtctccctccagacagacagcaggtttgcttactataaaagcagcatattccctaagcttagtgctccctggctgccacacgaaccagctatgtgtaaacatcaacataggcctttctgcattgcccctgtgggacttgaagtg

SEQ ID NO: 483347 - DNA, 603 bp, Homo sapiens
tgtcccatgccaagcctggctccccatttcttttattactgagaaggcattggtacaatccaaaatgattaaagcaatagagattgaattgcagacaaagaacatcagactggatcaggaatgggaaaataaaactccaaacaagaatgagactcaagggactaatgatcaaagcattcaagtttccctttttaaaaaaaaaaaaaaaaagctggaatattcaactttctactttatgacacctcagaaaaaaagtttacatcatctattaatacagtaatgctttttatctgggaggagttcttccaggattcctaaaagagaaccctttatatatatatatatgaaatcttccaggatkcctaaaagagattttaggattttaggaatcttccaggattcctaaaagagaacactttatatatatatatatgtatataacatatatacacatatatgttatatatttatatatatgttttatacatatatatatatagagagagagagagagagagagagtacaaaatatgtcagaggtgtaagaaaactaatgaaacaaagttcctggatccaattctccttgtccatagctactccttg

SEQ ID NO: 483348 - DNA, 603 bp, Homo sapiens
tgtcccatgccaagcctggctccccatttcttttattactgagaaggcattggtacaatccaaaatgattaaagcaatagagattgaattgcagacaaagaacatcagactggatcaggaatgggaaaataaaactccaaacaagaatgagactcaagggactaatgatcaaagcattcaagtttccctttttaaaaaaaaaaaaaaaaagctggaatattcaactttctactttatgacacctcagaaaaaaagtttacatcatctattaatacagtaatgctttttatctgggaggagttcttccaggattcctaaaagagaaccctttatatatatatatatgaaatcttccaggatgcctaaaagagattttaggattttaggaatcttccaggattcctaaaagagaacactttatatatatatatatgtatataacatatatacacatatatgttatatatttatatatatgttttatayatatatatatatagagagagagagagagagagagagtacaaaatatgtcagaggtgtaagaaaactaatgaaacaaagttcctggatccaattctccttgtccatagctactccttg

SEQ ID NO: 483349 - DNA, 604 bp, Homo sapiens
aggcatgagccaccacgctggctgtttgtttttttttttaagttcctgagggtaatttctaaacatgtcttatattctattccaccattctcyacatattggacatcccagtccccctgaatatacgttaaaaacgagagtacaataaataccaccaacgtgtgacattattttcatgtaatgggtaatcaccacgcatcaccaaatatcttctaatatgcagaggtaatagaattcaaaattacatatccctgtctttaagaatcggaatgtgaatgcaattttggttctgcctattagattcctatgataaatatatgagactttaatttgagttaacaagaagatagaggcagaatatgatgtgcctgctttgctagcatagattgtggttagaagtttgaggttcttgaatcaatggttgttccttaattcaacaaggagcttccaatttcaccaggtttttgctgaatgaatgaaagagttaaggcaacaaggccctggagatgacaggtccgttacagacttctgcttctaaatgtactgaacatggcagaagcaataacaactttggtggcttaattctgtgatatgattttgaaag

SEQ ID NO: 483350 - DNA, 604 bp, Homo sapiens
aggcatgagccaccacgctggctgtttgtttttttttttaagttcctgagggtaatttctaaacatgtcttatattctattccaccattctccacatattggacatcccagtccccctgaatatacgttaaaaacgagagtacaataaataccaccaacgtgtgacattattttcatgtaatgggtaatcaccaygcatcaccaaatatcttctaatatgcagaggtaatagaattcaaaattacatatccctgtctttaagaatcggaatgtgaatgcaattttggttctgcctattagattcctatgataaatatatgagactttaatttgagttaacaagaagatagaggcagaatatgatgtgcctgctttgctagcatagattgtggttagaagtttgaggttcttgaatcaatggttgttccttaattcaacaaggagcttccaatttcaccaggtttttgctgaatgaatgaaagagttaaggcaacaaggccctggagatgacaggtccgttacagacttctgcttctaaatgtactgaacatggcagaagcaataacaactttggtggcttaattctgtgatatgattttgaaag

SEQ ID NO: 483351 - DNA, 604 bp, Homo sapiens
aggcatgagccaccacgctggctgtttgtttttttttttaagttcctgagggtaatttctaaacatgtcttatattctattccaccattctccacatattggacatcccagtccccctgaatatacgttaaaaacgagagtacaataaataccaccaacgtgtgacattattttcatgtaatgggtaatcaccacgcatcaccaaatatcttctaatatgcagaggtaatagaattcaaaattacatatccctgtctttaagaatcggaatgtgaatgcaattttggttctgcctattagattcctatgataaatatatgagactttaatttgagttaacaagaagatagaggcagaatatgatgtgcctgctttgctagcatagattgtggttagaagtttgaggttcttgaatcaatggttgttccttaattcaacaaggagcttccaatttcaccaggtttttgctgaatgaatgaaagagttaaggcaacaaggccctggagatgacaggtccrttacagacttctgcttctaaatgtactgaacatggcagaagcaataacaactttggtggcttaattctgtgatatgattttgaaag

SEQ ID NO: 483352 - DNA, 563 bp, Homo sapiens
aatggtagacagctgaattccctcctcggtatgtttaaaatgtcttctgagtgagaaagctacatataytctctgggcagtcatttcttccttagaattccacttcccaatccagttctcttttcatcttgcttctgcctattcttctaaatctcttttgtttaaagaatgaacaaaatgttgctttggtgaagtaacaataagcataatcctgttgttttaaaaactcttttaccaaagatttgaggataacaaaatgaaaataaaacaaaaacacaaattcattaaaaactgcataatagctgctctttccaaggtttataagccatcccttccattgaaaaagtctagtgcttactgtctctcttcacattgttactaggtttctgttcttccctctcagactgttttctttccaattatttcatccctcactcaccctggctagaacaactttggttttctacctctcattttctatcacaaagttctgtaaaatctacctttccaaaattaaaattttgaccctgcttttccctctgtattcccaaggaattaatttg

SEQ ID NO: 483353 - DNA, 582 bp, Homo sapiens
gaactgacaccaaagcaaatgatccttctttttaaaataactgacctgttttgatagcttgatatttatatatgggtcttgactgagttggttttaatggaaaaaaataagaaagttatgaattaagtttttgcttattgagttatacaggatgctgcctctacctgcatgcatatttgtacctgtataggtaaattgtctctaaatgccagtaaaaatgtaattggtttagactgccataacttagttctatgtcatttttgtcatacagaatagtggcaaaaacctkcaaggtctgttgttacatgggatagtaccagtcaccatcctgctcatttctcctcagcactcactgtctgtacaagcccatggcttctgcctgtaagctcctgtgactctctctttctcaatgctttgtgcggcaagctagaaatgcctggctattaacatttccaggagcagacttcaaccattgatggacagcatttgacatataaatagccaacctcattgccccttgggtgggaccactatacagcctactttatggagtcttccagaagtccccatcaggactgagcc

SEQ ID NO: 483354 - DNA, 595 bp, Homo sapiens
aatcattttaaaccattagggattcataacttttctaaactttaccactttgtcatgagtaaaattcttgaaatctgcacagagtaatcataataatttctgctaagaaattccatataacagccaggcgtggtggctcatgcctgtaatcccagcactttgggaggcagaggcaggtggatcaagaggtcaagagatcgagacaattctggccaacatggtgaaaccccatctctactaaaaatacaaaaaattagctgggcgtggtggcaygtgtctgtagtcccagctactcaggaggctgaggcaggattatcgcttgaaacccgaaggcagaggttgcagtgagccgagatagcgccaccgcactccagcctgggcgacaagagcgaaactccgcctcaaaaaaaaaaaccaaaaaccgaaaaacaaacaaacaaaaaaaacagaaattccatgtaactgatttaatacagttagatgggcatatttaaactcaggtgttcaaagaaaagaaatcaaaaaccaaaactgaaaattaagtttggaaggtgacatttttatatttcacacattgccttaccagcttcagcag

SEQ ID NO: 483355 - DNA, 595 bp, Homo sapiens
aatcattttaaaccattagggattcataacttttctaaactttaccactttgtcatgagtaaaattcttgaaatctgcacagagtaatcataataatttctgctaagaaattccatataacagccaggcgtggtggctcatgcctgtaatcccagcactttgggaggcagaggcaggtggatcaagaggtcaagagatcgagacaattctggccaacatggtgaaaccccatctctactaaaaatacaaaaaattagctgggcgtggtggcacgtgtctgtagtcccagctactcaggaggctgaggcaggattatcgcttgaaacccgaaggcagaggttgcagtgagccgagatagcgccacygcactccagcctgggcgacaagagcgaaactccgcctcaaaaaaaaaaaccaaaaaccgaaaaacaaacaaacaaaaaaaacagaaattccatgtaactgatttaatacagttagatgggcatatttaaactcaggtgttcaaagaaaagaaatcaaaaaccaaaactgaaaattaagtttggaaggtgacatttttatatttcacacattgccttaccagcttcagcag

SEQ ID NO: 483356 - DNA, 595 bp, Homo sapiens
aatcattttaaaccattagggattcataacttttctaaactttaccactttgtcatgagtaaaattcttgaaatctgcacagagtaatcataataatttctgctaagaaattccatataacagccaggcgtggtggctcatgcctgtaatcccagcactttgggaggcagaggcaggtggatcaagaggtcaagagatcgagacaattctggccaacatggtgaaaccccatctctactaaaaatacaaaaaattagctgggcgtggtggcacgtgtctgtagtcccagctactcaggaggctgaggcaggattatcgcttgaaacccgaaggcagaggttgcagtgagccgagatagcgccaccgcactccagcctgggcgacaagagcgaaactccgcctcaaaaaaaaamaccaaaaaccgaaaaacaaacaaacaaaaaaaacagaaattccatgtaactgatttaatacagttagatgggcatatttaaactcaggtgttcaaagaaaagaaatcaaaaaccaaaactgaaaattaagtttggaaggtgacatttttatatttcacacattgccttaccagcttcagcag

SEQ ID NO: 483357 - DNA, 387 bp, Homo sapiens
ggtgtcgggggcgggggaagagtatgagcaggggtgggggcaggggtgccaggtgtagcaggtagggaggtagaggcggcgagtgggggcgcccgagggaccggggcggggcggggagcgtaagggtggcaaggcgcccgagagtcagggctggagctgaaggtgggtgacagggagggggcgcccaggtgtcaggacctgaggagaaagagtgcgcgtagcgggagggccccgaagtgtcggggcgggatcctggaaggagggagaacgtgaggagggaggaagggtccctggggtgtcasggatgggggccaggaaaggggcagagagctggaggcccacaagtggggatagcgggggagggaggttggagcgagtggggaacgc

SEQ ID NO: 483358 - DNA, 664 bp, Homo sapiens
aagagtaacttataaaggcacttatcagtttgttactggtagggtcttgactatgcatcatccacattcttggcattttgaatgaagcarcgaaagcatagatttattgaaacgaaagtacctgccacagagtggtagcaggctggagcaaggggctcaagagacttggttacagaattttctggggtttaaataccctctagagatttcccattggttacttgattataccctatgcaaatgaagacttggccagcgaccagtctgattggttgcagtaggggaccaattagaggtactttctatttttcatctgcaatagtggaggggggcagatagcaaagggggcagccttatcctggctaacacggtgaaaccccgtctctactaaaaatacaaaaagttagcagggcgtggtggcgggtgcctgaggtcccagctactcgggaggctgaggcaggagaacggcatgaacccaggaggtggagcttgtagtgagccaagatcacgccactgcactccagcctgtccttttgattcagttctaggaagtaagtgtgagttggccttaggttcttttcctccagaccctattctcctgcctcaagtttaggtggaaattgttgacaatggctttattgcttttatgtacaatagaaaatag

SEQ ID NO: 483359 - DNA, 664 bp, Homo sapiens
aagagtaacttataaaggcacttatcagtttgttactggtagggtcttgactatgcatcatccacattcttggcattttgaatgaagcaacgaaagcatagatttattgaaacgaaagtacctgccacagagtggtagcaggctggagcaaggggctcaagagmcttggttacagaattttctggggtttaaataccctctagagatttcccattggttacttgattataccctatgcaaatgaagacttggccagcgaccagtctgattggttgcagtaggggaccaattagaggtactttctatttttcatctgcaatagtggaggggggcagatagcaaagggggcagccttatcctggctaacacggtgaaaccccgtctctactaaaaatacaaaaagttagcagggcgtggtggcgggtgcctgaggtcccagctactcgggaggctgaggcaggagaacggcatgaacccaggaggtggagcttgtagtgagccaagatcacgccactgcactccagcctgtccttttgattcagttctaggaagtaagtgtgagttggccttaggttcttttcctccagaccctattctcctgcctcaagtttaggtggaaattgttgacaatggctttattgcttttatgtacaatagaaaatag

SEQ ID NO: 483360 - DNA, 616 bp, Homo sapiens
tttaatcgtcaaaataatctgtgaagatatgactattcatgttctacagatatggggataaatttcacaaagttaagaaattttctcaaggtcatagtactagcaagctgaggctgaaaccatcttctgataacaaaatccagagtarcattttgtaaaatactagtttagaaagataccaattgaactatagagacaaaaattagattagtgatagcctaggactggaaagggttgagaatgacagggtaggggtaggggtgactgctaatggacacaggtttttcagggaggtgatgaaaaagttctaaaattgattgtagtgatggttccacaactctaaatatgctaaaaaccattgaattggacactttttaaatggatgaatggtatgtaaattacattttacagctattaaaaaatcagttgacaattaaggaggcaaatgaattattgatattttgtcattttaagatcaaattatcaagaatacaaactcaaaaatgtaaatttagcctaggtgttttgttccaaaacagacaattcatttcacattaggaagttcagtagtaagtggaagagaaaagctggcttactattcctggatggattccac

SEQ ID NO: 483361 - DNA, 558 bp, Homo sapiens
gttaggaggctgaggcaggagaatcgcttgaacctgggaggcagaggttggtgtgagccgagatcacaccatgcactctagcctgggcgacagagcgagactccatctaaaaaaataaattaggcggtgcgtggtggctcacgcctgtaatttcatcactttgggaggccaaggcgggcagatcacgaggtcaggagatggagaccatcctggcaaacacggtgaaaccgcgtctctactaaaaaatacaaaaaaytagtcgggcgtggtggtgggcacctgtagttccagctacttgggaggctgaggcaggagaatgttgtgaacctggaaggcggagcttgcagtgagtggagatcgcgccactgcactccagcctgggcgacagagcaagactctgtctcaaaaaaaaaaaaaaaaaaggctttagaaacagggagacccaggtttgggctctggttcagccacttattagccatcactagtcaattaaaccttctaggttttcaggatttttaaaaatgttttaaaagggggagggtataataaaaatatctc

SEQ ID NO: 483362 - DNA, 558 bp, Homo sapiens
gttaggaggctgaggcaggagaatcgcttgaacctgggaggcagaggttggtgtgagccgagatcacaccatgcactctagcctgggcgacagagcgagactccatctaaaaaaataaattaggcggtgcgtggtggctcacgcctgtaatttcatcactttgggaggccaaggcgggcagatcacgaggtcaggagatggagaccatcctggcaaacacggtgaaaccgcgtctctactaaaaaatacaaaaaattagtcgggcgtggtggtgggcacctgtagttccagctacttgggaggctgaggcaggagaatgttgtgaacctggraggcggagcttgcagtgagtggagatcgcgccactgcactccagcctgggcgacagagcaagactctgtctcaaaaaaaaaaaaaaaaaaggctttagaaacagggagacccaggtttgggctctggttcagccacttattagccatcactagtcaattaaaccttctaggttttcaggatttttaaaaatgttttaaaagggggagggtataataaaaatatctc

SEQ ID NO: 483363 - DNA, 604 bp, Homo sapiens
tcaaactcccgacctcaggtgatttgccagcctyggcctcccaaagtgctgggattacaggcgtgagccactgcgcctggccggcttcattcctttttcatttgcctagcccatactcaggttgcatgatcacttatttaactacctccctactgctacatcatgtgattgtttccatacactgtaaagtctgtatgtgcctaaaccactgttctcttgaaggtcgtttgcaactgcatcaactataccattcttcatcttattctttaccactgctctgcagcaatagacaagaatagcaaacttcctcttagaaaaaaactgccccttaaatttgattctcttgaagtttgacctgttctttactgattgtttagtaactacccttcattctcctagttctaaataggcaggctttaaagttcagttcttggccctttttcctctctctgttctcatctaattggataatcactcacatacagacagtgccaacgatttccttgatcctgaacagtcttagattaacatctcctgcctcatcttctctctgaagatctgatgccatatttccttcctgctcgctgggcaaaaccacctgcat

SEQ ID NO: 483364 - DNA, 624 bp, Homo sapiens
atttctctgttctacctctggttgtgctttgctaaatcaaatttcacttattcttttatgatggcataagtttactgytgtattccttctctttcttttcctagacaggttttttttaacctatttgattcttatttgtgtaattaccatgtcttaataaaaccttcttggctaaattatagggtaactatgagattttttttctaaatgatttgtctaagatttttatgtagattggtgaaagctctggataactaaggtgtattatatttgataactgtacttgtcttcattttgagtggagggtgcaaactttgaatgttactttttaaaaagtccccatttaagtgtgtgtgtgtgtgtgtgtgtgtgataaatctttggtaataatttgatgaaattactttgatagtctattaattgtgacatttctagagcaaagctaggttataaaagagtggggaattcccttctcatggaagattctgggaaaacaggtgcacacatggcatgtgaaacaatacccttgaaaaataagattctaatgtactcacttattcaaattcaaagatttattctcttagatcaaagcactttcatctcttagaaggcactcctggtgcc

SEQ ID NO: 483365 - DNA, 600 bp, Homo sapiens
ttacatgtttattagagatattattgtacctagctcaaactatagtaatggagccagaaaagaatacagtgcttgttatcctacaggcaagattttggggrcataggttcacctttttatgttagctgttaaaatgcaaatgaagatgtttcttatgatgagagagattacaaattgtgttatttgagtgcatttagtagacctatgtctaagcatgtccttgagtaaaattttactataagcaaaaattgctttataccttcccccttgatttagttattttgatgtaggaattggagacaaaataatactatatctagtttattctgtcattgttagagtctcttttatgcatatgttgatgatatatacgtatacataattaccattaatgtgatttttaaatattccatattcttgctgcttgtttgtctattagcaattaatgaaggttttataatatttccatcataactgtgaatttgtctgtttctcattttaatttttttatacatattgaatctgtgtgattgtgcatacctacctagaattatgacacatttctattggattgtcacccttattgtaatgaaatatcac

SEQ ID NO: 483366 - DNA, 600 bp, Homo sapiens
ttacatgtttattagagatattattgtacctagctcaaactatagtaatggagccagaaaagaatacagtgcttgttatcctacaggcaagattttgggggcataggttcacctttttatgttagctgttaaaatgcaaatgaagatgtttcttrtgatgagagagattacaaattgtgttatttgagtgcatttagtagacctatgtctaagcatgtccttgagtaaaattttactataagcaaaaattgctttataccttcccccttgatttagttattttgatgtaggaattggagacaaaataatactatatctagtttattctgtcattgttagagtctcttttatgcatatgttgatgatatatacgtatacataattaccattaatgtgatttttaaatattccatattcttgctgcttgtttgtctattagcaattaatgaaggttttataatatttccatcataactgtgaatttgtctgtttctcattttaatttttttatacatattgaatctgtgtgattgtgcatacctacctagaattatgacacatttctattggattgtcacccttattgtaatgaaatatcac

SEQ ID NO: 483367 - DNA, 606 bp, Homo sapiens
actgagagtgagaggttcaggtgaggggttgctgaagatgtgacttctgtagcacaaaaatttcctccattgtaaacactctatttccatgaactgatattaaaaatagacacaatcaacacacacacaaataacatttagtaatggttaataattaaagatcttcactttgagagagtagtatttgtttttattgaattgtttgccatgttcaatattttttctttggcttccaatatgtcctgaggaggattttttttttttttttttttttttgagatagggtctcactctgtcacccaggctggagtgaagtggcatgaccatggctcactgaagccttcttgamctctgggctcaagcaatcctcccacctcagccttccaagtagcgggactacaggcctgtgccaccacacccagctatttttttatatatattttttgtagagacaggtgtcccactgtattgcccaggctggtctcaaactgctgggcgcaggcagtcctcctgcctcggcctcccaaatgcagggattacaggcgtgagccactgcccccagtgaggaatgaattttataattacataaaacaattactggaaaag

SEQ ID NO: 483368 - DNA, 608 bp, Homo sapiens
tcaggcttcaccttaactgttacttccttactattccctcacctccaatttaarttatgtttctcattattctctcacacagcctcctataccttccttcatgacatgtatcacaattatagttgtatatgtatgtgtttatttgaatatgtgtgtctacctccctataccccaagcactacaactatagaactcccgccaatgcaagccaccatttaaaatctactacttagcatattggaaagtgtagtaaacatttactggatacctcctgtgtcttggatgttgtcctgggcactggaaatactaggggataatcacaaattccctgttctcatggagctgaccttcagatacaaagagccaggcaataaatacagaagcatatttctttgattgaggactcttgctgcaaggctacataaaaagttggattttacaaaagaaagaatgcatgcttgtcttgccctaatcagggtcccgtagctcagatatcctcattttgtctgtgtttttttaaccctgccaggctactcctgagtgtgacttttgctctggcactttaaaaccctcatcaatggcattctttgtcctcctttccatttgta

SEQ ID NO: 483369 - DNA, 502 bp, Homo sapiens
tcctataccttccttcatgacatgtatcacaattatagttgtatatgtatgtgtttatttgaatatgtgtgtctacctmcctataccccaagcactacaactatagaactcccgccaatgcaagccaccatttaaaatctactacttagcatattggaaagtgtagtaaacatttactggatacctcctgtgtcttggatgttgtcctgggcactggaaatactaggggataatcacaaattccctgttctcatggagctgaccttcagatacaaagagccaggcaataaatacagaagcatatttctttgattgaggactcttgctgcaaggctacataaaaagttggattttacaaaagaaagaatgcatgcttgtcttgccctaatcagggtcccgtagctcagatatcctcattttgtctgtgtttttttaaccctgccaggctactcctgagtgtgacttttgctctggcactttaaaaccctcatcaatggcattc

SEQ ID NO: 483370 - DNA, 608 bp, Homo sapiens
tcaggcttcaccttaactgttacttccttactattccctcacctccaatttaaattatgtttctcattattctctcacacagcctcctataccttccttcatgacatgtatcacaattatagttgtatatgtatgtgtttatttgaatatgtgtgtctacctccctataccccaagcactacaactatagaactcccgccaatgcaagccaccatttaaaatctactayttagcatattggaaagtgtagtaaacatttactggatacctcctgtgtcttggatgttgtcctgggcactggaaatactaggggataatcacaaattccctgttctcatggagctgaccttcagatacaaagagccaggcaataaatacagaagcatatttctttgattgaggactcttgctgcaaggctacataaaaagttggattttacaaaagaaagaatgcatgcttgtcttgccctaatcagggtcccgtagctcagatatcctcattttgtctgtgtttttttaaccctgccaggctactcctgagtgtgacttttgctctggcactttaaaaccctcatcaatggcattctttgtcctcctttccatttgta

SEQ ID NO: 483371 - DNA, 352 bp, Homo sapiens
catttccctactgcattcactctcccactttcctagatgactatttcattcctactcttctttcctcaaatacttctccccactccttattctgagttgatgatcttacttcctatttcacagaggaaacagaagcaaccagaagaaaacttttgtgttctactatatctgctcactactagcatctgaatccatataatcttattatagataatctttccatcacttggtgtgygtgctaaataaatctcctcctctctccaactcaagcccattgctctcatattccttatattctgactttatcaaattctttatcctctaacttggtactatagtttagatgtttgtc

SEQ ID NO: 483372 - DNA, 639 bp, Homo sapiens
taactctatattatatggagtttggggatatttgaaagcaagttaaataaaattcccaccaaaggcgrcataaggcactaggcagaagtagccaaacttaagtacagtaagtcaatttctagaaagctttgaatattatttcaatttgtctgtccgtattcaatgcaaatcgttacaaaatcacgtctattttgaatttattaaatttctcaaagtttttttttcaaaatctgagttcttataagaatttgtaacaaatacctgttacaattaaacaatactgaaagtattgttacttttgataacctggtatagatgtttcttattaacccgctgtagagttgatctacacatgccagttaccatggtcttctaaaagcactgttcaagccctaaaattaactcagttaagactcagttgtttaataacgtatcaggaaccacctgtccctcagactaaaaatcacttctcattttaactactctagcactaaaagtgaatagcataataatgtatctactagcgctactgctaaacagtccgggtcccctgaaacttatccctaaacacagtgctttcgtgcggcatctgcgccttacttttgcagtctggggtgactgagtcaacgtgaccgtgcg

SEQ ID NO: 483373 - DNA, 639 bp, Homo sapiens
taactctatattatatggagtttggggatatttgaaagcaagttaaataaaattcccaccaaaggcggcataaggcactaggcagaagtagccaaacttaagtacagtaagtcaatttctagaaagctttgaatattatttcaatttgtctgtccgtattcaatgcaaatcgttacaaaatcacgtctattttgaatttattaaatttctcaaagtttttttttcaaaatctgagttcttataagaatttgtaacaaatacctgttacaattaaacaatactgaaagtattgttacttttgataacctggtatagatgtttcttattaacccgctgtagagttgatctacacatgccagttaccatggtcttctaaaagcactgttcaagccctaaaattaactcagttaagactcagttgtttaataacgtrtcaggaaccacctgtccctcagactaaaaatcacttctcattttaactactctagcactaaaagtgaatagcataataatgtatctactagcgctactgctaaacagtccgggtcccctgaaacttatccctaaacacagtgctttcgtgcggcatctgcgccttacttttgcagtctggggtgactgagtcaacgtgaccgtgcg

SEQ ID NO: 483374 - DNA, 512 bp, Homo sapiens
tgctgagacttcaaaagtgttttcatgaaaaacaatgttggagctggaacagattataaacatcatctagtccaagtccctcaacttagatgagaaatggaagcatgtgaagatgaataacttgctcaaggtcatggtttttttcaggactgatctccttacttccaattctcttttctttccttttgaagttgttagtaaaaaaaaaataataaatgattatttacattyttaattgtcaatttttccatgtatgcttacaaatggggcatagattttctacttttacctacctccatcaaattaaagttaaatgttggttttaaatgagattttctatgatttatacttgaattgtttgaaatagacttcattagctcaggaaacttgaattctttcccttttttgcagggttccttctttgtctgtaaatagtcatcttgacgtgcttcgaccattccactggctattcttaccatttgatttcagtttttattaacttccgggttagg

SEQ ID NO: 483375 - DNA, 562 bp, Homo sapiens
ctcctctctagtagggaacttcactgaatattggttgatatgggtgaggtgtttttttttttttttccttaaccattcagtggtcatggggacttacaaaaaggtgccgttygagagtgataggataatgcaggggaaacaggtgccacaagactctgaactaaatatatatgaaactttcttgtgctctcagacactgctaaagccttatctaactcctcctgagaatggagtgttgtgacgcacacgcaactttatgatttggtggatcagataacaatgagtttatagacgggcagattagtttcagatgctcttggcatttcacggtaggaatgccaggaacccaggctttaccagatcttaggaacatgcccaggagctgattttcaaaatgtaaataagttatgtgtgttaagaaggcatagctgcaatcaaaagctgtaggagcctgcatcatgattcttctctcaggattcccagagagtccatcgcattcctatctgcaatagacgtttggagcacatttttatctgccgggttttaaagcccaagcaggaaa

SEQ ID NO: 483376 - DNA, 562 bp, Homo sapiens
ctcctctctagtagggaacttcactgaatattggttgatatgggtgaggtgtttttttttttttttccttaaccattcagtggtcatggggacttacaaaaaggtgccgtttgagagtgatrggataatgcaggggaaacaggtgccacaagactctgaactaaatatatatgaaactttcttgtgctctcagacactgctaaagccttatctaactcctcctgagaatggagtgttgtgacgcacacgcaactttatgatttggtggatcagataacaatgagtttatagacgggcagattagtttcagatgctcttggcatttcacggtaggaatgccaggaacccaggctttaccagatcttaggaacatgcccaggagctgattttcaaaatgtaaataagttatgtgtgttaagaaggcatagctgcaatcaaaagctgtaggagcctgcatcatgattcttctctcaggattcccagagagtccatcgcattcctatctgcaatagacgtttggagcacatttttatctgccgggttttaaagcccaagcaggaaa

SEQ ID NO: 483377 - DNA, 431 bp, Homo sapiens
gctgacagtaactatatgcttaagtggcaggcagactcactagayggtaaacacctagagtacaggaatcatttaaaaatcatgtttgtatgtcctatgtgcccattgcaggcacttaatagatattactcattgaaaaaaactgagcttgtgacttttccagttaaaatgaaaaaaagaaaaagaaaaaaaaaaaacaataccaagcatcttcccagaaaagagtgaaaaacgagcttggtgtcccaaacaacattcttcctatcaacaaaatgggctctaatatccaaaggcaaactctcatagagcactcacctaacagctttagaattactcagactgaaatttatccacattacagagcactttaaggggtgcctatggaaggaaatatatactataaaaccaaattctcatctcttcactgtgtg

SEQ ID NO: 483378 - DNA, 641 bp, Homo sapiens
ctgacagtaactatatgcttaagtggcaggcagactcactagacggtaaacacctagagtacaggaatcatttaaaaatcatgtttgtatgtcctatgtgcccattgcaggcacttaatagatattactcattgaaaaaaactgagcttgtgacttttccagttaaaatgaaaaaaaraaaaagaaaaaaaaaaaacaataccaagcatcttcccagaaaagagtgaaaaacgagcttggtgtcccaaacaacattcttcctatcaacaaaatgggctctaatatccaaaggcaaactctcatagagcactcacctaacagctttagaattactcagactgaaatttatccacattacagagcactttaaggggtgcctatggaaggaaatatatactataaaaccaaattctcatctcttcactgtgtgcaactcagtgataactggactgttagaaagaaaacattttgtatggtttctaagacttctgagtagtttttgtgctgtttcaaagtaatttagctctggggaggaagcagaagcaacaatcatcaggccaggatcaaaattaataggctccgtattggccagacacagctctttactcagagttcttgccagagtcaaatgtaacatttct

SEQ ID NO: 483379 - DNA, 595 bp, Homo sapiens
ccttgctgggggtggtggtaggatactccttcagtgcttagccagatggttgtawgttctgctttgacacttacttcctgcttgccttaagcctagtgattatctgaaagtgaaagcttaaggtcttggtgggtattttctgaccatgtgtcctgtcttgggcatgtatacagctttctaaattccttagtatgcacagacagttttgattgccctaatttcacaaatatattgtcttccttgattttcctcctagattttaggtgctctatttttggcctcaattttaatctcttgctccgagtaatcacagccttttcatttacctacaatgtttataagaaatgcccactgtttttccctcctgagttccacggtaggagaaacaaagacaaacatcttgccatgtagggaatggtaacaggaattaaaaaacaaacaaacaaacaaaaaaaacaaataagagatctttgttgccaagtatatttcaccacttagagaaggcattaaatgagtcacaattttcaggctaatgatgttggggagttataatcttagttgtgatgctggcgggagaagaacacacagttactga

SEQ ID NO: 483380 - DNA, 595 bp, Homo sapiens
ccttgctgggggtggtggtaggatactccttcagtgcttagccagatggttgtaagttctgctttgacacttacttcctgcttgccttaagcctagtgattatctgaaagtgaaagcttaaggtcttggtgggtattttctgaccatgtgtcctgtcttgggcatgtatacagctttctaaattccttagtatgcacagacagttttgattgccctaatttcacaaatatattgtcttccttgattttcctcctagattttaggtgctctatttttggcctcaattttaatctcttgctccgagtaatcacagccttttcatttacctacaatgtttataagaaatgcccactgtttttccctcctgagttccacggtaggagaaacaaagacaaacatcttgccatgtagggaatggtaacaggaattaaaaaacaaacaaacaaacaaaaaaaacaaataagagatctttgttgccaagtatatttcaccacttagagaaggcattaaatgagtcacaattttcaggctaatgatgttggggagttataatcttagttgtgatgctggygggagaagaacacacagttactga

SEQ ID NO: 483381 - DNA, 466 bp, Homo sapiens
agagcatttgtgcagggaaactccccttttgaaaaccatcagatctcattagacttattcactatcagtagacgagcactggaaagacctgccccaatgattcaattacctcctactgagtcactcctacagcatgtaggaattcaagatgagatttgggtggggacacagccaaaccataccatgggcttttgtcatgttgcccaagctggtctcgaactcctgggctcaagtgatccacctgcctcaaccccccaacattgctgggattacaggtgtaagccactgaamctggccctgtttagccaatttatttacaagcaatggcttatgaagtgtatcccacagtccttaagaacagaaacaataacacacacacacaataaaacagctattcagatatactcaagtagactgagataaaccaaagaaatcaaatgttgcaaagtaataatcttaaagcatg

SEQ ID NO: 483382 - DNA, 596 bp, Homo sapiens
cagctgagggcctcctgtctcagtttacagagaaaacagaggaatcgggcacttgccttccttcccccatcttgctgtcagccagcatcccttctcctctgcttccatggggccagccctgccttgtcccttcagctcmccatgtctaagaacttcactcctgcaattaccctcctctcacagttgggttaccaagtcatgttacatatctccactctttcttttcttttctttctctttctttctttctttttctttctctctttcttttctctttcttttcttctttctttctctctttccttctctttctttctttctttttctttcttcctttttcctctctccctccctctctcctttctttctttttcctctctccttccctctctccttccttccttccttcctttctttctttctttctttctttctttctttctttctttctttcttccttccttcctttccttccttccttccttccttctttatttctgtcaggcctctgagcccaagctaagccatcatatcccttgtgacctgcacatacatatccagatggcctgaagcaactgaagagccacaaaagaagt

SEQ ID NO: 483383 - DNA, 514 bp, Homo sapiens
tttctgtcctggttagctgtgtagcagtgtggtttcccactcccactcttccaggagttatcctgtggacacattggtctctgtcacatttaggtaattgttgatattataacaatgcgtaataacacaaaaccaagaaaaacatctttgcagctcstgctactttattatttggccaattagaacttccgagtccagacctggaaagtttgctaagaggggcttaggggagcagcaagaccaggagcagattttcttggaacctgaggtgctttgatgcaggaattcaaggactcaccttcgataggtcaggctggggccctcttgagggcagactggttgcccagatcctgcctctggagagtcctgcgtgttgtcctgaatggggagacttggcaggcccccagcagaatggccacttggtctttcttggcagagagaccctgaatacatttctacctatttgttcccacagagaattgttttcaaaactgctctgtgccctgttttccct

SEQ ID NO: 483384 - DNA, 460 bp, Homo sapiens
aggcgggatgtagccggggtgtgtgtgtcggggggtggcaggatgctccccagaggcggagagcggcgcgtggggggtgctgcaggcgtcctgggagtttgggggcgccgcccttcctcctgccttgggcccaaccggtggatcctgtcgagtctgttgtggtccccttcttaggaaaagcacagagagccctttaaagatgttgacctgacagcagcagggggcccagggtgaccacggagcaaatcagggaaaggaaacytaggtcgccacacatttgatttaaaagaaaataacttccctcctgaagcaggggctggggtaggtgccctggcacaggcacagaaccagagagaacccttgccgctgctccggaatgtcgggccacaccctccggatacgggaaaggctttcttctccatttcaaatgaccctgtttcgccttttttagatacaaatg

SEQ ID NO: 483385 - DNA, 503 bp, Homo sapiens
cgaaaaagctccgtgctgccagcagtagggcagataatggtcccccaaaagatatagccaagtgataaccctccagaacctgtgcatgtgatcttatctggaaaaagggtctttgcagatgtaatcaggtcaggatctggagatgagctcccaagtgtggagcatggagaagaggggaggggagtgagggagacggggaaggsagcaagtgagaagggggagaaagggggcaggggaaggaaggggaggtatggagtggattctccctcagagcctctggaaggaattaaccctgccaacaccttgatttctggaactgtgagagagtaagtttcggttgcttttcagccacccagtttgcggtaatgtgtgacagcagccacaggaagtgagcacactgccccgtcctcatgcggggggtccatacagtgatcccatggggctgcgcacgaccggcctcagcacagcgcctggcacgttccaaaggtccactcctgaaatct

SEQ ID NO: 483386 - DNA, 631 bp, Homo sapiens
atctagagagcctcacaattttattggtattaaatatggtataaagaatctactttgcattagataattccacagaaatatacattagtagaattttattaaatcaaactgagctaatttttaaaataaaaaacaatgtacaccaaaataacaaaatcttgtattaaataatctttattttttaaagtcaagacaaagtcaatgtcagatgttctatttcaatctaaacaaatgtgatgctattttaaaaatgctttttaagtcatgaaatatcaaaaaagagtaccagaatgcagtctgtaagagtcaartgttcccagtaattatagatttccccatattgaaattcgaactagataatttcaagaaaaaaaaactggggaaactgtatttctttttaagatgaatataagcacatacaatacagtgtggtaaaacaatctagacagaaactcaaatattcatgaggctgtaggtgaatatcttaatgacacaaatctgaatatattttgtaatgtctctttgactaacaaagaaaacctttctttaaattcctttgggatagcattgtacctgtttctcacaggaaattctgatatttgtgatttttctaatagttttaaaatattaa

SEQ ID NO: 483387 - DNA, 592 bp, Homo sapiens
ccagtaaatttttagtgccgattatagtagctgagtgccacaatcagtagctctcttaatgctgtactcttacctttaccacatcgtatgaatctattattaataagttaaatgtgatgttattacctttcagggattatttgcattccattttccttggttagggtatttgtgcagtccacagctatgcaagcaaactattcccagaattctattttgtaaaatagttacttgacatcaattattataacaagttcctggaagaaacagataactcactcaaatgaatatgtttgagaaacagtttaataaagggatgcataataaaagtaaggacagagtataagaaagccacaagggatagagcaggacccaaggactggagggcgtttgcagggaaacattgtcactccgagggctgaggtggtaaagaaatgaagtaattactgraatctagagagagacaaaacccagagagaaggaaaccaggcagatagagggggtgggggctaattaacaagagtgtgaccttcactgggaaatagccagttcacagtgattttgcagggctgtacctgggtaaattagtgta

SEQ ID NO: 483388 - DNA, 587 bp, Homo sapiens
aaatttttagtgccgattatagtagctgagtgccacaatcagtagctctcttaatgctgtactcttacctttaccacatcgtatgaatctattattaataagttaaatgtgatgttattacctttcagggattatttgcattccattttccttggttagggtatttgtgcagtccacagctatgcaagcaaactattcccagaattctattttgtaaaatagttacttgacatcaattattataacaagttcctggaagaaacagataactcactcaaatgaatatgtttgagaaacagtttaataaagggatgcataataaaagtaaggacagagtataagaaagccacaagggatagagcaggacccaaggactggagggcgtttgcagggaaacattgtcactccgagggctgaggtggtaaagaaatgaagtaattactggaatctagagagagayaaaacccagagagaaggaaaccaggcagatagagggggtgggggctaattaacaagagtgtgaccttcactgggaaatagccagttcacagtgattttgcagggctgtacctgggtaaattagtgta

SEQ ID NO: 483389 - DNA, 513 bp, Homo sapiens
taccaaagatgccaaatcagttccaattcacatgccaatccttatcattaagtaatcatattgtaaagatctatgtcaagagagggatcaagrtagctgactagatgcaagtagtatgtatctccttcatggagaggaaccagaatagtaagtaggtgcttacatttcaaagagcttgtctaggagaatacagtaggattcaccagagaagagacaggaagcaccagaagtaagtaaggacagcattcacagcatcctgcccagccaagaactgaatgaaaaatgggaaaagtctctggattcagggaaataataagagaaattcttacttttaggaaactcttactgttagggcttcacatccaaatgggcttttacaatcttggctacaggagaaaactttgactcgctagggcctcaggcctgacatatagcctgcctcaagattgcacagggacttcgctccaaaaagaaaaccacacagaatctgacagtcatgtgagcctagagcag

SEQ ID NO: 483390 - DNA, 456 bp, Homo sapiens
tccagtggcttttgcagcttaagaaaatgagacccaaaagaaccctgattaaggacagacttggctgagtatggtggctcatgcctataatcccaacactggsaggccgaggcaggaggatcacttgagcctggaagggcgaggctgcagtgtgcggtgttcacatcattgcactccagcctgtgtgactgaccaagaccctgtctcaaaaaaaaaaaaaaaaaaaaaaaaaaaaaagggatagacccggttacagattaaagcactggacttggggccaggatgtttgtgtaaatgtccctgtgtgacctttagtgagtcacttaaccttttgtaaaccccagccacagtatgactgcattaccagctcctctgaaccccctgtgctcagtctgctggaagaatccaccgtgcagggcgcttggtactttttgcaagccattgggccccagctta

SEQ ID NO: 483391 - DNA, 456 bp, Homo sapiens
tccagtggcttttgcagcttaagaaaatgagacccaaaagaaccctgattaaggacagacttggctgagtatggtggctcatgcctataatcccaacactgggaggccgaggcaggaggatcactwgagcctggaagggcgaggctgcagtgtgcggtgttcacatcattgcactccagcctgtgtgactgaccaagaccctgtctcaaaaaaaaaaaaaaaaaaaaaaaaaaaaaagggatagacccggttacagattaaagcactggacttggggccaggatgtttgtgtaaatgtccctgtgtgacctttagtgagtcacttaaccttttgtaaaccccagccacagtatgactgcattaccagctcctctgaaccccctgtgctcagtctgctggaagaatccaccgtgcagggcgcttggtactttttgcaagccattgggccccagctta

SEQ ID NO: 483392 - DNA, 456 bp, Homo sapiens
tccagtggcttttgcagcttaagaaaatgagacccaaaagaaccctgattaaggacagacttggctgagtatggtggctcatgcctataatcccaacactgggaggccgaggcaggaggatcacttgagcctggaagggcgaggctgcagtgtgcggtgttcacatcattgcactccagcctgtgtgactgaccaagaccctgtctcaaaaaaaaaaaaaaaaaaaaaaaaaaaaaagggatagaccckgttacagattaaagcactggacttggggccaggatgtttgtgtaaatgtccctgtgtgacctttagtgagtcacttaaccttttgtaaaccccagccacagtatgactgcattaccagctcctctgaaccccctgtgctcagtctgctggaagaatccaccgtgcagggcgcttggtactttttgcaagccattgggccccagctta

SEQ ID NO: 483393 - DNA, 634 bp, Homo sapiens
ataatcaaactaacattccttgccctcccctcaaactttctccaatttaatctagaggagattcttgaaaagttaatcattcaatgtaaraaaatatatactatctatggaataagatttttttatcaaaatggttgctgtaaaaatgttttaagagaagaacatttccagatatacaaattacaagcagaaagccctttataataacaaatgtattcaataaaagcatggttacgctaggctgcaaacgtatgtgacagagacccaatgcctccacacattgagtcatgcctccctcgaaaacaaagcaaattaaaaactcagaggaacagatatgggtcctgccctctttaaaaagaaagacataattaaaatgaaatttggaaagtgcaaggatgggaaagaataagacactattatgtgtgcctcacattggttttggcagggatcgggtatggctaagaataatgagctgaaggaggcaggtggcaggagatcagaacagcagatcctaggcaggaaaaagggaagagttggccagcatgttcaaagacccagagatgcaagaacagggtagatctggagactagagtgagttcagcagggctgcctaacctgggaatgcaccctggaa

SEQ ID NO: 483394 - DNA, 420 bp, Homo sapiens
catctgcccacttgcctatatatgactacaggaaagttttcccttgacccacctaaaaatatgccccattcatcttgaaatttggtagctgtgccaaagcacaaagaaaggatgattaaatggcacatttctatgattagacacacaaacttcctggaagatttaccacctacaacactgaagacctatgatcttcarataaaacccaatctcctgcagaagaaataatagtagttttgagattaaaaagaaatctgcgtatcacacaagttctcataagaccccctaaactttaccggtgaaggctcttctctttcccctggacaacgtatgttctggaaacatttctgagaagacatgtagatactaccattgtgacatgtttaaccagtcccagtgtccctttccataacctcagct

SEQ ID NO: 483395 - DNA, 420 bp, Homo sapiens
catctgcccacttgcctatatatgactacaggaaagttttcccttgacccacctaaaaatatgccccattcatcttgaaatttggtagctgtgccaaagcacaaagaaaggatgattaaatggcacatttctatgattagacacacaaacttcctggaagatttaccacctacaacactgaagacctatgatcttcaaataaaacccaatctcctgcagaagaaataatagtagttttgagattaaaaagaaatctgcgtatcacacaagttctcataagaccccctaaactttaccggtgaaggctcttctctttcccctggacaacgtatgtyctggaaacatttctgagaagacatgtagatactaccattgtgacatgtttaaccagtcccagtgtccctttccataacctcagct

SEQ ID NO: 483396 - DNA, 420 bp, Homo sapiens
catctgcccacttgcctatatatgactacaggaaagttttcccttgacccacctaaaaatatgccccattcatcttgaaatttggtagctgtgccaaagcacaaagaaaggatgattaaatggcacatttctatgattagacacacaaacttcctggaagatttaccacctacaacactgaagacctatgatcttcaaataaaacccaatctcctgcagaagaaataatagtagttttgagattaaaaagaaatctgcgtatcacacaagttctcataagaccccctaaactttaccggtgaaggctcttctctttcccctggacaacgtatgttctggaaacatttctgagaagacatgtagayactaccattgtgacatgtttaaccagtcccagtgtccctttccataacctcagct

SEQ ID NO: 483397 - DNA, 598 bp, Homo sapiens
gagggttccagatgatctgaccaatgaaaaatgatatgcctagcagatttgcagatttaggttggatcatttatctagcagctatagttttattatgcctaagaaacatgcaacttacagcttattcttttcagacctaatagattacatgatttgtgtatacaattcccaaagattacaatttctgccccaaactgagacctactggggccctaaaagtaaatattctggtcctctgcctttctcttcggctttatgtgtctacatgagacctggaatttgggaagtatggttcttcatgtttaaggatgctttgtcwttccagcaataaggaaagtctttgggggggttcccgtgctttagatttttttcttggtaaaatctgaggattggagatggtattatttcttaagttccttccagctcttaaacggtgaaccctctaggttctgagatgtatcaatcaacaagagtacataagacaaaaagaaagagaaatatggagtggaactctagggcaaaaaagtggagatatcaggtcactttggagctaaccagtagttatataaatatgagtacccagtagttattaacacca

SEQ ID NO: 483398 - DNA, 605 bp, Homo sapiens
tacacttaagctcttccccctgctccataatggatccctctcacygtaaggagatacaaacatttagaaaacactaaaccaaaccaacacctcccaggatcctctacaaaggtttcctggttcagtaagggaagcctggaagagatcaagtcatgttcaaagaggatcacaagctgtgctaccacaggattctactttctttccctcttaagatctaatcatttcctttgtttcccaaggaatacaaccattacagccacaggactgccaagttcaatcaatgacatagagtaggcagggcagctaccctggggtggtggaatatacttttcaagtgtaaaaggttaagctaataggagaaagaagagtaatcgggtaaaggtgctacactgtccaggtccctcctcctgaggagaagctcatggtgataatgatcacaattttaatctaaagtcaatcacgtcattcctcagctcaagattccccacaggttccccttacccttacaatggcctttaaagccctagtgatgctcttactgtcttcctgccccatcagcctccttgctcttcatcccactgggccaagctctgcccagagaatcc

SEQ ID NO: 483399 - DNA, 620 bp, Homo sapiens
ttcacttatttattttggccacagggtcttgctctgtcatccaggctggagtactttggtgcgatcatagctcactgtaaccttgacctcctgggctcaacgatcctcctgctttggcctcgtaaagcactgggattccaggtatgagccactgcacccagcctgttcatttatctttttagagacagggtctcactctatcgccccggctgaagtgcagtgcgcagtcttagctaattgtagtctcaacttcctgggctcaaaccatcttcctgcctcagcctcccaagtagctgggactgtaggcacaagacaccgtgcccagcttaggtcagcatatttaaaaaaggaaacaccacrtcatatctgagaagaggctgctataaacagaaggtaccatgaaaacaaagataataaagacaggacacagttctcacattttctgtagatgctgttacctgggagagttcagagccagagacctgcttgctgtttgctaaaaggtcagaacagcaagtggcggaggggagccgaggtgaactcccgggccaggtggctggccgggacagcatctgcaggggatgaactctctcccaggtgagtctgttgtctttagggct

SEQ ID NO: 483400 - DNA, 457 bp, Homo sapiens
gctgttcagcagggattagaaaccagacgaatggctcaagaatgaaaaacaaaaagcaaaacccaactttacaataaattggaaccagaaaccacattatacggtgttaacacccccagtgtgccagggaagggtgtgtccttttacaatccagagaaaacctgaccaaaatatatccttgggcagcgacagagtggttgctcrctgagatgctggagacccccatcaggagcgggggttaccaagcccaaaactgctcagaacatgcccaaaagaaccagggccaggttcagaaaaatatggaccccaggacccggtgagatgacttttgaatcaaagttgaagttggagtcaaaagccgcggcgtttccacccagaccggggccccactggtccctacagaacatcagcgttggccctgactggtccacactgaatgaggaatcgagtccagcca

SEQ ID NO: 483401 - DNA, 557 bp, Homo sapiens
gctgtggccctgagcctggaacacaggacaggccagttttgctggcagggaggtaggacccaagtcagggctagggtcttgggcgcctattaggacagtctccaaaggtggcaggggcctgggggagagactgagttgggactgaccacctggtgccttgaagccctaagaaggaacaggaagcggccaggcgtggtgactcatgcytataatcccagcattgtgggaggctgaggcgggaggatcacctgaggtcaggagttcgagaccagcctagccaacatgatgaaaccttggttctattaaaaatacaaaataattagctgggtgtggtgatgcatgcctctaatcccagctactcgggaggctgaggcaggagaatctcttgaacccaggaggcagaggttgcagtgagccaagatcgtgccactacactccagcctgggtgacagagccagactccatctcaaaaaaagagaagcaggaaagcaccaagagatgggaggcccctagacaactcgagaaggtagggctcaaccctttgttgcacaaggctg

SEQ ID NO: 483402 - DNA, 345 bp, Homo sapiens
cacctatgttttagttggaacctaacactgcaccccttcccakctgcaagtggtgacctcaggaatgtcacttccccctggggggctcagttgcatcatctgtaaaatgggtcatcgtcgtgaattacacaaggaaggtacaaggaagtgcctcgaatacacaattggatttgctctcaggagaaacaggatactctgtgcccaagaaagattagccatctttcatggcgtgccttcgttcaaccaacacttgaccttgactccgccccttcttagcatccagctaagtgcagagagaggcagaaacaaacacccctgggctccagatctgccacactgggaaaa

SEQ ID NO: 483403 - DNA, 412 bp, Homo sapiens
gctcagacttcagagctgacaaggtctgttcttccaccctgttcctctagacacccctgccatgtcagggggccgaggagccctttcagaaagtgttaagccaagagsgctgcttggaggagcatcagataagtctgagggcaaatctgcctctcagccttttctataaaatgggctcccaagcgcaaatacatcagcaagcctcaaaaagaggaacattggcaacctctgtttactgcctgtaacagcccatcccaggcagggccccttgcacaagactctatctggaagcagaactcacattccagcctcacggcagcaggagcctcatttcccaggtgctttgactactcattaaccaggaggaagtcccgggggaaggggaaggggctgggcccagaggccgttccca

SEQ ID NO: 483404 - DNA, 481 bp, Homo sapiens
aatgaataaaaataaatccaactaaaatatggattctatcagtaacctcaagaaaatcaggaagttttggctctttctcaaataatggaaggagcatagaactaargtgtatgtgagtaaatttatcttttaatcccagcctggcactacctagataaccttggtccagtaacatggtctgatgacttcacctgctgaggaatcaagtgcttctttcatatttattttgttgtgttgtaattttttaaatcacttttaacttcaaaacatttcttcttctctggatacaatgtatttgcttctgttttaccctaatttctaaatagttgatttaaattcactccgacttaagtattagaattgggcaagactgaggaaaagagaggcagacaacggtcaaagtgcaatgacttaaaaacatactacaagtctggaatctgtcctaaggacagtgggaaaccagctaaagattttaagcaaa

SEQ ID NO: 483405 - DNA, 583 bp, Homo sapiens
ttggccacatttgcaaagattccattctctagaggagtatggtttttttcttgcacagaaaggcacatgccacagctgagaattagaggaaacccacagaggttaattaggtacccaatcttaatgcaattttcatgctcaggccacaatttaacccatctgaaagttgcttaattaagctggtaagaaattatcctgaagacatgggctattgctatagtcttgtaatagcaagtgagattaatttccatgtttgttgaccataaactgttgtttatgcttataatgaagaatttgcaactagttgcaacaactttgcaaatagtagtgtactcccatatttaaaaaaaaaatctaaaaatcagtcagcttccttctgtctttggggaaaagaatatcgactactttaagaatcacaaaatcactcactcagtatcraactgaaaaatcagagagacgcctaaagaaagagatgctttaattttttatcttagtaatatctgtcttacacaaaaatgagctaaatatctctgcttttttacattgtcttatgattttgctttattttctttttgattttggt

SEQ ID NO: 483406 - DNA, 587 bp, Homo sapiens
ggctatttttataactaaagtttggttagaacacatattgcctgtggctgctttcacactgcatggaaaaaatcaggtccctgtgacagagaccatatagcctgcaaggccaaaaaatatttactatctggccctgtatggaaaatgtttgccaattcttacactatttattgcttcgtgtgtgtgtgtgtgtgtgtgtgtgtgtgtgtaattctgattaatatataatatatattttattatgtatacatatatatttaattcactcaacacattccggcttcaactaagcactcgcttcctgccagacatgaaatcaaatgctagatatataaagaatacagcactgttcctgcccctcaaggagtccagagatgaaaatagacacctaaagaaacaattacaacaagcaggctcagctcctgtttggaagccagggtgttataagtggatgaatgaatgaattacaatgtacaacaaagtgcaggaattgaagcgcaaggaaacccccacgtaactccttagatgggstccaaaaaaacccaatcatgtaaaatgtgggcttgtgagattgcaacattaacaaa

SEQ ID NO: 483407 - DNA, 515 bp, Homo sapiens
aacttacatgaataggttagtgggagttgttctcaatctcagcttttcagtctcctggagcagccgaggctctgtttctcacgttatgattcagcaggtttaggracagggtctaagcatcagtatctttataaaactttccacataaccatgatgctgaaggttgcagaatcacaaacatgagtcgagagaataggcttatggcggagggcttctgcctgacaatggttagggcaaagcccagcagggcggggccctctgactagttgtgggtggcatcctccatctgatgccctggcacctctgcctctatttgattgacaggtagcaggaaatatacaggaccaacctagaggtcagcttgcctggttgtcaccccaaatcctctccctcaggagaatgcatgtgaattccttgtgagaatgtttcaaggtacagtagtcactatggacttcctgtggaatggactgtgcaagaatggcctattgcaggcagaaatgtggaatcccagacag

SEQ ID NO: 483408 - DNA, 637 bp, Homo sapiens
gcatgtgtgtgaaagtttgagaagcccctttccagagcagtttgtcaaccttttaaaatcagggaccccctatgaagattcacataaaatgactgcctccttcttcaatgtggtttaaaattcaaaataaaatgaataaaaacaagtcaaagtaaaggtcaytctgaagatgctttttcaaactgcacacgtacctcccttctggctcccacttacaatatgtgatgcaagaaccactctccatgactccaggaagtcaggattggggaggcacatccccaggtaaagaatgactgacagagagctacagccccactgtgcagatggcatgtctgtagcccagagaggtgcttccctagaagccccaacttctgcactggtgcttcctgagacagggaccctcagttctagacagacacaagtgttagaaatgacttgaagtttgtttccctggaatgtacatttcacagcctgagtgccaccatcttatgtcagcttttgacaacagtcgtcatttcccctaagagtctccttccttcaagtgaacagcctgaagtcctcaagatccatcttgcaacataaagtccttcctcatcctggtcattctcccgtggtcccacttgagtttgtcaatgtc

SEQ ID NO: 483409 - DNA, 637 bp, Homo sapiens
gcatgtgtgtgaaagtttgagaagcccctttccagagcagtttgtcaaccttttaaaatcagggaccccctatgaagattcacataaaatgactgcctccttcttcaatgtggtttaaaattcaaaataaaatgaataaaaacaagtcaaagtaaaggtcactctgaagatgctttttcaaactgcacacgtacctcccttctggctcccacttacaatatgtgatgcaagaaccactctccatgactccaggaagtcaggattggggaggcacatccccaggtaaagaatgactgacagagagctacagccccactgtgcagatggcatgtctgtagcccagagaggtgcttccctagaagccccaacttctgcactggtgcttcctgagacagggaccctcagttctagacagacacaagtgttagaaatgacttgaagtttgttyccctggaatgtacatttcacagcctgagtgccaccatcttatgtcagcttttgacaacagtcgtcatttcccctaagagtctccttccttcaagtgaacagcctgaagtcctcaagatccatcttgcaacataaagtccttcctcatcctggtcattctcccgtggtcccacttgagtttgtcaatgtc

SEQ ID NO: 483410 - DNA, 375 bp, Homo sapiens
ctacctccctgtaatggggctaggcagaacccaaggatccttgcccaygagcacaggctctgtgatcctctaaggccacggttatgggaggtggcacagctgaagcatttcatggggggcccagcctgcagccactgcccatcccccaagtattatgtgtgggacacaaaaggtgctgtgctcccattttgcttcaaaatctacaccctttgggatttctaagagtcctgtgccctcgctcccttgtagcagcagttagacacccagacgagggagatggggagggctgggagacactgcaggagggagtggagtgggaaagaacactgattctcgctgtcaggggcatcacagctagcaaggcaggctgtcctt

SEQ ID NO: 483411 - DNA, 375 bp, Homo sapiens
ctacctccctgtaatggggctaggcagaacccaaggatccttgcccatgagcacaggctctgtgatcctctaaggccacggttatgggaggtggcacagctgaagcatttcatggggggccyagcctgcagccactgcccatcccccaagtattatgtgtgggacacaaaaggtgctgtgctcccattttgcttcaaaatctacaccctttgggatttctaagagtcctgtgccctcgctcccttgtagcagcagttagacacccagacgagggagatggggagggctgggagacactgcaggagggagtggagtgggaaagaacactgattctcgctgtcaggggcatcacagctagcaaggcaggctgtcctt

SEQ ID NO: 483412 - DNA, 553 bp, Homo sapiens
ctggtgttgtgtctggtacatggaggaccagctacgtaatcagcatctagtacacaatgaaaaggcagggcccctggttaaaatatgattattaatttcaagaggtcaacagaagagcattaaaccaagctcagggttcttccctgagcagggccctgtatgactgcataggtcagatatctatgaagctggctctggctacctgttagatacttaattatttgtagttgatgtgtggatgcccccaragagtctatcctcaacttaggaagtctaaatatctgggttgcataaacagcccaggctcccggattctgtccttaataaggacattgaagaagaggctttggaaggtcctccccaggtatggccagcctctctgatgcctccttctggtttgagtggccccagatgttccactttcccctaacagcccattaaggccccataagccaagacttatctaagtccttttgtgtgaatccaggagaaaagctgcatagaaatcctcttacagttaatccctttgagaataggggctaaatctacaaga

SEQ ID NO: 483413 - DNA, 553 bp, Homo sapiens
ctggtgttgtgtctggtacatggaggaccagctacgtaatcagcatctagtacacaatgaaaaggcagggcccctggttaaaatatgattattaatttcaagaggtcaacagaagagcattaaaccaagctcagggttcttccctgagcagggccctgtatgactgcataggtcagatatctatgaagctggctctggctacctgttagatacttaattatttgtagttgatgtgtggatgcccccaaagagtytatcctcaacttaggaagtctaaatatctgggttgcataaacagcccaggctcccggattctgtccttaataaggacattgaagaagaggctttggaaggtcctccccaggtatggccagcctctctgatgcctccttctggtttgagtggccccagatgttccactttcccctaacagcccattaaggccccataagccaagacttatctaagtccttttgtgtgaatccaggagaaaagctgcatagaaatcctcttacagttaatccctttgagaataggggctaaatctacaaga

SEQ ID NO: 483414 - DNA, 553 bp, Homo sapiens
ctggtgttgtgtctggtacatggaggaccagctacgtaatcagcatctagtacacaatgaaaaggcagggcccctggttaaaatatgattattaatttcaagaggtcaacagaagagcattaaaccaagctcagggttcttccctgagcagggccctgtatgactgcataggtcagatatctatgaagctggctctggctacctgttagatacttaattatttgtagttgatgtgtggatgcccccaaagagtckatcctcaacttaggaagtctaaatatctgggttgcataaacagcccaggctcccggattctgtccttaataaggacattgaagaagaggctttggaaggtcctccccaggtatggccagcctctctgatgcctccttctggtttgagtggccccagatgttccactttcccctaacagcccattaaggccccataagccaagacttatctaagtccttttgtgtgaatccaggagaaaagctgcatagaaatcctcttacagttaatccctttgagaataggggctaaatctacaaga

SEQ ID NO: 483415 - DNA, 590 bp, Homo sapiens
tgtcctataagaggtgaccagacacccttctctacttgctcacctccaattcttgcctcagccccctgaattgagggtcgggggtgggggraggtggaagggccttccacagtgaactctgcatactccagggtagcatctgagagctgaagccaggagacactgtgccgccctgatctttctgggcctttaccctgctgacaccactcctggagcctctgaccccaatatctgctcaatctactcccagctctcctgggacctcagtgatggtccctccatgtaagcctcttcctctgcctgccctgggtctctcccaagactccctcactaaccactgccctccccactgaaactgcctctccctgagtgatctcacaccctcctggagggttaactagcatatagtagcgcttaactcctaaatccatcaggagtttctttccaaaaactgctgacttcttggacattctgcacattcctttgccttattgcttcctcctacccccactcccccacatttaataaaatattaactcctgctgatttcactcctatgtgactcaaccctagtctctcccctacatccc

SEQ ID NO: 483416 - DNA, 590 bp, Homo sapiens
tgtcctataagaggtgaccagacacccttctctacttgctcacctccaattcttgcctcagccccctgaattgagggtcgggggtggggggaggtggaagggccttccacagtgaactctgcatactccagggtagcatctgagagctgaagccaggagacactgtgccgccctgatctttctgggcctttaccctgctgacaccactcctggagcctctgaccccaatatctgctcaatctactcccagctctcctgggacctcagtgatggtccctccatgtaagcctcttcctctgcctgccctgggtctctcccaagactccctcrctaaccactgccctccccactgaaactgcctctccctgagtgatctcacaccctcctggagggttaactagcatatagtagcgcttaactcctaaatccatcaggagtttctttccaaaaactgctgacttcttggacattctgcacattcctttgccttattgcttcctcctacccccactcccccacatttaataaaatattaactcctgctgatttcactcctatgtgactcaaccctagtctctcccctacatccc

SEQ ID NO: 483417 - DNA, 429 bp, Homo sapiens
acattgcaatcaggggctgcatgtccgtgccttggtcccagaacagaggaggaaaggagccctggagtccatgctgacagagrtctgtttaccttcatgcccagtgccctgagttacgctccaggtgtcccatttggagaagagaagctagtcaggagccctgtctgagagactgtggcagcttggggttgaagccaggagagcagacttggaaggactttaagctattagcaaatacagcacagacagaggccagaagttctgagaggaactgggattagggaacagtctgagtcatggcctggcagggaagcatgaaggcagccagctctggggagggcactgagaacaagcaggcccaggctggatgcctggctctacctactcgctctgtcacaagatttcatgcttctctgagcctcagtttct

SEQ ID NO: 483418 - DNA, 448 bp, Homo sapiens
gtggtgcaattctggctcacatggcaactacaggcgcacaccacgcctagctaatttttgtatgtatgtatgtgtgtgtgtgtgtatatatatatatatatatatwtttttttttatttttattttttttattttttgtaaagatgggttttgccatgttgcccaggctcgtcactaactcctgggctttggtgatctgcctacctcagcctcccaaagtgctgggattacaggcatgagccaccacactgaggcttcaaatgttttctcctggagattcatgcctttcctgcctttcttcaatagaaacaaggaaggccaaaccttacagacgaagaatgaaaagcttgagtgtgaaccttgagtatattcttagcacactccattagtcacttcagaagaaaaaaaaacctacagggtttggtcagacataattcaattagaccct

SEQ ID NO: 483419 - DNA, 609 bp, Homo sapiens
gaaatatttcataacatatttaataaaatttaaattcatcgtcattttaacatatagtttyagctacaaccgaaggactttctgatcatccctcgtccttagcaacaacgctcttggttttcaccctttttggttctattatttggttgtttttcctgaatgggctacataatctaaatagagatctttttgtcaggaacatacagtttcagtatttccttaggcctcccaaagctcaatgttcaacagcaggtgattagagtaaaaggatagtctaggtgatgtcctcagaatgggtaacttttcttcaattagaaataaaccagttatacattacttaacaaccagcctaaaacgaagacctagaatacttcaagttcttatttcttcctattcacatttttaaaaggcaatgcaactctctaattgaggcagtgttaaagggtagaatttcgtacacggtgtaaatgttctctcaggaatggtgccatttccaatataaaccattcctgatgttagcatccaggatgagctgccatttcccccagcactgttggctttagcaacagcaagctagagcttctcagcatggtgtattgataataagca

SEQ ID NO: 483420 - DNA, 609 bp, Homo sapiens
gaaatatttcataacatatttaataaaatttaaattcatcgtcattttaacatatagttttagctacaacygaaggactttctgatcatccctcgtccttagcaacaacgctcttggttttcaccctttttggttctattatttggttgtttttcctgaatgggctacataatctaaatagagatctttttgtcaggaacatacagtttcagtatttccttaggcctcccaaagctcaatgttcaacagcaggtgattagagtaaaaggatagtctaggtgatgtcctcagaatgggtaacttttcttcaattagaaataaaccagttatacattacttaacaaccagcctaaaacgaagacctagaatacttcaagttcttatttcttcctattcacatttttaaaaggcaatgcaactctctaattgaggcagtgttaaagggtagaatttcgtacacggtgtaaatgttctctcaggaatggtgccatttccaatataaaccattcctgatgttagcatccaggatgagctgccatttcccccagcactgttggctttagcaacagcaagctagagcttctcagcatggtgtattgataataagca

SEQ ID NO: 483421 - DNA, 609 bp, Homo sapiens
gaaatatttcataacatatttaataaaatttaaattcatcgtcattttaacatatagttttagctacaaccgaaggactttctgatcatccctcgtccttagcaacaacgctcttggttttcaccctttttggttctattatttggttgtttttcctgaatgggctacataatctaaatagagatctttttrtcaggaacatacagtttcagtatttccttaggcctcccaaagctcaatgttcaacagcaggtgattagagtaaaaggatagtctaggtgatgtcctcagaatgggtaacttttcttcaattagaaataaaccagttatacattacttaacaaccagcctaaaacgaagacctagaatacttcaagttcttatttcttcctattcacatttttaaaaggcaatgcaactctctaattgaggcagtgttaaagggtagaatttcgtacacggtgtaaatgttctctcaggaatggtgccatttccaatataaaccattcctgatgttagcatccaggatgagctgccatttcccccagcactgttggctttagcaacagcaagctagagcttctcagcatggtgtattgataataagca

SEQ ID NO: 483422 - DNA, 535 bp, Homo sapiens
ctgaggcagagaattgcttaaacctggaggggcggaggttgcggtgagccgagatcacgccactgcactccagcctgggygacagagcgagactccgtctcaaaaaaaaaagaaataaaatgtttcttagcatgcatctcatctgtcacacagcaaatgaagaagtgtctgacaaacaagaaatgataaaatgaaaattacccacattattattacccattattactagctgcaaaatgttactgatattcctcatgagaggctcttatttattagtttatttttctgaaagttttttttaaaaaaggttttcctagggctcccttattatctcaggctcccaaccccatattccctttcaggtcgtaagttctttaaatgcacatttccctaaaatgggattttttcagccatttaaccttgtggttgcagaagagctactctatcttgctgatattggagtattaagtgttgtttgcaaggctgccttcaatgtttaaataaaccagggaagaaggggaggcatgcagattga

SEQ ID NO: 483423 - DNA, 657 bp, Homo sapiens
agacactgtggaccactagacggggagggagtaggttgaaaaactattgtttattatgctcactacctgggtgcactatacctctgggacaaacctgcgcatatatcccccatatctaaaatgaaagttgattttttwaaaaaagaattggatgtccataccctctaaaagtgaataggattattaacaacagacttgtttactttgtgaaggagtgaataggattattaacaatagactaacttactttgtcaaagaaatttacaggacaacttcataatctaatatgcaagagcaacatatttacttaagtacctgcctttgcaacttaaagcattgtctgagaactggctgtaccagcctcacccaggagctgctttaacatgtagtcatctcaggattctccttagacctactaaattagaatctctattttcacaagattgccaggtgattcatgtgcacaggggaatttaagaagcaccgcactatatagtcctcttgtacaaatcactttgttgtgggctttaatcacaaaacatatcttaccaggactgtgttgaccttaccagggttttatttagctcgtgatggatggcattaccttgcttggaacaaaacccgctatgaagaactatttcaaaataattttggtta

SEQ ID NO: 483424 - DNA, 638 bp, Homo sapiens
ctgatattttgggctcttcgagggtggaatggttcctggcccctcttctccccgcaccccccatgccttgaatggagaagaggtggtagatgtgtgctctgggttttaactggaagatgggaagaagcaataatctgtaataggaccgtgctttagaattttcttccttttccggtattaaatagctttactttaatgaccctcagcttctagtttcttttagaaccttcataccagtgctggcaggagtccagctaccaaatcatctctgaatgtggcgttcactaatgccttgtgtgtgctkaagcttgatttgttctttttatgagacttgggaaacaatctgtaagggtgattaaacattgagacaggcagcctgaggcggttggccaggccttgttcttggacagctttgaaaatgggcaacactgggggtcagggacttcccttccagaaagccgcactgtgtgatgaagtttgggaatgtggattcttagcttggggtgcccagagcacggattaaaattttgtgtcaaaggatactgttctttccttaggagacaagattgagagtcagtgtctgggtgaaaataggaggctttggaaaatcccagctcttccacggttcatgctgtgac

SEQ ID NO: 483425 - DNA, 530 bp, Homo sapiens
gcatgctggctggtcctgtcatcatgccttcttcagggatgctgcactctgcatccctaaagatggtcccaggyactccgcaagtcctccatcctcaggtcagtcatgtttcctctcttctcctttcttagggcacagacctttgcctttcatctttctgcaggttggtcatcttcctcacaggcataaaactgatgtctggagccaagctgaacagtagttcacattggccagtgttaaacgtagacacagcacccaggtgtcttatgtggccttgtaaaatatgctgaacacctctctatttagaaaattcctcacgttgtgattcctacactctaagaacagaaaaaaaactatgtttcccagcagactttgctgccacaatgcagacatgtgactcagatgccaccagtcagacaggcgcctgtggactgattcggacaggtgctgtggaaggagacctggggccgccttactgctgcacagtggcagcatctcagttgcagaaggacaatgtgattcggcgggtg

SEQ ID NO: 483426 - DNA, 530 bp, Homo sapiens
gcatgctggctggtcctgtcatcatgccttcttcagggatgctgcactctgcatccctaaagatggtcccaggtactccgcaagtcctccatcctcaggtcagtcatgtttcctctcttctcctttcttagggcacagacctttgcctttcatctttctgcaggttggtcawcttcctcacaggcataaaactgatgtctggagccaagctgaacagtagttcacattggccagtgttaaacgtagacacagcacccaggtgtcttatgtggccttgtaaaatatgctgaacacctctctatttagaaaattcctcacgttgtgattcctacactctaagaacagaaaaaaaactatgtttcccagcagactttgctgccacaatgcagacatgtgactcagatgccaccagtcagacaggcgcctgtggactgattcggacaggtgctgtggaaggagacctggggccgccttactgctgcacagtggcagcatctcagttgcagaaggacaatgtgattcggcgggtg

SEQ ID NO: 483427 - DNA, 530 bp, Homo sapiens
gcatgctggctggtcctgtcatcatgccttcttcagggatgctgcactctgcatccctaaagatggtcccaggtactccgcaagtcctccatcctcaggtcagtcatgtttcctctcttctcctttcttagggcacagacctttgcctttcatctttctgcaggttggtcatcttcctcacaggcataaaactgatgtctggagccaagctgaacagtagttcacattggccagtgttaaacgtagacacagcacccaggtgtcttatgtggccttgtaaaatatgctgaacacctctctatttagaaaattcctcacgttgtgattcctacactctaagaacagaaaaaaaactatgtttcccagcagactttgctgccacaatgcagacatgtgactcagatgccaccagtcagacaggcgcctgtggactgattcggacagktgctgtggaaggagacctggggccgccttactgctgcacagtggcagcatctcagttgcagaaggacaatgtgattcggcgggtg

SEQ ID NO: 483428 - DNA, 530 bp, Homo sapiens
gcatgctggctggtcctgtcatcatgccttcttcagggatgctgcactctgcatccctaaagatggtcccaggtactccgcaagtcctccatcctcaggtcagtcatgtttcctctcttctcctttcttagggcacagacctttgcctttcatctttctgcaggttggtcatcttcctcacaggcataaaactgatgtctggagccaagctgaacagtagttcacattggccagtgttaaacgtagacacagcacccaggtgtcttatgtggccttgtaaaatatgctgaacacctctctatttagaaaattcctcacgttgtgattcctacactctaagaacagaaaaaaaactatgtttcccagcagactttgctgccacaatgcagacatgtgactcagatgccaccagtcagacaggcgcctgtggactgattcggacaggtgctgtggaaggagacctggggccgccttactgctgcacrgtggcagcatctcagttgcagaaggacaatgtgattcggcgggtg

SEQ ID NO: 483429 - DNA, 512 bp, Homo sapiens
tattgggagagtgactgacaatggctcatagcttcactctgagaatgaccctccacgttgaagcatggcccaggatgactcttaggaatacaaaggttggggccaggggcagtggctcacacctgtaattccagcactttgggaggccaaggcaggtggatcatgaggtcaagagatcgagaccatcctggccaacatggcgaaaccccgtctctactaaaaatacaaaaattagctaggcatgatggtgtgcatctgtattcccagctactcaggaggctgaggcaggagaatcgcttgaacccaggaggtagaggttatagtgagctgagatcaygccatcgcactccagcctggcaacacagtgagactccatctcaaaaaaaaaaaaaaaaaaaaaggaatacaaaggtcaggacaactctgccttttatgctccagagcaaaaaccaaaatgcctgacttcatctgagatgacatccttgcttggctctttccccttccttatcagg

SEQ ID NO: 483430 - DNA, 546 bp, Homo sapiens
ggatacaacagggatttactccttcccagttctggaggccagaaatccaggtgtcaggaccgtgctccctctgaaggccctaggggaggacccttccttgcccttctcagtgtcccgtggtgtctggcatcctctgtgtccctcggcttgggacagcccctctctaatctctgcctccacctgcacatggccatcttccctgaatgtgcctccaaaactctctcctttataaagacaccagtcattggacataagccccaccytactccagtgtgacctcatcttaactccatgacatctgcaaaggtccttatccaaatggcccttatcccaataaggtcacattcacagggatcaggggttaggcctggaacgtatctttttcagaacactattcagccagcccacaccagcgcccccaacaggcgctaccgtgcatccttttcatgctgttgtgtaatgatctgttcctgagtgtctccccaagttggcccaggtctttagagatacctggttcatctcctttcccctggggcctcatacagt

SEQ ID NO: 483431 - DNA, 546 bp, Homo sapiens
ggatacaacagggatttactccttcccagttctggaggccagaaatccaggtgtcaggaccgtgctccctctgaaggccctaggggaggacccttccttgcccttctcagtgtcccgtggtgtctggcatcctctgtgtccctcggcttgggacagcccctctctaatctctgcctccacctgcacatggccatcttccctgaatgtgcctccaaaactctctcctttataaagacaccagtcattggacataagccccaccctactccagtgtgacctcatcttaamtccatgacatctgcaaaggtccttatccaaatggcccttatcccaataaggtcacattcacagggatcaggggttaggcctggaacgtatctttttcagaacactattcagccagcccacaccagcgcccccaacaggcgctaccgtgcatccttttcatgctgttgtgtaatgatctgttcctgagtgtctccccaagttggcccaggtctttagagatacctggttcatctcctttcccctggggcctcatacagt

SEQ ID NO: 483432 - DNA, 573 bp, Homo sapiens
ccattatttccatcactatgtactccctcctttgtcaagctcactgaacaagcatcattattacatagtattgaaagtcatagtgtggtttgatttcagaggggaccatttctgcccttgcaggtgggtggcagaaaattgggatgcttctgtggacaagagtggccagaaagagaygccaccctcaactgccaccccagcttccccctaagggagatccatgctgcaacagggtcccaattaccagacccgttagtcaggcaactttctgtaggatgagcacggatgaattatttgcttttagttcaggactggtgaacaagcaacccaccaggaagaaaaatgggacgtccttgaaacttcctgcagaagaggatctggaggcgcattcggcccactgcaaagccacacacgtcggtgagaccaaagaatttgtcacctcagattctttcgttaacagacagattcattatgtaaacaagacacaaaaatattttcataagatgtcagaatggatttcctctccttccccagcaacaatgtgattcttgtttgtgggactgtggggcttct

SEQ ID NO: 483433 - DNA, 332 bp, Homo sapiens
atcacacacatttggttagtttctgggtagctgtgtgtagcatataaacttaggcagttgccccccacatccagggcaatgaactccccgatcatatacaacttagctctggagctagcatggacttccaccttttccagatatgcctccaacctgccagggctaagtctggttttcttccatctcattgcatctcagcctgccatgtccctaacttgacctrtggctctatctgtggatggtgggtaactttgtgatgatcctcttgggcggtatcaaatgctcagtgtgtaaactgtctcctcattgtaaatgtgatcgtctaagaggcc

SEQ ID NO: 483434 - DNA, 524 bp, Homo sapiens
ggcatttgatttctattgttttgctctctggaccttgacttccatgatgccaagcagcagggagcaactgaattagagtctaaaccggcaaatgtggaggactccaaaggaccaaggtagggagggggctcctggtaaccaccgttgctgtttcctttcaggactactgactaatctcccacataaacctgtggccccaagttccagccacctccagaattctgtctttcctctccattgaggatatgagcctgtattcaggggttcctgggcttggcggaggtggttatcgaattagatgatccccgttgacacatcattagataaattaagaatagatgcccagcagagaaaaccaattcatgactcaggccaatgtttycagaacgtgtaacttgtcataaacatctagttttcctgcccttcctgccatctctgagcatcaggtgtgcagtaaaaagccttggacaagacatctgagtgttatgaacccagtgctctggcatcctggtggcccttgaaag

SEQ ID NO: 483435 - DNA, 567 bp, Homo sapiens
atgatgcacaggaccatctgagctgcccatgttcatgccctctcattataccatccgcttctcaccccaaaatcttaacagtaaagtrtagacattttgaatgtgctgtattacagatatagatttatcttatttttaaaaataaataagagtatttaaaaatgcttaggtcaaagcaattcttttgacctaaggtataatacgttgcctcaatggacaaaaactcaagaaatatcttcatggacctccgagtaatgtttaaacttgatgccaatatattaatttttctgccctttataattaaacaacattaacccatcattctgaaattattatttttccctttaatttattgtctcctcatatagctgatcataacaaaaatctgactacatcccctccatggtgttgtttcctggaaatggagcctgttttgttcctatacttctccctgttcagatgctcctgcctgaaggaagagccagctttcaggaagaagggagataaagtgcactcagagggtgattgatgaactgatttgtaatgcaatgtacagaaattgagagg

SEQ ID NO: 483436 - DNA, 574 bp, Homo sapiens
tgcacttcgcactcacccaggattgcagccccgatgaataagctggtcaccacccgaagcagccagaacagcctctgagtcacaaggtaggtgggttaagtaaagagtgccttccttccacatctacccttcctgtttccagacttgggggaggggcgggaattctaaagctgagatcacttggtcaattgaaatcagagtgtctggcacataataagtgcttatgtatttatgtatgcatttatttatttattagagacaggatctcactctcttgcccaggctggagggcagtgatgcgatcttatatcactgcagccactcaagtgatcctcccacctcagcctcccaagtagctgsaactacagatgcacaccatgatgcccagctattttttttttttaagagatgaggtctatactataaacccaggctggcctcgaactcctgggctcaagcaatcctcccacttcagcctcccaaagttctgggattgcaggcatgagccaccatgccccaccagcgctcaatagtgaactgctgaatcaatgaatggggagctttctgcctgggg

SEQ ID NO: 483437 - DNA, 656 bp, Homo sapiens
tattattgatagggtcaagataccagtggaagtgaaaacctagaacccagagtgaaggtgacactgcatttaatcagctttgtggaacaggtccttttttcttcttgactggtcctgggtcagcagggcagccactgtcctcagatgtggttcttctggaatgtataatatgggaggcgactatcagagtgatgcccattgctaaatcactgttctacaaaactggtgatagtcaggattgtttgctaaagtgaaactaaaaaggctgtaagtttgagaagcagatgagatgctggaacgtggccatgttaactccttgttaaataaacttttcatttattaatgataaccaccataccgtagcttggatagcacattaaagaaaacataatgtgttcatttcactgaattgatttatccaaagaaaaccatgttgccttcttcagatggggacattgtggcatgggttctgtgatgagaacatatctgtcttctaatttgaacsctttgggcccctcactagctttggatggttggggcaagtcatttaacccaccacgcctgtttcctcatctgtaaaatgggaatgatagtacctaccacagaactattccagggatttacgtgagttaatgtatataaattgcttagcacat

SEQ ID NO: 483438 - DNA, 592 bp, Homo sapiens
agtgtgagtgtgtgttttgtgttaggagaagctatcagagagagagagagtttgtgtgagagagtgtgtgtgtgtgtgtstgtgtgtagctgtatggtggatatgggggtatatgagggtgtagagcaggggtgtccaatcttttggcttccttgggccacattggaagaatggtcttgggccccacataaaataccctaacactaatgatagctgatgaactttacaaaactgttttttaatttcataatatttttagagagtttacagatttgtgttgggccatattcaaagccatcctgggctgcatgtgggctgcaggttggacaagcttggtgtgaagagtatgtgtgttgggctcaacaccaccacccattgcacgagagctttgttgccatcagatcttacatctccattttcttttcttcctaatgagtcatcagatttctcttgtttgaaagaattttttttttttttttttttaccttcagatctgtctgctacccgattgtccaaagccaaggagattggggctgatttagtcctccagatctccaaggagagccctcaggaaatcgccaggaaagtagaa

SEQ ID NO: 483439 - DNA, 618 bp, Homo sapiens
ttctgttataatttgattattgcagaaggaaaaagcacacacatctagagatagacaagagtacattgttcccctgaggagcatattttggctttaaaatctccaataacaataacagtcatgaaatattgtgctgcctgagagtcatcattgtaatgatcactttgaattattttttgttctacatttacaagagtaagattactatttcaaattatttgaatattttgtgggcttttatataataaatagtctgtcccaaaattatattggtatatactactaatagtcatacataagcgtgccaatttcattgcaattccaccaaattttggtagtataatttttatttgtgcaacatawcaggtatgaaactacattttatagttaaaatataggtaactatgtcctatattttaattttcaccatctgaattactagactttctatcattttccttgcattaattcacaatttgtctaggataacccagggtccccttccttttattctaccaacttttgtccctcaatacaggatacctggagcaagattttacttctgtttggtttctgctggaaaacctagtttggaactgaagaacttcagtcttaaaa

SEQ ID NO: 483440 - DNA, 618 bp, Homo sapiens
ttctgttataatttgattattgcagaaggaaaaagcacacacatctagagatagacaagagtacattgttcccctgaggagcatattttggctttaaaatctccaataacaataacagtcatgaaatattgtgctgcctgagagtcatcattgtaatgatcactttgaattattttttgttctacatttacaagagtaagattactatttcaaattatttgaatattttgtgggcttttatataataaatagtctgtcccaaaattatattggtatatactactaatagtcatacataagcgtgccaatttcattgcaattccaccaaattttggtagtataatttttatttgtgcaacatatcaggtatgaaactacattttatagttaaaatataggtaactatgtcctatattttaattttcaccatctgaattactagactttctatcattttccttgyattaattcacaatttgtctaggataacccagggtccccttccttttattctaccaacttttgtccctcaatacaggatacctggagcaagattttacttctgtttggtttctgctggaaaacctagtttggaactgaagaacttcagtcttaaaa

SEQ ID NO: 483441 - DNA, 609 bp, Homo sapiens
ccacattctccagactctcagcccaagcagccatccccattgtgtgcccatggacttagtcaaccagcattggtgcaaatgaccaagatctcaaagttaagattagtcaaaaatggctttctagccattctctatgcatggaactccagtctgcttgtgtctctaggcaccctcttccttgtggacttaggatctcccattttaatgagacttcttatataaataacatttctaaagtatcagtgaagctttcaaccactaggttatcatagatatgtcctatcttccctcaaagtggctgtctctagtccattgtaataatttgtaataaataaatgtaatgggatcatctattggatagaagaamtttctattgtggagatgaattattaatgcagaaatccacaagcttctaaaacctagcactggcttgggcaaaggtattgtctctatgtgaacacctttaaaaatagaaaagaaatcagtcagtgcctctcaaattgattaatgtatactaatacccattcctccagaatttatgatagtgactctgttatatgggaaaagtattactatcccataagatactgaaatgaacacctacattta

SEQ ID NO: 483442 - DNA, 596 bp, Homo sapiens
actggggcttagggagctgtaaacactcaaccctagatgctgccctgaggtcggagcccaggctccccacgacctgcccgtctgcatgcttcccctaggggtttgagctgcgggcaccgaagacgggagccatacacctgtcacacgccctgcgaggggaatatgggaacttatccagtttcaggaggagggaatgactagctaccaaacaaccaaagccaattttcctgtgaaagggacgctggggcatctgattacttttgttgctataaaggccttggaggctgggcacagtgtggtgtgcttatagcctgcacaacrtggcaggatcctgtctctctaaaaacaagagggggtgctttggtgaggatggaaaattctgaatagctctgccttgatgtcttctgctgtcattacagcaaaagtggtctggggtgtcactcaaacagaaaactgtcttgtttgggacttgagaagatttttggtgccttcaccaccagaaaatgaggaagaaggagcaaataagggaggaacgccaggcactgagggccgagggccttcacggcctgcactgttctgccgagcagggctgtgcg

SEQ ID NO: 483443 - DNA, 596 bp, Homo sapiens
actggggcttagggagctgtaaacactcaaccctagatgctgccctgaggtcggagcccaggctccccacgacctgcccgtctgcatgcttcccctaggggtttgagctgcgggcaccgaagacgggagccatacacctgtcacacgccctgcgaggggaatatgggaacttatccagtttcaggaggagggaatgactagctaccaaacaaccaaagccaattttcctgtgaaagggacgctggggcatctgattacttttgttgctataaaggccttggaggctgggcacagtgtggtgtgcttatagcctgcacaacgtggcaggatcctgtctctctaaaaacaagagggggtgctttggtgaggatggaaaattctgaatagctctgccttgatgtcttctgctgtcattacagcaaaagtggtctggggtgtcactcaaacagaaaactgtcytgtttgggacttgagaagatttttggtgccttcaccaccagaaaatgaggaagaaggagcaaataagggaggaacgccaggcactgagggccgagggccttcacggcctgcactgttctgccgagcagggctgtgcg

SEQ ID NO: 483444 - DNA, 560 bp, Homo sapiens
atatgtcaaagctcccaatattgacttaccaactcagtgcaataccaataaaaagcctagacatttgtttgtctgtttaactcacaggctgattctaaagtgtctatggacatctaaaagaccaaaaatagtgaagtcagtcttgaagaagtagaaccaacctggagggtctgcttgaccagatgccaagacctatttcagaactgtagtgataaagacattgtggtgctgacaaaggatagtaactagactggtgactaaaatgcagagtccaggagcagaactgtgtcagttgcctatcgctgtgtgacaaacttcctcactacttatctgggtcagaaattcagaacaacaacaggggcagtccactttgctccacaatgcctggtccttccctgcaatagtccaaacatcagagaattggctggaacaactaacggcartgatgtatctagggcttcagttcttgatgtcagtttttctcttcacttctctgggtggctaatctgggatgcctcctagcgtgatgttcccagggcagtcagacttttcatgcaaca

SEQ ID NO: 483445 - DNA, 396 bp, Homo sapiens
aaattaatatcagccttttgggtaaatatttattttataattcaataacaaggtctaattgaacagggtcataatgagataaatttatagataggaaaaaaattagaaatcagaaaattatcccccccatcccacagtagtaacaaaaattcacagtttaaaatatgggtaaaacttagtaaatatmatagtcctctttcaaattcacataaagccttagtttctaccaactatccttatcaatacaccagtattgtcatgagcccaacagaatccttcaaaaagatagtcattataatctccaaaccaaagctcaatgagattaagtgatttaagcaagtttacctggctactaaattatgctcctaaaatttggcttcagaattttgtactcca

SEQ ID NO: 483446 - DNA, 603 bp, Homo sapiens
agcaatttcttgttcagagatacagatatatgtaatctattgcaatggttattaacacaacagtctaaaaagtggtcacttctggcaagagtggtggccgaggaggacaattttggcagggttactcagagccgttcaacggtgttcrtaatggtgtaatgcatgatagttacgttggtgttcattttattattttttatagtatatgcacatatttggtactattattatatattaattataatatgtgttataatgtgtgttaaaacttctatagataaaacatatttcacaattttaaaatatctttttttacaaaggaagaaagaatacacagaaatggatgatatttgaaattttaaaaaatcacttgataacctattgaaattttataggaaaaagataatgatgtcttgttctgttggagacagaaaagaattaattactaaagaaatatgtagggtttttaaaaaattgacagtgtttgtttgttgttttcatattgtgattgaggctgtgttttaataataatttctagtttattaacttgtccaacttagtggattttgaaagcatttacaagaatattgaataagtatgttg

SEQ ID NO: 483447 - DNA, 608 bp, Homo sapiens
ttataaacagaacagcagggttaattgtagaaactgtttttgcaaaacagtcaagtgtagcttgttcaagctgtgggcctttctttctacacctcaactctgaaatacacatacacacctacccttcccacacacaggcaggcaacacmaacacgcatatttactttgggggtggctacatgtcggaagccctattaatggatcctttagctcagagctgcttttcctcacaatgcagataaagtaatagtgtaggaggttactcattaaaagttcacgtctggaaatatttacatctctactgggggaaaaatctgtgtgtaaaattcaaacagaagccataaaaaatccacgctatgcatagttacataaagcttctttgtttaaaagttgattcacttacatgatctggtgtaactttaatatggtgacagatatttttgtttttattttatggctgaataaattgagattctgcttgataaagtcacttttatagttggttttgctgatgacagaccttgagcctttacctgctgccccacctctagggtagtttcaactccatatagctattcaacatcattaaagagtgatgtcatattagt

SEQ ID NO: 483448 - DNA, 525 bp, Homo sapiens
tggaaaaaaagtgctgctgctggtgaaacctctgtgtggaaatttctgacattgggggagcccatagtgcctggtggaccttgtcactgctgctggagggatcaccaaaaagaatgaccgtaaaagatgagtagcttgtctcttctttacatcttttaatatccagacagcacttctcattgctgaaaccaaattcacaaaggaatctggaaaatgtagttttaattggtctaattctctgcagtacacagatgagctcagaagaaaggaaataagttaagcacaaatagataaatgtcaagctgaacattctagtgacatttggtacaaaaatgctttttcctccaacatctctgatcactcccttcaatctccttgctagaatactctttctcttaaatgttaattattaaatattatgaagattattacatatattacatattaatattatttaaagtcttgtactctactctcttctrttctactcagtgggtgatttcatacactccatcttgatccccc

SEQ ID NO: 483449 - DNA, 534 bp, Homo sapiens
agagaattaattttatagttttctgccaatttttcatttcccacctctcccccatagaaatgcggtgtcttagttacacactagatgaataaaatgagcacatagcctactgttcagagctgggattgtggtcatcttctgccctggaagataggcaaggactaattaggcatgtgtctcttcccatcaagttttgacaacctggaagtttggtggtagcataaggggaggcctgctgacagggctctttggtagaagggactgtttaagaggctgggagccttaacaaataggcatctggcattatttgtcctgtcgtttatttcctggatctcctacattagtgctattccaatctggctgatgatttgattcattggggaaactttcttttttaaaatgtgtgtggtctcaacctccactttgaactktagtgaataggaatttctcgggatgggtatcaataatctacattttcaaatatgcttttcaagtgtttctaatgaccatccacattttgcatccataatttga

SEQ ID NO: 483450 - DNA, 392 bp, Homo sapiens
atgatgagagggcaaatgtctgttgcratggaatcccatctgaggcttgaatgaagggaaggagttggccatgcaaagacttagagaaaagctttccagacaggacaaagggcagaatctgaacaggcttagtatgtttagatgacagaaagaaggtaagtctggcaaaacttactgaggttgggattgggttggatgagcagaggagaagcagggagcacgttatgcagttcttggaggtctttactgtaatttcatatacagggatttttgctaagtttgtggaatgctttatctcatttaatcttttcaacaaatctggatattattaccccttcttttgcagacaagtaaatggaggtttagggagtttaaataacttctgcaagatc

SEQ ID NO: 483451 - DNA, 674 bp, Homo sapiens
  misc_feature (1)...(674): n = A,T,C or G
tgancaagcaaaaggaaatgtcaatatgatttntggttttggttttgttttttaaagagagggagtcttgctctgtcacccaggcttgagtgcactggctcaatcacagttcactgaagccttgaccttccaggcttaagtgatcctctcgcctcagcctcttcagtagtttagactacaggtgcaagccaccacgcccggctaattttttcattttttgtagagatagggtcttgctacattgcccaggctggcctctaacttgtgggctcaagcgatcctcttgcactggcctcccaaagtactgggattataggtgtgagccactgtgcccagcctcaatatgaattttataaaagtccaaatgctctgcatgtggagaactttccatctacaaaaaatcgttctgccttaaggtgtgcaaagaagtgaggccagaactcatttcagaaacagattaagtggasaccaaaggatatttaagcttcagaagggaaagaagggttatcaatgaacggtagctgagatcacaggccccttatctgcaaagagagagaatctgtgataagctgtagtacaaaccagaattcatttgaaagataagatgcataagatgcagaagctccagggccttacttagatgcagcctcatttcctttgtaccctgccaccca

SEQ ID NO: 483452 - DNA, 674 bp, Homo sapiens
  misc_feature (1)...(674): n = A,T,C or G
tgancaagcaaaaggaaatgtcaatatgatttntggttttggttttgttttttaaagagagggagtcttgctctgtcacccaggcttgagtgcactggctcaatcacagttcactgaagccttgaccttccaggcttaagtgatcctctcgcctcagcctcttcagtagtttagactacaggtgcaagccaccacgcccggctaattttttcattttttgtagagatagggtcttgctacattgcccaggctggcctctaacttgtgggctcaagcgatcctcttgcactggcctcccaaagtactgggattataggtgtgagccactgtgcccagcctcaatatgaattttataaaagtccaaatgctctgcatgtggagaactttccatctacaaaaaatcgttctgccttaaggtgtgcaaagaagtgaggccagaactcatttcagaaacagattaagtggacaccaaaggatatttaagcttcagaagggawagaagggttatcaatgaacggtagctgagatcacaggccccttatctgcaaagagagagaatctgtgataagctgtagtacaaaccagaattcatttgaaagataagatgcataagatgcagaagctccagggccttacttagatgcagcctcatttcctttgtaccctgccaccca

SEQ ID NO: 483453 - DNA, 674 bp, Homo sapiens
  misc_feature (1)...(674): n = A,T,C or G
tgancaagcaaaaggaaatgtcaatatgatttntggttttggttttgttttttaaagagagggagtcttgctctgtcacccaggcttgagtgcactggctcaatcacagttcactgaagccttgaccttccaggcttaagtgatcctctcgcctcagcctcttcagtagtttagactacaggtgcaagccaccacgcccggctaattttttcattttttgtagagatagggtcttgctacattgcccaggctggcctctaacttgtgggctcaagcgatcctcttgcactggcctcccaaagtactgggattataggtgtgagccactgtgcccagcctcaatatgaattttataaaagtccaaatgctctgcatgtggagaactttccatctacaaaaaatcgttctgccttaaggtgtgcaaagaagtgaggccagaactcatttcagaaacagattaagtggacaccaaaggatatttaagcttcagaagggaaagaagggttatcaatgaacrgtagctgagatcacaggccccttatctgcaaagagagagaatctgtgataagctgtagtacaaaccagaattcatttgaaagataagatgcataagatgcagaagctccagggccttacttagatgcagcctcatttcctttgtaccctgccaccca

SEQ ID NO: 483454 - DNA, 674 bp, Homo sapiens
  misc_feature (1)...(674): n = A,T,C or G
tgancaagcaaaaggaaatgtcaatatgatttntggttttggttttgttttttaaagagagggagtcttgctctgtcacccaggcttgagtgcactggctcaatcacagttcactgaagccttgaccttccaggcttaagtgatcctctcgcctcagcctcttcagtagtttagactacaggtgcaagccaccacgcccggctaattttttcattttttgtagagatagggtcttgctacattgcccaggctggcctctaacttgtgggctcaagcgatcctcttgcactggcctcccaaagtactgggattataggtgtgagccactgtgcccagcctcaatatgaattttataaaagtccaaatgctctgcatgtggagaactttccatctacaaaaaatcgttctgccttaaggtgtgcaaagaagtgaggccagaactcatttcagaaacagattaagtggacaccaaaggatatttaagcttcagaagggaaagaagggttatcaatgaacggtagctgagatcacaggccccttatctgcraagagagagaatctgtgataagctgtagtacaaaccagaattcatttgaaagataagatgcataagatgcagaagctccagggccttacttagatgcagcctcatttcctttgtaccctgccaccca

SEQ ID NO: 483455 - DNA, 676 bp, Homo sapiens
ttaatgattttattttgtcattacttgtctactatttaccagtggcgtgaactgggcaaggcagccaacctctgaaagcctcagtttcttctcccgttaaacagggacctattatgtctgtatagtaggctgaacctataattgttagtaaaccaccttcctttttgcccagaacattataggcttttgacatgatctaaaaatgtaaaaagttatctgagaaaatgcccattttctgggcaggaggtgaacctccctggtcagtgtggcacaaagaaaggctcagtagcatggaggaatgttagaaaaatsaagtacaggtgaatttggacactggcagaaaggcagcaaaatggggacaaggaagaactgtctttggtgggtccaggtgtagagtcttttcagcagagaccaaagagagaccagattagggctggcagtcaagcaccaatgggcatgcatctacctctgagacaacaggagaaataggtgttcccaaatcctcgggccttcggggattgacctatctggtaagatccaaataaaataactcagtcctccctctcatataattgcagaaagtctagtatctctacaatgtttatcagggtacagggagagggggaagctttgtctttagtgttcatcacctcctactgtgctcaattctccaacc

SEQ ID NO: 483456 - DNA, 598 bp, Homo sapiens
ataagaggccctagagctcagaaggtgggctttttggattttacaattcccttgccacccttagcggaaggaggagtgaaataaagtttaaaatgtgtctttatccttaaaagaccgcggggtctgggcgcagtagctcatgcctgtaatcccagcacttcgggaggccgaggcgggtggatcacctgargtcagaagttcaagaccagcctggtcaacatggtgaaactccatctctactaaaaattagccgagtgtagtggcaggcgcctgtaatcccagctactcaggaggctgaggcaggagactcacttgaacccgggaggcagaggttgcagtgagctgagatcgtgccaatgcgctccagcctgggggacaagaatgaaactttgtctcgaaaaaaaaaaaaagaccaccggaagtgcctttgttttttctgttgtcaactcagccctagacaaagtctggactagaatctttaaggccttagcttcatacattgaactgtttcccccaaactctctaaatagaagtaggactctgagtcctctgaacagtaagaacacttgcagttcagacctatggaactggggcctgc

SEQ ID NO: 483457 - DNA, 614 bp, Homo sapiens
actctgttgcccacactgaaatgcagtggcgtgatcttggctcactgcaacctctgcctcctgggttcaagcaatcctctcacctcagcctctcgagtagctggaactacaggcaggcaccaccacacccagctattttttttttaattttttttttgtatttcttggtagagacagggtttcaccatgttggccagtctggtctcgaactcctgacctcaagtgatccgcccacctcagcctcccaaagtgctgggattacaggcatgagccaccaygcccagcctgcctccagctagctcttgccatctttcccccaattcttctgccaacttccaatccactatctaacctagaatctaagtcatattttaacaacacaaatctttcagtctcctacttaaaaatcacccacagacttaatatctttccagcatcctcttctcaccatcttccctacacccagtccgctgcactgaatgaaatgctattcatgaggaagacctacgttttcatacacacacctccaggtctctgcaactgctatttgttccaccaggaatgtaattcccctcctttactgcctgccaaaattctactcatccttcaaaatc

SEQ ID NO: 483458 - DNA, 612 bp, Homo sapiens
agctacacagaaaggcaacccagaaatctggcatgcgagcaaaaggttaaggatttcttaccagccaggcttctgacctgcttctctgtgcacaccagttgagtgaaatggtaaagataattgtttgtctcaaggtctatgacccctataagcctgctgtttggcagacttgtcagttacaaacgttgctgcaggtccttgaaacaaaaactggacgaggtttccctttcatcttattttatgtctttgagagcttgaccttatgaccatggtgggggaccctctcttgctatctagcatccagaaggggggaattccgaggctcatgtcaggtagccagtctgaaaggacctggagactgagacacataagcacacgttctttgtcccaaacgtgtcaagcacttggggatgagttctgtcttaaaaggtcccaccccaaggggcttttgtcatcttttgctatcttaaatctattcctgagagtaaattcttggggaccatggagatgcctcctctaccccctctctagaaataccatttgcttatattataaaaacctgaaaaattaccatytgagccttaaagggcttttggattgagtagctattga

SEQ ID NO: 483459 - DNA, 591 bp, Homo sapiens
gggtttggattcacacgtttggatctaattttacttcctattctagctcctatctcacgggaaaataaatatgataatgtatgtcaaagcagcatacacgtagcaggtattcagatagtgtatgacgtttacctttcattcagtgccataaagttcacttcttttttaaaaaacaaggtaaaaacagtatttacttctttctcaggaatatataatgagtccttgcttaccgaatcttgtgtattcaaaatcatgttcaagtgccttcacattcaggttacctcactggttttatttcccwctgtggtccatttgcaactttaagccatcaggctggggtgttctttgtcttaatgacactacacctgttaataaaaacgatagcagtggcaacaataacaatgactactgatggattcttatgatcagacattgtgctaaattgtcctgaaatcatctgtgacatggtttgggtctgtgtccccaccaaatctcaggtgttcctgtaatccctaatgttggaggtggggcctggtgggaggggattgcaccaggggcctggtttcagtttcggatggattaacaccctcc

SEQ ID NO: 483460 - DNA, 683 bp, Homo sapiens
gtggcttaaaacagcagtgactccctcgcagtcctggaggccagaagcctgcaaccaaggtgtgagcagggccaggctccctcagatgcctttgtgggaggatcctcctttggtggcagcatcactccagcctcttctgtcttctgtctatgrctttgtctctcctcctctcatgaggacaccagtcatcttagatcagggctcatcctcgaggcctcatctcaacttcattccatctataaagaccctgttccgagtcagatcacatcctcaggcatcaggggttaggacacgaatgcatcttgttgggtaacacacttcaacccatcacaggggcacaactggtggtgtgggcagtgtgggccctcagctttcatcccttctcaggccagggctgctgcatatttctagctgcagttgtttgggatggcagaggggctgcctgactcccgtgtgcattcttccctgtcccattgtggaaaagcagctcttttcctgctggcaaggccatgccctcaccaagacggtggctccaattctcacggctcgtccctggacacgagcagtacgcagcaacaagacaggagccaccgctgtggcagaggggcttggccctcccatcctgcagatcccagagctgcggaggcgggaggtaggatctccttcagttggtcaagaggagt

SEQ ID NO: 483461 - DNA, 683 bp, Homo sapiens
gtggcttaaaacagcagtgactccctcgcagtcctggaggccagaagcctgcaaccaaggtgtgagcagggccaggctccctcagatgcctttgtgggaggatcctcctttggtggcagcatcactccagcctcttctgtcttctgtctatgactttgtctctcctcctctcatgaggacaccagtcatcttagatcagggctcatcctcgaggcctcatctcaacttcattccatctataaagaccctgttccgagtcagatcacatcctcaggcatcaggggttaggacacgaatgcatcttgttgggtaacacacttcaacccatcacaggggcacaactggtggtgtgggcagtgtgggccctcagctttcatcccttctcaggycagggctgctgcatatttctagctgcagttgtttgggatggcagaggggctgcctgactcccgtgtgcattcttccctgtcccattgtggaaaagcagctcttttcctgctggcaaggccatgccctcaccaagacggtggctccaattctcacggctcgtccctggacacgagcagtacgcagcaacaagacaggagccaccgctgtggcagaggggcttggccctcccatcctgcagatcccagagctgcggaggcgggaggtaggatctccttcagttggtcaagaggagt

SEQ ID NO: 483462 - DNA, 546 bp, Homo sapiens
gtttgtcctatgtagaaactaaaatctagaagtatattagaatttctgttctttggaccaataaaaattcatagtataaaacttaagacataaaataacagtgatttcatgtatctgccagtagaaaaccacagttatcattttgtaagaaacaaaaacactacgttttcaaatccaacagtgattcacttttgtttccactcatttgttgcattttattagtgaaatgaagtataaaggaagctgcatttatcgggcaattacaatctacaagaggctatgaaaatgcagtgggaataaaccacatcttttgttttgaaggagagaaaagtatgatrattaattagtgaagagagtgagtgttttgagggtattaaaattatcgctgttaaaaccagacctgactaggttcaaattttgtttccaaatctcactagctgtttaatcttaggcgagttattctccaatctttctgtgcctcaatttccttgttgttaaaatgcatatattcagagaccacagttcatgggattttcttgaggatta

SEQ ID NO: 483463 - DNA, 606 bp, Homo sapiens
agttaattttgtaaaaaaaaaatcgaataatttatgtaggtgcagagaggggtctggaaataaaggcacacaaaaccttcacagtagctgtctccatgcagtgaggtaatagaagccttttacttttttttttgaaaaaaattgcttgtctttattttctcaaacatgcattgctatagtaatgaaaaaataatgaatgttatttttaattaaaaaatactaaagcaaactagctttctctgtgtttaaacagtatggagctatastccatttagaaaggatgtttatttcacagcctctgttgtggggaagtatgtaaggtaatttggaactcagtttccagcgggacctgtcgaggtggaagtcctacaccttgcagcagcatcagagcaccttccagacaccctccccctggcccctacacgcctgactggaaacataatcctggctccataaggtgtgggcttattttatttctcagagcatagttcagcccatttctgagaagatgctgcacacaattccattgtctggatgctctagtaatgtgcctgttactggctatcacttgaggactaagcaattgtgagcacttgccaccaccca

SEQ ID NO: 483464 - DNA, 642 bp, Homo sapiens
tgagggcatcttctttacccagtctactatctcaaatgctaatctcttccagatataccctcagaggcacacccagaaataatgtttaactggctatctgggcatctcttagtccagtcaagttgacacactaattgacaatcacaatggatataacccatgtgtattatataatactttaaggatcatataaagaactattaaatgctctttcacttaataaaattttactgagaacctattagatactaagcactgttctgctcttgtgtgacttacaaaatagtatcactgagacaaaagtaaatacgtaaataaatcaataaatgagttttaaattaaggatatagaacaaggycaagttccagagagggagggttcctgttgagacatgctttagatatcatggttaggaagacctacctccctgactccactgactggctacctgacaccaggtaagctcctctctttcctgtgtttctatttaagtaactataagatgaaataaacttatagaattgttagcacacaatcaggggcaagtagcacacaataaagtattgtctattatgattacagtattaaattttatataattctcaatataaagtttggatatcatcactcccaacaacctct

SEQ ID NO: 483465 - DNA, 604 bp, Homo sapiens
tgaaggccaaaaaaatttcaccttgggtgctaatctgccatattggcttccgattaacccaaattacgggagtgcctctgagatttctagtttatctattgtcctttgtgtaagagcacctatataccaaaactcttgcccttaaatgcaaattcctatccccttcctctgaagcacaagcgcccctcccctaaagtatataatctggggtctggtgggtaatggtgctaggatccacgatcttgtctcactactggccaagacacagacatagcttctgttcataaacccccattaaatgtttctttctaagaaaaaaagtmaagaaaagaaaagctgattaatacactcaaagcaggatatcactaaaaagcaatattcttatttttgaaagtacttttacttttacacttcattttaggaagggctgggagtaatggaagcatgagctttggcatcaagtagacctgtctctttatgagctgcttcatcttgacaaacataaaacaccctcccaatagcactttttcctctgcagctctttcagaggccattttttcttcatactccactcagaaccctgttaaccaacttgggaccaaga

SEQ ID NO: 483466 - DNA, 589 bp, Homo sapiens
ggtaatttgacagttggagaataacacactgcaaatttagagggacaagctctaagcccaggtttttcataattccaacaaaccrtctccagtggttattatgacataacacttctgatgattaattaaaagctcttcattagatcagtcagcttataattaatagctccccctatctttaataaatagaatgatgtgaaataaatgagagcgataccaaggattagctaaagcctaaacccaaatgaaagcaccctctgctctcaaccaaggaggcaaagaaacaaaaggggagggaaaagtgggttttgttaaacaaagatgagaagagagagtgctgaggaggggaatgtgggaaggaaggaggcatttgctcaatcagtacctattttcagaatttccttcaagctggcttgaactgagagccatcaattatttaaaagatgtaacatgatgcttcctttgttgaggcaaatctgcaagcagaccccgagagaaaataaaaaatgaattaggcagaatttattagtgtgcttgaagaaaacaaagatttagctattggaactgactcttttagaaatggttcaat

SEQ ID NO: 483467 - DNA, 610 bp, Homo sapiens
tacaggtgtgtaccactgcatccagctaattttttttttttaagatagggtcctgccatgctgcccaggatggtctcaaattcgtgggctcaagtgatcttcctgacttggcttcccaaagtgctgggatttcaggcacgagtgaacattcctggcctcatttcttaaaaatcaaattgatttggtacagtgtttgggagcacagttttaggtgttttttttcttttaaatagatatatctgccgcttttaaaatatagttaaagactaaaatgttatgactttaagttggtaaagagttcaaatatatattcctctcaacacttctggagcrttaaaaacttgttctagaatctgggaatcagtagtgagcaaaagttgtggaatgaatgggcaaaattccttgtcctcatagagcttatattttggtagaatgagataaactataaataataggaaggagagaaggagggaaggaaggaaagaaggaagataaaagtgcaaaagggagggaaagagagagggacgaaggaactaaaaataagtgtaaaaataatcacgtcttcatgggtaagtgttatgggaaaaataaaactggataaagggaatag

SEQ ID NO: 483468 - DNA, 610 bp, Homo sapiens
tacaggtgtgtaccactgcatccagctaattttttttttttaagatagggtcctgccatgctgcccaggatggtctcaaattcgtgggctcaagtgatcttcctgacttggcttcccaaagtgctgggatttcaggcacgagtgaacattcctggcctcatttcttaaaaatcaaattgatttggtacagtgtttgggagcacagttttaggtgttttttttcttttaaatagatatatctgccgcttttaaaatatagttaaagactaaaatgttatgactttaagttggtaaagagttcaaatatatattcctctcaacacttctggagcgttaaaaacttgttctagratctgggaatcagtagtgagcaaaagttgtggaatgaatgggcaaaattccttgtcctcatagagcttatattttggtagaatgagataaactataaataataggaaggagagaaggagggaaggaaggaaagaaggaagataaaagtgcaaaagggagggaaagagagagggacgaaggaactaaaaataagtgtaaaaataatcacgtcttcatgggtaagtgttatgggaaaaataaaactggataaagggaatag

SEQ ID NO: 483469 - DNA, 610 bp, Homo sapiens
tacaggtgtgtaccactgcatccagctaattttttttttttaagatagggtcctgccatgctgcccaggatggtctcaaattcgtgggctcaagtgatcttcctgacttggcttcccaaagtgctgggatttcaggcacgagtgaacattcctggcctcatttcttaaaaatcaaattgatttggtacagtgtttgggagcacagttttaggtgttttttttcttttaaatagatatatctgccgcttttaaaatatagttaaagactaaaatgttatgactttaagttggtaaagagttcaaatatatattcctctcaacacttctggagcgttaaaaacttgttctagaatctgggaatcagtagtgagcaaaagttgtggaatgaatggkcaaaattccttgtcctcatagagcttatattttggtagaatgagataaactataaataataggaaggagagaaggagggaaggaaggaaagaaggaagataaaagtgcaaaagggagggaaagagagagggacgaaggaactaaaaataagtgtaaaaataatcacgtcttcatgggtaagtgttatgggaaaaataaaactggataaagggaatag

SEQ ID NO: 483470 - DNA, 610 bp, Homo sapiens
tacaggtgtgtaccactgcatccagctaattttttttttttaagatagggtcctgccatgctgcccaggatggtctcaaattcgtgggctcaagtgatcttcctgacttggcttcccaaagtgctgggatttcaggcacgagtgaacattcctggcctcatttcttaaaaatcaaattgatttggtacagtgtttgggagcacagttttaggtgttttttttcttttaaatagatatatctgccgcttttaaaatatagttaaagactaaaatgttatgactttaagttggtaaagagttcaaatatatattcctctcaacacttctggagcgttaaaaacttgttctagaatctgggaatcagtagtgagcaaaagttgtggaatgaatgggcaaaattccttgtcctcatagagcttatattttggtagaatgagataaactataaataataggaaggagagaaggagggaaggaaggaaagaaggaagataaaagtgcaaaagggagggaaagagagagggacgaaggaactaaaaataagtgtaaaaataatcacgtcttcatgggtaagtgttaygggaaaaataaaactggataaagggaatag

SEQ ID NO: 483471 - DNA, 725 bp, Homo sapiens
tctttccattacatcttatttaaaagccattctgtttattaaaataatagttttggatgagaaacaatgaaattcgtagaatgctcatagaataacctttgctgcacaacagactgtctggggatcttcattaaaaagacagatgctgcgatcccatcccaattctgctaaattgaaatctatggaaacaagattgaggtagctgtgttattaacgggttctcatccacagctccaataacaataaaaacctgagaacttttagttccatgactattagggcaggagtgaatcctagggatgaggaaatctatcatccatttgtttcatagtgttaaaactgacccaaagcttagctagcttgcctaaaatcatatgggtagcaaaggaaaagctatgaagaatgtggtattcagaatcctagagaagatcaaaattatttaaaagtatgaaaaaaatgtgatatttgaagaagaraaggggaattaaagtgggaacatgctcacctccagacatttagaggaaaaaaatacctagattgttgatctgcaaatctatgtcttaccaaatagtattttccattaacagagcagggaaatattatccacatctagtgggaaaaactgcaaaggcatggagcaaagggtgttgttgaatgttataatacaggagagaatgtagagctactaacaatgattccatttactacataggggtgtctgaatt

SEQ ID NO: 483472 - DNA, 441 bp, Homo sapiens
gctgagtgagtcatgtgttccctgctggaactctaactgatatacacccatccttatttagtttatttttatgccagsctgattgcacaaaatataacctaattgctcaagctagaaatctggaggtccactcctacttcctcacccatatatgaagtctttatgacctgtttatcccctaaatatctctaaaagcattctcattgctctcttctcttataacttatttggcccaagcctttcaaaatagcctccctatttatcttctaaacatccttcatactgctaatggaatgttctttctataatgaaatctggccaacttatttgcatttcatcagtggttcctacagccttctggaaaggtcagactcattagcaagccaataaagaaagttgctgaagatctggcctgtacctatctttccagcctgattacct

SEQ ID NO: 483473 - DNA, 441 bp, Homo sapiens
gctgagtgagtcatgtgttccctgctggaactctaactgatatacacccatccttatttagtttatttttatgccagcctgattgcacaaaatataacctaattgctcaagctagaaatctggaggtccactcctacttcctcacccatatatgaagtctttatgacctgtttatcccctaaatatctctaaaagcattctcattgctctcttctcttataacttatttggcccaagcctttcaaaatagcctccctatttatcttctaaacatccttcatactgctaayggaatgttctttctataatgaaatctggccaacttatttgcatttcatcagtggttcctacagccttctggaaaggtcagactcattagcaagccaataaagaaagttgctgaagatctggcctgtacctatctttccagcctgattacct

SEQ ID NO: 483474 - DNA, 572 bp, Homo sapiens
ctgtgagacaataacaaaagagctaacatttgtaccatcggatcctcaggagagagaaagtgggactgaaaaaggtattcaaaggaataatggttgaaaaattcctgcatttggtgaaagacagaaatatagagatttaagaagcttaaagaatctcaaatagaataattccaaagaaatccacattaaaacttatcatccttaaaagtctgaaaacgaaaggcaaagaaaaatcttgaaagcagccagagagaaacaatacgttacttataggaaaacaccaatgcaaatgaggacagatttctcttctgaaaccatagaggccagaataaagtggcacatttttcaagcacttgaaagaacagaactgtaaacctcaaattctgtttctggcaaaaatgtctgacaggaatgaaggggaaataaagacattcttagatgaacaaaagstaagaaaactcgttggtagcaaatctattatttagaaaaatggctaaaggaaatagcagaaggcttaacacttcaaaaaggaaagaatattggaattggtaaaagaaataggggtaaatata

SEQ ID NO: 483475 - DNA, 617 bp, Homo sapiens
tacctcttcctctccttcactacttgatgctcctacaggcattaaaaaccctcccccaacaaaaagggaagaagtcgttccctatctgccatacttaggctgacatacagatttcctccttgcattgaggcatgatgcaggtgaatttaccgtcaagctcatgaagcagaagtgtcagagcccctcactttcatagcctcttccaaggtctaaacacttcttccagaagatgtgtttacaatgctatatatttttgaaaatttttcaatgaaaggtattttggtattctcttacttaaagaggactcctctcccaaattgtgtaagcttcccatccctttagggtttccagatttagcaaataaatattcaagatgccttgttaaatttaaatttcagataaataataattttttattattccaaatattacttgggacatactttacttttaaaaaatattarttagacaacaaagaattcttcattactgcaaatattgcatgggacatacttacacacaaaaatttatttgctgttaatctgaaatttaaatgtaactgagaatcctggagtttgtctatcagcagccctctacccatccaaaccaggattctc

SEQ ID NO: 483476 - DNA, 596 bp, Homo sapiens
tctgcttgtcttaataaagaacacttttttctgatactgaatatatttgatcatattcctctcttattttatgttttctgattaaagtgatttcttattgttttaatgagtacatttttaagttcatgcttcctttagatgcatataaccagaatattaatttttaactatatatcaaggtatcagtacagtttggaaaataagtgcaatatttctaagaattcatttataascctcagtagtaaatctatgaatgctgtatggcttgcatgacttcaattagactctaaagcaagcaacacactgttacaaagaagtcattggcaaaacaggataggacttggcacttttgagtatttgtcctcccctttaattgagccaaaaatctataaagtactgtttgatagttatataatattaatgtaacatctgcttcatttaaattttaagtgacattctcaaagtgaacttaaaattgactttagttcattcatacatgaaaaagatagcaaatactatattatctatcatttctttcatttttttcttttctttttttttttaggagacagtgctcaggtgatcttcctgcctca

SEQ ID NO: 483477 - DNA, 596 bp, Homo sapiens
tctgcttgtcttaataaagaacacttttttctgatactgaatatatttgatcatattcctctcttattttatgttttctgattaaagtgatttcttattgttttaatgagtacatttttaagttcatgcttcctttagatgcatataaccagaatattaatttttaactatatatcaaggtatcagtacagtttggaaaataagtgcaatatttctaagaattcatttataagcctcagtagtaaatctatgaatgctgtatggcttgcatgacttcaattagactctaaagcaagcaacacactgttacaaagaagtcattggcaaaacaggataggacttggcacttttgagtatttgtcctcccctttaattgagccaaaaatctataaagtactgtttgatagttatataatattaatgtaacatctgcttcatttaaattttaagtgayattctcaaagtgaacttaaaattgactttagttcattcatacatgaaaaagatagcaaatactatattatctatcatttctttcatttttttcttttctttttttttttaggagacagtgctcaggtgatcttcctgcctca

SEQ ID NO: 483478 - DNA, 332 bp, Homo sapiens
accttttggctatgactaatgctgctgttaggctggagcattcattcccaatcttccccctcactcccagtatatccatacatccactccctgccaggccagtgattacattcttctatctgtggccacaactcccaagagcagcccctttcccaaggctacaggtcttgctggttctgggaacagctctctttccctgcctttttagctctagagatggtactggcctcccattgtttctaattacaacacrtttgccactccttgctgtttcccttaaccctgctcatacctctgtaaaaagtcactgagggaatttaaatgtaaccttt

SEQ ID NO: 483479 - DNA, 490 bp, Homo sapiens
agcacagtggctcatgtctgtaatcccagcactttgagaagccaagacggtaggatcgcttgagcccagaagtttgagaacaccctggtcaacatggcaaacctccatctctttaaaaaatacaaaatgttagcttggcatggtggcttatgcctgtagtcctaggtacttgggaggctgagatgagaggatcactggagcctaggaggttgaagctgcagtgagctataattgcaccactgcactccagcctggacaacacagtgaaaccctatctcaaaaaaaaaaaaaaagaagaagaagaagttcagcccagcaagaatgtagaggatggattagagtgtccaagaggagggactgggaagggacaaagaggaccccactaacgagggttggagagggaggtttaattagagagattttgaggaactaagatgagatgaaatctgaggaaggagtaggagttatkgaggatggtttccaagtttgt

SEQ ID NO: 483480 - DNA, 610 bp, Homo sapiens
atagctagagggcatagctaactccacatgtccacagggctcacccttacttaagcaggcaagttgtacagtaagagtcatagggcattgtatgaagcatttaggaggcctaacaatccgtgaattgtacaacatttcttgcataaaatcactttcataaatcctttcacaacttacacagaccatctgagaccatgtggatatctagcccaactccctggatcccaccagtctctaagttccaagaaggaagaaactttatttgtttttctattttttycaagtgactagcacatgcatgaatgcatgcgggatgctctgtaaatatttgtgaaagaaatggagagaagaaagcaagacaggaaggaaagacctaaagaaaggaagggaagggtagagaagggaagacgactgaagggaaaggaagaagggtaagggagggagtctaagggaaggtatgggagagaagaaggaatgacaagctgccgaccattcaatcaggttacttccagagctgtctgcttccctgaggaaggaagagggtacatttcaaagtgttatatggtacttaagggcttggagctctaaattagctagacctgcgtttaag

SEQ ID NO: 483481 - DNA, 609 bp, Homo sapiens
cgtcagcacagtgcaggggtaggcatcaggaaaggggatgcacgttgctttttagatttgcaagatatgaagaatgagtttatttggggagttatcttagttatcttattatcaagtgagaatgataacttactggaggaaaatcttatttttggaatagttgaatgtttagaagttgttgcttctaataatacagtgaaatactttggactgatggctctgggaaaataacatgtctgtgcttcattttttttgttttgtcttttaatatatatatattctaaagcttgagaaacttacatgtgcttcactgcttgccaacaaaaagacaaccctctgaaacaaatattcttgggtcattctcagattttactttaggagatataaaaaaataaagacaaataayttctaaaacattttttaaatgaataaaacaaggatgaaaccttgaagtcatggagccgacagggctctttcaaagctcaaccaggatatttagttctggggtttataaagcaataagctgaagataatatgaatgggttgtcgggaatccaggactagaagtgaggtttcctaacctgtgactccatgctctgtcttcagagg

SEQ ID NO: 483482 - DNA, 416 bp, Homo sapiens
tgtttctatcacactttttttttcatttgagcttttcaaacttcacatttgttggccactcaacactattacttaatgcattaaaataaaatttctcattcccaaatgagacaaatcaacccggakggactgtaaatcagatggactgtaaagaaaacaaactctcaacagacaggcagccaaagacagccccaaaaaagtacctgcaaatttaaaaaagcgaaagtgtttagcagaggttattgttggtacaggtcttcccaaagagaaaagtatggcacgaattacctgcttcaatcaagcaagctactcattttgacctatataactcataatcaactcaatacttccctatagctatagatcttgattgctgggcccaggtgagttgtggaaataagctatactcgtgtttt

SEQ ID NO: 483483 - DNA, 647 bp, Homo sapiens
ctggaaaagggtgtagcacctgggaaaggcgatcaactcccagtcagggagcccacggtgataacaccagtcagacgatcacaccatggaagggtccaatgagatccaatggaaagacttagaacatctaaggttgggggaggtgcaaccttctgctattcagcccctctgctccaagcggaagcttttttctcaggaggtaatctctaataacaagcagagtgccctctggagcctcctcgctggtatcwcagtgcctggacagagggggacacaccacagcacaaacacgtggcacagactcaatcccaacacacagccagtcaacgagcctctggccccttcctctgggtcctgatacagagctggcagcgagggcctctgaagaggttacagggagcccaagggagtgtcaggtagaggcagcaccaggtcccggagggacagatgagggatccctagtaaacagctcgtggacgcacttgactagcagttcgaaagcaaaaagagattcggattacaagagacttttcccttgcaaatggaagactgtatttaaatgcatattgctttagctgggcagtctccaggaaggagctgattgttagtagaggaattgttatgcaaataattttccctgcagtttc

SEQ ID NO: 483484 - DNA, 645 bp, Homo sapiens
cgggaaggatggcagccccaggcagcccacccaacagctctgtgccttaagaggtggggagggcagaagactagggcacccctgtacccagggctcaggcctgtgacccccagtgctggcaagaggaacgtgggccaggagagttgtccaggtaaaagagatagcagtgggaaacaaaggtctttggctgaagcatcctaggacacctccccaacgaggagaaggcatggctgtgatcacagggagctcattaaagctcaaggggacaccacgctccgggacagggtgtgtctgacatgcaggggtctttgtgggttttctcctgaattccatgtgctccatcctccaaccactttctctttctgcatttattaaaattatgacccaggatcygggtgcagggtgggcgggtgtttatgtgaggtggagaagggctgagaaattcaacgcatcctttttccgagcactactgaaatggggtccttgctcttccatcctcccggtccagattagagaaacttgccaaaaaatctcacacatacatctacatgggcagggaaggagggtgcaggaaagttcctagagcttaagtggtatttgctttaggcagataaggtatttcccatgaatgaggacagaggcagc

SEQ ID NO: 483485 - DNA, 646 bp, Homo sapiens
ggagaagaaaagtagaagacaatgctaagaaactaataacctcttttacaaagtggagtgttgagagtctgycaaaagttgtcttagtcagtttgtgttgctatgaaggaatacctaaggctgggtaatttatgaagaaatgaggcttatttggctcatcgttctacaggctgtacaggaagtgtggtgctagcacctgcttctgatgagggcctcaggaagcttacaatcatggcagaaagtgaaggtggagcaggtgtatcacatggcgagaaaggaagcaagggaggggaggaggtgctaagccatttttaacaatcaggtctcatagtaactaactgagtgagaactagaagagtgcccacaggagggcaccaaaccattcatgagggatccatctcatgacccaaacacctaccagaggcccacctccaacactgggggttcacatctcaacatgagatttggaggggaccaacatccaagctaactcaaaagtaaatggaaatagaaagaaaaggatgagtgtattatttgaagttacaatattatcaagagagatgctagaaataatctaattctcaaacatttcaaagaacagaggcgggaaaggtttggttgtcagggaagcaaatcttctatatgc

SEQ ID NO: 483486 - DNA, 456 bp, Homo sapiens
taaaaagtattaaactgccagcacaacgtttagcacacagtggggaactcaggaaatagtagttataaatactattttaaacaataatgcagctggatagtgtacattctcaattatattagcccatctaaagtaaatcccccatctaagtaatattgggtctaaattcactgagtccaaagtgatcactacaccattacaccattgtaccaattacacaagactggagtcaatgaatgtattgttaagttcttgaatgaacacaggtataaaattattgggttgaaaagtcttaayttcaaacagagaataaaaggatggagaaaaaagactttcctgttatttaaagagcaaacctaaaaattaaaaagacgtaaagaagaaatcaaatggggggaaaaatagcaaccatcccacaatggcatctagaggggatgaataatttacaccagtcgg

SEQ ID NO: 483487 - DNA, 513 bp, Homo sapiens
tgttttcctctgcaagcattgtgattatttcaggccctttctctgtcggtaattcagtttattgccgtgtctgttctattccctgatacatcagatgtaagtgtcaggtctataatggtattgatttgttcttcagtttctttctttaggttttccatcacttcttcttcttcctgttctaatgtcccagcatctcatttctgagttcttgttttgttgaatttgtgatcttattaagctcttttattgaataaatctctctattccgtgagctatggtttcttacagactcgattctctgggtgttcaatgttatattcctttcatcctctcttattttggggggagcgtggtatgtttgcccagggcttgctctgatgtggtgtgggtaaattcttatcagctctcttcccattgtattggagaccacattgtgttcacctctgagctagagtttgaggagactgtgtccatgtttcygttacctgctctcctgggagtggaggtgaatgg

SEQ ID NO: 483488 - DNA, 603 bp, Homo sapiens
taactaagtcttgactggtgctatccaaaattgtagctgctagccacacgtggctactgagcacttgaaatgtggctagtcttaactgaaatgtgttgtgagggtaaaacacacaatggatttaaaacagtacaaaaataatgcaagatatcttattaatactttcttatattgaaataatatttttgagatagtaggttacataacatattgtattaaagttaatttcacctgtttctttttactttttaaaatgtatactagaaaataaaccattgcataggtggcttgcactrtatttctattgaatggggctggactagaagttaaccaaaatgaatttctaacgacattaagtttactgagttcatggcaccatatgttgagtttatttataatccttctataaaatcaataatgaatgatggcttcagtttcctgaaagaggcccctctctaagtgtggtgttaaagatgagtgctaacgggcaggaagtgtgctgggaatatatgcaggcactaggtaaacaaaacagtccagagagtttgggttggaaattagttgttgctttgacatgtggcatgatttatccctttgctactc

SEQ ID NO: 483489 - DNA, 603 bp, Homo sapiens
taactaagtcttgactggtgctatccaaaattgtagctgctagccacacgtggctactgagcacttgaaatgtggctagtcttaactgaaatgtgttgtgagggtaaaacacacaatggatttaaaacagtacaaaaataatgcaagatatcttattaatactttcttatattgaaataatatttttgagatagtaggttacataacatattgtattaaagttaatttcacctgtttctttttactttttaaaatgtatactagaaaataaaccattgcataggtggcttgcactatatttctattgaatggggctggactagaagttaaccaaaatgaatttctaacgacattaagtttactgagttcatggcaccatatgttgagtttatttataatccttctataaaatcaataatgaatgatgrcttcagtttcctgaaagaggcccctctctaagtgtggtgttaaagatgagtgctaacgggcaggaagtgtgctgggaatatatgcaggcactaggtaaacaaaacagtccagagagtttgggttggaaattagttgttgctttgacatgtggcatgatttatccctttgctactc

SEQ ID NO: 483490 - DNA, 535 bp, Homo sapiens
gagtgtcctgtttatatgcatgataccaatacaaactattgttgttgggctgtaatatcatctaacaatagtatttacaacttaaagcgcaacaaattttgttcatccaccacctttcacagaataagattctgtaatttrgcatgtaacttttattgttagttttactgaaagtgtgtttataaattggcaacgcttaaatctatgtttggcattcaaaggcaaaatgggatctaaaatctgaaagaaagcataaggaatattttataagtcaataaagtttgacttcttagatcccagtgtgtataggtaatagcaatattattaattgtatacctagaattttttataactcaaaattatggggtgctcctagatttcacatgggcaaacaatgtgaaaatcagaatatactcagattcttcaaaaccaaatttgtgaagctccttgagaagtggaaaaaaaatttataatagtataattttcacatcattttgacatttcacattggattcttataaccatatcttgagtt

SEQ ID NO: 483491 - DNA, 487 bp, Homo sapiens
gtcccagattaaatgactctattattctcttagtttctgtatctggatttctagtctgcatctgtaataatagttaaaacctctttgtagactgagactcattttgctcttacatatgtgcctcccctggaactgacatgctatgatgtgatgctaccaattccaagaacgcatgtgcttttctatgtagtctgtgagcattaccatccctgcaaccttagactcagatacctttgtgctaatttctagagctatattgattataattccttgcattctcactaaaaattgtctggtaccttggatatcttgttctaactttttagctgtgtctttattcttagtctggattctccagtttcttccccactgtagggctattctaaaattgtttytaagtctgtccacttgtccattagttttcttttttgttttctatgtgggcattccccatgataagacaaaaatataaattgaatatatttat

SEQ ID NO: 483492 - DNA, 520 bp, Homo sapiens
cctatgtggcaaacctgcacattgtgtacatgtaccctataacttaaactataattaaaaaataaatgctgacaccgtgtatacaaacccaggctagcatgccaaatgatgaggccacatgaacagtagcccaagttttctaagctgccccatctgaagctaagtaaatgagccagatactgyccacccactaagttgatggaaagtacatgaatggatccagctgaaacttgttgataagaactccttacagaagaacccgtcagatgttttccaaactagcaagagcatgaaataaatatctcaattcctttaaactgctcagttctaaaatggtttgttacatagctaaagttaactgatttaagaagcttcaaaacacacaaatttgaaggtaataatgactgtcaaaacttgttttgtctcttacgagttcactccaaaaattcctattatttacttaataactccaagtggataccccactggtaacttacatcttctcaatactgaaatcatt

SEQ ID NO: 483493 - DNA, 427 bp, Homo sapiens
gcctcagcctcccgagtagctgggattacaggtgcacaccaccacgcccggctaatttttttaatttttagtagagacggggtttcactgtattggccaggctgatcatgaattcctgacctcaagtgatccgtccacctcggcttcccaaagtgttgggattacaggcgtgagccatcatgcttggccagccgtggactattgagattgtgggagggctcttcaatttaacaaaaattaattgatacttgttccttgccagataaagaactgaggtctgaggctgcacrggtgaataagaaacattctctgggagcccatagtacaatggggaagaagaacacataaacagatgcctttaataaacagatataaatgcagtgatacaagaacatgcatcataatacggaaccaataagcagaccac

SEQ ID NO: 483494 - DNA, 538 bp, Homo sapiens
ctgcgcaagcaggagcgaaaggggcagtgggccaggcgtatgtgcccctcggtgggtagggtgggcccaggcctcccagtctgaagccctgggtgggttttggatcacccgtggggagggtggaggagcccagaggccatccatgtgaggggcctgtggacatccccacaggcagctgtcatctccatctcacagatagcaagccactcgctccccaaggtcaccactaagatgagcagaatagatggtctggaaacccagggtttccctctatgcccaggggctgcaattgtgaatgcgcattggtggggggatcactgcagccccaggggaggccaggctggctgaggacctgttcaaagggcrgctgggggttgtgggagctgagggtgacccccaccccatcctctcaggggacctgctggttgggcagggatcagactactctgggggttttacctctgccagtgcctccaagccaattacctgtgtaattagcaacaaatgacttgtgggatggttgtggttttcagttaaa

SEQ ID NO: 483495 - DNA, 612 bp, Homo sapiens
ctgtgcctgaagaccaccctggggctttttaattacgcaagccaacacatttccttttttgcataagccatttagaaagggttttctgtcattcgagaacaaaaatgacttggccaagaaatacaatggggcagaatggatgagagaaagaagctcttagggctcccaaaggctcaaacaagaggcaggagtgtctgtgtgtgcacaygcacgtgcacaaaacaatttttgttttaattgggggctgggtgcggtggctcacgcccgtaatcctagcactttgggaagccgaggcgggcagatcacctgaggtcaggagttcaagactagcctggccaacatggcaaaacctcatctctactaaaaatacaaaaattagccgggcgtggtggctgtacaggtgggatgcctgtaatcccagctactcgggaggttgaggcaggagaatcgcttgaacccaggaggcagagattacagtgagcaatcgtccttcctgcattgacacacatatccaccaagatcaggcggctgcactccagcttgggtgacagagcaagactctgtctcaaaaaaaaatacatacataaaataaaataaaaataaaaataacaa

SEQ ID NO: 483496 - DNA, 505 bp, Homo sapiens
cctccccacgcgccgcacgtctgtcagaacgccaggggccaggggccaggggccagggctgggcaagacggcccatcacacaccacggccgggcccagccgccgagtgggaggagaggcgccctccttggccagcctgagcaggggggctccagggcrcagcccggtgggtcagggatgcaaacaagccacccgtccagagaatcttccgtggataataataatggtcacactaataataataagagcagcgagcacttccatacttactacaccccggctctgcttttcaaaaatctgggtttttcttaaagcataaaataatgtttatccccattaaatctacagcctgatgaatttggacaaatgtatccaccaccagcatcaagacacagaatagcttcaccccctaaagttcccgccagcccctttgcaccaatcccccctcccaacccccttctgctttctgtcactggcgttttgccatttctagaatgtcaccgcaa

SEQ ID NO: 483497 - DNA, 584 bp, Homo sapiens
atagtgcacacaggatgtgcccttcttaggggaagactataaacttgtaataagaaaaaaattgatagctttaattagtcctttaacataaatgcaatcatcatatttttctctaggagctcttcaacactagtctcatgattaaagtacactaataaagttgtccccatcacagaaagatgagcaaaacatgcagaagcccttaggagggttggtgtgggatctttcactgtactagtcaaggttcttgattgtaagcaattgaaactgattctagtcatttaagcagaaaakaaatttattgacaagattttagtttcttatgggatctctaagaaggctggaggaccaggcttggaaaatgggggaaacaatgggagtctatgtagttggaacgagagcacatttagcagtcagccagccccatggatcgttgactgctgaatggaggatgctgatggatgcagctaacattaagcacgaagtctcataccactgccactgcccctacttctctgagtttatatctgtggacatttgattggccaagctaggtcctgggctcctgcactagtaacagggaa

SEQ ID NO: 483498 - DNA, 515 bp, Homo sapiens
catcattcattcactcaacaaacaccctatgagtgccacggtcaggyaccatactaggtcctggagacgccatgaacaagccaggcagggtctttatcaccctggtgagtgcatctcacccagaaccaaaaacaggcacccaaaaagttttgaaactaaagacaagtggtggttgcacaacattctgaatacatgtcactgatctgtacactttaaaataacaaactgtacattgtgtgactttcacctctattcaaaaagaaagcagccccacatgggcaaagtactagctctagcctttctgtatgtctttcctcaccatgagggcaagtgcagctctgtgctgtcatgcacccgccatgcacttgctcctcagtcagaggatgggggaggctggtgtatctactaccacttcagagccttcctgagccgaatctacccatcctgtcctctcactgctacagagaaaccaccagctacctgttctccactactccaagctgcctcggacatct

SEQ ID NO: 483499 - DNA, 642 bp, Homo sapiens
tgctttctagctctgatactgtatttctctttactatataactttttgataatttgattarggatataagatgtatataaaagggagaaagtcgaaatttataatttagtttgtgatttcgaactaaatagaaaatttgcttatatattttgagcacataaatatagtttattgcctattgtttttagtcagatcctttctccttttcctcccaactttatctacactgttaaaatgtggaaacatatattcaagttcacttgttagtctctgctgtgcttggatagagatggtgatgcagcaggtactcaatgaatgtgtattgagttaaaccatgaccaaagtagttaaaacagaaattttcctcctcagcattcatactctgatttagtctcaacctaaatgaatagtgcagtagaatcactgccttctcaggcctgtttctaggaggcatgtgaaacatatcagagtttcaaccctgttcccagtagacaagtatatagatcacaaaacacattcatatgcctttctagttgtcagtctatgcagaggatctaagaatggaataggtcccaaaggcaaaactatcttctcattttcagtggcaactagggccaaggttgaagcagactaacagaggtg

SEQ ID NO: 483500 - DNA, 590 bp, Homo sapiens
tcacctcccaaaattctgactrtcattccaagtggagacatgtaggtctttttttatccttgtgtttgccagcagcagagtctgtttctgatatttagaggttgtccctcctttcctctttaattacacaggattcctacccttcttgccatgagaatctgtttccaagaatatatctgaaactcaaagaacaaatgctggctatcaagagggttatcccttccaggtcaatttgcaggtttattaggaatcaaaagtctaaactataggaaaatgcaattttaattagctggtaaatttaatttcttacagatgctcacaagtctgaatcccaagtctcttcaaaactgttgcatctcctttactgactggcaaaattgctccaaaacctctgccttctggctacttcacctcggctgggctgccttcagaactgccacatgtaacaaacactaagctcaccatcttctctcttccccattcgcatctttctcctcctcaattccttagttctgtccattctctggccaaccaaattcaagtctcagtgttatctttggcttccctctctccattgcttttcatattca

SEQ ID NO: 483501 - DNA, 631 bp, Homo sapiens
ctgtagaatgacaggacctgattgagaaagtgctaataaccaatatctaatgcagattgagttggttttgtccactgtcaacctgcacctcctcacactgtcctcacttgccttttcctcgtagacttttgcttaaactcttctcccaagcagctcaggggccctactgggaggcacatccctgcctgcattcatcagctcacctttcttagcagctcattagccccaaggctttattgtttaaaaatctcataacctaaggatctgttccctgactcctrgattaaaacaaataatagcttttacaaaaggaaaataaataatggatctgaaaatgcaaatagcatacatacaactccatctgtacatgtgatcacgtgtagtcctcacaatgcctgaatcaatgttccatcaaccccacgttgtggacaaagaaactgagactccaagaagctcaggggcagcaaatggcagagcgaggcccttaacttgggcagaatgaacaccacctactggctttttgcactgtgttctcttatcataaacatacaagaaatctgaatgccttccttgctttcactccacattcctattccagcacactgaccacagtcacctttactctttctcc

SEQ ID NO: 483502 - DNA, 631 bp, Homo sapiens
ctgtagaatgacaggacctgattgagaaagtgctaataaccaatatctaatgcagattgagttggttttgtccactgtcaacctgcacctcctcacactgtcctcacttgccttttcctcgtagacttttgcttaaactcttctcccaagcagctcaggggccctactgggaggcacatccctgcctgcattcatcagctcacctttcttagcagctcattagccccaaggctttattgtttaaaaatctcataacctaaggatctgttccctgactcctggattaaaacaaataatagcttttacaaaaggaaaakaaataatggatctgaaaatgcaaatagcatacatacaactccatctgtacatgtgatcacgtgtagtcctcacaatgcctgaatcaatgttccatcaaccccacgttgtggacaaagaaactgagactccaagaagctcaggggcagcaaatggcagagcgaggcccttaacttgggcagaatgaacaccacctactggctttttgcactgtgttctcttatcataaacatacaagaaatctgaatgccttccttgctttcactccacattcctattccagcacactgaccacagtcacctttactctttctcc

SEQ ID NO: 483503 - DNA, 504 bp, Homo sapiens
ttctcccaccttctgcccttgatttatttatttattctgctggccggatgtgggtcatgattcatagagcatgtccactggctctgtcctccttggctgtttcagccactccccactctgtggagcactggtggggagccatccaacaacaacacccccgcagccagcagcagctytcattaaacaaaacacatgcagaagcgcagtcatctgcttggcaaagataccgacgaggctaccatcaaactagagcagcaacgtgagtgctggcattcagggctgagtgctgtgcccgaagccctggagtcgtgtagatgtgtttgtgagtctgctcctggcaatgccttcctccttgtgactgaccatacatgagaggaagctgctcacccatgacccttgaagcagcgagagaggtttcggcccttgtcatttgtttgaagatgccagatgtgccatcactttcctaatgccaaatttgtggaaaggagatggaagtaagaatga

SEQ ID NO: 483504 - DNA, 533 bp, Homo sapiens
tgtatgcatcaggtcaactgaaaatgaaacagaatattctggatctgccatagttcatgcacaccctcctttagtttcaactggtaccaacttctagaagaggaacaggagatcaacggctcttctcctgatgagattgttcttattcttagtcatctctgatttttctcaaatgccaagttctggttcccagatggtgctttgatgaaaggtgaggcaatatgaacactcagcccatcctgaaataggaagagttttgattcatcaagtgctttggctttcttttcccctttcatagatttaaaaaattttgcatgttggaggaagatgctctagtttaaacataccttcttaaagggcatggttggaaaggagatagcatcccccttccactttgtcacctatgctgtgcccacactccttggcaatgctaaggcaaggtaaatgrttagtttactttgtgcattttggagggggcagtgaaatagcaagatcaacagatgaggatcccccacgtgggtcagtttcagctg

SEQ ID NO: 483505 - DNA, 524 bp, Homo sapiens
gcttacagtcacagagtaatggtttcatgactgctctttgtgtaccttctcagtgagtgttatcgggttagtaaaactttataatctcactttggtttcccactkctaagtgctatgcatgtgtcacaaaaaatatttttcaacatgtcaaaaacaatgaaaatgtatgaatgaaatgaaaagtaacaaggaaagaaatcagctatgattttggttatgggggtcatagttccagaaccagttggctataaaacactttatccaataatattgttttatccatatttttaggaatgtttataacgtgaatgttgtttcatcatgagttacaatcatataaaactgaatccacatggtaaatacaagatggtgtgttttcactggtgagatttttattttttttaaatagtgatgtttcttctctcacaagtgatcatgcaccttattttctcccttattcttacttagaagagtatctcattatctccctaatgagagatcttgtgaaatctgtcctccacttt

SEQ ID NO: 483506 - DNA, 491 bp, Homo sapiens
ctgactccaatagaaacccttcccacatgtatcatatttayacagtttctctcctatgtggactctatgatgagcttgaaggtgtgatctccaagtgaagtcttttccacacagcttacatttgtatgttttctccccagtatggagtctttgatgggtttgaagacttgaattctaactgacacatttcatatcttgttcatatttacagagcctttcttctgtgcagactttctaaggtctaagaatcttataagattcttaataataattttttagtgatttttatgatcatataataaagcaaaagtttcaaaaacattgttgatttttttgcagtaatgctttatatcaatcacttatattgttttaagacataatggaattaagaggcgaaaaagaagagaaacatcaaagttgtatacacaattcaaaatacttaaaattattatattggaaatgtgcaaagtttttcttatcctaaagtgttt

SEQ ID NO: 483507 - DNA, 506 bp, Homo sapiens
aacagaaccacaggagccctcctttggataggatgttcagatctacttgtggagtccacatagagatgaaaacataaaacaaaaatccaagttttccaaagaacacaggtcatcttgtttatccatgctcaattaggactcctgtctcctaaaaatattagcttacatctattgagtgcttcctgtgtgccactcttctgagcatttgacaggtgcaatacaatggatttcacaaatgcagcacatatttacttcatacccctacaattcgagcagtgctagactcctggccttctctgggaaatctcagaatattgaggaggtttggctggctgcgttctctttttgaaacaaaacaaaataaaaatttccagcctgatctatcacctcagaatagaacgggatttattaatgagtaagcaggtatataaatagaagctatattttcactrtatttttaatactctttaattagcacatgtttacagcaggcctgatgatgtact

SEQ ID NO: 483508 - DNA, 601 bp, Homo sapiens
gtgaggactgccacatgacctcaacacccagtgtcagaacggccagattcaagcagcacttcagaggtgcggttgagatggctaaaaatgctgatctgggctgggagtgcaatcacagtgtttattgatttttgtgcttctgttgcaccaagcaacaagagcgttcccaggaaccrctggctttcccctgccatctctggcagggaaaaactacctggtgacaggatggccacatcctgcagagcatgtgtgcgtgcctctgaatcgacagatggcacgagcgggttctgcccctgagaagcatgcacaagtgacaagacccggccgtgccactggatggcactggggtgggcaggcccctgggaacaatctggtgtgaggaaggacagagcaacatcggcttggataatttagagaactaaaacgcagtcacggcggcaggcagcagcattagaccatgaagcggtgctccttcccgtcatgggccatgaggatgacgttgcggttggaagtccagatgagccgggccagcttgagggcattgtgggagccgggggacgcgggctgcacagggggcacctggtaggttttaatgcagcgc

SEQ ID NO: 483509 - DNA, 588 bp, Homo sapiens
tcagaattgactcccacaattgttagaggctttttcttcatttttggtgaggggtgtagattcagttttggaattttcatcaaggaaaattttcrtcaaggaaatacaagaaggctcatgagcttgagctattttcacatggtttaggcatctcactgaaagaagagcttcttttctaatttttcacctttttccatgaagcagatagagagctgtttactacagcctttgtctgggtttggcattgattttaaatcacctggattgatcatgtggttatgggacttaaaaaaatcccaccaaataccaaagcctctaaacacaattagaattgaggggtttttaatctgctagcattatgtccataggagtacattctaaattattcttaacttctgctcatgttaggtgaaaataaagcaccatgataatgtgtagtgtctgaggttcagcagatgctctctaaacatgtagaaatgttcctagttttcaaaatgaggaagcatctaaaatctatgtctgtcttggagtatttcactgccttggcagtttcctcagccaataagagaaaaataggcaaatcaacca

SEQ ID NO: 483510 - DNA, 598 bp, Homo sapiens
tgagatcgcaccaccgcactccagcctgggtgacagagtgagactccatctcaaataaataaataatataaaataacatagaaaagttgtcgtaatttacaattagaaataawgggaatggctgggcgcggtggcccacacctgtaatcccagcattttgggaggctgaggcaggcagatcagttgagaataggagtttgagaccagcctggccaacacggtgaaacccaatttcaactaaaaacagaaaaaaattagctgggcgtggtagtgtgtgcctataatcgcagctacttgggaggctgcttgggaggagaattgcttgaacctgggaggtggaggttgcagtgagccaagatcacgccactgcactccagcctggacgacagagtgagactctgtctaaaaaaaaaaaaaaaagatacaacaatggggatgttttgtcatgtacgtaatgtagattgatgggccctaatagaaaacgtaaatttaaaaatatttttccaccacaagttacataactctgttgaattactattaccacactgatgtttatgtagattttgttactttatagcaagagtcatttgaggtacac

SEQ ID NO: 483511 - DNA, 590 bp, Homo sapiens
gtaaagcaaaagagtaatttgtaaagaaaacacatagctctacttcataaggtgtggatattgggwtatagcaatgggtgaaacagagtagacagtcagcctggagaccgaaggatgctagttaagatgtgttccttaaagtgctttgcttctgggccgtctgcctcaccaagatattcttcctataacaaatgagagcaggattgctagcaagttaaatgactctggctcctattttttaattttccccccagattcttaacaatgaaagttgttcaggcctgtaagtcagatcatgacatctctataaactcatacatattatttccctggcgccagaagttgatgtgtcatggaaagatggcctacagctatgccttataaagctgaaaaaataaagcacacgatgttcctcctgttgtcaggcattctccttacaactaaaccatgctgtcccccttcattctgtttgttctgacaagtctgcatgtcaggccatctattcccttttacagagctatgttgataaagtgcttggtcatactaaaagtcctggagatctcatcagtgcaagattttcattgaaccag

SEQ ID NO: 483512 - DNA, 590 bp, Homo sapiens
gtaaagcaaaagagtaatttgtaaagaaaacacatagctctacttcataaggtgtggatattgggatatagcaatgggtgaaacagagtagacagtcagcctggagaccgaaggatgctagttaagatgtgttccttaaagtgctttgcttctgggccrtctgcctcaccaagatattcttcctataacaaatgagagcaggattgctagcaagttaaatgactctggctcctattttttaattttccccccagattcttaacaatgaaagttgttcaggcctgtaagtcagatcatgacatctctataaactcatacatattatttccctggcgccagaagttgatgtgtcatggaaagatggcctacagctatgccttataaagctgaaaaaataaagcacacgatgttcctcctgttgtcaggcattctccttacaactaaaccatgctgtcccccttcattctgtttgttctgacaagtctgcatgtcaggccatctattcccttttacagagctatgttgataaagtgcttggtcatactaaaagtcctggagatctcatcagtgcaagattttcattgaaccag

SEQ ID NO: 483513 - DNA, 590 bp, Homo sapiens
gtaaagcaaaagagtaatttgtaaagaaaacacatagctctacttcataaggtgtggatattgggatatagcaatgggtgaaacagagtagacagtcagcctggagaccgaaggatgctagttaagatgtgttccttaaagtgctttgcttctgggccgtctgcctcaccaagatattcttcctataacaaatgagagcaggattgctagcaagttaaatgactctggctcctwttttttaattttccccccagattcttaacaatgaaagttgttcaggcctgtaagtcagatcatgacatctctataaactcatacatattatttccctggcgccagaagttgatgtgtcatggaaagatggcctacagctatgccttataaagctgaaaaaataaagcacacgatgttcctcctgttgtcaggcattctccttacaactaaaccatgctgtcccccttcattctgtttgttctgacaagtctgcatgtcaggccatctattcccttttacagagctatgttgataaagtgcttggtcatactaaaagtcctggagatctcatcagtgcaagattttcattgaaccag

SEQ ID NO: 483514 - DNA, 590 bp, Homo sapiens
gtaaagcaaaagagtaatttgtaaagaaaacacatagctctacttcataaggtgtggatattgggatatagcaatgggtgaaacagagtagacagtcagcctggagaccgaaggatgctagttaagatgtgttccttaaagtgctttgcttctgggccgtctgcctcaccaagatattcttcctataacaaatgagagcaggattgctagcaagttaaatgactctggctcctattttttaattttycccccagattcttaacaatgaaagttgttcaggcctgtaagtcagatcatgacatctctataaactcatacatattatttccctggcgccagaagttgatgtgtcatggaaagatggcctacagctatgccttataaagctgaaaaaataaagcacacgatgttcctcctgttgtcaggcattctccttacaactaaaccatgctgtcccccttcattctgtttgttctgacaagtctgcatgtcaggccatctattcccttttacagagctatgttgataaagtgcttggtcatactaaaagtcctggagatctcatcagtgcaagattttcattgaaccag

SEQ ID NO: 483515 - DNA, 522 bp, Homo sapiens
tgtttacaaggagtgataaaattttagaaagatggataaaagagagagataatgaattatcaccttgagacaagctaaatcagtgaacactgtagtttgtttcactagcctccatattattcatttttaaagacaacaggtgaacaccagtttggagagtgagagccagagtaaacttgaagaaacagtggacatattttgttggtgcaaagggtacattatagaacgttcttttggtgccacatgtgacattccctcakggctgttctgatttaagtcaaactctggtgggcagtatttgagcaagtgggcatatctcatctcaagtgcctttcaacgctctttgcttttgtttgtttgcatggttggtatttctttctttctttcttttttttttttttttttttttttggccggatgctctttctgaaaccgtggaagcttgctaaacctacctgcatgtgtggtctaaaaatgcataaaaataaagccctctggacctatctgcacacaaagaaggat

SEQ ID NO: 483516 - DNA, 529 bp, Homo sapiens
ctaatatcactgtaactcattctgaaataaattttaagcctttgcttttgaaatcaggaggttgttctgttccacttttgtttcctaagctcagtctcgggtctctgcgttaacaccatccctccagggaagagcctatttacccaatccacttgttacccacgtgctgcaagacagaatctccttgagggctcaggaaaagctgcccgtctgaatgccagcttgagagccacaggtgattccaatttacatctcaggttgagggtggctgatatcaataaggattacaggcccacaacctgcayccctctcccctctccctcacttccgagccatctctcacctggtcaggtgaacaggggccttcagcaggtcagggtcacctaacgctcatttcagaagctcagcagccctcccggccaccgtcccagccaccgatcatccttaactgaagctgtcagacagcctctccttattttgagatgccaggtgtctccctgagacaccagtgttcctggaaactgtgcag

SEQ ID NO: 483517 - DNA, 352 bp, Homo sapiens
ctccctttgatattaatacacacaataattttgtaaagttcttattacttgtaaaaactttttttaatttttaaggtttttttacttctccaaataattcattccttgtcaccctaacttattcacaagaggcttgttaaatctttttatgtaatgagatttcaagagggatagtctataatttcaaatgattttcctgctgcaaaactaaaaatctaattcacagtctccaagtaaacaggtgtgagttataagcaaagggaagtcatcggaagagacagrccaagacatctgtggtgcaccaaagcccttcccataccctctcccatggaaggccacaggaccaagagca

SEQ ID NO: 483518 - DNA, 569 bp, Homo sapiens
gctgaagaactgcaccctcaccctgttatgggctgaatgcatgtgtccccctgaatctgtatgctgaagccctaaaccccactgtgatgtcatgaggaagtggggcctctgggaggtgatcaggtttagatgaggtcatggccgtgagacgcatgatgggatcagtgtccttacaggaagaggaagagascagcctttctctctctctctccaccatgagaggccacagcgagaaggcagccgtgtgtaagccaggaagagagccctcaccggagcctgccctcactggctccctcatcttggactcccaaccgccagaactgcgagacataaacgactattgttgaagccactcagtcttaggtgttttgctacagtagccccagctaagacatcctggtggcatgtcacccacatgacatccaccatgccaactgccaaacccaggagatatcagaaggatctatccttctcctcttctgcccacaggttgcccagaaatgcaggacaaatcgctctaacagtaccaaacagatatcaccataaaggtcagctttccagccttgcag

SEQ ID NO: 483519 - DNA, 390 bp, Homo sapiens
aggtttgaccttggtgagttgctgcaggtttgggtagttttgttgttaaacaggaagggcagtaggtcctgaccttgaccaagtgcaagctacccacaccttagcaaatgctcccaagctaggacagcctatgcaaacctgaacaggtggtacaagctgcagggaagctgcacagaccccggggccttagcacaggcatgcgccacagggaccaagcaagtgcattagccagacatgagctgcgtgggtggccttgatgtgccggctgttgtgcattgaccttgarccacactgtgcagacacatcggaatatgcatgctggtattgcaggtgaggctaaggctaaaggagacctcctttgacagaatatattctgcttttaaactatga

SEQ ID NO: 483520 - DNA, 631 bp, Homo sapiens
gaccccagagagctcccccagctacttggagagatgctgttgaggttgggaggcaatgcagggtgttcatcagccagcatgagaccctcgcttccagcctgtgcctttagcccagccttgctgttctagatggtgttggcagcctttttcacgtacagagttgcattgctcctccgtcttccgcgtgcctgtgggcagcttttgttcctttggattacttttgtttctttaaaactccttggcaccatctaattttttaaaaatgagcctaatactgttcacgttttagcacctggcaaatgtattgatactttacgagcattcacatgcrtttaagagtgctcttagcagttcgcgttctatatagaactgtttacacctctcaggattcttactctaacaaacaggtatagacaacatcctagttgcatctcaccgcggcctaacatccccgggagcatggggattagtggagtgagtgggaggactcgccctgcgcaggtggagggtgatgagaggctggggacgttttcggatgaccacaggtgtgaagctgtcttcagtggtgggggaaccacctgggccttgggccttggctctggtagtctcacataactctttggtgtctgca

SEQ ID NO: 483521 - DNA, 631 bp, Homo sapiens
gaccccagagagctcccccagctacttggagagatgctgttgaggttgggaggcaatgcagggtgttcatcagccagcatgagaccctcgcttccagcctgtgcctttagcccagccttgctgttctagatggtgttggcagcctttttcacgtacagagttgcattgctcctccgtcttccgcgtgcctgtgggcagcttttgttcctttggattacttttgtttctttaaaactccttggcaccatctaattttttaaaaatgagcctaatactgttcacgttttagcacctggcaaatgtattgatactttacgagcattcacatgcatttaagagtgctcttagcagttcgcgttctatatagaactgtttacacctctcaggattcttactctaacaaacaggtatagacaacatcctagttgcatctcaccgcggcctaacatccccgggagcatggggattagtggagtgagtgggaggactygccctgcgcaggtggagggtgatgagaggctggggacgttttcggatgaccacaggtgtgaagctgtcttcagtggtgggggaaccacctgggccttgggccttggctctggtagtctcacataactctttggtgtctgca

SEQ ID NO: 483522 - DNA, 628 bp, Homo sapiens
gctggcgcgggactggggacttaggggactgggtcctggggtgagctctggagcccgtgggtctggttgtcttgctgacctggtctgcctcctgcttgcttccatagcagagcctgtgggacgtgaaccaccattcatgatcctgggaggtgaagccctgggaactgccacttggaatgagaggggaaggctggaactgagctgggctggccatggggatgctcagagcccggctctttcatgggatcacagtttgttcaccttggaagctgttgctcaccgcgtgttgattttatttaagactggaaaggcttgtccatgtatcgccgttgggaagggaatcactccgaagacggtgrtgctgggtacaggctctggagtcatcttgatttggtaaaaggcatgaagtctgagttcattccgaagattctggcttttgagaacttatataaagagaacttataaaaaatggaaaatgagaaacgatgatgtcagtgaacatttattggcctttttttctgtgccaataactctcagtgcttaacctgaagaagcccacttaatccttccagcatcctgtcctagaactttccctgctgtctggataaggaaactgaggcacagaggg

SEQ ID NO: 483523 - DNA, 585 bp, Homo sapiens
gtcctttttggttctgtgcgacagttaatgaatagtcatgtgcatttgacccctaaaaggaaggtcttttgctttttaaagagactgtattaagaggaataatggaccaagtacaccaggagggaatgaacgagaaaaataaaagaaagaaaatcacacaagaccaaataactaattttgaatattttctgagacctttggtttagaatctaaactttgttgaggctgggcgcagtggagcacgcgtgtaattctagcacttagggaggccgaggcaaatggatcacttgagctcaggagttcgacaccagcctaggcaacatggcaaagccctgactcttccaaacatacaaaaatcagcgaggcatggaggcagacacctatggtcccaggtacatgggaggctgaggtgggatgatcgctggagcttgggaagttgagggtgcagtgagccacgatygtaccactgcactccagcctgggtgacagagtgagatcctgtctcgaaaaaacaaaaacaacaaaccaaaaaaaaaggtgacattgagaataaagagatggtggttggatttgtggctatttttc

SEQ ID NO: 483524 - DNA, 548 bp, Homo sapiens
ggatacctttcccttgtcctagggacctaagcctctctgggtgtcactgtccgtgcacagcctgtgataagccgctgtgtggcagagaccaactgtgggtgatttgtcgctccccagagcccggttgcaacaggaggagccaccaggctgggagggcaccaggcaggaggctgggtccatacctggcgcaaccctgggcctcaggttccccagtggcaaaggtaggataggggctttggtcgcctctgtgctatgagtctttgtccagtttgtcagtcaccatattcrttttactctccagtcttttctataaaagtgtttgggggccagaagttgttaacctggttcactagaagctaatgcattgattatttttgtgtgtgttgtactcagcacgtgcttctcagtgcgctgtgtcctcatttgctgtttcccctgaagtttgacgagtatggtatattctggtcaccaggcaggtggtgcttggggaatatctcctctccgtgtgctggaagcattgcctgattttaatgaggtgactcactgca

SEQ ID NO: 483525 - DNA, 646 bp, Homo sapiens
cagataagacattcccttctgttctgttttcaaaagaagatgatgtgaaaaaaaagtggcatttttatgagacgtgttgtcccctcacataacttcttggatacctttcccttgtcctagggacctaagcctctctgggtgtcactgtccgtgcacagcctgtgataagccgctgtgtggcagagaccaactgtgggtgatttgtcgctccccagagcccggttgcaacaggaggagccaccaggctgggagggcaccaggcaggaggctgggtccatacctggcgcaaccctgggcctcaggttccccagtggcaaaggtaggataggggctttggtcgcctctgtgctatgagtctttgtccagtttgtcagtcaccatattcgttttactctccagtcttttctataaaagtgtttgggggccagaagttgttaacctggttcactagaagctaatgcattgattatttttgtgtgtgttgtactcagcacgtgcttctcagtgcgctgtgtcctcatttgctgtttcccctgaagtttgacgagtatggtatattctggtcaccaggcaggtggtgcttgggkaatatctcctctccgtgtgctggaagcattgcctgattttaatgaggtgactcactgca

SEQ ID NO: 483526 - DNA, 556 bp, Homo sapiens
ctgggcaaaggcatctgagctggaggtaggtgataagctccctgggcctcccaccctgcctgcctctgctcagtggctcctgggtccctcctgaccatgtaacctttgcgccagccagagaatctgccctttgccttcctctccaggaagttgttgagatacatgagtgaaaatattattcttttaagtgctttggatgttataaaaaatacactgtgccattaatgctcgtgcagggctcccggccggcctaggccctctgcacttgagattcctctggcagcatctgtttagaactgggcactcctggttctggtcaagtttatcctgaccagttcatttcatggcagttctggtcatttttgagaaaatctagtttgcactttcattgggcccctttgtgttttctagttcagatgtggcttctctagctttttcttgctgctaaatggtcttaaaggtttgagatcagtgtctcagactttagcctgygtcaggatcacctcaggtcacgttttaactgagggtgggttaaaatgcagatcactgtgccggg

SEQ ID NO: 483527 - DNA, 566 bp, Homo sapiens
agctgcccacgagctccagggagaaagactcagcaagcggccactccagctccctccaagctcaagtcctgtgagagacgataatgtacacaagactggaagaaaaagtcaccaaaacaaaccttgcccataccctgtgggcagacggctgaggtgtctatgccacctgctctgccattcacttcccgaggccccgccctcattctctcccagctttgcaaaccgtcagcacaggaaagaggatgaacatggatgtgagtgaggaaaacaagagtgtgtgcttagctttcgtgtgtggctttgcatctcactggccctgcccatayagacccggcttccggtggctcctaaccaagaatgttcccagtggcatcctattttcaaaacaagaaactcttggacaaataaattcaagtttctatgtaaaattctgaattttatgtccagaaaaccccccaaaagacaatatcatagtcatcacagttcaattttttttttttttgagacaagatctcactctggcacccagggtggagcgcagtgatgcaatcatagctcactgcagc

SEQ ID NO: 483528 - DNA, 625 bp, Homo sapiens
accattattccagaaaatgggcttcaaagtttgctcagaggggctggaacccacactttacgtccagtcaccagtatgtcagggtgtcctcttcacaaaaactgccttatctcagcygagtgcggtggctcatgcctgtaatcccagcactttgggaggccgaggcgggcagatcatgaggtcaagaccagcctggccaacgtagcgaaaccccatctctactaaaaatacaaaaaaattagccaggcatggtggcatgtgcctgtagtctcagctacttgggaggctgaggcaggagaactgcttgaacccaggaggtggaggttgcagtgagtcgagatcacgtcactgcactccagtttgggcaacagagtgagacttaaggaaagaaaaagaaaagaaaaaaaaaaaaaagaggaaatcaacaatggtaaaaatcaatactagccatcaccatgaaggcctagtctgaggggttacagcactcctggtaagcttctgtccgaaggcagcaggccacttaccgactgggatgtttgaggtggtcacagcagtagcatgggaggaatgggagggtactgtcatggtaacaatggtacttgtgggagcttgcgtgtgtgacaca

SEQ ID NO: 483529 - DNA, 626 bp, Homo sapiens
ctgctcccaggccccgtctcagggaggaggagccctggcaggsgctggggtgacaggggagaggagggaacctctccttcctcaggaacctgtttgccctctgctcagcccagacctgggagccacccccgcccctctctttctcattgtccaccccatcccatctgcccacgattcctgacagccctgcccctgctgatcctggagcctccttcatttgcattgccacccaggggtcaagtcagccccctgtcccctgaatcactgcatcagctcctgacctctccccatgaccactcctgcccccacagtccactctccactcacaggttccctccctagcccacccccagtcaggaccttccaacggttcccattgtccttttaatgaaatcagaccctgaccagggccctgggctcaaccagagctcctgctgcaaggcctttgtccctgccgttctgcctcccgctgctcttccctgccccagccctggcaggctccttgtcatccctggagttgcagcggaaggccatctcctcccagaatcctccctggtgccctctcccctgctccatctcatgcccctctgcggcatcattcataacatcgcccagtgtctgccgtg

SEQ ID NO: 483530 - DNA, 626 bp, Homo sapiens
ctgctcccaggccccgtctcagggaggaggagccctggcaggcsctggggtgacaggggagaggagggaacctctccttcctcaggaacctgtttgccctctgctcagcccagacctgggagccacccccgcccctctctttctcattgtccaccccatcccatctgcccacgattcctgacagccctgcccctgctgatcctggagcctccttcatttgcattgccacccaggggtcaagtcagccccctgtcccctgaatcactgcatcagctcctgacctctccccatgaccactcctgcccccacagtccactctccactcacaggttccctccctagcccacccccagtcaggaccttccaacggttcccattgtccttttaatgaaatcagaccctgaccagggccctgggctcaaccagagctcctgctgcaaggcctttgtccctgccgttctgcctcccgctgctcttccctgccccagccctggcaggctccttgtcatccctggagttgcagcggaaggccatctcctcccagaatcctccctggtgccctctcccctgctccatctcatgcccctctgcggcatcattcataacatcgcccagtgtctgccgtg

SEQ ID NO: 483531 - DNA, 522 bp, Homo sapiens
ctgcagacaagagcagagctttcaatggacattttaaacacatgggattaagatcctgaagcacgtctttgaagaactataagagaaggtgaaacrtggctctaccggtatgactctgaagacaaagcacaatcgaagacacgcttcccatctgtaagccatctacaaggatggtggctcctgtcagcagttgactcacctttctaaaggtgattacctgcctggcatgtaatcttgtggccaccactagttttcctggtatgtaatcttgtggccaccgctggtgactaacagcctttgacatttactctcgctatgatatgccacacctatgagagtagtagattgtggccacatcattatagcacttgggaccaagctctgccatgattttgggaataagcgtaccatgcagatgctcctgatgtttgctgcactgtgtataataaactacttagctttgatccattgtgtcttgtctatttttggcacctatggagttaatagaattgtttgcagcac

SEQ ID NO: 483532 - DNA, 522 bp, Homo sapiens
ctgcagacaagagcagagctttcaatggacattttaaacacatgggattaagatcctgaagcacgtctttgaagaactataagagaaggtgaaacatggctctaccggtatgactctgaagacaaagcacaatcgaagacacscttcccatctgtaagccatctacaaggatggtggctcctgtcagcagttgactcacctttctaaaggtgattacctgcctggcatgtaatcttgtggccaccactagttttcctggtatgtaatcttgtggccaccgctggtgactaacagcctttgacatttactctcgctatgatatgccacacctatgagagtagtagattgtggccacatcattatagcacttgggaccaagctctgccatgattttgggaataagcgtaccatgcagatgctcctgatgtttgctgcactgtgtataataaactacttagctttgatccattgtgtcttgtctatttttggcacctatggagttaatagaattgtttgcagcac

SEQ ID NO: 483533 - DNA, 522 bp, Homo sapiens
ctgcagacaagagcagagctttcaatggacattttaaacacatgggattaagatcctgaagcacgtctttgaagaactataagagaaggtgaaacatggctctaccggtatgactctgaagacaaagcacaatcgaagacacgcttcccatctgtaagccatctacaaggatggtggctcctgtcagcagttgactcacctttctaaaggtgattacctgcctggcatgtaatcttgtggccaccactagttttcctggtatgtaatcttgtggccaccgctggtgactaacagcctttgacatttactctcgctatgatatgccacacctatgagagtagtagattgtggccayatcattatagcacttgggaccaagctctgccatgattttgggaataagcgtaccatgcagatgctcctgatgtttgctgcactgtgtataataaactacttagctttgatccattgtgtcttgtctatttttggcacctatggagttaatagaattgtttgcagcac

SEQ ID NO: 483534 - DNA, 582 bp, Homo sapiens
tgagatagaaaacataggagaacctttgctgaaagagaactccatttgcccagtgcagcatagcctgcattgccaaggtggtcttcccaacccctgccctccccaccaagactatcgtctgggcctgggctctagtcctattaggatccagtaggcgctgcagttcctcatgttcgtcctttgatgtattacggatatatacgtggtctttaggccaactgatgttgtcccatgtctccagtagttcagccttcatgttctctctgtattttcttctgtggtctagagagggcggagtggggagaagaatgktaagaataaatttcagagttaggaatgattcagttacaaagttcctaccccaaagacttgaataagagaaactctgccttccaggattttgtgggaatgcagtggtagaaagttgcaaaaggaggctgaggtaggagaatggcgtgaacccgggaggcggaggttgcagtgagccgagaggcaccactgcactccagcctgggtgacagagtgagactccgtctcaaaaaaaaaaaaaaaaaaaaaaagttgcaaaatatgaagacagtt

SEQ ID NO: 483535 - DNA, 669 bp, Homo sapiens
tggctgccgacaagttgcatttctccaggctgtggaaggtgcaggtgcaaggtgagcctcagccatgatgcccaggttcctctacctttctctctcaaccccttaacccccgagacccaaacattatgggaagattaaattggagaaagaacaaaagcttaaagaaggagaaaaagggccaggcgcagtggctgacgcctgtaatcccagcagtttgggaggccaaggcgggtggatcacctgaggtcaagagttcgagagcagcctggccaacatggagaaacctcatctccactaaaraaaatacatatatatatacatacatatatatacacgtatatatacacacacatatatatgtatatatatacatatatacacacatatatacatatatatatacacacatatatacatatatatctgggcatggtggtgtgcacctgtagtcccagctactcagaaaggctgaggcaggagaattgcttgaacccaagaggcagaggttgtggtgagccaagagtgcgccactgtactccagcctgggtgacagagggagactccatctcaaagagaaaaaggtgaggcaaggtagggttttctcagccctattgaggtgtgggctggattgcacttagttgcagaatgagaggactgccctgtgcatta

SEQ ID NO: 483536 - DNA, 519 bp, Homo sapiens
gaaaagctctctgattttaagaatctatgtgattatattgggtccacctgactgattctggatactctcccattgtcaaggttggtaacatgaatcacatttgcaaagtcccctttgccatgggagaaattctagaatcacagaatcaaggcttagtcccctagtatattcacaggttctggggcgagggcatggatatcttggtggaggtgttattctgcccacracagtacctcaacacatctctgggcagggccagcacctgatggattcagagcatctgtcactgggccctggtaggcctgcaggagggttttacgttccaagccaaaaagagccataagtggaagttccgtttcaatgcaatggatggagtctctctagtcagtcaaattatagttcaatcagttcattttaatcactcctctggagagaagtaaaaccctgtgttgaggaatatgcagcaattttattgatgacaagtttaattgtttcatttttccttactgtctccaacat

SEQ ID NO: 483537 - DNA, 578 bp, Homo sapiens
gcctgtttgcagtgattatgaatgtatgattgccaagccttttaagcaatatataacccaaaatgttcttgcataaatgaagctgggaacagcaatattgtcagaacttcgttcttgaatttgccactacctaggcaggatctcagcatttgttgacacacttcccaggccagactgttgatgtctccaagtcagaaagaagagagaaataaacttgtaaataggatcatgtcagaaatgtgtgtgtgtgtgtgtgtgtgtgtgtgtgtgtgtgacagagagagagagagagagactgacttttcagtttatcccaagtccatggctagtacttttgttcgatttttttttctgcttctcttaggtaacaaagggtaaattaaatacaataaaaatattacagagggaataaagtcaaaagaacgacattctcctggcatttgtttcaaggctgcmaaatgtagagtttcttgacagcatcgagagagatttttctcttttaaactaggtgtcagagaatgtgcttcatttaagcaaatcaatatctttaattccagcctgttgctctggatttagtg

SEQ ID NO: 483538 - DNA, 392 bp, Homo sapiens
gactcctccagtagcagtgcatccacaggtgtgagaaatcctacttgtgtcaggccrggtgcagtggctcatgcctgaatcccagcactttgtgaggccgaggcgggtggatcatgaggtcaggaattcaagaccagcctggccaagatggtgaaaccccatctctactaaaaatacaaaaattagccgggcgaggtcgtgggcacctataatcccagctactcgggaggctgaggcagagaactgcttgaacctgggaggcggaagttgcagtgagctgagatcgcggccactgcactccagcctgggcaacagagcaagactgtctcaaaaaagaaaaaaaaaaagaaatcccacttgtgtcccaattggggccagtggctgaacctgtc

SEQ ID NO: 483539 - DNA, 418 bp, Homo sapiens
acctctctcttcttgagccctggacctcggaaataaagaaaaagtggaggattgcagggtcttcaccygaagcttctcttaacctcattctctgttggtgtgtgtttctatgtggctgagcctcttctcccactgtttcaatcatactcattcggtccctacatccaccctcctgtcctctctgcccttctgtgtttctgtctctaaacgaatggggagagctgggggaggattggtggctggactcgtggagtgaatggccaaggccgagacttctgtgcccaacacagtgcgcctcctgcttttgcccagctcctgccacgccctggctctggcctggactttctcctatctcctgttcttccgagccctcagcctcctgggcctgcccactcccacgcccttcaccaatgccgtc

SEQ ID NO: 483540 - DNA, 418 bp, Homo sapiens
acctctctcttcttgagccctggacctcggaaataaagaaaaagtggaggattgcagggtcttcacctgaagcttctcttaacctcattctctgttggtgtgtgtttctatgtggctgagcctcttctcccactgtttcaatcatactcattcggtccctacatccaccctcctgtcctctctgcccttctgtgtttctgtctctaaacgaatggggagagctgggggaggattggtggctggactcgtggagtgartggccaaggccgagacttctgtgcccaacacagtgcgcctcctgcttttgcccagctcctgccacgccctggctctggcctggactttctcctatctcctgttcttccgagccctcagcctcctgggcctgcccactcccacgcccttcaccaatgccgtc

SEQ ID NO: 483541 - DNA, 559 bp, Homo sapiens
cacacaacgcaaacatattgggcaagcaaagaatctaggctgatatgtgtgaatgcttatgtggcattctatcaaaggagatagatgtacataaggggaattatggagaagtgaaaatttgtctaaggttcattttttcagtagcttaattttaatagtaaactcttttaaggaatgaatggccacaggcagagactaatggtgtactttcagtgttctcagtgagtgcttcacagattaggtttccaagagaagaagattgcctctgaggaagaagagatggggtagcaagaggcatatatgagaccgttcttgggaccaacacctatggaggggagggaagaaggcagaattatgggaccagatagaagaagttggtctgcaatgcagtcttgaggaaggcctcagmagagccaatagacagttccgaagctggcatgcccttgagagttgtcctaaattcgggtgagagggttaggcctttatatccttggtcacttgatagtagatgctggaacaaaatggtgctctttagctaaggcaatttacagagggctga

SEQ ID NO: 483542 - DNA, 641 bp, Homo sapiens
aaggaaagtgaggtaatgttgtgaatttaaaagtaacataaagcttttcaatcacttgttaaaaatagcattgcagagaaacattgaaccctccttaaatgtaaatagcaygattcatcgaacatctagtcaagatgactaatctttttttctagtaacgctcaacagtctagaaggtacagaaggcggtgggtatcaaggtttataaaaggtcaggaattggaactctggggacctggttgttctcatgagggcacataccaagatcagggtgagctaggaagtttaagtgataggaagataatagatttatttagagaggggaaattgagacagtttcaagcctcggagatggaacagaacaacagagctccaagcactgggatgcagggctggaggtgaccaagtccacgactttgtctttctaaagtgaagtggaggtgagtctgaagaaattatcactgtgattaaggttgttattgagggcaacagggcaagctagcttaggaagaaaaagtttggcctaggtataagatgtagttgtctaatattgaacagcacagattttagaacattagcatcaccacagaaaattcgattgaacagcactgtactagaggtacaggaaagtgagagggtag

SEQ ID NO: 483543 - DNA, 508 bp, Homo sapiens
tcgtgacttcataatttacacttttatttatgcataattaagtataaataaacaaaaacatgtattttctaactgctacctgttctgtttccagtcttgcttgaaaatcatctttctcaaaaaactacctatcatgtgctatgcccattacctgggtgacaaaatgatctgtacacccctacaaaatgcaacttagtcatgtaataaagctgcttatgttccctctaaacctaaaataaaggttggaaaggaaaaaataaataagataaaaattatctttctctatcagagtaatttgacatcttgaggaagtgatcctgggacttcatattctttaggattcaggtgtccagataatcccagaagtagccagcaatttggcyatttggggtgtagaaaccttcatacctaggttattgtaatacctcaggctattctctccaggtttccagtgattaattagctgtgaacctcaaccaacacctgactctagaagagtcttcaaata

SEQ ID NO: 483544 - DNA, 577 bp, Homo sapiens
tgatgccattggaaagtccagtcattactgctctcagcgcggccatctgtttattgctctgttccgtgaatccctgactcagcttctcctctatcacgagggccctgccaagagcaaattcctcttctgcactcaccaccaaggattcggcttcttccttccttcaattcttttgtctgtgctaatcatttgttgttaagttgcctgaaaagaaatggatgtgatcattgtataggactttttttttttaataaaaagaaagaacgaaaaggctctgctttctccttgcacatcrctgtttggtgctcaatctagcatgacttctgctttgtatatttgggttgctaaacaagagagtcattgttatccgcttaatttgaaatcatgatttttctatgaagcattctaatctcagctttaccagcagatgggcttacacctaaaataagactagcttctcgcctacccattttgtctgtttaaatcctttttataggagtatgaaaggctaggggttgaaattttcacatgttctgtgactacttgttgcagaagtttccagacttgaaatatgcag

SEQ ID NO: 483545 - DNA, 452 bp, Homo sapiens
tgtcatgttctgctcaacgctgaagacagctctccaggaagactgcctcgtgccccattctcgcaggcctcaatgacttcattggagagaagctcctgaagctccgtcacatctttacccttgcttcccttggagcaaaagcaccggtctaccaaaaaagcagtagcatgggagaaaaatggaaactatgaagttaaaattggaatcgtttaaaaatgtagaacatctgtacagcacaaaactttataagtamaagttttagggccttctcaagggaaacattgaagcagaattctcctctgaactaacactacatgttctgcctcttataaaaaggctcttaacctaccccccagcattcagaatgtccataaacttggttgggaaaaaattatatcttattttctttaacctccaacaattgtaaataaaacttagcatttctttcaatt

SEQ ID NO: 483546 - DNA, 542 bp, Homo sapiens
tggctattttccttttctttgccagaggaacactggcaaatgtttaacatctgattctctggaggtggggaaagcttgaattaatagtgtttgtctaattccatgatagaagtatttccamtgtggccagtttcgagttactcccacgatgtcactgaatgcacagctacaaagagatggtaacaactggcccctgcaaactgctatgaattggctctagggcaacactgctacaccatctccctacgaataacagggatcccctttgtggggttggacactgtacatatgtagctggcactacatgcatgatatttcatataatcttaactatcattgtttgaggctgggattactattgccatttcagggatgagaatagcaaggctcagagagattgtgtagccagcatcggttcacataattagcaggcagcgaagttgggatttgaatactgtgggcacctttcatgtggcacactcctccccactctgagtcctcctctttcttccctgggaatgagtagcttgcttcctaacaag

SEQ ID NO: 483547 - DNA, 542 bp, Homo sapiens
tggctattttccttttctttgccagaggaacactggcaaatgtttaacatctgattctctggaggtggggaaagcttgaattaatagtgtttgtctaattccatgatagaagtatttccaatgtggccagtttcgagttactcccacgatgtcactgaatgcacagctacaaagagatggtaacaactggcycctgcaaactgctatgaattggctctagggcaacactgctacaccatctccctacgaataacagggatcccctttgtggggttggacactgtacatatgtagctggcactacatgcatgatatttcatataatcttaactatcattgtttgaggctgggattactattgccatttcagggatgagaatagcaaggctcagagagattgtgtagccagcatcggttcacataattagcaggcagcgaagttgggatttgaatactgtgggcacctttcatgtggcacactcctccccactctgagtcctcctctttcttccctgggaatgagtagcttgcttcctaacaag

SEQ ID NO: 483548 - DNA, 491 bp, Homo sapiens
cacttgctggtcacttgcactacaccgtgaactcctcaagggcatggactcttcctgtggaacactgtgtycccagtgcccagtgcctggcacacgaataaggtgctcagcatgtttgctgagtggatcaatgaatccggagggagaggaggctgggcccaaagcactttggggctcccttcgctgctgcctgtccagtgagcagcttgtcagacctgctattagcatctcacgcatgtgctcaggaaggcagtccaggagaaccctgtgcggggaggtggggctggaatgatgtcccaagcctccttcctgtgagctgctctctgagcccatcagaaatcgcccctcgcccagcctcctcaggaggaagctaaaggagctagggggcccctgtctccttcctctccacgcccctcctggtcagtccactttgatgtgaaggttcctggggaggctggtttgtgtcactgtcgagtcggggagggagacag

SEQ ID NO: 483549 - DNA, 505 bp, Homo sapiens
cctccctccctcctttctcccttccttcctttcttccattcatccttcctgccttttatttttattttttgtaatatcacatgtgctgtagtttggaattttattctagtgcatttcttgctcatcagaacctcagctaatctacctaggaaaaatagtatcaaaggaaatgagaaagttgtatctgagtccctccagaactaagataattctttttgaccatttaagcctttataaatgcgttttgaccatttaagcctttataaatgcttgttttaggaaagtgaatctgttagatgcatcaacaaataatgaccaggacaaaacgatttaataattaaagtctcaaatcaccatggttatacattttcaccagaaatagtaatcttacaatttttcatttttctgatgaagatttctgttmcaatatctgtttcctaatagattttttaaattaattagctttcctctgctttatgaccacaggttttatccctaaccgaga

SEQ ID NO: 483550 - DNA, 288 bp, Homo sapiens
tctctgccagtaactcatgctgggctaccaatccccagcttagtccctttctcagagatcctgataatttcagtttgtcaactgcaagggcagtctgttcctccactcactttgaccaagatgggcttctttgtgtacaggcgcatttttagaggcaggmccaggtccacagggaaggaaattacaaaacgcaggattctgccccagatgaggcaacagctttctaaatcttagtactgtccaatctcagagtgagattatttgggaaacagctctcaatccctgcag

SEQ ID NO: 483551 - DNA, 401 bp, Homo sapiens
aagaatagattgaaagaagacagtaaacaccccgaaatcctttggagaatgcaatgagctggagagtggttgggatctccatgagatcatatgtcaagtgagatatttcacttatgggaactaacactatgtctgctacattataggcccacaaaaatcttatgtattcatggatgaagcaaggcctgagttgggctttaaggattgttgcctttgtgtgagcagaaatgatggggcactatacccttaaacaaagcctcttctgtcttttgttgaacacaaagatgtagcctcaaaagacacttctactttaagtctccaactaagttttatataaagaggttcagtgtttttaaatgttatgttcatmtttcatccatcaatttgctttttgacaggtt

SEQ ID NO: 483552 - DNA, 584 bp, Homo sapiens
cctttgctgtgcttagtctcataaaaagtttcaccagggagagaggaaaaggaaaaaaatgggaattggaaggacaaaaaaaagaacctacccttgaggagcttttgatggaattttgaatttgaaataaattactttaattcagttagaaaaaattaccagttatcacatgataaaatgttaagtagtataaggccacacagactcagagagcacaaaatcaatgtggaaatgaattagtctgggaaggttccattcaagagctggaatgtaaatcagtccttgtagggtaagtcaaataaagatamgcagataggaaagtacagaaattgctgttagtcactctacctgtcagttttcttgattacatgcaacaagaatcaattctaacttaaacacagaaaagaacttattgtaagtatatactatacttcatagaatcaacagaaagttgagaacaaagctaagaaaatgggcaggaaccaagggaagccacatagctataaaacacagccaacatcatttggtaggatagtctggggacgtctccaccactgacatgcaacgaaaacagtcaccagaca

SEQ ID NO: 483553 - DNA, 540 bp, Homo sapiens
cctcaaacttttgaactccacccccaccattaaaaaaaaatgcagagattctgtaagggtttctggtattttttagcacttggagaaccagtattgtgattctcaatgatctggatgttggagaggcacagcaatgccgggaatcctgtctgagttcctccatgatggcacctttatcyttttcaaaagctccctcatttcaaaaactgccacataaaatatatccatgggaaagctagaaaacaacaaggtcttgggaaagcaggctctattgaaacatccctaacatagtcaattctctgtcaaggggctgctgaaactatcacagagacttaacacagaaacgaaacagaaagtcactaaatactggctagtgatagctcaacaattcatatatataaatatatatggtgtggccaatatggtaagaagattaaaaagtattgagaacctactatgtgcctttcagtgtattaagaattttacatttatagttttaagtcagcagactcaagtatctgccttcatctccagcaattt

SEQ ID NO: 483554 - DNA, 629 bp, Homo sapiens
atacattcccttttatcttaagcaagattaaatctgacatgtagtatttgccaccaaaaaaaaaaatgtactaatataaagtaaaaaaaaaaatgggcggggggcagaatgtattcaggcaaatgacatggatggagtttgaagtcccctctccctgtgtcacagaagcagcaatacgtctgttggggcaggatgtaaaacttagataggcaatatttaggatgattaaaggttggtatctagagtggacttcctggcttcaaagcctgcctcattagtaagttgagtgatgccaggcaagtcatttggccctaccatgcctctgtttcttcakctgtaacttggggtgagtgatggaacctactcaatagagttaataaataaattaagtgaggtaataacatgaagcatttagagggactggccctgagtaagcataattgtgatggctatcattatttttaagccctccctttttacctttcttctttcctaagtccaacatttattcttctacagtaaagaatgcacagtgcttaggaactgaagatggatgcccctaagtctggccctcagatatctcagtctgatggagaagacctcacacctcattatgaatctgggtttag

SEQ ID NO: 483555 - DNA, 554 bp, Homo sapiens
ccttaaatgctttttaagtattattagcatagatgcttgtttgattccaaacttctgctcccctgagagccctgacggtaggaaccagaatccgggagggtggcagaaccctcaggcagagatagagattagtatgcagaacctaattcatgacttcttaaaagtcagttttcctttttttttttttctatttttctattttcaggttcccaaagagagctcaattattcagtgttacaaaatgatcattgattatcttgaaaatccaggcaaggaaaaaaaaaggtaatgatactgactactcagttgcttagatagctttttattaagagayataattgttttttacaccttattaaataacatgaagagcaggaaagaaacagcattattggtgatttttaatcaggtttctataagtttcagtcatgaagtaattattcaaacaaatgaaggaagacagcacaatccgtaactgcacataaatatatattaaagaaataatatctcattttaagataaagtacataggtggtataaatgcaagtacggca

SEQ ID NO: 483556 - DNA, 556 bp, Homo sapiens
tttgcaatttcagccttcttttagttggagacaatattcccaagagatataagggtggagggaccctgctcttcactgtatcacttcatcttaagtggacaaaggccaattgattgaccaccacacaactaactctagagcatcactttaaatgacagtttccagatagaacaaacacaagattgggtgttttatgtacttcatttmctctaatctgcacaaccacttggtgaggcagctatttcgtgactcctggattgattgatcaatcgattgattttactattttcactactttaaggcaaactgctttttgagaacatcagattcttagctgccttcatatatccatggcttaccctccagcatgagccacttttgcaagctttaagtcttacctgcttcaatctttgtaggtaagaattggaggaatggcagctttgcctggcgattagatctttacaacagaatggatttgatttttgacatcaatgaacaaacccatttgtctgctccttcatttcagtactagaaatccatcatagtttatctgcca

SEQ ID NO: 483557 - DNA, 491 bp, Homo sapiens
ggagggaccctgctcttcactgtatcacttcatcttaagtggacaaaggccaattgattgaccaccacacaactaactctagagcatcactttaaatgacagtttccagatagaacaaacacaagattgggtgttttatgtacttcatttcctctaatctgcacaaccacttggtgaggcagctatttcgtgactcctggattgattgatcratcgattgattttactattttcactactttaaggcaaactgctttttgagaacatcagattcttagctgccttcatatatccatggcttaccctccagcatgagccacttttgcaagctttaagtcttacctgcttcaatctttgtaggtaagaattggaggaatggcagctttgcctggcgattagatctttacaacagaatggatttgatttttgacatcaatgaacaaacccatttgtctgctccttcatttcagtactagaaatccatcatagtt

SEQ ID NO: 483558 - DNA, 629 bp, Homo sapiens
gtttattcagtccaaggcctaacttcctgctttatacgcatctcgtgagctcccagtgccagacatcctaaaataaattaccaaatggactccaggaacactccttgttcttgttataaatttcaagaaatatatagaacttcctatagacccacaggacagccctttcagatgtgctaagaacagcctggctttcctcttctggaagatttatctcctagagcccatgggcaaagagcagtggtaagacctctgcggttacaaactcttttgcagtctagttcaaagaaaacatcatgggctttggagtcagaaagatytgagttgaagcctgagcttgctacctactatagctgcaaccttatgcaatgtgctttattttccttgaccatcaggatcttcctatataaggtaagtgaacagttacagtggaagaacactgcaataattcagtgaaataatgtctaaaggcaacttcatggtagtggaaatacagtctgtgtacaagaactactgagcccctctttaaaaagaggtatcaccttcatcttcctaccaacttcatggagtgtaaaaaggacacagcacattgcaaatgctgctgaaattgagatatggggaggtaaaat

SEQ ID NO: 483559 - DNA, 475 bp, Homo sapiens
taatagtgggtgccagacacacagtaggtgctcaataaatgttcaytgagtggacacagacaagcttgaatgataatctgtggaaagaagtcttatttaatacctagtcatgttctgcttggcattcaggacctccatctatccccagtggtttcaaactctccacccagatattatatcttagtgttttattgcaagtctcaacattagcaggacaatctagacctaaaagagccaagaattcagggaatagacacattctagggatgaacagaagaatgggaaacaactcaggtaataaaatggtaaacaggatgaaaaagccagataaattcagtaagtgcccaccgacctccctgtctgccaggcagtgtactatgcactgtggagataagagataaggtcatcatagtcttgagcctccaagtccctcatgactcaacctgagagttccatcaggaaaggaaatcatttc

SEQ ID NO: 483560 - DNA, 549 bp, Homo sapiens
catgtgttctgtagcttcttatggcttttcattgggtttgggtctctctctgctttcctcatattagtaatgattctggaataatggaaaarggctcaattcgagcttcacggcaatttaagtatcactttttatagttttctccctcacatttctacagcatcctgtctactaatattaacaccccagcttgaggcaggcacagaccaatttgctttatggattctttgacccctaaaagtccttgctctgtttctgagctcttccaacaggagcctggaattagccccacaaacctatatctgcttgtcccctacaaaggcaagtgagaactaaggcaacctttttctcctctctcacagcaaactgcataaattttaaatgtacacatatccttgcttgcttttagtaattcaaatagcaaatctgttcagagaacatgtgaagtagatgtgattttttattgactgataacatgaaactcatggaatgaacctaatatgaactttctgaaatcactgtggttgacatacatgaaaaaaacttgga

SEQ ID NO: 483561 - DNA, 463 bp, Homo sapiens
tctgtatccaagctgatccctcagagttgtctgaaattgaggccagggggcccaagtctttataactgccccactccatcagccagtcatcagctatgggaaaggacttcaccttggatgaagccgtttccttccgccaagggcaatttccagtgaaggatgaaggtattcccagcaccyggggaatgggtgctaaggcctcgaagatggggtctatgcagaaaccacaatattcactcctgagtggagaccctgctggccaaggcaggcaggggagggagcctgggtgcggggacatcaccttgtcagttccagttccagccgatggacccactgccctccatgccttttcagaaacccacagggcattctctccccatcctcaggctcctggtggtctcagtgagccagcctgtacccctgcagagaagctaacagagacatcaaagccgcagcctcttgc

SEQ ID NO: 483562 - DNA, 570 bp, Homo sapiens
gtgagcatgcaccctgtgcagtagggtgcagtagggtcttccctactgaggacagaactcacctggagccctggtaaccatatggcagcctcgcggcccctcccaggaggttcaggttcagcggggctggctggggctgcagcactgtgktttttacaagttcctaggtgactctcgccatcaggagacagaggagccctgctgagtgggatggagtcacacagactctggtgggatggtggatcagtatctgcctcactgtgtggctttgaaaaatcaaagatgctactattccagagggagcactggatgagatttcaggctcccaccctccagtccaagaacagagtaggtgctcagccaattgtgttattgtgggacactcagcaatggatgcaggcaagggggaccaggaggaaggcccccccagtaggcacacagcaagccagggttggccctccacctgacctttgggtcagttaggtcctgccaggagataaagggtcccagcagtggggtgcaaagctttaggtcaaggcattcccccaacggggagccttagtacttgga

SEQ ID NO: 483563 - DNA, 570 bp, Homo sapiens
cagtagggtcttccctactgaggacagaactcacctggagccctggtaaccatatggcagcctcgcggcccctcccaggaggttcaggttcagcggggctggctggggctgcagcactgtggtttttacaagttcctaggtgactctcgccatcaggagacagaggagccctgctgagtgggatggagtcacacagactctggtgggatggtggatcagtatctgcctcactgtgtggctttgaaaaatcaaagatgctactattccagagggagcactggatgagatttcaggctcccaccctccagtccaagaacagagtaggtgctcagccaattgtgttattgtgggacactcagcaatggatgcaggcaagggggaccaggaggaagkcccccccagtaggcacacagcaagccagggttggccctccacctgacctttgggtcagttaggtcctgccaggagataaagggtcccagcagtggggtgcaaagctttaggtcaaggcattcccccaacggggagccttagtacttggaagggaaactgaccacaacacaaaacaac

SEQ ID NO: 483564 - DNA, 568 bp, Homo sapiens
agcctctgattggcacagtgctggccatggaccctgatgcggctaggcatagcattgggtaagggggcgtgtgtcgatgagaatgataaggacaatccggcctggatgttcctatgcctgctggtctgaggccaggactcagagaggggaactggcttctcctagcacttacagggaaagtgacagaggcaagaccagaagcccaagctcttgcacttggcagcctggcatcttgacctgcctggactcccccacctagcatggtcctgggcatccagagctacttgtcctctgtccggccttgaaggcttattctctgcaccacagctctcaccagtcctatgtggtaagatctgacaktcaagaaagcaaccaatcagacgacacaccagaggccccttcactaaaactgtattcttgaatctatcttccccaaaccacaaaagtaagaagtgttcattttatacagtgaaacaacacagagatctaccaagaaaacactgataacccccactctcagataactcatgttcgtggcctaacctggtcctattgctcctttcttttc

SEQ ID NO: 483565 - DNA, 236 bp, Homo sapiens
aggtagaattcaaaatgtgaagcagcttccaattttgagattgtgagtttctctagaaattgtgtaatttttgccagagggaggggcaagagttggagttttgcatcctctatctatattagaaaatcacaatcaccctccaggagaactattaatactcccactttacccaggagcccgcyaggccaaggatccctggcgcctgccgggcccacccagactcacttctgccaaca

SEQ ID NO: 483566 - DNA, 588 bp, Homo sapiens
gagggggaggctgtgggaaggatggagggttttagttggcaggtgtctgccaygtgatgtggcctctaaacagccatcttgtctgcactgaaagaaggtggtctgcttgcttcatccttgtccacaagctggtcaggccacttgtggagaatagcatgcagttctaggcagtacactctgaaggacggaaacaaactggaacctgtttgtaagacacagggaaaggaaatgaacccatagaacatgagctccttcagggtaaagattgctcgtttgcatctctctgaagctttagtgcctacctacatcagtgtccaggcctagtatgtgctcacctgttgtccattgaataaataagagattggggttgtcctgtatccaggacccctgagcccaatttgagttcaaagtaaagaagaactttcgaatagtgctttcccctggctgccattagtgggaatgtgcatctgcacgcaggatgtccacaggcacaggggagtcaagcttaggtgggtggttagaccggtgggcctcaagattccatcactctctccatgcgctggactctttgatgggagagagtaaggg

SEQ ID NO: 483567 - DNA, 588 bp, Homo sapiens
gagggggaggctgtgggaaggatggagggttttagttggcaggtgtctgccacgtgatgtggcctctaaacagccatcttgtctgcactgaaagaaggtsgtctgcttgcttcatccttgtccacaagctggtcaggccacttgtggagaatagcatgcagttctaggcagtacactctgaaggacggaaacaaactggaacctgtttgtaagacacagggaaaggaaatgaacccatagaacatgagctccttcagggtaaagattgctcgtttgcatctctctgaagctttagtgcctacctacatcagtgtccaggcctagtatgtgctcacctgttgtccattgaataaataagagattggggttgtcctgtatccaggacccctgagcccaatttgagttcaaagtaaagaagaactttcgaatagtgctttcccctggctgccattagtgggaatgtgcatctgcacgcaggatgtccacaggcacaggggagtcaagcttaggtgggtggttagaccggtgggcctcaagattccatcactctctccatgcgctggactctttgatgggagagagtaaggg

SEQ ID NO: 483568 - DNA, 588 bp, Homo sapiens
gagggggaggctgtgggaaggatggagggttttagttggcaggtgtctgccacgtgatgtggcctctaaacagccatcttgtctgcactgaaagaaggtggtctgcttgcttcatccttgtccacaagctggtcaggccacttgtggagaawagcatgcagttctaggcagtacactctgaaggacggaaacaaactggaacctgtttgtaagacacagggaaaggaaatgaacccatagaacatgagctccttcagggtaaagattgctcgtttgcatctctctgaagctttagtgcctacctacatcagtgtccaggcctagtatgtgctcacctgttgtccattgaataaataagagattggggttgtcctgtatccaggacccctgagcccaatttgagttcaaagtaaagaagaactttcgaatagtgctttcccctggctgccattagtgggaatgtgcatctgcacgcaggatgtccacaggcacaggggagtcaagcttaggtgggtggttagaccggtgggcctcaagattccatcactctctccatgcgctggactctttgatgggagagagtaaggg

SEQ ID NO: 483569 - DNA, 486 bp, Homo sapiens
caaagtgtaggagggggaggctgtgggaaggatggagggttttagttggcaggtgtctgccacgtgatgtggcctctaaacagccatcttgtctgcactgaaagaaggtggtctgcttgcttcatccttgtccacaagctggtcaggccacttgtggagaatagcatgcagttctaggcagtacactctgaaggacggaaacaaactggaacctgtttgtaagacacagggaaaggaaatgaacccakagaacatgagctccttcagggtaaagattgctcgtttgcatctctctgaagctttagtgcctacctacatcagtgtccaggcctagtatgtgctcacctgttgtccattgaataaataagagattggggttgtcctgtatccaggacccctgagcccaatttgagttcaaagtaaagaagaactttcgaatagtgctttcccctggctgccattagtgggaatgtgcatctgcacgca

SEQ ID NO: 483570 - DNA, 588 bp, Homo sapiens
gagggggaggctgtgggaaggatggagggttttagttggcaggtgtctgccacgtgatgtggcctctaaacagccatcttgtctgcactgaaagaaggtggtctgcttgcttcatccttgtccacaagctggtcaggccacttgtggagaatagcatgcagttctaggcagtacactctgaaggacggaaacaaactggaacctgtttgtaagacacagggaaaggaaatgaacccatagaacatgagctccttcagggtaaagattgctcgtttgcatctctctgaagctttagtgcctacctacatcagtgtccaggcctagtatgtgctcacctgttgtccattgaataaataagagattggggttgtcctgtatccaggacccctgagcccaatttsagttcaaagtaaagaagaactttcgaatagtgctttcccctggctgccattagtgggaatgtgcatctgcacgcaggatgtccacaggcacaggggagtcaagcttaggtgggtggttagaccggtgggcctcaagattccatcactctctccatgcgctggactctttgatgggagagagtaaggg

SEQ ID NO: 483571 - DNA, 430 bp, Homo sapiens
tcaaactcagcttgattcacgtgcttgactctgtcacgacatgcaaacaaaaattwaaaacgggcatttttataattcacatgggtggtgtgttggggaggagacaatattttaatgagatatccagagagaaatacatggcttatgccatttttcttgttctcactcagctccagtgagtctggactttccttatttctcagacatattatgttctcttctgtgttccaacttccatgtgtttttctctttgaaagtttcttgtgtatatccctattcttcacccaatacctgcctaaatgctaactacccttcagatccccgtactcactgcttgtcaaggaagtggtctctgaccaccagaacatgtggaaatgcagaattataatcttttagcttttttttttttgatggagtcaaattagttctg

SEQ ID NO: 483572 - DNA, 474 bp, Homo sapiens
accactgtcccaaacctcgttgacctggggtctgtcctgggccaggctcagcagagctgtggaccttccaggagtttggccatggggctgagctgggcyctgccgagagatcatgctgacacctgactcagcagcaggtggcccagggacccatgatcttcctccccctggtccctcagactcagtcccctcttgttcatttcatctaaatgctgtgctgtgtcattgggacacttgctgattattcagtgggaatagttgggtcatttaagcaaccacacacccctgtggagtcaacagggcctctggtctcatttcagccatggtgctgctccttctataccattccctcattgccacaagagataagcaattggcaccctcagctcgtctgttatttatttatgtttttctcatcaatgttttatgtaaacttgcaaaaagcagcagaaaaccatagtggactgagaatct

SEQ ID NO: 483573 - DNA, 474 bp, Homo sapiens
accactgtcccaaacctcgttgacctggggtctgtcctgggccaggctcagcagagctgtggaccttccaggagtttggccatggggctgagctgggccctgcsgagagatcatgctgacacctgactcagcagcaggtggcccagggacccatgatcttcctccccctggtccctcagactcagtcccctcttgttcatttcatctaaatgctgtgctgtgtcattgggacacttgctgattattcagtgggaatagttgggtcatttaagcaaccacacacccctgtggagtcaacagggcctctggtctcatttcagccatggtgctgctccttctataccattccctcattgccacaagagataagcaattggcaccctcagctcgtctgttatttatttatgtttttctcatcaatgttttatgtaaacttgcaaaaagcagcagaaaaccatagtggactgagaatct

SEQ ID NO: 483574 - DNA, 474 bp, Homo sapiens
accactgtcccaaacctcgttgacctggggtctgtcctgggccaggctcagcagagctgtggaccttccaggagtttggccatggggctgagctgggccctgccgagagatcwtgctgacacctgactcagcagcaggtggcccagggacccatgatcttcctccccctggtccctcagactcagtcccctcttgttcatttcatctaaatgctgtgctgtgtcattgggacacttgctgattattcagtgggaatagttgggtcatttaagcaaccacacacccctgtggagtcaacagggcctctggtctcatttcagccatggtgctgctccttctataccattccctcattgccacaagagataagcaattggcaccctcagctcgtctgttatttatttatgtttttctcatcaatgttttatgtaaacttgcaaaaagcagcagaaaaccatagtggactgagaatct

SEQ ID NO: 483575 - DNA, 634 bp, Homo sapiens
catcttagatggggttctctggaagcyaactctgcaatagagatgtccatgcacagaagattcagaagggagtgggggaggcaacacggggcagaaggagaccctgactcgtgatggagttgacattgaggcctcaggtatccacacagggagctctggagctgggaggcccttcattcagtggcatcttaaattgaggcaaggatttgagatcttggttgattaaaccgaacccctctgaaaagggacacaaacttgaggaagctttctgcaaccaacagcacttcccagtgagggcacagctctgagctgctgggcttctcagcagtgccaggtgggtcacattgaggaggggatctgggcagacttcacagtgtccattcctctggtttgctctgttgggaatcacaggctgccacacagcctgggggccaggacctcagcagaactgggcagtagttctggggcctgatccagacagttggtctaaggacttgccctgtccccaccatatgaccatccaggggtaggacagtggacagaggttgcctctgtctgtctttccacccaagccttcattctctaactcacacaacagccccaagtcaccagatgattctggcccttccaggcc

SEQ ID NO: 483576 - DNA, 634 bp, Homo sapiens
catcttagatggggttctctggaagctaactctgcaatagagatgtccatgcacagaagattcagaagggagtgrgggaggcaacacggggcagaaggagaccctgactcgtgatggagttgacattgaggcctcaggtatccacacagggagctctggagctgggaggcccttcattcagtggcatcttaaattgaggcaaggatttgagatcttggttgattaaaccgaacccctctgaaaagggacacaaacttgaggaagctttctgcaaccaacagcacttcccagtgagggcacagctctgagctgctgggcttctcagcagtgccaggtgggtcacattgaggaggggatctgggcagacttcacagtgtccattcctctggtttgctctgttgggaatcacaggctgccacacagcctgggggccaggacctcagcagaactgggcagtagttctggggcctgatccagacagttggtctaaggacttgccctgtccccaccatatgaccatccaggggtaggacagtggacagaggttgcctctgtctgtctttccacccaagccttcattctctaactcacacaacagccccaagtcaccagatgattctggcccttccaggcc

SEQ ID NO: 483577 - DNA, 381 bp, Homo sapiens
ggtgtgtgcacctgggcctccctccctgcacctgctcagcacgaaggctcaccacaggcacacctggggggtgaccccttctcacctccccttctaggtcctactggttaacgtttcccaaggctctgaactgtgcagccagagtggyacagagaagcaaagggcggcgggacgtctcccaccgggggccatgtggccacaggctctcattccgcacctggccctgaaggtcgtcagaggccacactccaggcctcagggaccccaccctgagaagcagcatctgtgagcagggagcggtcagtcagaaccacacataaaaaggaaactctcaagtggcactttcccccggagtgaaccctaagcagaggcaggagaggac

SEQ ID NO: 483578 - DNA, 381 bp, Homo sapiens
ggtgtgtgcacctgggcctccctccctgcacctgctcagcacgaaggctcaccacaggcacacctggggggtgaccccttctcacctccccttctaggtcctactggttaacgtttcccaaggctctgaactgtgcagccagagtggcacagagaagcaaagggcggcgggacgtctcccaccgggggccatgyggccacaggctctcattccgcacctggccctgaaggtcgtcagaggccacactccaggcctcagggaccccaccctgagaagcagcatctgtgagcagggagcggtcagtcagaaccacacataaaaaggaaactctcaagtggcactttcccccggagtgaaccctaagcagaggcaggagaggac

SEQ ID NO: 483579 - DNA, 615 bp, Homo sapiens
gtggcctccaccagtctcccttgctgcctgggaatatgatgttcagggccrcagggctgaattctccctgagtgctttatataaatacccgcttcagggccgacacgtactccatcatagggacccgtcaaatgaaccagccaagcccataaattattgcaaaaaccattccaaacaataaaggcaattttacttactgaaccattaaatgtacatacttaaattagacccaacaagacatcgcgtggggatgtctcagggccaggcaaacaatgagtttcgaggaagggctatcttgtgttttccccacctctcacatgaaattaatgaggtgcttcatatttaatcatcattacaatcatatctttatttagttacttagctgggtttgacctgctgcctcgggtagcctggatgtcacctctctgccctgggctgtcctgacagccggtgagaggtcagcaggaggctggtgcacagatgccaggctgctccagcccagtgaggcaggcttggtggatgtcgcttctgcctctgggatctactgagggccagcctgcagttttctctgacctggagatcagagcccatatccgggagacacacaatggcagc

SEQ ID NO: 483580 - DNA, 561 bp, Homo sapiens
gtatctcttcagatattgcctctgcctctccacctacctcctcgtggcctgtgccacttcgaaaccgctgagtgccttgcaaacaacagtggcccagtgtgtcgaactgacttctctgggcatcttcttttctctctgggatcctgttgtctcctgatccctataaatcctggcttcctaaatasatctgaattccaatgcttggcatccagccccatgggatggctgaaacggctcagtttctccgtctcttaggggctgttgtcttgtgagcttcttggccctctgtccaagccatttatggatcaacagacaccccaggaaggaaagaagtgtagaatgtcatgattagcccatggggtctcccttcactctggggtcctggcctgcctgttcaagtcctcctgccttgagagctcctgggtgtctcacgttacccagctttctagctctcagtgggggactggttgtccatagcgagcctgtcccctagcacatcctgacgaatgcagcagggatctctggtgtgcctgtgggctcattaaaagagaatgtaactgt

SEQ ID NO: 483581 - DNA, 596 bp, Homo sapiens
ccaagggggtcactgaaaccagaacctcttttccccaaagccagccataaaacctaaaatacatgactttaaccttccctccacctttctgtgtaagaactggccataaataaatgatctgtcctaccttgtttgactggaggccataagacccccatgccagagagggtccagctcctcacccagaaggaaggaacactgcacagagaggccaagaagaatctaagcggatargccttactgagcttccccactcagtccgtcagcatcagctcaaaccatgtgtgttcaccctgtttctacacggctggttatacttcgatgaacataaaatggacaatttcccctgtatcttttggtcttcattctgaaggctgctgtgtacacttcaataaattttgcatgacttttcttcaatgaatctgccttttgtaagtttgcagcaaaagttcagagggcaaagggaacatggaccctacagaaccaaccaagcaaggactaaggagggtgagtcagaaccagaaaaagccagtgggcgcacccgcctttccacataacagagctggggccttgcgtgggcttctccatttatccca

SEQ ID NO: 483582 - DNA, 610 bp, Homo sapiens
tggcttcggacagccgtcttttcactgtgtcctcacgtggctttttatctgtggatgctcagggagacagggtgtcgagggcagagcaaaagcacacgagcaagctctggtgtctcctcctcttgtaaggccacagtgcaataggatcagagctccacatttacagcctcatttcaccttaattcattctgtaaaggccctatctccaagtacaatcgcactgagggttagggcttcaatatataaattttggagggacacatgcagtccatatgcctctgccccttaattcaccagtcaggcccctacaaaagtgatcctggctccagcgcttccgtgggatccactgaggtctttgttgcgacctcagcagagttcagtttctctctctgccwgatgctgatcctttgcccccatagacgcgaatcctctctgcacacagagctctgtctcagaatctgcttctcagaataccccacctacgacaagtggatttcccaaacacttagctagtaactaaaaatcagtgtccagatccttctggagagctctgtcctgtttttcaataccaggatgatattccccccaacacaaatattcaccttgagca

SEQ ID NO: 483583 - DNA, 499 bp, Homo sapiens
gtgaccagggtggcagcaggaggcatggaaaagacggatgcatggagaggggtgaagagcgtgggaaccagggctggggctgcccagacctgggcactggggagggcaagggaagcgtcagtgacaactccagggtctgaacctgcggggtgaggaagcaggtggtagcagtgactgcccgggagtctgaggagggggctggttaagtggggaaggtgagcgtgatgccaggtgtgctggctgcaggggacagaaggtgtgcaggsctctccccggggcccctaggctcctgaaaggcggtgccctaagcatcggctccatctcgttgtccctacccccgtccctacccccgtcacagtggccggcaagggcccaacacttagcaattgtcaaagaatcggcagacgtgtccagtgggagctgaggcagggacagggacatcaggcccacgtgttgaaggcgtgggcctcccacaccactgccctcagtgttgtgtaac

SEQ ID NO: 483584 - DNA, 533 bp, Homo sapiens
gcagacctagcccaggggaggttaccgggcaggcagcttcacaaacccacacacaagcaaagggatgttttatttgagaccacgaggccatggtgattcccaactcaccaatccatgctccggcactgacctgctgtgtgaactcagacgagccccttaacctctcctccacctcaggtgttctcccccgtcaaatgcaattcacagttttagctctgccggccccgccaggctgtgggcagatcaggtgagaaaaagggatgtgaaagcaagtttgtgaacggcacagcacggagcaaaggcaggacactgtcacttcccatcatgggtgctgaacacagagccacacccctgccagcctcaggccggggtgcccagcctcccccaaaaagctgcatcacagggctctcccaagcccttatttgcatttagctcccctctgtggtcctcsctgcagtggctgaggatggtaataatgacagtagctgagcttcgttgagtgtgttgcacaacagcgcattgcactctcccag

SEQ ID NO: 483585 - DNA, 533 bp, Homo sapiens
gcagacctagcccaggggaggttaccgggcaggcagcttcacaaacccacacacaagcaaagggatgttttatttgagaccacgaggccatggtgattcccaactcaccaatccatgctccggcactgacctgctgtgtgaactcagacgagccccttaacctctcctccacctcaggtgttctcccccgtcaaatgcaattcacagttttagctctgccggccccgccaggctgtgggcagatcaggtgagaaaaagggatgtgaaagcaagtttgtgaacggcacagcacggagcaaaggcaggacactgtcacttcccatcatgggtgctgaacacagagccacacccctgccagcctcaggccggggtgcccagcctcccccaaaaagctgcatcacagggctctcccaagcccttatttgcatttagctcccctctgtggtcctccctgcagyggctgaggatggtaataatgacagtagctgagcttcgttgagtgtgttgcacaacagcgcattgcactctcccag

SEQ ID NO: 483586 - DNA, 613 bp, Homo sapiens
gcaggcagagttgagcacgcggctcacattcgcacatgcttggcatcatgaaccgtaaggaagagcaaagctggtttccagaaagacgttaactcacagtcgtacttctctccacttcccttgctcctctccctggcctctctacatctccctgctctctcctgcaccagggcttggtcagtgcttaactctggcaggtgccacgagtgctgcctgctgcagcttgctaggattcagatgccactcatgaggcatgggcaagtgtgagcacacagaaacacacacgcacacctgcacaggcacgtgcagcctctgtggggcatgtttagaactcctgggtctgctggcrggtacctttccccctcgtgctttccacgtgcagccaaggcctacttctattgcagtaaaaattagtctccgtgtctgcctgtctgaacacaagctaacttacaaggaaacatgaaatttaattttaaattgaagttaaaaattttccattagacttaatttaaaaatttttagcttcattttaaaatttaattaaattagatttaactggttccttgaaaattgctgatctctctctgaacgtaatcctattttcaaaattatg

SEQ ID NO: 483587 - DNA, 613 bp, Homo sapiens
gggctctggcaccgctgcttccgtttccccagaggactctgcccctcacctcctcgcctcctrccatcggccctttgctcagaggccaccttgtcagtgaggccatcctgaccgcctgtttaaattggccccaacctcttttcgtcttctttcatctccgtagcacttaccccaggaccaagccaaatccctccttggctttctttgtgtggtctccgcacccagaaccacacttcacccgggagggattcctgcctgtgcagtgcatgctgcatcctcggcctctgtgcctggaacaagctgggtgtgtcctggatattttcgaaggaaggaggcatgaacatgtggctgagggtgaaacatgatgaaggccatgaggaggaggccagctttggagacggagggagccatgtccttggatgccgggagtgaatggcctggggaaaccctgcgtgtttgggcagcagcctctggcctctggaagtagacggtcatgattttcgggtgaaaaaaggaggcaagggcgtgatttcctcaagccatgcacgggaagtggagggctgatgagtgccatgagtcaggggtgagttttgcaggtgagtcctggggcact

SEQ ID NO: 483588 - DNA, 547 bp, Homo sapiens
cttctctccacagcttgatactaacttgtccttcagacctgagggtgcagatgaagagggctggctggtggcctttgcacacaagagcagctcagcttgaagtcctgtccttctgccttccatggagactccccccaaccaagcctcatttatgctcaccctgtgaggcacctttgagcccctgggctggtattccaaggtacccattctgcacatttggtgatgttctctggcctccagggaacttctctgctctggtactcgagcatcccccacctctgtgacatgcctgtttgcaatggaagtgccagggacctggggcgatgctcattgcattaatttagtttccatgtgtttgaatcacagcccatacagatttttagctccttgatcccacagtctgtccacatcccctgccttgctcacaccatgggggccaccgaccacatgctgattgatgacagaatctgtgagctcgggcaggaagaggaacrcaggcagacatgaggcagaacgttccttaacaaggggtgagagagattggagt

SEQ ID NO: 483589 - DNA, 305 bp, Homo sapiens
tgcttttgcactacagcaacagagttgagtagttgggatcctatggccctcaaaaccatttctgatcttgccttttacctaccactgttttatagcattggcttttaatctttcttggaccagagacccctttgagactttgataaaggcttcgagattgaatatatgaacacacacagaatatgttgtattcaatttcatgaggayaagtgactccttgaagcccattcatcaatcccctagggattcgcagacaccaggttaaaaattctgttgcccaaggctagtgaggctagagctgagaa

SEQ ID NO: 483590 - DNA, 561 bp, Homo sapiens
gcaaaggcagtgaaccaagatgcagggaaggccctgtatgatggggaggatctaaagcaaaagccttttgtgcattgcctcaggttcagcagcagcagccctcactctgaagcctaccttgagaagccaggcatttctgtgaaaagctcatcagcatgcatttacaatgcaaactagaaccaactcccagtcagctaataacagaccccaggaaaaagaaaaggtcttccagacctccccgacacactttagaaccctcaggggtgaaaaagagggtgctccagggcagtgcaacttaaactgtggttgaaggacaaacagcctctgcaatacttgaggagcttgttagaaacccaaactcacagccccctccagacctacgtacagaatgtayattagcaagattcgctaggtggtttatgtgcacgttaaagtttaagaagcactgcctgagaatcccttggtcctaattaattcttttccacactcagatttgctaatgggtttcaccttatctcttgactcttgtttgatggcaacaggaaatagtagcatttcagg

SEQ ID NO: 483591 - DNA, 590 bp, Homo sapiens
aaggccctgtatgatggggaggatctaaagcaaaagccttttgtgcattgcctcaggttcagcagcagcagccctcactctgaagcctaccttgagaagccaggcatttctgtgaaaagctcatcagcatgcatttacaatgcaaactagaaccaactcccagtcagctaataacagaccccaggaaaaagaaaaggtcttccagacctccccgacacactttagaaccctcaggggtgaaaaagagggtgctccagggcagtgcaacttaaactgtggttgaaggacaaacagcctctgcaatacttgaggagcttgttagaaacccaaactcacagccccctccagacctacgtacagaatgtatattagcaagattcgctaggtggtttatgtgcacgttaaagtttaagaagcactgcctgagaatcccttggtcctaattaattcttttccacactcagatttgctaatgggtttcaccttatctcttgactcttgtttgatggcaacrggaaatagtagcatttcaggaagggtggaaaatataaaaagcactcccaacccaagcctccaaaaaacagcaattt

SEQ ID NO: 483592 - DNA, 571 bp, Homo sapiens
gaggctgctggtcaacatatacccccaaaaaagattacgctgtcccttagaagccacctccatttcacagcagtcatcccattaagtggggagatatgcggtttcactttggagataggacagcagctcaagctttccacgaatatatattaagggaagagagaccccagaaagctaaatgacttgatgacattcaggaggctgaaagttaggctacaaaaatagtgcttcagtgaccaaccttggtgcacacaggttttttttttttttccttttttcttctcttagattaccaaatacagcactaayatcatttgaaagaagagtttgcttgagcttatagctacgaaacggggaactttgtgagtacaatgccacacacatttagaagcaactactgtctaacaggggctttggacacaaagatgcatagagcacagccctgcccttgagaatcttgcttccacaggccgaaatcaaagtccacataccactagaccataaatggggagagtgttgtcctagatgctgaaagctctagaatccagtttcagctctgccactcactagt

SEQ ID NO: 483593 - DNA, 465 bp, Homo sapiens
ggtggagttaagatttgaagacaggtcaggtgaatttgacaccaggaggtccccatgctcccctaggagaatatctccaaggctccataatttgtgaatccaactgctaaggtgttgatgactagatctctcccttccccatcctyccaccaccttagcaacattccacgtgtaggagcttcctcaaattgtccctcatccccatcaactatgcttgtgaggtgcatagttgcacccctaagaggggtgccttttgtcttgtgtgaatagtcaaagggttaaagtaaaaggctttgttgctggtctccattggaggcagaagtcccctccttggaatgacagatgaagaatgcctcttctgaattgcaggggttgggtgctcctggggagggtggggagtgggagtggtaagggaggaatttagtcataggtcgagatctgacccttggaacactcaaatccacc

SEQ ID NO: 483594 - DNA, 465 bp, Homo sapiens
ggtggagttaagatttgaagacaggtcaggtgaatttgacaccaggaggtccccatgctcccctaggagaatatctccaaggctccataatttgtgaatccaactgctaaggtgttgatgactagatctctcccttccccatcctcccaccaccttagcaacattccacrtgtaggagcttcctcaaattgtccctcatccccatcaactatgcttgtgaggtgcatagttgcacccctaagaggggtgccttttgtcttgtgtgaatagtcaaagggttaaagtaaaaggctttgttgctggtctccattggaggcagaagtcccctccttggaatgacagatgaagaatgcctcttctgaattgcaggggttgggtgctcctggggagggtggggagtgggagtggtaagggaggaatttagtcataggtcgagatctgacccttggaacactcaaatccacc

SEQ ID NO: 483595 - DNA, 646 bp, Homo sapiens
gtattagcaagaggtgtttgtcagaggttagtgtttttggcaacaaggtttggggataatgaacagattccccatcaatggccctcagccaccatacactaggcatacccaaaccaaacagacccctttctcttttcacccacccttcccagtttcttatctctatccttggcaccacaacccaaaccaggtttctaaggcatacactgcagagtgagcctagattcacacctccctaacatcctgattgccatcagaccccaagggcagttgacatgaatatcaccacccaccatcccagctctccctctgctgtatcccataccactgctgtatccacccacttccttctccactacgtcaggatgctgaaaaaaaaatcacagggaagtacagagcttttkgtaacagatacccatgtacctgccacttatttaatgactactaacatttcgtcttatttctcttaatttttacttctttaaaaaaaatgcagtaagtacactgacatccttgccttcacaacatttgtgtttcatctgattcatatttttaataggtaaaagtcatatcgtacaagacttaaagagtatgagaatttgcccctttgtcatgtcccgattgtgtcatctgatgctgtgagcat

SEQ ID NO: 483596 - DNA, 599 bp, Homo sapiens
tgcttaaaatgggtccactggtgatgtcaacacaatcatgtccccacacacagagcttggtgcaggcgcagggcttagccaaccacaggctcaagtcccaagtgccatgtccccggtttgccctggagtgtgagtgtgctgtgcctgtgtaagaagtgcacatgtctttagccataaatgttgcatggctgttataaaccatgaggtctggtaataccagcagcagcttatcaggtttcaaatgtaccactttcttctaggtttccagatgctctttattcattctgtctctctccccgccaccaccaactctcctctccttttcctcattctaaaatgccccatattgtttactttaatctaacaatttgtaattaagttgaatataacttcaagagtggggaaaaaccgctagaagtgtctatttaaaggagaaacaggagtggaaatttaccacatgcctcactgtgccagaccattcattggtcacaggcagacyaaatgaaggtgactcaaggctcttcaacttagaggaaagaaatggatgagaggatctgatttaatatcattacaaatttacaactcattttcaacatatt

SEQ ID NO: 483597 - DNA, 554 bp, Homo sapiens
ctgcacttccatccctgactgatttcatcactggacaaagtgtaagctggagaaggcacaggaaaggcgtgttggtgcaggtttcacccctgttcctgcaatgccattatctggtgctctcccagtgagaaattcatcagtaggacaggatgcccaggaatgtgagatctgagtccagggaagtggtgtctgtttttagacactgtagttgctaagcttcaccgtcttctgcaaataaaacagcattactttgcaaagccaggtactttcctacttctgttccgcagatatctaaatgccctagcataagaaggattaaacagaaaaaaatctccggatatatcattgtgacttactaatgttaggattttcttcccccagcaacatgtcttcaacattgtcagagcatttactgattgcagtcaagggaaaaagcaatggtgactatatcttctttctcaagccagttcctaaattcttaaacagagcttctgggactgtcatctgtcaggaaaggggaaattgaggtccyggtctgctgggccgctggccct

SEQ ID NO: 483598 - DNA, 646 bp, Homo sapiens
agagtaagctctgcactttacataaatgctcaaatcctgcacttttatataaaatgtattgactgaccagcatatattggacacttaactatttagaattttttaaaaaagaaaaaccaaaaaaagatgcttctggcagggctgcctttatgcaaagtattaaaagtgactcatctggattatggctttttctaaccccacccttccgtgtttgcctttccttttgctgagcaaaactttatgccaggcagggctcactgctagtgaggggaatttgggcacggttccaggccccacttgttcccttgtcttgagcrtccttgcagtgatccttacagtgatttggacttgccagagttgcatcgggattggcaggagagtgcccagggctgcagcgatgcatgtggagcactgtgagtggaactggagttggtctggcaggcctggttcaaagtgcagaggtgagaggcagcatcaaaatcatgtaggaatcccctaagcattgacatacgttgtcccacccagcatctctgcaggtagagcccaggcaagcatagagctgcaggggatgtgttaatattgtcagtcctggagtgtgaggacatggctaggaaggtttagggattgggcattgcagatcctgcag

SEQ ID NO: 483599 - DNA, 504 bp, Homo sapiens
cggaaatattttttaatatggattgtgatgattatgaagtaggaagttgtagcaagttcacctctataaaccacctaaaatgatggtagagaacactcagtaaaataactgaaatatttaataaaaagggtctgtcaagccttggactccaacatacagagaaagtgggtgaagtatttgtgtcaggggatcaagagggtggacccctcactctggtgggagcttctggtcatcacttccatgtcgtaaccacacccagttgagtgaaaacgagacagcccgacatgaggcagccgtaggacccacttcctgttattatgtgatgattaactggtgcctgcctaagatcccaaagctacaaaaggcctgtcatgctacccagaggaggctcctttgttggtcaaaaataaataagccaagacccagtgtagagagaggtagaggtagcatgatgacctgacagggtatastttcctttcttccctgtcatctcatctctacatt

SEQ ID NO: 483600 - DNA, 620 bp, Homo sapiens
atctgtgggtacattatgagtagcaagggactagaggataatagtgtcttaatgctggtggcatttgtcactaataaatgttaacaatagctaccatgtactgcgtgccaactatgagacatgaagtcacagagctagtaaggaaggttgctagaaactgtctctgaaatgtatgctcttgccaccactccaagccggctcactgcagggtactggggtgagtgggaatgctctagccctcacaatccaactcgagacccagaccccttgcagcccgggagccggtagtccaggggtagcacctggagctcccctctgagcagacacttggccaagttcagtgaaaaacattccaggcttaaaaaaaaaagtacatctggcatttccagacacggatgaacaagctagcctttctgctcagccaatctgactgattgtgcagaagtagggtattaggatgaatgaaagtaggaaaatcttgatctgattgaaaaatggttgtttgtgtacaaaatacagtcaaatgatgaaytgctcctccagggcaaatgcaggatgtctttgtgctatccacagaggatagaagttggtactgagtcctgcctttgtttctccactcg

SEQ ID NO: 483601 - DNA, 598 bp, Homo sapiens
gaccacattttgtgtttgctccttattcctgcaaccagcaaamcctcagaccccaatgttttcccagtgatgtgttgtagcctcagaaggtgactcacatgtactcttggtcttctattctagattctaaagagagttcactgcctctgcaagccagtagaggctggccctgatgctgcccgcaggtgcttatgggtccagccatacagtagtcttgggtactgcatagcagtgaggattctttctccaaccctgtatcccttaggttccaaagtcccataaggtccttcattatccagtccctacagcttctaccaaaacctcttggggtattgatttctttcatttttctctgtctcttccacaaacccaggcaacaacatcttttcctcttttagcccaaaaaaggtaacagcatccatgtacattaagaatacaaatggatgccatggattggagctatttacagccacacacagccagcatccacagtgttatacccttaacctcccgtcttctagaaaggacttagccacttctatcttctagaaaggctcttaattttggctttcaggacaccacctcctttgacctttct

SEQ ID NO: 483602 - DNA, 598 bp, Homo sapiens
gaccacattttgtgtttgctccttattcctgcaaccagcaaaccctcagaccccaatgttttcccagtgatgtgttgtagcctcagaaggtgactcacatgtactcttggtcttctattctagattctaaagagagttcactgcctctgcaagccagtagaggctggccctgatgctgccygcaggtgcttatgggtccagccatacagtagtcttgggtactgcatagcagtgaggattctttctccaaccctgtatcccttaggttccaaagtcccataaggtccttcattatccagtccctacagcttctaccaaaacctcttggggtattgatttctttcatttttctctgtctcttccacaaacccaggcaacaacatcttttcctcttttagcccaaaaaaggtaacagcatccatgtacattaagaatacaaatggatgccatggattggagctatttacagccacacacagccagcatccacagtgttatacccttaacctcccgtcttctagaaaggacttagccacttctatcttctagaaaggctcttaattttggctttcaggacaccacctcctttgacctttct

SEQ ID NO: 483603 - DNA, 627 bp, Homo sapiens
tgtagacacagatgggaccacattttgtgtttgctccttattcctgcaaccagcaaaccctcagaccccaatgttttcccagtgatgtgttgtagcctcagaaggtgactcacatgtactcttggtcttctattctagattctaaagagagttcactgcctctgcaagccagtagaggctggccctgatgctgcccgcaggtgcttatgggtccagccatacagtagtcttgggtactgcatagcagtgaggattctttctccaaccctgtatcccttaggttccaaagtcccataaggtccttcattatccagtccctacagcttctaycaaaacctcttggggtattgatttctttcatttttctctgtctcttccacaaacccaggcaacaacatcttttcctcttttagcccaaaaaaggtaacagcatccatgtacattaagaatacaaatggatgccatggattggagctatttacagccacacacagccagcatccacagtgttatacccttaacctcccgtcttctagaaaggacttagccacttctatcttctagaaaggctcttaattttggctttcaggacaccacctcctttgacctttctccttcctacctggc

SEQ ID NO: 483604 - DNA, 474 bp, Homo sapiens
ccacttctgcagcaggcacagccagggccagtcaggcagctccagggcatgaagtgtctgtccctacccccagccctgagcatcacctagtggcaggggaggccaagagggagacccctggcctgcagtctccagggcagagaatcagcccagtcagcagagcctgctatgatctctctcttgccctctcagtactggctgaggaggggcctggaccccagacccaggactcctcttcattcttgttcccacaggcttggggccctcacagtcgctctgggctgacttactcccaagtccagcccgttcctaggaycaggtgtttggggctcagagggtttgttttatggccttgactctcatcagggcctgtggcagagcccagcttcccctgctgaagccttttacacagctggacacagacccagctacacaagggtgcacagggacacagacacaactacacacagatat

SEQ ID NO: 483605 - DNA, 514 bp, Homo sapiens
ctgcaagaacagcgccactgaggcatccagaggctgcaacctccaccagcaacagtcacgtccgtggtgtttgtgcttcactacaagtccctggccagcaggctggcasgtttcattttcattttcgtgggcactgtgcacggccccatgttcacaggaatccaggcacggagtggacgtcccctccctgccgcatccccagcctctcggttctctccagaggtcagcgctggattgtttgtgtgtcctgctggagactcccgtacacacagcattgctatgacatcttttttgtggttcttttttgttttgttggttttttggttttggtttttttgagacagagtctcactttgatacccaggctggagtgcagtggtgccatcacagctcactgcagcctcaaactccagggctcaagggatcctcccgactcagcctcctaagttgctaggactacaagcatgagccaccatgcccagctaattaaatttttttttttttggtatagaca

SEQ ID NO: 483606 - DNA, 514 bp, Homo sapiens
ctgcaagaacagcgccactgaggcatccagaggctgcaacctccaccagcaacagtcacgtccgtggtgtttgtgcttcactacaagtccctggccagcaggctggcaggtttcattttcattttcgtgggcactgtgcacggccccatgttcacaggaatccaggcacggagtggacgtcccctccctgccgcatccccagcctctcggttctctccagaggtcagcgctggattgtttgtgtgtcctgctggagactcccgtacacacagcattgctatgacatcttttttgtggttcttttttgttttgttggttttttggttttggtttttttgagacagagtctcactttgatacccaggctggagtgcagtggtgccatcacagctcactgcagcctcaaactccagggctcaagggatcctcccgactcagcctcctaagttgctaggactacaagcatkagccaccatgcccagctaattaaatttttttttttttggtatagaca

SEQ ID NO: 483607 - DNA, 514 bp, Homo sapiens
ctgcaagaacagcgccactgaggcatccagaggctgcaacctccaccagcaacagtcacgtccgtggtgtttgtgcttcactacaagtccctggccagcaggctggcaggtttcattttcattttcgtgggcactgtgcacggccccatgttcacaggaatccaggcacggagtggacgtcccctccctgccgcatccccagcctctcggttctctccagaggtcagcgctggattgtttgtgtgtcctgctggagactcccgtacacacagcattgctatgacatcttttttgtggttcttttttgttttgttggttttttggttttggtttttttgagacagagtctcactttgatacccaggctggagtgcagtggtgccatcacagctcactgcagcctcaaactccagggctcaagggatcctcccgactcagcctcctaagttgctaggactacaagcatgagccaccaygcccagctaattaaatttttttttttttggtatagaca

SEQ ID NO: 483608 - DNA, 514 bp, Homo sapiens
ctgcaagaacagcgccactgaggcatccagaggctgcaacctccaccagcaacagtcacgtccgtggtgtttgtgcttcactacaagtccctggccagcaggctggcaggtttcattttcattttcgtgggcactgtgcacggccccatgttcacaggaatccaggcacggagtggacgtcccctccctgccgcatccccagcctctcggttctctccagaggtcagcgctggattgtttgtgtgtcctgctggagactcccgtacacacagcattgctatgacatcttttttgtggttcttttttgttttgttggttttttggttttggtttttttgagacagagtctcactttgatacccaggctggagtgcagtggtgccatcacagctcactgcagcctcaaactccagggctcaagggatcctcccgactcagcctcctaagttgctaggactacaagcatgagccaccatgyccagctaattaaatttttttttttttggtatagaca

SEQ ID NO: 483609 - DNA, 512 bp, Homo sapiens
tgttgccctgaagcctaggtgtcaacccagggcataaygtcttcttggggcctgctgtccacctgcagactggtgtctgcatagggcctggtatccacctggggtctggtgtctgcatggggcctagtgtccacctgaagactgagtacagacctcacacctgatgtatgcctggggcctatttatccacctggggactagcattcatctggcgcctcatgtccacttaagccctgggtgtcaacctggtgcctaatggccaccagggatctatgtactcacttggggcctggtgctcccatagggcctaggtatacacctggggaatgatgtgcaggtggaggcggatgtcttcctgggtgctgctgttcacctggggacaagggtctccctggggaccggtgtttatcgggagcctcatatgcaccttgaacctgctgtctacctagggcccgatgtccatgttaaggctgggtgtccacctgggacctgggtgtccacttggggcctaa

SEQ ID NO: 483610 - DNA, 152 bp, Homo sapiens
ccacatgtacctgcccatacatacacagacctctctgtgtatcccccagagctacaaatgccaatcttgagaatgaagattttgcaagtgctctgtgccaggcatgatgccaggtccctgacaacamaagactcctctggtttctcccactc

SEQ ID NO: 483611 - DNA, 524 bp, Homo sapiens
tggccaggctggcagggaggaaggaagcccagcccccaagggccagccaaaccaccccaggattgccccaggcctggcagcaggggacacgtgcacccatggaagaagggacaggactgtcyagagcttcttccagggtggaggggcattcataggagcaaactagagacttgcagtgagtttctctggctcttggggtcctggttttcttgtctgcatagtgacctaggaatttccatatcaacaccaaaatggggtgcaatgctcttcctaacagtcacacacttggtatcctcaatcaggagagaaactccttatcatgggttctgggagaggttagtccacaattaaaggggtcagactgcccagggactctgctgggctcctctgttgctgattatggtcaacaataaaagtgcggggaccatgggtgtgagccaccgcacccggccgcttcttccttacccaattcttgctctatttaattatggtcagagaagttgccctcttccttatttcttctg

SEQ ID NO: 483612 - DNA, 524 bp, Homo sapiens
tggccaggctggcagggaggaaggaagcccagcccccaagggccagccaaaccaccccaggattgccccaggcctggcagcaggggacacgtgcacccatggaagaagggacaggactgtccagagcttcttccagggtggaggggcattcataggagcaaactagagacttgcagtragtttctctggctcttggggtcctggttttcttgtctgcatagtgacctaggaatttccatatcaacaccaaaatggggtgcaatgctcttcctaacagtcacacacttggtatcctcaatcaggagagaaactccttatcatgggttctgggagaggttagtccacaattaaaggggtcagactgcccagggactctgctgggctcctctgttgctgattatggtcaacaataaaagtgcggggaccatgggtgtgagccaccgcacccggccgcttcttccttacccaattcttgctctatttaattatggtcagagaagttgccctcttccttatttcttctg

SEQ ID NO: 483613 - DNA, 524 bp, Homo sapiens
tggccaggctggcagggaggaaggaagcccagcccccaagggccagccaaaccaccccaggattgccccaggcctggcagcaggggacacgtgcacccatggaagaagggacaggactgtccagagcttcttccagggtggaggggcattcataggagcaaactagagacttgcagtgagtttctctggctcttggggtcctggttttcttgtctgcatagtgacctaggaatttccatatcaacaccaaaatggggtgcaatgctcttcctaacagtcacacacttggtatcctcaatcaggagagaaactccttatcatgggttctgggagargttagtccacaattaaaggggtcagactgcccagggactctgctgggctcctctgttgctgattatggtcaacaataaaagtgcggggaccatgggtgtgagccaccgcacccggccgcttcttccttacccaattcttgctctatttaattatggtcagagaagttgccctcttccttatttcttctg

SEQ ID NO: 483614 - DNA, 173 bp, Homo sapiens
ttatacattgttgccaggagttaagaactggccctastcttttgcaggacaatctggaaatacccactgaaccttaaaaatcaacctggtctgtaattaattatactaaaagaaatctaccttaaggaaataagtaagaatgcatacaaaaaaaaacctaaataatgtatggg

SEQ ID NO: 483615 - DNA, 173 bp, Homo sapiens
ttatacattgttgccaggagttaagaactggccctagtcttttgcaggacaatctggaaatacccactgaaccttaaaaatcaacctggtctgtaattaattatactaaaagaaatctaccttaaggaaayaagtaagaatgcatacaaaaaaaaacctaaataatgtatggg

SEQ ID NO: 483616 - DNA, 645 bp, Homo sapiens
ctatccaaaagggcagagttttctatgtaattaaaagactgttgtgctgaagctaagccctgtttaactgaagtgagggttgatttataaattacttcyttagcactcttctacctcgcaatgcagagtctcagagttgctaggaaagcatttattcatatgtactaaaaccaagaatcaaaaacaagtatatctttctgagttctactttcttcttcctaacatcataaactcggaggacttggagtgtagaaacaaaacacacgtgatgggaaaatttgggaatgtaggtgaccttcaaattaatcttttcacccagaagagaagaaaagtggggggaatgtttcctgaatatatcttaaaacctttgaaaagaactccatttctgctaagaaaaacctgagctattatcattggagaaaaactgttcccgacaccttccttaccaagcatttctttaataagcgggtgaaagcaggttaggaagagatctcaaaattcacttgcaaagcacatacctgcttttagaagcacaatttgatcattttgacacagttccataaatccatcaatgcgtttggcaaactccaccacatactgtatagcttctgtaattttgatggcacacaattgccacatcacctc

SEQ ID NO: 483617 - DNA, 570 bp, Homo sapiens
gaccagctaactttcgtgaatgaggccgcctgctctttctaaagaacaactttttttcctcatatgcttcttygaggactcttatttctgacccccacccaactttaattttataatttcatctgcttgattttaatccatgcatgccctttatgtttacccctcaataaaatgaagttatcctctttttccccctctagccagataattaacttttggcccacactgatccagagatatttcttccttctcacccccatgcttctgaacattctcaacagaaagttgccaagataaataaaattgcaacacagtacatgcttctacatagaagattctctgcttttctcatctctacttttcttagtctcagacgtaaaatgaaaggtagacatacacccacttcagcagtcccccaaattccaaatttttagttgtactggaaaatacaataatttgggcaggcatacgagcattcacaataaatcacagagttatgaataaatcttggttgtcaaaagcaagtgtgtagccgttccaaagcgtctgccattagaattcagcaaggca

SEQ ID NO: 483618 - DNA, 540 bp, Homo sapiens
gctgacctcttggtatctctttctaaggattatctgcctctgtgaccatttatattttcttgaattctytctagtaagcccccaaagaaagccttacttcttcttacttccttttcacaggggaaacagacacacacaaacaataaaataaaataaaataaaaaacatagctttagatatttttcagaagagagagattgctttacagaagaggcgggacttgatcaagggtagagttaaagtacaacagagagacagtctgagacatgaggcccccagccttgcccatgtcaaggttagcaagcaccttggctgaaagcaagaggagtgagaagtcagggtcctgccctgtcccatcccaggttggattttccaaagaactggaaactgaggtcatatacatcaacttggttgacaaaggcccccagccattacaaaggaaggcaggtgcacttcttctcaagctgcccaccataacttcccatctgcctattgtaggggggaaaaaaaaaaaaagcacagatgaacaaaaagaaaaat

SEQ ID NO: 483619 - DNA, 560 bp, Homo sapiens
gtttgcgtaacagaggtttgctgagcctggaaacagggaattctgtgtgactgcagtaaaagcaccaagcggcctcatgatcaaactctcctgcctcttagtgatttctgaactggtggctgaagtcagaattgtccgtgattactatcagattatgacaatgaaagtcaccattctgtgttcttttgagcaggattttccctcgtgttgtccctcccttcagcttcccacactcactgcttgcgtagcattttgttaggggagtagcagttctgacacaaccaaagatgtgtacgatcaacagtggggtaatgtggataactgacacgtactgtgggcrtggagatgctcctatgttgtggtggatgatagccttcgaatgctctttgttgtcttcattgtcatccactctattaatgttctagaagaaagctagtggccaatattttcttccaacaaattcactggctccaggaaccttgacaccaaaatgaggattgagcgtcaaagttcttatgttgtcattgccccaaactacttggagctacttcttatgcagc

SEQ ID NO: 483620 - DNA, 515 bp, Homo sapiens
ggcttcagagtccattttctcaactactatactctatgaatgaataaatggatgaataatgaataatggatggctggatcataaataatggataatagatggctggctggmtggatggatgatggatggaaagatataggtatggatggatggatgggtagatggatggatgatagaagaatggaaggacagaccctttaatgaggtcctagatactgcctgccattctccagggaactagggcattagggtaaacctcagtctttagtcaactgagtggtgatctttatctatagcatgaagaataccacctgtttctactctgcagtcactcaccacccatacacagagtaatttggccatttgagggcaacgccattctagaaggcctgtggtagactgaattatggttcccaattcttccctccatttcgattttaggattatgcattcatatgcatttccatgtgactttgcagtactaccctctagggtaggtcttgggattggccatg

SEQ ID NO: 483621 - DNA, 515 bp, Homo sapiens
ggcttcagagtccattttctcaactactatactctatgaatgaataaatggatgaataatgaataatggatggctggatcataaataatggataatagatggctggctggatggatggatgatggatgraaagatataggtatggatggatggatgggtagatggatggatgatagaagaatggaaggacagaccctttaatgaggtcctagatactgcctgccattctccagggaactagggcattagggtaaacctcagtctttagtcaactgagtggtgatctttatctatagcatgaagaataccacctgtttctactctgcagtcactcaccacccatacacagagtaatttggccatttgagggcaacgccattctagaaggcctgtggtagactgaattatggttcccaattcttccctccatttcgattttaggattatgcattcatatgcatttccatgtgactttgcagtactaccctctagggtaggtcttgggattggccatg

SEQ ID NO: 483622 - DNA, 515 bp, Homo sapiens
ggcttcagagtccattttctcaactactatactctatgaatgaataaatggatgaataatgaataatggatggctggatcataaataatggataatagatggctggctggatggatggatgatggatggaaagatataggtatggatggatggatgggtagatggatggatgatagaagaatggaaggacagaccctttaatgaggtcctagatactgcctgcyattctccagggaactagggcattagggtaaacctcagtctttagtcaactgagtggtgatctttatctatagcatgaagaataccacctgtttctactctgcagtcactcaccacccatacacagagtaatttggccatttgagggcaacgccattctagaaggcctgtggtagactgaattatggttcccaattcttccctccatttcgattttaggattatgcattcatatgcatttccatgtgactttgcagtactaccctctagggtaggtcttgggattggccatg

SEQ ID NO: 483623 - DNA, 570 bp, Homo sapiens
tattagaacacattccttttgaaaagaaaactgcttcttaattaaaggttggcaatccatagcctgtttgcagatgagaaaaattaagcaactactatgaacagcgcmgtgtgtctcctctgttggttagaacattgctgtctagacacgtggagtgtctcctgtgttttgggccgtccctgcatttacatctgagtgcatttttttttttttttggtgttgcacaacaaatactaatgaaccatgagaccaaatggaagagctttcggagtgaaacaaacttgtcttctgttttaaccactccctgtcacagactgcttttcaaacataatacctgggcggggtgcgtgggggttaatgaaaaatgtttcgtgtccaaaacccagccttactgtctatgccaaagagttggtttctggggccaagtagaagctgagaggatctgatctttgcctcacctctggaccaagaatgaaataaacttatgaagaataaaaatattcctttcatgggttgaagattcttaacctgggttccatgaaatggaagccttctaagaattccatggaa

SEQ ID NO: 483624 - DNA, 570 bp, Homo sapiens
tattagaacacattccttttgaaaagaaaactgcttcttaattaaaggttggcaatccatagcctgtttgcagatgagaaaaattaagcaactactatgaacagcgcagtgtgtctcctctgttggttagaacattgctgtctagacacgtggagtgtctcctgtgttttgggccgtccctgcatttacatctgagtgcatttttttttttttttggtgttgcacaacaaatactaatgaaccatgagaccaaatggaagagctttyggagtgaaacaaacttgtcttctgttttaaccactccctgtcacagactgcttttcaaacataatacctgggcggggtgcgtgggggttaatgaaaaatgtttcgtgtccaaaacccagccttactgtctatgccaaagagttggtttctggggccaagtagaagctgagaggatctgatctttgcctcacctctggaccaagaatgaaataaacttatgaagaataaaaatattcctttcatgggttgaagattcttaacctgggttccatgaaatggaagccttctaagaattccatggaa

SEQ ID NO: 483625 - DNA, 570 bp, Homo sapiens
tattagaacacattccttttgaaaagaaaactgcttcttaattaaaggttggcaatccatagcctgtttgcagatgagaaaaattaagcaactactatgaacagcgcagtgtgtctcctctgttggttagaacattgctgtctagacacgtggagtgtctcctgtgttttgggccgtccctgcatttacatctgagtgcatttttttttttttttggtgttgcacaacaaatactaatgaaccatgagaccaaatggaagagctttcggagtgaaacaaacttgtcttctgttttaaccactccctgtcacagactgcttttcaaacataatacctgggcggggtgsgtgggggttaatgaaaaatgtttcgtgtccaaaacccagccttactgtctatgccaaagagttggtttctggggccaagtagaagctgagaggatctgatctttgcctcacctctggaccaagaatgaaataaacttatgaagaataaaaatattcctttcatgggttgaagattcttaacctgggttccatgaaatggaagccttctaagaattccatggaa

SEQ ID NO: 483626 - DNA, 625 bp, Homo sapiens
ctgggacaatttctttttttttttttccaaaccatctctcatcatcatgatattttccttgtctgcatcccacttgagctgttatttccttaatggtggctttacatcaattcgtgcttacttagaaacatctgtctgacaaagaaaccctaaaaagatcagttctgccaaggaaaaactatcacttgccatacatagaaaggcaactgtgaaattaagtacaaaggaaataaatcaagttatgaaatggagttggatgctgatgcctgctgaggatgtgagcctgggccttcccctcttatcattatgaagagagggttgaaaacattgcagaggtgttaaagagatgttagcattggattgagactttctcttacagggagtcagaggctagaaagagtccagaagtgatacctttctctctctgagttagtactgtttaataccatgtctttgcatgtcacccaaacccatccatgtgctgcccarccatcagtggtattcatcccactggagaaatccatagttagtcccagctccttattttgtaagacttaggtccaaagaggcccaagttcatattcatttattcattcatgcatttgtttgacatatatcaaacacc

SEQ ID NO: 483627 - DNA, 485 bp, Homo sapiens
actttcctccagagtccttgaaggctcctttgtaaatacacagctcaggaatcggccaaggttttgagatcatttatatgccaatttaggggctccctcatttctagtttcctcctttctgggacttccaccttcgatttttagtcactttgatagtcttgaactttgtgctctgatatatcatgtcaatcaataaggctgaggctttctagcaatcccttcatgtggtgtcaagtgataaccttcaggraaaaaaaggggctggggtaatgttacacagtatagaagtattatttcaagaaacaaatccctccagtttctgtctgatttgtgttgctctatagtgccttcgtgtagtttttcatattttgactagggtttataattgtttgtctacattgtctacattgagctactccaccattcctgagactaaaactagtcctgttaaattattattattcacttgaaaactgacttacaaa

SEQ ID NO: 483628 - DNA, 569 bp, Homo sapiens
ctaaacaaaaatttagaggcactcatcaattttagttatttatttggccacttttccttcaattaatgtatatgcaatacaaayccacaaggacataatttcatttcacgagtcagaatatcccccaatcctacctcaattcatttattggttcaacaaataaatattgaatgactattctgtcactcattatgctggggatatagcagtgaacaacaacaccaagtccttgccctcagggggcttacattcaagttggatgtggcagataattaaaaaataaataagtgaaataatagttcagaggttgttaaatgtatgaagaaaaataaaacagactagaaggaaaagaagcatgagggcagcagtgtgtaagggttgggatagggggagtattttattaaaagggtcaaaaaaaggcctttctgataagctttcctttgagcagagacctgagagaagtgagggagccagtcaggtggttggatagctgtgagagtggtgagataacaaacagcacgtgagaacatgcatgaacaagcttgaaaaggctgcaaaaggctgggtgt

SEQ ID NO: 483629 - DNA, 569 bp, Homo sapiens
ctaaacaaaaatttagaggcactcatcaattttagttatttatttggccacttttccttcaattaatgtatatgcaatacaaacccacaaggacataatttcatttcacgagtcagaatatcccccaatcctacctcaattcatttattggttcaacaaataaatattgaatgactattctgtcactcattatgctggggatatagcagtgaacaacaacaccaagtccttgccctcagggggcttacattcaagttggatgtggcagataattaaaaaataaataagtgaaataatagttcagaggttgttaaatgtatgaagaaaaataaaacagactagaaggaaaagaagcatgagggcagcagtgtgtaagggttgggatagggggagtattttattaaargggtcaaaaaaaggcctttctgataagctttcctttgagcagagacctgagagaagtgagggagccagtcaggtggttggatagctgtgagagtggtgagataacaaacagcacgtgagaacatgcatgaacaagcttgaaaaggctgcaaaaggctgggtgt

SEQ ID NO: 483630 - DNA, 583 bp, Homo sapiens
gctttcctacacctttcaagaacttcattataaggaagactcagtacagagaccctacatccatgaaagtcaagaacatacaaatctcaggccaggtgcggtggctcacgcctgtaatcccagcactttgggaggccaaggcgagtggatcacctgaggtcaggagttcgagaccagcctggccaacatggcgaaactccgtctctactaaaaatacaaaaatttgctgggtatggtagcaggcgcctgtaatcctagctgctccggaggctgaagcaggagaatcacctgaacccaggaggcagagkttgcagtgagccgagatcacgccactgcactccagcctggatgacagagtgagactctgtctcaaaataataataataataatacgattttcaacattttcacattcaacataatctcactatatttttcttgattctcttttacatatttcaaaggtctttcctcttgaaatttgaagaaaaatacatattttttaaattagaaaactcagtatgtttattattttttaaatacccagaattaataacagttggtgaggatgtggagaatttgg

SEQ ID NO: 483631 - DNA, 578 bp, Homo sapiens
ttgtccattgtgcaagggttgggaggatggaatacaacagatagaaagtgtgtactgacctctcatctttggggactaaatttcaactgagtccatagattcatgccttcttaattcattactactgaacagtgaccacataaaatcacaaaaattagtcactcaaggttaaccaaaaccttaggaccacatgggcacaaaactgaattcatcttttaagttcaggagacatcattatctttctgggggcccaaaggtgcatctgactaaaaagatcacattacgcccaccctggctgtacctgcagcctgaagattaacagataagtgaatgactagacagtcaggaaaacaataaaaattctcttcagaaaagatgagggaaaaaatgagaatattttacctagcaagcctaatattattaaattaggmtttcttaatggattaggttttgcttggaagtggtagtggccgctcagcagggactgttgagagagtcctgctgagttcagcaccttgcccttgaacaaaaacagtatcaagtcattctattagcccacaccctgtagggtgctgtcc

SEQ ID NO: 483632 - DNA, 517 bp, Homo sapiens
caaaataatgtatagacagttgcactttgaatacattatcccagacagaatactggaatccaacagagaagtgaccggaaacaccaaaatcagggaaggaaaagggagggagcagcctttctgaccaggttcagatgaaagccaggaaggcttcccaatgtggctaaatggtaagtaagagacttgcagcagcccacatccctaccatggaatcatgtaatcctggccacaagrgagcttctcagccctcccgatccctggaactaacatagggtgctgccaggagactacgggatggaactactccaaggagagagctctcaccaggtctcacacactttctgacacctaagtgtctataacaaggtgccattttcaagtctagcctttgacagagtacacactgtcctgtagcccactggaaccagattgaggcattacagaaagactgtgactgctgggactggtgagcagtcccacagccagagctaagaaggaaaggatgcatgggctacag

SEQ ID NO: 483633 - DNA, 517 bp, Homo sapiens
caaaataatgtatagacagttgcactttgaatacattatcccagacagaatactggaatccaacagagaagtgaccggaaacaccaaaatcagggaaggaaaagggagggagcagcctttctgaccaggttcagatgaaagccaggaaggcttcccaatgtggctaaatggtaagtaagagacttgcagcagcccacatccctaccatggaatcatgtaatcctggccacaagggagcttctcagccctcccgatccctggaactaacatagggtgctgccaggagactaygggatggaactactccaaggagagagctctcaccaggtctcacacactttctgacacctaagtgtctataacaaggtgccattttcaagtctagcctttgacagagtacacactgtcctgtagcccactggaaccagattgaggcattacagaaagactgtgactgctgggactggtgagcagtcccacagccagagctaagaaggaaaggatgcatgggctacag

SEQ ID NO: 483634 - DNA, 524 bp, Homo sapiens
ttccccttcacacagagcacgaagacagcaggttagattctaaagcagttccacaggtcactcagttctaccgaaattcctgaattgagttgctgtcaaacacacctggagaaggaagtcactatttttggaaaaaaaaaaaaacgaaaagaacaaaaacaaaaaatagctaaagtactccagaagaacagctgtgtcatacttggaatgtgaccaaartgggtttccagttaaaacatgggaagaccctcatgtcagttaccacaatgactctggactcagcacaatcctcagtcttaggaagaataaaacaaaattcagccatgaaagagctgatgaggaaaaaagaaaaaaaaggcagggagccatttaataagaattctttaaagaaaaaaatgaacattcatgtttcctatttacaattatccccttccactaccaccaccacaattctaattaaacattatgttccacattttattttgttttcaagttacatttcaagaaaaggtcattttttttcc

SEQ ID NO: 483635 - DNA, 592 bp, Homo sapiens
ctcctctgccatcttcaggggatgttctggctggggaaactgaaagtgaggggtgagaagcagagttaggattcacttctacatggcaaagcagctcgaggaactcacactgtttaatctctgaacatcttcctgtaaaatggtgataaatagcacttactgctcagtgttgccrtgaggactcaatgagttaaatatgtaaaaaacagtgacactgcagagaaggacaaaaacacacaaactcattctctattactttagattatttcatagttttgttttgtttgttttttctgggtaagggtggagtgtgctgaaacggagtgtgtttcaaatgttctgaaaacagaatgtgagcaaaccatataggaccgcagtagaattagttactcctccagctttctggctcccgaaccacatctcgacctggttgacacctaggctgaaggtgtcttatagtgaaaaagagaatgtctacattcgtctaggctacaacattcatacacagaatatacaacacacacagacacagacacacacacacacacacacacacacacgacttccttcactccacaagtagatggattct

SEQ ID NO: 483636 - DNA, 592 bp, Homo sapiens
ctcctctgccatcttcaggggatgttctggctggggaaactgaaagtgaggggtgagaagcagagttaggattcacttctacatggcaaagcagctcgaggaactcacactgtttaatctctgaacatcttcctgtaaaatggtgataaatagcacttactgctcagtgttgccgtgaggactcaatgagttaaatatgtaaaaaacagtgacactgcagagaaggacaaaaacacacaaactcattctctattactttagattatttcatagttttgttttgtttgttttttctgggtaagggtggagtgtgctgaaacggagtgtgtttcaaatgttctgaaaacagaatgtgagcaaaccatataggaccgcagtagaattagttactcctccagctttctggctccckaaccacatctcgacctggttgacacctaggctgaaggtgtcttatagtgaaaaagagaatgtctacattcgtctaggctacaacattcatacacagaatatacaacacacacagacacagacacacacacacacacacacacacacacgacttccttcactccacaagtagatggattct

SEQ ID NO: 483637 - DNA, 261 bp, Homo sapiens
gccaaatttcacctacttctactctttaatgggactactaggaagttaatcgtgtctctcatatttttactggaaagcactgatctaatttattgtccttattataatgaagaagctgaaggctgaagaggtaaaggctctgccaggaccagagcccaggtctccccacagctaaagtcagcctcagaagcagaggaggtaaaaagmtgacaaacagcctgggcacaggagatagcagcggtgctagctctagctgagcag

SEQ ID NO: 483638 - DNA, 638 bp, Homo sapiens
tataccccaagcctgtactatccagcaatggtacctgttcacccaagtagaagaaaggaggcttactctctgcagaaggtaaattagagaggctctggatttggagataccaacagtagctcagaagatggttgagacttttgattctgaaagtgggattaagtgaaatccacatgctttactgtgagtcaggcttgtacatccagacatacatatggctgacataagattcctcttggggaaactgaccagcccaggagacaatacctacagatatccacatctgggggtctcctaacaaaacatggctgaatacagagaaggttggaagaccatgaggttcatgcatgaactagagcttctaattaatttttatgtgactcataccaaaataagtrtgagtagctaaggatcacctgccttctgaagaacacctctaaagtcaaagacaaggaataagacacattaacagagaaaaggcactgggagaaaagagagtacaagggcaaaagaaaatgccagcaaaacttataaataatattctcaaagtgatagaagatattgcacctgtgaaatggaaaagggaaacttaaaaggggtatatgttcaaaaacaggttaaagatttgatagcaaaac

SEQ ID NO: 483639 - DNA, 541 bp, Homo sapiens
gataggacatcaatatgagtgtttatagggaaagccagtgatcctattgttagacgcgaaatcaagacatatgatctgattttttgttttactttttgtttttgaggtataacattcagtaaagcgcacaaatcaaaagtgtccagaatgataattttttacatatgcatacccatgtaactgccatccatatcaagatgtggaacctttccagctcattcatgccccttcccattcagtatccsacaaggattaccactattttaacctctatcaccatagattagttttaccaatatttgaacttgctatggatgaaatacataacacgtacaattttatgtctggcttctcttgcccaacagtgcgtctatgagattcatccatattgttgtgtgtaacaatggtccattctttttcactactgtgtattacttcattatataaatattcaacgatttgtgtactcatcctactgttggtggacatttgagttgcttcatgtttctgcctttgatgaagctgctgcagacattcttac

SEQ ID NO: 483640 - DNA, 361 bp, Homo sapiens
agaggacccacgggaagggagccatggccaaccggaggcmgggaaatgtttcccttggtctgcggtgggggctgatgttggcgtgcttccttcttgtccacaacaggatggcacaagtgagagcaaacaaaacagaagccaatgcaaagggcttcttggccttcctcagtgagaacaacccaggaatcaaggccaggaataagagaggggctcctgggtttgaagtggggaccaggagaccttatgggaaagctagctagctcctgggtcctgctaagtctgacagtgacttgtgtaaataaagggcagacagtgttgagggcttctgtgtatggggttcatgtgtgttttgtctacccca

SEQ ID NO: 483641 - DNA, 670 bp, Homo sapiens
tgcaaatctttcctgcaaatttccccaacaaaatggaatttatcccgcacaattaagaagtcaactacatccatattcacatatgcacacataccatttctctcccagtaagttaaagaaattttaaatatttatgcatacatatgytacatagttacatgtatgaatagacatatataatacagtaacttacaatataacttttttaaagacagtgaatcttgtgcttgttcttagttcctatgtatttgaaaatactatataagtactttggtttgcatttagttagaataagagtttcattcaccagtgactcatcccttgaatgtttcatattctagacattttccctacccaatcctcatgtctcttccatgcatttgtctttatatttacattgtgtggtaatatggatatttttatttgagattatttggcctatgtcaggtattcttctctgtggtccccagggtcttgtatcttgtttttaacttcttctttttccttgctctctttttatcaaatgtcatccattgtgcctcagtattttacccttgggtgtttcaattatgcatgaatgagatctgcctcacagttgcacgtttccattttcagtctaaataactgcacacaagaataaaagtctctgcatttaacttgaggggctctc

SEQ ID NO: 483642 - DNA, 582 bp, Homo sapiens
aacaagacatccctctagttgctcaggtcagttcagaaggagtcattttttatctattcctttactaagttcccatgtttactccgtcggtaaactctgatctctctgtcacttgaatatattctaaattagaccacttctcatcatttctactacatctgccctgatcaagccaccaatgtcttttgcttggggtgttccccagtcaaatatctacagagcacaayagccttgagtgatccttttaaaataaagtgatatcatatcatttccctgcataaaatgagccaaaggtttcctagcatacttagaagaaaatttaggctttttggaaattattctgaccaaataacttttatcccttaggaacaatgtgaagggaattttttaaaaatccaaaaagcataaaagagatttggaaagattcttattgatcatctaagagttttggaagatactctagtaattaattaataagtaaattaataaacaatttgtattaatttaaggacagaggcaatcaacattggaaattttccagcaacacaaatctttcaatatataaacctagactaaaacaaa

SEQ ID NO: 483643 - DNA, 591 bp, Homo sapiens
atattgagaattggtcatcccattacgtgttgcgcaagcctgcttttaatctcaccttaaatgttgtcccaaataaagctatcacttagaataaaatacaaatataatgcacacattttgtgaaaaataataattactattaacctcaaggagcaaaaggttaaaaagagcagagttcctattttcaaatgtaataaatcagtctaatttggagtcaaggtagtaaaaagatgtctcgagctttytactccaaacatgatgagatcaagaaattttccttttggagagaaaaaaaatgcatttctaaaatgcaagcactttgaacatcttgctcaattccaaatgcagcctccttctgttgcactttattttaatgcttttcttttcacagatgaaagtttgacttaaaaaaaaaaggtacaagaatatgccgatagtatgagagtgatggctaggagggatagcaatagtttatgtggtctgggaattctctaccatgtcaccatcctcccccttctgtaagtgtagcaaaataattggccaacataattaaatatgaatccgcataacttcagactctgaacgcctgat

SEQ ID NO: 483644 - DNA, 501 bp, Homo sapiens
aaggtagtatgtcccaagccagatctcctcccccatcttctgcagctgagaacctatccttccttgttctctcaaatttaccaggcatttccacaccagcagggttctgcctggaatggtttccttacatgctacaaactttccaattctttcttgttttttaagacccagctcaaatgctgccttctctcaaaagccttctctgattccatagttagaattaatttctccttgaatgtcagtactatkttattaatcccatcttggtttgcagcaaggttagttgtatccaggtatgtctccttcacagccacgcttctgattgtttggggtatttctcttagtacaattttttttccatttttaaataatatctaattgatgacctccttttcccctcctttcaacaaacacgttataacttactaggcacatgatatttccacttattaaaaaaaactgacaaataagtcaatgattttctaaacccaaatgttcata

SEQ ID NO: 483645 - DNA, 536 bp, Homo sapiens
ttttccttatgtaatttagaattttatagtgttgctcatatcaaatagatatatttgtttttctctctttcctcacttttacctgtttagtagttttgcacttttggttcagaaatacattttacattggaggtttggggttacttccccataatgatgtaaataatattgcaaatctaatggtaaagctggcaagtggctttggccagatcttattcctcaactgtgtcttcttactcttcctgttgctttcartacatgcaagaggactgtctctatctgaggtcattggcagtggagctgtctcttacaccttgccacttgttctcagctatcatgaagaaggaaagaaggctgcctgcatcagacaggcacaagcctcagagcccgggagcccacaagcccaccattcagctctaacttagtgtggtgcttacctattctgtttctttgctgcgcatgggttcattatctctaggcataattatgtcttttaaattaaaacaatttacatatctttgctatgagtttggatg

SEQ ID NO: 483646 - DNA, 536 bp, Homo sapiens
ttttccttatgtaatttagaattttatagtgttgctcatatcaaatagatatatttgtttttctctctttcctcacttttacctgtttagtagttttgcacttttggttcagaaatacattttacattggaggtttggggttacttccccataatgatgtaaataatattgcaaatctaatggtaaagctggcaagtggctttggccagatcttattcctcaactgtgtcttcttactcttcctgttgctttcagtacatgcaagaggactgtctctatctgaggtcattggcagtggagctgtctcttacaccttgccacttgttctcagctatcatgaagaaggaaagaaggctgcctgcatcagacaggcacaagcctcagagcccgggagcccacaagcccaccattcagctctaacttagtgtggtgcttacctattctgtttctttgctgcgcatgggttcattatctctaggcataattatgtcttttaaattaaarcaatttacatatctttgctatgagtttggatg

SEQ ID NO: 483647 - DNA, 641 bp, Homo sapiens
tccttcctataagctgagactaccatccatcagcatatcttggacttggtttcctaattttgttcttccacttgcctttattgctcttttaattctattccaatggtttgtctggtggrttgttctttattgctacccatacaggatgaagacattaacacaggaataaatttattcagcattttgctccctgtttatccccagataattcttcagtatagagacaggttggtatttttggggtactgccatctgggcctctgccatccataaacaagggatggggggtgtggatggaaaaaagaaaaatgactatgctgatttctgaaaattactgagattgagaaaaccaaggtctcacatggaatagttgtgttagatcccaagctggatagtaagtcttcaatatcgtttctctgaagtcatttgggttttaataaggtcaaaataaccaggacactgaaattggtactattgccatcaataaagaatagacagcatttttggctgtcatcattagcaggaggacagattgatggtattttgtcctaaaagctaaggaccttcctacttctcactcaaaatcttttccttaattatatttacctgaattgttttgtagctattggtccttatattct

SEQ ID NO: 483648 - DNA, 545 bp, Homo sapiens
atgtgcctccctcaaacctcgttatgatgtcggcacatcacccatctgacttggaaaaaaaaaaatccctgcaccaaaggctgttctggttccatctaaccatgcttgaaagcaaacttcaaaamgattaactgtttccaagcaacttaagtatgtcccagaacagaccaagaatacttaaaagaatacagaaatatctgacatccaacaagataaaaattacatctggccatccactcaaaaattaccagacatgcaaagtagcaagggaacataatggacaatgagcgggagggaaactgatcaacataaacagacccagaaataacatagatgcaggagttagtagacaaggacatcaaaacagttataactacattccatatgttcaagaaggtggagaaaaatgtgagcatattaaagatataaaaagatattttaagagagccttaaagttgggagaggagcacctcaaagcttgaggtatctctgatatgtaaaaagaaagcagcaacatccactttccttatctggtgtgatcatac

SEQ ID NO: 483649 - DNA, 503 bp, Homo sapiens
aaatgtaataataataaaatttaaaaaaaagaaattctctctatagaaaggagcactaactaaattaaaagatgaacaataaaccaggaggagagaagttagaacaatttgacaggcaagtgattaaaattctacatacggggcttctaacaagtctgtctgcctatcactagctatgtgactttggggggtcatttaatttcagacttctattatattaatagggataataatcaaatatatttcagaggattgcaaggattataaaagaaaatacatgaaaattagcatagtaaaggcttactaaattgtggctgccattattatcaaaagtattattatatcattattcattagtataataaaagaatacatgatatttatatttatatataataaataaattattattattaaataccacaagggaattagaaacaaaaatttggaaaggcawttcaaaccagaagaatacaaatggcaaacaaatgaaatgggacctg

SEQ ID NO: 483650 - DNA, 582 bp, Homo sapiens
attcggctggcattgcttagtgcagatgcgtgtgccactgatagctctcttacagcaccgtggaaaactgccaggcctctgtaatgggactgtatgccatttyctttgccctgacactttcctggtgaggtcctccctgagctgcctgatatctaggctcagtgaagagcccacgtgaggctgagacgtctcctttctgggcctatgctgacccccgcggttggtgtcactccccacacaccttctccttcagattctatgtgatgaccagcatgcttgggatttcaactgaatggagccctgcacgcctgtattcccagctcgctgtgctctgcaggcatctgggaaggggcttactaccggctgtctgtcatctccagcctgtcctccagcggagcactagggaaccagaacgctctgctctccactcccactcacaggggggagtgtggaaaatgagcttgctcctactctcatgagagaaatcaacagttttgataattgctacaaaagtagtaacaatcctcccaaaatgattttagacaaacaagagcaacaaaaccaagatttaacattatcatt

SEQ ID NO: 483651 - DNA, 582 bp, Homo sapiens
attcggctggcattgcttagtgcagatgcgtgtgccactgatagctctcttacagcaccgtggaaaactgccaggcctctgtaatgggactgtatgccattttctttgccctgacactttcctggtgaggtcctccctgagctgcctgatatctaggctcagtgaagagcccacgtgaggctgagacgtctcctytctgggcctatgctgacccccgcggttggtgtcactccccacacaccttctccttcagattctatgtgatgaccagcatgcttgggatttcaactgaatggagccctgcacgcctgtattcccagctcgctgtgctctgcaggcatctgggaaggggcttactaccggctgtctgtcatctccagcctgtcctccagcggagcactagggaaccagaacgctctgctctccactcccactcacaggggggagtgtggaaaatgagcttgctcctactctcatgagagaaatcaacagttttgataattgctacaaaagtagtaacaatcctcccaaaatgattttagacaaacaagagcaacaaaaccaagatttaacattatcatt

SEQ ID NO: 483652 - DNA, 582 bp, Homo sapiens
attcggctggcattgcttagtgcagatgcgtgtgccactgatagctctcttacagcaccgtggaaaactgccaggcctctgtaatgggactgtatgccattttctttgccctgacactttcctggtgaggtcctccctgagctgcctgatatctaggctcagtgaagagcccacgtgaggctgagacgtctcctttctgggcctatgctgaccccygcggttggtgtcactccccacacaccttctccttcagattctatgtgatgaccagcatgcttgggatttcaactgaatggagccctgcacgcctgtattcccagctcgctgtgctctgcaggcatctgggaaggggcttactaccggctgtctgtcatctccagcctgtcctccagcggagcactagggaaccagaacgctctgctctccactcccactcacaggggggagtgtggaaaatgagcttgctcctactctcatgagagaaatcaacagttttgataattgctacaaaagtagtaacaatcctcccaaaatgattttagacaaacaagagcaacaaaaccaagatttaacattatcatt

SEQ ID NO: 483653 - DNA, 548 bp, Homo sapiens
cccatgggggctgaatctgtcccctgcttgagaaccactgctctatcctatctccagtgccactctacaaattccgtaaaactgttgaaaatatgtatcattttattctaaaatatgctagtaatgtcttttcaaattcagtcttctggagtcrgtgttataatattcagcatgaatttaccatctctatttatttacttactttaaaaggccaagtggagaaatttttggacgacccttatctgtagcttctggttagagaatttaacataataaggttttaaatggcatcaaataaagagttttgcccaatgggaattggaaggcattttatgtataaatgtcttgggtaaatcacccaggtctgccactgtgcttgttctgagaagcacatttcaaaggttctctaagatttaaatttttcagttttaaaatgagaagaataattgtgtctatctcataggattgtggtaagcactaaatgaatacttctaaagccctaaagccctggacagaggcctggcatattgtgacgacatgatgatgtc

SEQ ID NO: 483654 - DNA, 599 bp, Homo sapiens
cccgaaaagcagacccacaaaagacaggccatcactcaggttcatctgagagcaacctgcaagcggatccaggcttagggcataacaagacggcccacaagcctcgactatagagaggttcacaagcacttctcaaggagcctgtaggaagctctgttatccccagcagayaacgcagacaatactaaaacatggcccaccatggcaagaccaagtctcagatctctcctcctgggttgtatgtgctggccaagggcctccaagtcccaacgggaacgttctatctacacccgcagcctcctggcccttccctcccttcagctgctgcagcccacatacacctcactcacctcgtacacattgtacgcctcatcacttctctcctctcgcagcttggtgagatcaaaggctgcggctgatgtggataaattacactctaatgtgaaagacattcagtcatgctattgctttacctcaggcatcagagttgggcaataaagaaaaggcttgtgcctgggtagaaaaggactccaggcatctttccagtgccctttgaatggagtcactccagcttctcctgggagctgttctgaagccac

SEQ ID NO: 483655 - DNA, 599 bp, Homo sapiens
cccgaaaagcagacccacaaaagacaggccatcactcaggttcatctgagagcaacctgcaagcggatccaggcttagggcataacaagacggcccacaagcctcgactatagagaggttcacaagcacttctcaaggagcctgtaggaagctctgttatccccagcagataacrcagacaatactaaaacatggcccaccatggcaagaccaagtctcagatctctcctcctgggttgtatgtgctggccaagggcctccaagtcccaacgggaacgttctatctacacccgcagcctcctggcccttccctcccttcagctgctgcagcccacatacacctcactcacctcgtacacattgtacgcctcatcacttctctcctctcgcagcttggtgagatcaaaggctgcggctgatgtggataaattacactctaatgtgaaagacattcagtcatgctattgctttacctcaggcatcagagttgggcaataaagaaaaggcttgtgcctgggtagaaaaggactccaggcatctttccagtgccctttgaatggagtcactccagcttctcctgggagctgttctgaagccac

SEQ ID NO: 483656 - DNA, 618 bp, Homo sapiens
gctgcttctaccaaagcctcagttaaatggaaatagaaacggaatattttatatataatagaggatccttacccaaatccaactaccaccatgattgtaagtggaaaaatgctaaaagctaaagtcatttccactaaaatcaggaacaggcaggggttcccccatcaccagtgctattcagcatagttttagcagtctggaaaatgacataaggaaagaaaacagtacatttaagcattggaagagtatagataccttttttttcgctagtaatacgattttatacacataaaattcagcacttaaagggggggtggggaatgccattagaattcattgaagaatttggtaaggatctatgtacacaataaacatatgaaaatcattaacattttttctatactgatattaaagatctaaaaattgatattagggaaatgctaattcataacagggaataagtctataaaagaagacaaaatctgataggaaatgttgttcagggtatgtgtagaaaactgtaaaatcttattgaaggaagaaggcttaatattataamatgtcaatatttctaaaaattaatatataatttcaatttaatcctagtggattcagggg

SEQ ID NO: 483657 - DNA, 526 bp, Homo sapiens
tcccctccgcacccccctgctggcttcaggacgtcaaatgcagccaccacttgacgctgggagggacagaaactttccagcccaggctggccctggggcatgggtagacatccccttgcacacatggctgaccccggaactcaaagatgcccctgactctggcccacctgcagcctgggccagcaccacgctgttgccccgactgcaccaaagaccaagggtgacagactttgagttccggaggccttgtggtttcagctagaccctcatctgcccctttcagccccgccaccagcgctcagggccccacctagaccaaagctttgcatccatccctgcagtacagacctctggtctggggatcatggttctcctggtctgagatgaaagttctgggrccccttcccaggcctgagcaggcatggtgggctgctgtgactagagcgagctgggtctggagtgggcattgaggtttggctctcacattgcctttgcagggcctgcggcctcaccatggacccagaat

SEQ ID NO: 483658 - DNA, 654 bp, Homo sapiens
cagctgcaatttgggggaaattataattgtattccagtcatagagcatattaactcacttttacaaattattatatttgctgtgtttctgtgtgtgtgtgtgtatacacatacaggcatgcatgtgtatgtgcagtattggaaaatgaaagaaatcacttttttctttttttattaacaagtatcaattgtatatacttatggtggacaacatattttgatatatgtatcaattgtggaatggccaaattaaactaattagcatgtgcatttcctcacatagttttttttttttttttttttgkggtgaaagctcttaaaatcgactctcttagcaatgtttaagtgtacaatatattgttattaaatgcagttaccataacatatattagatctcttgaccttatacctcttgtctagctgaaattttgtatcctttgacaacctctcccatcctcccacccccagcctctggtaaacaccattctaccctctgcttctctgagttcaacatttttagattccacctataagtgagatcatgaagtgtttgtctttttgcttctgtcttattttacttatcataatgtcctcccgattcatacatgttgcaaatgacaggattctcccctttctaaaggcggaattgtatttc

SEQ ID NO: 483659 - DNA, 279 bp, Homo sapiens
gtgttcttgagattatacaataagttcccaaaccatgttaccttgttacaatttaatgtcataattttggtggttcacaaaagaaacactcataaaaattattggtaatggatgtgtagaactttggcagcttttcccaacaaattggttttcaaggaaatcaaaaggyatgttgctgctctacatttacatttaacagatcatttttacagtaaacttggtgattttacaatttacattaaaaatattttcatttttgaggaaaaaataggaagatag

SEQ ID NO: 483660 - DNA, 451 bp, Homo sapiens
ttctttggttaatatcgcactcaaaatttaaacaagaaaacaaaattactgcctagatcctgttgaatttgtagattataaatacattggtgttcatgtgagcctggatgctttataatgctgtgatgtttttctctgtaaaatagagaacaarcacaaagtctgtagcagaaaatgctattagtaggttttttaaccctattaaatttccttttcttacctatcttgattttattcaaaactttaatatgctcacctaaaatacatctctttgtagctatgtgggtctgtattcctagctcaatcaaatgaaataaaagtagatataatatgtaggaccctggggaaagtatctcaaaggaactgattatgctcctttgtgcttcctgaaattcaatcatgagtctgcagttctagtaactagacctttgggtgttttagtaagcatatg

SEQ ID NO: 483661 - DNA, 590 bp, Homo sapiens
attttcaaggctagtatcttattacagctaatgtcctcatcactaaaagtcatttgaagtggttagcttagaaggatctgagcagaaagcaggaactagctttctagagcactttatttaaaactcatcttcatggcaaaaatgatagcagtctttcagtttctcttcaagagtcctcaagagmagagacacttctctccaacagaaaatggagagaggcaaatcaaaactaatgcacaataggatggaggaaagtgcctttatgaagacctgcttggatgattacaagaggcttcaatcatggcacagaaaatccttttggctctgtgtgaatgtctttcccatctttctgtctttcttttctccaatagtaggaaagtcattatccgtctcttctacaatttcttttaaccatatagcaactaccatgacaacaggaaggcttatagccttgtacatatgctatgtttgatcctcctgtccaacctatcccaattgtttgaacctcatagagaggggaagaaaataaacccctctaatacagtttgattaataatttacctctttgcacaaatcttatacaaaaggag

SEQ ID NO: 483662 - DNA, 590 bp, Homo sapiens
attttcaaggctagtatcttattacagctaatgtcctcatcactaaaagtcatttgaagtggttagcttagaaggatctgagcagaaagcaggaactagctttctagagcactttatttaaaactcatcttcatggcaaaaatgatagcagtctttcagtttctcttcaagagtcctcaagagcagagacacttctctccaacagaaaatggagagaggcaaatcaaaactaatgcacaataggatggaggaaagtgcctttatgaagacctgcttggatgmttacaagaggcttcaatcatggcacagaaaatccttttggctctgtgtgaatgtctttcccatctttctgtctttcttttctccaatagtaggaaagtcattatccgtctcttctacaatttcttttaaccatatagcaactaccatgacaacaggaaggcttatagccttgtacatatgctatgtttgatcctcctgtccaacctatcccaattgtttgaacctcatagagaggggaagaaaataaacccctctaatacagtttgattaataatttacctctttgcacaaatcttatacaaaaggag

SEQ ID NO: 483663 - DNA, 636 bp, Homo sapiens
gctaatgtcctcatcactaaaagtcatttgaagtggttagcttagaaggatctgagcagaaagcaggaactagctttctagagcactttatttaaaactcatcttcatggcaaaaatgatagcagtctttcagtttctcttcaagagtcctcaagagcagagacacttctctccaacagaaaatggagagaggcaaatcaaaactaatgcacaataggatggaggaaagtgcctttatgaagacctgcttggatgattacaagaggcttcaatcatggcacagaaaatccttttggctctgtgtgaatgtctttcccatctttctgtctttcttttctccaatagtaggaaagtcattatccgtctcttctrcaatttcttttaaccatatagcaactaccatgacaacaggaaggcttatagccttgtacatatgctatgtttgatcctcctgtccaacctatcccaattgtttgaacctcatagagaggggaagaaaataaacccctctaatacagtttgattaataatttacctctttgcacaaatcttatacaaaaggagagaacataacaattttttattattcttagttggactttacctaaaagaaaataatggacagaaaatctccta

SEQ ID NO: 483664 - DNA, 597 bp, Homo sapiens
gctttcactcaacactgaatctgcctgcaccccgatcttggacatctcagcttccaaaactgtgagaaatatatttcttttgtttaagccacccaacctatggtatcctgttatagcatcccaaactgactaggaaaactattaatcttaatttgttcctatttctccaccaaaacaaatatactttcaccaacttgtgtctcakaatatacaaaattctaggcttgtactagaataaaatatttgataaaatgagagtattcccaaagtgtggcattccctgatccacagcatcagcatcacatagaatttgttaaaaatgcaaattcccaggcgcttcccaagacccagtgaatcagtaactctgggatagggtccggcgctggtggattcacaagacctccagttgattacaccgcatgctaaagtttgagaatcactgcttcagagggatttttgtcttttaaatttgcagagcacgaacaagctactcatataaaatgtttgaataatccccagtctctcaatctggaatactcatagccctggggttcagagcagagtgataagatacctaggaatgtttggtgggattct

SEQ ID NO: 483665 - DNA, 601 bp, Homo sapiens
acacaattttaatacacttgactttgttataggttcacactatctgttctggaaatagttaaaaattctgttcctgttcatgactaggggctttatcggatcaaagatggaatatagatattccagcaagttagttttatataagatgttgaatcaaagcagaggctcttgagcatagaaattttagtttctttctcagctctgagagaaagaaaaaattagttgagttaaatattaatattatagttaaaaatccatttctgagtattcagttcttaaccatccatcctgatactggggcttcacgtctctacrtgagttggatacccaatatcacagtattttcttttttttttccatgacttccaaggtgacaacttctgctactagatggcagaagtgatagtaaacttccataaaggttttttttctaactcaaattttctacagttgtttgtgactaaaacgtctgctattttccttcctttgtttcaggatatttgaaatctgcagcctttcctcaagtcctcgcaaactcatcagatgtttgttttccacagcatatttgcttttatcacgtgaatccctttacaaactaatt

SEQ ID NO: 483666 - DNA, 652 bp, Homo sapiens
ctgggtcgagtgaggacttggagaacttttctgtmgtacaagaggactgtaaaatgcaccaatcagcactctgtagctaggattataaaattcaccaatcagtgctctgtagcttgcaagaggattgtaaaatgcaccaatcagcactctgtagctagcaagggattgtaaaatgcaccaatcagcactctataaaatgcaccaatcagtgctctgtaaaatgcaccaatcagcactctgtaaaatgcaccaatcagcaggatcctaaaagtagccacttggagggaggattaaaaaaagggcactctgataggacaaaaacggaacatgggaggggacaaataagggaataaaagctggccaccccagccagcagcagcaacctccttggatcccgttccacgctgtggaagctttgtgctttcactcttaacaataaaccttgctaccactcactctttgggtccatgccatctttaagagctgtaacactcactattaaggtccgtagcttcatgcttgaagtcagcgagaccgtgaacccaccggaaggaaccaactctggacacagtagaacagtaaagggtggtaaaggtttagaatgattgctgtagcgttaggaaaggaatcaactaagaatttgtgcaagaat

SEQ ID NO: 483667 - DNA, 652 bp, Homo sapiens
ctgggtcgagtgaggacttggagaacttttctgtcgtacaagaggactgtaaaatgcaccaatcagcactctgtagctaggattataaaattcaccaatcagtgctctgtagctwgcaagaggattgtaaaatgcaccaatcagcactctgtagctagcaagggattgtaaaatgcaccaatcagcactctataaaatgcaccaatcagtgctctgtaaaatgcaccaatcagcactctgtaaaatgcaccaatcagcaggatcctaaaagtagccacttggagggaggattaaaaaaagggcactctgataggacaaaaacggaacatgggaggggacaaataagggaataaaagctggccaccccagccagcagcagcaacctccttggatcccgttccacgctgtggaagctttgtgctttcactcttaacaataaaccttgctaccactcactctttgggtccatgccatctttaagagctgtaacactcactattaaggtccgtagcttcatgcttgaagtcagcgagaccgtgaacccaccggaaggaaccaactctggacacagtagaacagtaaagggtggtaaaggtttagaatgattgctgtagcgttaggaaaggaatcaactaagaatttgtgcaagaat

SEQ ID NO: 483668 - DNA, 639 bp, Homo sapiens
ctttggacccatgtagtgatgccttatttttgtctctcagtgtcccttcacccaggttccaattcatcttttatatccaccaccatttatakttgcaaaactcaatctttgccatgttatagcccccttttaaaaacaaacaatgataagattttgatgaatgtaaatggcccagatgaaaaatgtgaatcccagtattatttatgcattgctgcataacaaaatactctaaaatttagtgactttgtggattgactgggcagttcttgtgctattctcatgcagcgggagttgtatagctgcattcacccgacaggtaagatgaaaaatagttcagctgggatgttgggatggctgggtccccatcctcaaggctagtgtctctcagggacaacaaggagacctgggctgccttttagggaacacatgcctttcttagctccccaactcccaactttatccttgttccattatgttacctacttagctcttgtaagcactggaattagcaagccctgaaatgtgtaaatttcatttgtggtttgaaataaactaactcctgtggagatattaacattaacatattctctaatgttgaaatgctgtcagatacaattcctgtaccagtttattattgtc

SEQ ID NO: 483669 - DNA, 634 bp, Homo sapiens
tgtacacctccctaacattactgtcttatttctatcccgactgttataacaccaagacaacttatcataaatatcgctcgcagactgagacacttgattaaactcttctggctgtgtgtagatgggaacagaattaaagtagtacttctattcttaaaagagaattgtaaaagatattgtacatgtgcatcttagaaaaagttgtgacacttaaggacccctaggagtacttcaaatttgggtgcattttggtcctgggctgaagtaacagcatcttccttggccctgtggatcgagagaagagctagatacagctagaaatggaggttcttctctactaaatgtctgtggagaaaagcaagtgagaaggaagaagcaagcagatgagcaggggaagcacatgtgacagatggagagagaatttctcaggattgccagactcctccagaccctgagtctgctccagaggcccaggaacacacctgttcacagtgtcttcccaataaatttccctgttagcttcaggcagttcaagyaaggtttcagttaccattcaaccaaaggagccctaactcaggtcatatttgtcaagacagtactcccttgaaattacagtgattctatagcctcccca

SEQ ID NO: 483670 - DNA, 265 bp, Homo sapiens
ctaaacatttattgtgcacctatcatgtgccatgagtttttctggggaaaaatatatttgatgttctaaacctattctaatccttgcagcagccctataaggtcgctgttattaatattactgttctcattttgcacacaatgctgctaagaattagagaagttagatacttttcccaatgtcacatgactagtatatgttgaagacagggggtcacagcatmgtcctctatccaaaactcattccactacatcaaagaaaccac

SEQ ID NO: 483671 - DNA, 523 bp, Homo sapiens
attttgtctcctactctacaagaaaaatcttcaaatgtttgaatagacttgtgtcttccctcaatttcccttttgctagggaaacattcctagctcctccaactctcaaatctgtatcattttcatacatcctctggacatatttcaatacatcaagtttctcttaaaatgtgctgtccaaagtagaatgyaataatcaaacactgtaaagagccatacactggtaaaacaatgtgagaacattttttcacggttgtataacaatttggggccatattattgtctataataatagttttttagatgaacttctataattgtgcaatttatattttgaactttaagcaatttacaaaaagttctctttgttaaataatattttgttgattctaatgtagtgccatagatcatttcaaatctatattacatcatctacctaaattgtccactgcaatgattttttttaaaatttttaatcactatgagtacagagtaggtgtatatatttatggggtatatggga

SEQ ID NO: 483672 - DNA, 597 bp, Homo sapiens
aacccaatggttttgccttaggtaacgctgtcttctcctggcccaagtcatggccctagctttggccaagtgggtataatggaaagaacgtggggtttggatccagaacctgagcttgaatctcagccttagttcaccagctactgctttattaaagttgcttaaccctcctgagccccttgtttcctttgtagaatgaaaataatagaacctgtcttggaaggtggttgtaaggattagcaattatagatgtatgtgcctggtacatagcagttgtycagttattagtttaggtttggttttcctgtgccttaaaacaccggagtggccctataagtcaggattctgactctgactaggggcaccagagggcaattttgtagaggttgagggggtctgggataatgactctcagaatgttgaccaaggtgagtgcattgtgttcagggcatatgcggtatgactcacacaactcatctgtgctgcatcccaatgggctacaggctgcagccttctagataggtgggtcacagaatcagagaactggaaaggactgcagacatcccccaggctggggctttgagccctcgccatgca

SEQ ID NO: 483673 - DNA, 597 bp, Homo sapiens
aacccaatggttttgccttaggtaacgctgtcttctcctggcccaagtcatggccctagctttggccaagtgggtataatggaaagaacgtggggtttggatccagaacctgagcttgaatctcagccttagttcaccagctactgctttattaaagttgcttaaccctcctgagccccttgtttcctttgtagaatgaaaataatagaacctgtcttggaaggtggttgtaaggattagcaattatagatgtatgtgcctggtacatagcagttgtccagttattagtttaggtttggttttcctgtgccttaaracaccggagtggccctataagtcaggattctgactctgactaggggcaccagagggcaattttgtagaggttgagggggtctgggataatgactctcagaatgttgaccaaggtgagtgcattgtgttcagggcatatgcggtatgactcacacaactcatctgtgctgcatcccaatgggctacaggctgcagccttctagataggtgggtcacagaatcagagaactggaaaggactgcagacatcccccaggctggggctttgagccctcgccatgca

SEQ ID NO: 483674 - DNA, 597 bp, Homo sapiens
aacccaatggttttgccttaggtaacgctgtcttctcctggcccaagtcatggccctagctttggccaagtgggtataatggaaagaacgtggggtttggatccagaacctgagcttgaatctcagccttagttcaccagctactgctttattaaagttgcttaaccctcctgagccccttgtttcctttgtagaatgaaaataatagaacctgtcttggaaggtggttgtaaggattagcaattatagatgtatgtgcctggtacatagcagttgtccagttattagtttaggtttggttttcctgtgccttaaaacaccggagtggccytataagtcaggattctgactctgactaggggcaccagagggcaattttgtagaggttgagggggtctgggataatgactctcagaatgttgaccaaggtgagtgcattgtgttcagggcatatgcggtatgactcacacaactcatctgtgctgcatcccaatgggctacaggctgcagccttctagataggtgggtcacagaatcagagaactggaaaggactgcagacatcccccaggctggggctttgagccctcgccatgca

SEQ ID NO: 483675 - DNA, 598 bp, Homo sapiens
aactgtccatgggcagctttggccattaggaggaagtcatcagattctctgaagtcctccatccactgctcctctcacctggtctccatctgtcccaggattctcyctgcctctgtctggaggaagggctaagatgggcaacagagcaaagcagaggcatgcctgcaacccaacctggccaatgggacaaacttatggagtgttaatgagggtcatggactttgccaccatcttttcctcttagcctcagtttcttccaacttattggagcaaaacctcaagtggttggatgaagcagtaggaacaacctcagtaaagtcaaaaatgaatcaggggccgagtgtgacatctcatgcctataatcccagcactttgggaggccaaggagggtggatcacttgaggtcaggagtttgagaccagcttggtcaacgtggtgaaatcccgtctctgctaaaaatacaaaaattaactgggcacggtggtgcgcacctgtagtcctagctacttgcaaggctgaggcaggagaatcgcttgaacctgggaggtggaggttgcagtgagccaagctggtgccactgcactccagcctgggcaac

SEQ ID NO: 483676 - DNA, 598 bp, Homo sapiens
cattgccttgctgttggtttcagtagatttatttagcttactgttaaatacttactgtggtgaattctgctgttggtttcaggtagatttatttaacttactggtaaatacttaccgtggtgaattccgcccagtccaaacctcccagtctcctaagcactgtcaagggaaaaccgccttctaaagcctctgtcatggtggatgcccctcccctgaccaagctggatcttctcaggtagactccagactgctgtactggcagtgagaatttcaagccagtggttcttggttggctgggctccatgggagtgggacctgctgagtgagaccacttggctccttggcttcagtcccctttccaggggagtgaacagttctcctgtgttactggggttacaggcaccactggggtacaaaaaaatctcctgcagctagctcagtgtytgcccaaatagccacccagttttgtgcttgaaacccagggccctggtggtgtaggcttatgagggaatctcctgatctgaggattgcaaaaatctgtgggaaatgcctagtaccagggtgagtagcacagtccctcatggcttcccttggctgg

SEQ ID NO: 483677 - DNA, 644 bp, Homo sapiens
ctctttagaaatagaacatcaaatgagaagatatttttgttttctcccatcaccaatgacagcagtcattttcaggatttcgactgataagtttcagagttgctttgcctaaggatcatgtccctgatctgcacctgtgccctgcccaccctcaccctttttctgcccaaataaatcagtctgggattaatctttgcagcttcattcctcactgctcccctcagtgaataaaatttgggccagagtgggggaattcctgaatgtgccatgttctttcatgcctctgggactttctttccccaatcaagaacatttggtkcatctgtctgcctttgagattccaaatggccttcttgggtcagctcaaacgatcctccttgatggtttatttgcccttgggtttaaatttgtggcttttatgtattaagatctctccaaaatattaagatttgtttccagtcataaaccagctttttttttttttttcagcaaagcttccctttccaagcctgagagagatagctaaagggtagaactcagaagtggttcgttttctgctatttattattcaggaatgcttgttaaaatagtaacctttcctattaatgaaaagagttgatacaagggcaacaagtggcaaaaat

SEQ ID NO: 483678 - DNA, 470 bp, Homo sapiens
cagaggttgcagtgagccgagatcrcgccattgcacttcagcctgggcaacaagagcaaagatctgtcacaaaaaacaaaaagtagggactcataaccctgcattaattttcaccaattccctcttcattttaattcaataaatactgtatagaaaactgagaaccttgattacagtatcacttgttatgaggtaggtatttttactacaagcaatgaaattttggggaaaataacctactgaaatatttgctttcacagattcctcaatgttgcttcctactcaaacaatttactttgaaaatatgttgtaattctcataatactttcagatgctttcacgtctttaagacaaagcataattctctgtggtaatatctaccaaagttttgtttatatacacttaaaattctaaacactaaaagaaaaatttatatacagaaggaatccttttctgattacagagactta

SEQ ID NO: 483679 - DNA, 616 bp, Homo sapiens
ttaagaaaatgtaataaaaagataccattccgcagaagtaatatacatgtaaacattctacagttaaatttaataataaatttagagaaaatgtatagagaaaacaataaaattcttccaagaaagctaaaataactcttgagtaagaacatagaactagcatagtctgtatgagaatcaatagtgttaccaagagacccctaaaatttatctatagatataatttaattccaaacaaaatcctaatactggtgttgagataaaagtatttccaaatattacttggaaaaaaaatgtgtgaaaccagacaatacaattttttaaaagactaatgaagaaaaatttgtcttactaaataaaatataaatcatggattattaaactgtgaggtaaaggaataagcattagagctattagacagaatgcaacatcagaggtaggaccaagtatatatatgctgaatagtcaaaatgatgcttttaaaacttaatcagtatatcattactctgctcagaaccttctactgccttcctaaatcactctgagtaaatgccagtcttcagaatgcctgcagcaccctrcagaacctggcccttttcctagcacacccccttca

SEQ ID NO: 483680 - DNA, 553 bp, Homo sapiens
tctgtaggtgacctaaggactcaggcgatcctccggcacaagggtgcttattgtttgggaaactctgttctaaacaacagaagctaagagtttgctattattttcaaactcaatattccattggctgatacatctttgttactgtagcccttcctttgggctttgttaattactttttgtctwacaatttttgctttctgtcttctgatgctatgtgtttgggcacatgaatgttcctgttaactttacttttgatgttgattaaccaatttataaaatgattcaatttctcattataactctaatgtattttacattgaatttgaacttgtttgaatagaaataccataaaccctgcttcctttatgtttagcattttcctaagagtctttattctgtaaattttagtatttctttatcatttttatttatatgttaggagcctagacgcttagttagagttaattttttacctagtatttgccctttagaaatttttcccatttacttttattgtcttaattagtttatttgccttttctgatttttaaag

SEQ ID NO: 483681 - DNA, 379 bp, Homo sapiens
cagccaggagcacgggaacaggacacatttcttgttcaggcctcaaaacttgcagttcttccagacaggggctgttcctgctcccttctccacccttcacccccagcctttgttcctgggaatgctggctcaatgtctcgatctcactttcgccaaagcaaacattttccacaaagcgtatgctaaggggatattagaaagacagattttcttttycttttttttctttttccaaatacactgtgcattgggatttgggcagccagccgttcacacctgtactttttcctatattcatattctctatgtttttacctaatcttcttgctacttgctaccttcagctaatgagaggggtttttgagggctgagagttatc

SEQ ID NO: 483682 - DNA, 433 bp, Homo sapiens
atacctgtaatccaaggctgacactgcctgcttgagggggcatgggcacatcctgttgaaagtaagatattcatggtggggtggcatttgaaatgggtcctggagtagaatttcaggaggaaatggaaaggaggaaaaccacgtggtgggaagactgtgaatagaaacatggagggaataaagtgtggatcttgtttggtgaaggtaggctaacacaggcagggagggatgcagaggcactagcagtttagtctccctaaggatgctgccyagtagtgcccgctgatgcttttgcttgtcttcaaatcaactgccagggggcatgcgcaggccagtgggcggcttcctccaggcctttttagactttacttcatagtgccagaaaatgctacagatccctgatcttgaccttcaggtgcctctaaccctttcc

SEQ ID NO: 483683 - DNA, 433 bp, Homo sapiens
atacctgtaatccaaggctgacactgcctgcttgagggggcatgggcacatcctgttgaaagtaagatattcatggtggggtggcatttgaaatgggtcctggagtagaatttcaggaggaaatggaaaggaggaaaaccacgtggtgggaagactgtgaatagaaacatggagggaataaagtgtggatcttgtttggtgaaggtaggctaacacaggcagggagggatgcagaggcactagcagtttagtctccctaaggatgctgcctagtagtgcccgctgatgcttttgcttgtcttcaaatcaactgccaggggrcatgcgcaggccagtgggcggcttcctccaggcctttttagactttacttcatagtgccagaaaatgctacagatccctgatcttgaccttcaggtgcctctaaccctttcc

SEQ ID NO: 483684 - DNA, 622 bp, Homo sapiens
ttatgggcatgaaagatgaacagatttcagatggttatatagtcaacaggtcttggtgactggatatgctattataggagattttgatgttgcttacccttccaaattacatgtccattacgggttagtttaaattttttttgtttttctaactgtcccttttggactctgcagccagccacaggaacttttttcttcccttctgttacagagaaggtagctagtatagatgcctcacctttaggaagaagagaacattaatgtgcagaaaactaaagattctgataaatasgtaatttctgacattctgtggtataagaattaaaggtatgacaaaaatccaaattcatgcctagaaaaaagtctgggtttctttaactccaattttattttcctgaccaatattaagaataaaaatgaatgaaaatctttggctattcttttccttttctttttttctttttttttttttttttttgagacagagtctcactctgtcatccaggctggagtgcagtggtgtgatcttggctcactgcaacctccacctccggggtttaagcgattctcatgcctcagcctcccgagtagctgggattacaggcgcccacaaccacatcca

SEQ ID NO: 483685 - DNA, 615 bp, Homo sapiens
aacctttatttcaatataataatgtttgatcaagacactaaattctaagtataataaagaagcatgatagctactatttattgagtgctgtgtgccaagtactgggctaaaaacttcatataagttgtatatacataaataatatatacacacacacccaaatatatatacacacatatatacatgcacataatctttacaactaatcctttataagtattatatccattttttagatgagaaaactgaggttcagaaacattaaataaattaggatcacacagctaataaatagcagagttggattactggattcaaatccagatttttcagactycaaagccccatgaattttgacctcaaagccagagaatgcaaatcaggttcaaccattcaacactgagcaactagtatttgcttgaatctatgtatcaagaagaattctgaaacttacaggagtaaattggcagtatgtcctgtgaaacatggttgatgcaagtcagaaggtatatgtttggctctttttttcccatctctaagcattataatatgtgataaccctttaagttcaatttaaaagtatattagcattctggcagaaggtcacattgggca

SEQ ID NO: 483686 - DNA, 615 bp, Homo sapiens
aacctttatttcaatataataatgtttgatcaagacactaaattctaagtataataaagaagcatgatagctactatttattgagtgctgtgtgccaagtactgggctaaaaacttcatataagttgtatatacataaataatatatacacacacacccaaatatatatacacacatatatacatgcacataatctttacaactaatcctttataagtattatatccattttttagatgagaaaactgaggttcagaaacattaaataaattaggatcacacagctaataaatagcagagttggattactggattcaaatccagatttttcagactccaaagccccatgaattttgacctcaaagccagagaatgcaaatcaggttcaaccattcaacactgagcaactagtatttgcttgaatctatgtatcaagaagaattctgaaacttacaggagtaaattggcagtatgtcctgtgaaacatggttgatgcaagtcagaaggtatatgtttggctctttttttcccatctctaagcattataatatgtgataaccctttaagttcaatttaaaagtatattrgcattctggcagaaggtcacattgggca

SEQ ID NO: 483687 - DNA, 393 bp, Homo sapiens
aaacgaaaaattcctcccatttgcttctttttgcattaagaagtaaatcacccccccccccccgccaaaaaaaagtttggagataaattacctttccacatccacttaacacatagtgcatttcatttgcattaaaacgaaaatgtggctgtcataatccattataattctgttacaaattctgagtgcactaaaggtaagggcattttgatgcttacaaaagaaaaaggaaaaagaaaccccattagccaacatcctacttagcaattcatacaatcatcataataattaacatttatgcagccctcaccaagaacatgcaattttctacggcttttacatttattatgtcacttcttcctcamaacaaccttataatgtcagtggcattat

SEQ ID NO: 483688 - DNA, 538 bp, Homo sapiens
agctctgccacttgagttggtgatataattattttgagaaataacatcaaattgctagcttcccaacactcccattttttaagattccattggacataataataaagatattcaggcctggcactgtggctcatgcctgtaatcccagcactttgggaggccgaggtggtcagatcgcttgagcacaggagttcaagaccagcctgagcaacaaggcaaaaccctgtctccacctaaaatataaaaattagccaggtgtggtggcacatgcctataattccagctactcggaaggctgaagcacgaaaatcacttgaacctgggagaaggaggctgcagtgagccaagaytgtgccactgccctccaacgtgggtgacagagtgagactgtctcaaataaaaaagatattcaacattccagcaattcgtttccccaaataagtactccatatataatgtataatgccaatctaatggcataatagaaggtaagtcaaacttcaggatggctactgagtgatcatatggacaagaccag

SEQ ID NO: 483689 - DNA, 623 bp, Homo sapiens
caatttcatttctgggtgggccacttaatgcctccaaatacagcaagttccttctgagcatggttcactgtttttaccaccaacgtgctaaatgccatttcctttccttgcacacatctatcaaaactctctaatatcctcagaactaggttaagtgctcctataatacattctcaacacaccctgaatgtttcattcaaagtgttccttccagttaataattgtagaattattggttacatgaatgcctccactgccagattacagattgcatagagcagaaacaccatcattaaggcttagcataaaacctggcacttagtagacttaaatgaataaatgattgactcttatgtgatacttataattcagtacaaccacatttcttaccctaaaccactaacaagaagtgaccaatgyatccagccatcatcattctctccttctcttacctttctaaaagtgttgttaacataggagaaaatgtaagtggtcaattaaaccatgtacagtatggttttaaaacacatagaaatggtatagcagtaccagatgctaaataagaaatatcagtgtgaattcatgtcattttccagctccattactaccaaaaacagtccaac

SEQ ID NO: 483690 - DNA, 593 bp, Homo sapiens
ctgatatttagctgacctaactctgttgttttcttcattcagggctgctatggcttgtaataacagctaaccagctctacatatctttcaagctccagagtttgcagaagtcagtgcatccctttctgcctgcaccccatcccaatccactactggtggaaatcctactaattttatgatgctactgagtgctggaggtaccaccatactcgagagagaaatggggccctcaggtcctcctgggtccttgttgcctcgattcccagaatctcaccctgaagtctgctctctatactcatttttgttagcaactgtcttaatttaggtttacccagaaatctacactgagataagaatctgagtaaagtagtccatgtgggaggaggtctgagaaagcattaactgggcaatgaggaagtgaagttacaagggtaagagttaaatacacagcacatgtaaatgagcaagttactattgcaggcacctggagcccaatcyggctgagaaaaactgtgtagaaaggggctttacaaattaaagcccaagggccaagtctcactgcggcctatttttcacctacaggtgaagataca

SEQ ID NO: 483691 - DNA, 618 bp, Homo sapiens
gcccagaggctgccaagtaattggtcctggtgctctgcagccagaggctgatggcctctctctgctggggccagtaatcacagtctgccaggcctggatgtccagtgggctgggtctgatgctctgtctgcctttgtcccctataaggctgttgctgtccttctctttcttccccccactcctctctgacattmtctctctttctcactctgcctctcaatttctgtgtgtgtgagtgtgtgtgtgtgcatgtgcatctacctttctttctttcctgtgtccgtgtgcacacgtctgtgcacatctgcctctgaatctctgtcttgtctgcatgtgtgcctatgtttgtgtgcatttgtctttatgtatgtctgtccttttgtgtgtctgtctttcttctgtgtataggtctgtctgtatgtgggcatgtgtgtgtctgtgtgtctttccttctatctctctgtctctctacgggtctctgtccctctttgtgtgcatgtctgtgtgtctcctatttgtgtatggctgtgttgtttctttctctttgtgtcactcccttttcatgtctgtttctctgtgtctttctctttattgggggctgtatgtctgtgtgtgtat

SEQ ID NO: 483692 - DNA, 618 bp, Homo sapiens
gcccagaggctgccaagtaattggtcctggtgctctgcagccagaggctgatggcctctctctgctggggccagtaatcacagtctgccaggcctggatgtccagtgggctgggtctgatgctctgtctgcctttgtcccctataaggctgttgctgtccttctctttcttccccccactcctctctgacattatctctctttctcactctgcctctcaatttctgtgtgtgtgagtgtgtgtgtgtgcatgtgcatctacctttctttctttcctgtgtcygtgtgcacacgtctgtgcacatctgcctctgaatctctgtcttgtctgcatgtgtgcctatgtttgtgtgcatttgtctttatgtatgtctgtccttttgtgtgtctgtctttcttctgtgtataggtctgtctgtatgtgggcatgtgtgtgtctgtgtgtctttccttctatctctctgtctctctacgggtctctgtccctctttgtgtgcatgtctgtgtgtctcctatttgtgtatggctgtgttgtttctttctctttgtgtcactcccttttcatgtctgtttctctgtgtctttctctttattgggggctgtatgtctgtgtgtgtat

SEQ ID NO: 483693 - DNA, 615 bp, Homo sapiens
agaattcccacatgttgtgggagggatccaggagataattaagtcatgggggctggtctttcccatgctattctcatgatagtgaataagtcttgcgaaatctgatgcgtttttcaagggtttccacttttgcttcttcctcattctctcttgccgctgccatgtaagaagtgtctttcgcctcctgccatgattctgaggcctccccagccatgtggaactgtaaatccaattaaacctctttttcttcccagtctcaggtatgtctttatcagcagcatcaaaacggactaatacagtagtacaaggcgctggcatcccaaaaccatggagccaccaccttggttgtaagctgcttaagctttaacatttaggcagaaaataatgttgtctaagtcactttgtgcatgtgtgtgttgtgtgtgtgtgtgtgcgtgtgtgtgtatgttttgttttggtctttgtttaaacaaccaaatctgtatcccaataatgctttgctcctccccctaccccaactccctccttctagytaataacaccctgtactcctactgcttaaatcagaaagctgggtaccaccagctgactcctcctcttgctcaccctgtccct

SEQ ID NO: 483694 - DNA, 410 bp, Homo sapiens
gtgggctagagtcactttccaaatcaaggaaccatgcaatgagattccggagtgctcagacacacctgtgggggcacatctgtgggatgtgtgcatgagtccctgtgctgggtgctttcaagggccacctgagaccctggtcctagaggacatcttttggtaatgaagactgagaccayactgctaccctgccctgacttccattgcttggaacagaaggttaacacgagaagggaactcagatactgcccagctccacctcctgcttatggacgatgccactgatatggtttggatgcgtgtcgccctccaaatctcatgctgaaattaacctccagtgttggaggtggggcctagtgggaggtattggaacccggggacgaatccctcacgaattacctccccgtggt

SEQ ID NO: 483695 - DNA, 499 bp, Homo sapiens
agagggcagtgaagtgacaacagcttcagctcgtcatcgatgttatacagaaacacaaaaggaatccccggcctgtgatgaaggagaggccgttgctgtgtgttcaggacacctcagagcaggcacataaagtgctggagggtgacacagyctgtctggatgtcctcgggagggtgtgccatccaggaggcgacacccccatccagcacacgggcccttccacccgctgtcggtcctgctaaaggtacgaggctaaaaccggcctctccagaaaagaacgctcagtgtgtgctgaccacacttccctttgaatttcccgagtattcaacaggagatacattttaacaagaaaaaatacccctaacaaacaggacagatgactctctcaacaagagagcaactacgaacatgatacaaatttaaataaaaatgtttagttcaacgtgttcgtcatggagtttcaaatcagcagatgccatgacaggaaaggagcacacag

SEQ ID NO: 483696 - DNA, 499 bp, Homo sapiens
agagggcagtgaagtgacaacagcttcagctcgtcatcgatgttatacagaaacacaaaaggaatccccggcctgtgatgaaggagaggccgttgctgtgtgttcaggacacctcagagcaggcacataaagtgctggagggtgacacagcctgtctggatgtcctcgggagggtgtgccatccaggaggcgacacccccatccagcacacgggcccttccacccgctrtcggtcctgctaaaggtacgaggctaaaaccggcctctccagaaaagaacgctcagtgtgtgctgaccacacttccctttgaatttcccgagtattcaacaggagatacattttaacaagaaaaaatacccctaacaaacaggacagatgactctctcaacaagagagcaactacgaacatgatacaaatttaaataaaaatgtttagttcaacgtgttcgtcatggagtttcaaatcagcagatgccatgacaggaaaggagcacacag

SEQ ID NO: 483697 - DNA, 613 bp, Homo sapiens
gaactagagccgcccacaaggatgaatcttaagagaatcttaagggaatgatgaacacaaatccggggaggatgggactgggtatgggtgtgcatgagattcccaasggtcagtaatgttttatttctgaagctgagggttgcttttattatgactctctatatcttatacagattacaaatatatttttataggcattaaatattaattaaaaatatacacgtacatgtagaatgtataaaattctactcatttccccaaaccagcttaccctggaaatagagaaagaatctgtttaataaacctggtagaattcacaaactgtatgttccttgttaaaaatttcattgcatggaagcacatttatcaaacaaataagtgatttataatttcttagtttatctaaatgcagtgcttagcttattttatatccatatttaatggccatttctcaggatatcaaagtccaatttggggcattccatccatcatttcccataaacataccctagaaggtaaagggaaagaccagcatgtggtagatggctcagggggcgaacaccctgccccatgggcgtgtataccgtctggggcagcagcttctgtgaggcta

SEQ ID NO: 483698 - DNA, 613 bp, Homo sapiens
gaactagagccgcccacaaggatgaatcttaagagaatcttaagggaatgatgaacacaaatccggggaggatgggactgggtatgggtgtgcatgagattcccaacggtcagtaatgttttatttctgaagctgagggttgcttttattatgactctctatatcttatacagattacaaatatatttttataggcattaaatattaattaaaaatatacacgtacatgtagaatgtataaaattctactcatttccccaaaccagcttaccctggaaatagagaaagaatctgtttaataaacctggtagaattcacaaactgtatgttccttgttaaaaatttcattgcatggaagcacatttatcaaacaaataagtgatttataatttcttagtttatctaaatgcagtgcttagcttattttatatccatatttaatggccatttctcaggatatcaaagtccaatttggggcattccatccatcatttcccataaacataccctagaaggtaaagggaaagaccagcatgtggtagatggctcagggggcgaacaccctgccccatggkcgtgtataccgtctggggcagcagcttctgtgaggcta

SEQ ID NO: 483699 - DNA, 630 bp, Homo sapiens
ctgcctccaccatcacatctccttctctccccgtgcttccaaagtcacagtatcatctctgattctgaccctcctgtgtccgtyttacacaaacccttgtagttatattaggcccacctagaaaatcttcgataacctctccttttcaagacccttaacacttcttaatcacatctgcagaatcttttttgtcacataaggtagcatcacaggttccagggattaggacatggacatctttggggtgccattgctcagtctaccacagttggataggtggatggtatgggaaggagttttgtctatgaaagattccattcttattttactggggaatataaagtctccattaaaaaataaaaaggaatgatttgtgaaaagtcctgtaacagtattattaacccacaaaagctttgttgaacggacaataagtttctgaggaatccaataaaatgggaacatactgtactctaaagggatattcatctgcagctagtcctacaaatctctactttgtttttaatttatagagatagttgaactacttctcccatatttttcttatcctcaccctaccctgtcctgccactaaaaggttctttatgatgtggtttcattgaggagggctga

SEQ ID NO: 483700 - DNA, 551 bp, Homo sapiens
tcatgatacaacctcaagatactttactgtatarggcacttgtattttatttaatgactgatacattcctaagatgggatcttcaaaaaacgaatactagattgaacatacagcactggaaggtaaaataacaatgacaaatagagctctataacaaataacgaatccagtaccatataggaaacctcctcaggaaaaaaaaaaaacatacaaataaagaaataaatggcaaacaaaatatagtaatagggtctatttacctgtttgcagattctacaccaggaatatgtaagaattgtatgctgatatccaggtactggagaatccaactccttcaggattatctgcacacagccttggccatgaacaaagcgccgaatatgatgtaccatgggggtatcacagaacatgcttggacactgataagaaggcctttgacaaacaaaagagcccttctcacattaagcatgaaacagaaatcagaaccactgtcaaagtgcagcatgactagtgaacaatctgcacaaggtactcatgctgctctgagcctg

SEQ ID NO: 483701 - DNA, 637 bp, Homo sapiens
aacatcgtcttcagctacagcayggtgatagtttccatttgttaagcaccttctatttgccaaacaattttaaaacatttccttttaccttctgataattctagggattgttattccctataaaggggactagtaaagtgctttgtcatataagtggcgagtgatgatgctaagacttaaactgaggtctagatgattccaacattttacctctcatttgaatcactgtaaaaaaacaggtatccgaaaaatgttgatggtagggtaattagatgggcagagatatgagggatgttctggataagagatctcagtttaaatatgaaatagattattacttctttgaatgatatactctgatatgcactatgaaagtgaggatcatgtaacagtcacttaacatccgactcatgtttacgttttagcttgaaattttgagcatcaaaaatgtgtaatggaacagaaggaagaaatatgttcttacctgaaacagtatctctctaaaaatattcctaatgtaagatcattctttccataaaattccattgttacaatcctaaagaagagaccacctcttagaaacataagaattaccatgccccagagacatttcatgagaccacaaattatgattacc

SEQ ID NO: 483702 - DNA, 637 bp, Homo sapiens
aacatcgtcttcagctacagcacggtgatagtttccatttgttaagcaccttctatttgccaaacaattttaaaacatttccttttaccttctgataattctagggattgttattccctataaaggggactagtaaagtgctytgtcatataagtggcgagtgatgatgctaagacttaaactgaggtctagatgattccaacattttacctctcatttgaatcactgtaaaaaaacaggtatccgaaaaatgttgatggtagggtaattagatgggcagagatatgagggatgttctggataagagatctcagtttaaatatgaaatagattattacttctttgaatgatatactctgatatgcactatgaaagtgaggatcatgtaacagtcacttaacatccgactcatgtttacgttttagcttgaaattttgagcatcaaaaatgtgtaatggaacagaaggaagaaatatgttcttacctgaaacagtatctctctaaaaatattcctaatgtaagatcattctttccataaaattccattgttacaatcctaaagaagagaccacctcttagaaacataagaattaccatgccccagagacatttcatgagaccacaaattatgattacc

SEQ ID NO: 483703 - DNA, 603 bp, Homo sapiens
gtcttcagctacagcacggtgatagtttccatttgttaagcaccttctatttgccaaacaattttaaaacatttccttttaccttctgataattctagggattgttattccctataaaggggactagtaaagtgctttgtcatataagtggcgagtgatgatgctaagacttaaactgaggtctagatgattccaacattttacctctcatttgaatcactgtaaaaaaacaggtatccgaaaaatgttgatggtagggtaattagatgggcagagatatgagggatgttctggataagagatctcagtttaaatatgaaatagattattacttctttgaatgatatactctgatatgcactatgaaagtgaggatcatgtaacagtcacttaacatccgactcatgtttacgttttagcttgaaattttgagcatcaaaaatgtgtaatggaacasaaggaagaaatatgttcttacctgaaacagtatctctctaaaaatattcctaatgtaagatcattctttccataaaattccattgttacaatcctaaagaagagaccacctcttagaaacataagaattaccatgccccagagaca

SEQ ID NO: 483704 - DNA, 493 bp, Homo sapiens
gaatcttacttactctaaccttttcactggctgccagtgaaaggaggtccggagacactgcttacttccccaaggtcacacagtgactaggagacaagcaagagtaaactcagccaacaaatgcaaggaygctcaatgaaccaggggcctctggaatctctcctccctctctccctccctgtcttccttcctctctccttccttccttgtcactcaagaaaaatttatttgactatcacccaaggccgctgtgccctcagaaattcctagcccatgatactctcttcctgggggtggggggccctccgccctcaggagggcttgtgggttaactgttgtgatgagctatttccaaggtaggaaaagagaaactagatcattgagccctggggaagggctgtggttggcacagaaaatgacagatcccgtcagcaggcaggcggggtcaggggctcctccccatggctgggattgggggctggtcctggggggt

SEQ ID NO: 483705 - DNA, 630 bp, Homo sapiens
agaaagaaatcaaatgcattttaggtttcttaatatagcagattttctatgtacaatcaggtcagcaatcacgaaatgaatgcataaaatgaattgtaagaataaagtattattgaaagtaaaatctattttatttgctgacctatgtcttggttttacttttacttcttttattttctttcaacttaattgtctaacttaagatgtcccatttaaactggaacaattagaacaacaaaatgaataatgtagtattggatcgtaacccaaaatatgaaataaatgtccatgaatctgtctatgaaaggttgaatgaataaataaatggggagamgagacaaatctcccatagagaagaattcgaaacaatttgtgtagacaatcaaccttcaagcccatgaggcacaattcttcattccttaagtataggctgcacatagtgagtttctgcatacggtgtgaaaagggaggtttaactttataatgaaaaatgttacaaaaatgcctgccaggtgctcaaattcatatcatgttcccctgataagatttgaagaaatagaagtaggactttaactttgtggtctttctcctcaaaatccataatcccattcaaatcatgagaaaaacgtc

SEQ ID NO: 483706 - DNA, 630 bp, Homo sapiens
cagccctcataaagttgcttacatttgataggagagaatgatataatttcataatttatgtagtgacaagcatagtaaagaataataaaatttgagaagagaaaatgtcactttaggtcaggatgtgaggggagaactctctgagaatataatgtttaacaacaagactaaattatgtaaaaaaaaaataatatctggggaaaaagtgtaagaggtgaaatcaaatataaaatctctaaagcaggaagacatttgtcctatccttggacttgtttggaacctgagaaaatggattgctgataatgtcatttgagatggtaaaaattataggaacaacatgattgaaaatgggggagggagtcctagaattaagtttgggaaatgctgagtttgagatacctcttagacactcaagtagaaatgtcaagttggtaattgatatatgtgaatctggaactcaggaagatatacatttagggcaaagaagaagagattgaagagctgttagtcaaaggatcactgtcaaatttcagagatgaggaagraatacagaatgtctgtatctataaaactaattgtattttataagttggaccaagtataatactgccaaacattcctaataaaaag

SEQ ID NO: 483707 - DNA, 606 bp, Homo sapiens
cttatgatttggggatcaagcctccatgtctattcttgttgcctgtccagatgccaaaactctgtgttgctgcagggtttgaacttttggaaaccaattaaaatgtgcctttggtgggcggggtcaagagcccctggatgtcgacctctcccgctgtgtggygtccccctcccacctgttgaatacatagggatggctctctcagggccctgggaatgggaatggacagcactgctgtgggctgttcccctcccctaaagttaatctcttggtctggccaagttgctgctccctcaaccttcctgctgtcttcccctccctcaaccccaataggaggatcccaggataaacactgctgggcaggcgggcaggcaggcctggggctgccctgctcactctcattgtctggcctcaggacttagccatactagaccagtcagcttgcctggaagagggaggtcccactatgcctttgggagacacctatacttaggaaaaagcctttgttgtcctcccatccatccattaagctgctatctcagcctgtcccttctgccccaggggcttgcctggcttggctgcagtgcactttgaaatgaagtatct

SEQ ID NO: 483708 - DNA, 606 bp, Homo sapiens
cttatgatttggggatcaagcctccatgtctattcttgttgcctgtccagatgccaaaactctgtgttgctgcagggtttgaacttttggaaaccaattaaaatgtgcctttggtgggcggggtcaagagcccctggatgtcgacctctcccgctgtgtggcgtccccctcccacctgttgaatacatagggatggctctctcagggccctgggaatgggaatggacagcrctgctgtgggctgttcccctcccctaaagttaatctcttggtctggccaagttgctgctccctcaaccttcctgctgtcttcccctccctcaaccccaataggaggatcccaggataaacactgctgggcaggcgggcaggcaggcctggggctgccctgctcactctcattgtctggcctcaggacttagccatactagaccagtcagcttgcctggaagagggaggtcccactatgcctttgggagacacctatacttaggaaaaagcctttgttgtcctcccatccatccattaagctgctatctcagcctgtcccttctgccccaggggcttgcctggcttggctgcagtgcactttgaaatgaagtatct

SEQ ID NO: 483709 - DNA, 325 bp, Homo sapiens
tttccaggtctggcccaggtacctcttgcctagagcataggcttgtccagccagatgactatacatggaacatgtcctctgggcagggcactgggactaacataacagtttggctctccagtctcatagtctggtgaggaggcagaygtaaataaataaattagtgcacagtgggggtcactgttactgagactgggaagaggtactaaggaactacaggcaggtgatggggcaggaccattaaggaacatcaggacagggtcttgaaggctaaggagagtattccagggttggtaagtcaggagaatggagacttttggaagga

SEQ ID NO: 483710 - DNA, 423 bp, Homo sapiens
cctttaatgcaagccatatcaaattcttttggraagtaggaagctagacatcataaataaacacatttggattaagtggggagcaggtcagagagaaggcggaattacaggataatttttaagtggatgcagctttattcctctcaagaatttacagtgactcttcccgcgctgtcatcctatgaatctaactgctgacaaattatctctaagttgaggtcctgctgggacttctttgttgagtaaattagaggacaggtttccatactaattgtaggctagcaattgtactaatgacaaaggaatcctccctattcatcataagtaggttgaagcagggtctgcctcattctccatccccttcacataactgatgcattgctcagggagcctcggcttcatggcttcagcaaaagccctgct

SEQ ID NO: 483711 - DNA, 505 bp, Homo sapiens
aaattggaccgagcaagagttgatgtaatgraccctcctggccccaagcacaaggctgtcatctccgtttaccttgcttcttcattctggcctgggttataagtgattgtgtgtctgtctctctcccctctggatttgtcagcacctggagggtacagcccttgtctcattcacttttctacctcccaactccccatggcaataagcacagagaggtccttaatcaacgcaccggataggatattcagtaaaacctcaattagttggaaacctcattgaactgagttttataaatgactgtccactgggaggaggacaaagcgaatgtgagaaataagctccaggataagatggtttctgttgcttttttgcttttgtctttaaagcatttttttaagagatggggtctctctgtgttgcccaggctggaccatagtggctgttctcaggtgcagtctcattactgatcatcactggagttttgagatgctccatttccaaccag

SEQ ID NO: 483712 - DNA, 640 bp, Homo sapiens
taaggtgcaggaggcctaattccccacaccccctcaaacacataacttatatgtttttaaatgaaaggatagagaacaaaagggaattacaagcaggagtgaataatttgaagctgaarctaaatataattgctctggaacactgttcctcaacctttttttttttccttatcacccttcccccaaaggagacctttagacatttttttttcctaattgtactccaccccaacctttactccactcatgaaatttaaactccacagatacactgtatatttgcttatttactgtggccattgggaaggccacaagccattataatatctaagattttgttcatccactgagaaccaatatttgcccccttggagatgataacattcctattgacaaatgcattttctagtctagcaaggtaaaatcagtaaacaatgggaactgttcatgggttcctctgtaggcacactgcccttctcaaccttgctccaatgttaccaaggcttctcttgcctcttctgtctgagaatggcctattcttcaattttcttagtgctgcttctctgctgctctagtttttagaaaaactccatcccattcttttaccctcaggtctagaaagtgatagaggaagaataaa

SEQ ID NO: 483713 - DNA, 360 bp, Homo sapiens
atctgaagaggtgggtggattgatgcctaaacatagagatgatcctataaagattcctctgtttctgcaaccccagtacaacctgactctgcccacaactcccttcatggaatgtcataggagaaggataccagaagggtacagatagggtgatgcaacaaagatgcatttaaacttgtcatttttgcacaagactgaamccttcacagggactaactattgaagaaaagggcagggtcattttggagctccaggacacctggagatggcatacctggtgagtgtctggagatgggatgtgggaaggggtagaaagaaaagcttgtgatggaaccaaagtgatacaactgcccagaggcc

SEQ ID NO: 483714 - DNA, 389 bp, Homo sapiens
tgtgttccagaattccagttttaagactttaaacaggccaggcatggtggctcactcctgtaatcccagcactttgggaggctgaggcaggtggatcacctgaggtcaggagtttgagactagcctggccaacatggtgaaaccctgtctctactaaaatacaaaaattagccgggcgtggtggcrggcacctgtaatcccagctactgtggagactgaggcacgaaaatcgcttgaacccgggaggtggaggttgcagtgagccgagattgtgccactgcactccatcctgggtgacagagcaggctttgtctcaaaaaaaaaaaaaaagaaaagaaaaactttataaacataagtagtccattattgatattgtgtatgggaaataa

SEQ ID NO: 483715 - DNA, 561 bp, Homo sapiens
tgcactctgcagcatccggaacgtttcggcgtggccgcagggcgcggcggaatgacttccggggcgcccctaaagcggcggagaggagtgtcgggckgagtttccggctgagagtccttctagcggcgccggtgagtccgcgtgtggaagtctgtgaggcgcagaggtggggcaggccgtctgactagctaggcggctgggagcgttttcgtggcggggaacggaggttgaattgccctgcctgggctcatagggaaggaggatgtgaaggagcttgtgaaggcagaggaaggtaactttcgtctggggagccgcagagtagggagggaagctgcaggccgtctctccctaagtaaaagcgcgacttttagaaatgatggttcagggttcgagtttgtgacccgcttgagaaagtgaccaacctctgagcctgaatcccatacctgaaaaacaaggacagtaatcacccttgccagtttcacatagcttggtaaggtgtgaagaaaagcttcttaaattgggatgtttggtgctctcatttgttggcagatagcattccga

SEQ ID NO: 483716 - DNA, 632 bp, Homo sapiens
ctgcactctgcagcatccggaacgtttcggcgtggccgcagggcgcggcggaatgacttccggggcgcccctaaagcggcggagaggagtgtcgggctgagtttccggctgagagtccttctagcggcgccggtgagtccgcgtgtggaagtctgtgaggcgcagaggtggggcaggcygtctgactagctaggcggctgggagcgttttcgtggcggggaacggaggttgaattgccctgcctgggctcatagggaaggaggatgtgaaggagcttgtgaaggcagaggaaggtaactttcgtctggggagccgcagagtagggagggaagctgcaggccgtctctccctaagtaaaagcgcgacttttagaaatgatggttcagggttcgagtttgtgacccgcttgagaaagtgaccaacctctgagcctgaatcccatacctgaaaaacaaggacagtaatcacccttgccagtttcacatagcttggtaaggtgtgaagaaaagcttcttaaattgggatgtttggtgctctcatttgttggcagatagcattccgagctcatgtaacgggaatcacaccagtaggcttatgctgaggaacgtggattgtttggggttggattccag

SEQ ID NO: 483717 - DNA, 561 bp, Homo sapiens
tgcactctgcagcatccggaacgtttcggcgtggccgcagggcgcggcggaatgacttccggggcgcccctaaagcggcggagaggagtgtcgggctgagtttccggctgagagtccttctagcggcgccggtgagtccgcgtgtggaagtctgtgaggcgcagaggtggggcaggccgtctgrctagctaggcggctgggagcgttttcgtggcggggaacggaggttgaattgccctgcctgggctcatagggaaggaggatgtgaaggagcttgtgaaggcagaggaaggtaactttcgtctggggagccgcagagtagggagggaagctgcaggccgtctctccctaagtaaaagcgcgacttttagaaatgatggttcagggttcgagtttgtgacccgcttgagaaagtgaccaacctctgagcctgaatcccatacctgaaaaacaaggacagtaatcacccttgccagtttcacatagcttggtaaggtgtgaagaaaagcttcttaaattgggatgtttggtgctctcatttgttggcagatagcattccga

SEQ ID NO: 483718 - DNA, 630 bp, Homo sapiens
aaaatatttactatctggcccttaaagaaaaggtttgctgtcccttgttctagtgagattaaagtagttcacacatgtaaacatgtaaagtgtttaaatttttgaatcattgactagcacttggtaagacactcaattaataccagctttattaatatgattgcattcctttactgtagcacctaacaccagtactcagttaaattttttgctgaataaatcaatgaatggagaggtaaagaggaaccagaagttggggttacagaagtcactgatggaagagtttcaagatagtagaagtggtcagccctgttaagtgacaagccaaggactgaagaaagacyggcagatttggcaatcagatgaagtgacctgaccaaagagcagcttgtgtgaagtagtgaggacaggcgctggtctgcgactggtttaggaggaaatggaaatgaagaagaagagataggaaagtggagattatatgatgacaagtatcaagataaaaatgaacacatttggcctgctacctgaattttttaaatcggctcaccaaaaaatatcaggcttattgaaatattggaatatctgatgaagtttcctcttatctttgagctgtttgggtttgggtaaaat

SEQ ID NO: 483719 - DNA, 696 bp, Homo sapiens
tggaaagggtaactgtgcacctatgagacrcccctgtaaaacactcatctgccacacacagcaagcttcttttcttggtgaggtgctttggatacccgcttctctcccctctcccagcaagctgtattaggctcactcttggggatacctgagaggaggagatactcgaaacaagttgggtgctctccacacatgcctcccctatgcagaatgcaggtaagccatgggcaggaagttgggccccaagtcagtcgtctgtaagctttatctgatagtttcccatctattaaccagtgagccctgactcaccttcactggcctatttttaaaatttctgttagagctgaaatgtttgtggcagagccaggaagaattttcaagtatttagtaactttggctgccctgctggtgatttatttaacctgccacctgagaattctcatccaggtaaatatcctagatgtgatcatctacttttcttattctggaatcatgagaaaccagaaagttaactgtgacagaattttgggatttgttttagttaggtagctaattcttagtaaggaacaatgagtttagaatctgaatttagaatcttagtaatgaacaatgaatttagaatttagaacaatgaatttagaatcaggcccagttctggctcctgcagttaaatttgtacaaggaacttgatcaaca

SEQ ID NO: 483720 - DNA, 466 bp, Homo sapiens
ttccccatttgttaccattttactatctttgccttattctcattgtttgtgcatgtgtgcacacattattattgctattatttttgtatttttcattactgaaatctgaattataaaattcttcaatgaactgtgaacttatttctccaaaatactatagaaactcaaattagactacaagtttattaatttcccccatttctacctgytgcattaaggtaaattatgcttttcaagtgtgtgaaaagttataaaatttcaaggaaacattttgataaggctgcagcctgcagtcctcgtgaggaggaaagaattgtcaaagccaaggaagtcttcagttgaggcccatgcacaatcctaatcagtctggattagtgaggttgtaatttgatgttggatgggactgtcccaaccatttggagccagtttgaagtcctattagacagggtcctttaagaattagagt

SEQ ID NO: 483721 - DNA, 611 bp, Homo sapiens
gtttgggaacaagataccagagaggcaaggtacttacacaattaaaatataaagaatttaaagactgtgactgagtggtctttttgaggtgactyttaaatgaagggcagccatatgtactgacaaggtaaaaccagagctagacagtaattgaagtggtaaaaacaggtttctgtttatgactatctcactaggggaaaagagatcacagtgtagaactggattcacttctgaatacagtgtgggcaagtgggaatttatagccaggagcagggtgggggttggcgggtgggctaagggagactctagcttaacaggatttttgctgaagacagggcagggtgatcacacatcacctggggatggtggaggatgaggaacccaatcagatatggagagggatcagatatggagggtgggggattctggctaaaccaatttagccgggttcttgctaaacttgtctttacaaggaagtgtacagataaatgtaggagaagattcaggagcctgactaaagtttggtcaaacaaagcatctttgtcagatcaaatctgggaaagcaagaatttaaaggctggccggcattcgttttgacccaaacacatagg

SEQ ID NO: 483722 - DNA, 611 bp, Homo sapiens
gtttgggaacaagataccagagaggcaaggtacttacacaattaaaatataaagaatttaaagactgtgactgagtggtctttttgaggtgacttttaaatgaagggcagccatatgtactgacaaggtaaaaccagagctagacagtaattgaagtggtaaaaacaggtttctgtttatgactatctcactaggggaaaagagatcacagtgtagamctggattcacttctgaatacagtgtgggcaagtgggaatttatagccaggagcagggtgggggttggcgggtgggctaagggagactctagcttaacaggatttttgctgaagacagggcagggtgatcacacatcacctggggatggtggaggatgaggaacccaatcagatatggagagggatcagatatggagggtgggggattctggctaaaccaatttagccgggttcttgctaaacttgtctttacaaggaagtgtacagataaatgtaggagaagattcaggagcctgactaaagtttggtcaaacaaagcatctttgtcagatcaaatctgggaaagcaagaatttaaaggctggccggcattcgttttgacccaaacacatagg

SEQ ID NO: 483723 - DNA, 611 bp, Homo sapiens
gtttgggaacaagataccagagaggcaaggtacttacacaattaaaatataaagaatttaaagactgtgactgagtggtctttttgaggtgacttttaaatgaagggcagccatatgtactgacaaggtaaaaccagagctagacagtaattgaagtggtaaaaacaggtttctgtttatgactatctcactaggggaaaagagatcacagtgtagaactggattcacttctgaatacagtgtgggcaagtgggaatttatagccaggagcagggtgggggttggcgggtgggmtaagggagactctagcttaacaggatttttgctgaagacagggcagggtgatcacacatcacctggggatggtggaggatgaggaacccaatcagatatggagagggatcagatatggagggtgggggattctggctaaaccaatttagccgggttcttgctaaacttgtctttacaaggaagtgtacagataaatgtaggagaagattcaggagcctgactaaagtttggtcaaacaaagcatctttgtcagatcaaatctgggaaagcaagaatttaaaggctggccggcattcgttttgacccaaacacatagg

SEQ ID NO: 483724 - DNA, 663 bp, Homo sapiens
ctgcagtctcgtagaaagctggcacccacgccagcacctggatctgcctgctccatggcagcagccagcatgtctaactgcacagtggccggaccccatgctcgctcacacaccccttgccactccacacctgactcacagtctcccttggaggcttgggatccaggccrgtagtgtgatccaggcacagcctgccagaccaagtgggtggaacaagcccaggactcccaagcaaaactcaggcaaagctgccaccagctacaggtttccagccagaaaatgacaccccaaagattccataacaataacaatttcaaatgccctgtgaacaccaagctggttcacagttccttgtctctggaacactttaacctcttatttggctagctaatgtgcactcatccttcaagacttagttcatgcgccatcttctccaggaagccatgcttgtcatctcctctaggtctccatcccacctctgcctgctggaagttgagatcaggagtctgcctttcctagttccctgaacctaccacgttacaccaaaccagcatgatttattgactagcccttcctttccccactcatctgtcatgtcatttctgtaatatattaaagttctgtatgcaggtgggtatatttctgttccactggttgatttgc

SEQ ID NO: 483725 - DNA, 505 bp, Homo sapiens
tcactgcaacaaaacttataaaagattgagtggtggttggatcatcatggcggatgggaagcaggactagactgcagctccggagagagcagctcgcagaagctcgcattgtgaattttagctcgagatcgactgcaagaacaaaccagcaattcccgagaggacccacagaacctctgaaggaagcagactgctcctgcaggacccaggagacaccccaaatactgtgagtgccccaactgcgaaagtgggaaagggaaacccgcctctcctcaacacrcacccccactggggaagctgaaggtctgtttgtgggagaagtttctgactttatgtgaagctgagtcaatttagagagctgagaaaaatacaggggtagaggaagcagcagaaaggccctgggagctcgctgcgtctcataacaggccagtgctgcttggcaccacagggatccattgggaggatgaccagaggagcagggggtaaaactctacagggagaagga

SEQ ID NO: 483726 - DNA, 495 bp, Homo sapiens
cttgaaggactatcgggggtagctggttgaaaggaagggaaggccagttcagcaggggactggcatggacaaagatattgagtcctgaacaaaggaccagaggaaggggggaaagattgaggaataaaatgggagaggcagggcagcgggaacctacctgtcatttgatattgctgttgctaaatttcaaagcctagggagattggtgagagatcagataagctccctaggaatggtaggaaagaagatgcaaaattcaagaacttttaggcaaagcaaagacaaacaggttgcaaagatctatgtaagcagattttagagttcaaggcaccaaaaaatttacaagggcatyagcatcagtagttctgactatagagcaagaaccactggtttgtgccttttatgttatgtgattaatgtgggatgtagacaagaagcttaagggtgaatgctggcccagcttacaggagggacagagactctgggataatccag

SEQ ID NO: 483727 - DNA, 603 bp, Homo sapiens
gtggtaatgcagagaagagtctaaggttatttttcatttttagttatttcatgaaccttgacagtatctcatgactcctcctgaaaatgctgcagtataaaagagcaaagagatttgggaaatacctaagaagcaccttaggattagggtggcattgcttttatagatttttgattttaaagcaatgagcctttctcaggtgttttgtataaagtgtcactagctgtcataacattcgacaggtggggggtaggaaaayggtgaaattgagatggttgagcctcatttccatcaataaaggtgtaatatagtgcttcatttccatcgatagaggtgtaatatactgcatttcttcatttggtaacatagcaaagactttaaaaaaacacaaagaatggtgatgctcctaattcggatttctttatttcaaggtggtttggattttggtaagccttttcactctacagagtacttagaagacaaggccgccaactaccttggacttaaagccaagccatcagatagtgcccagcacatattaatgttagcttatttttgagaaaaattacctcttctaggccccgaagcaaaaaaatgcatttg

SEQ ID NO: 483728 - DNA, 534 bp, Homo sapiens
ggggctctccgctctggagagaggaaagagcggggctgaaccaagctatttcctgaaatgacttagacaagccattcaatgctctttgcccatttacaagaagcagccatttgaggctaccaactttcattctggagaatgggccagagaaaaatgcactttggatgatcaagagccctccatttggtcctcatagagcttcrtttgggagtttgagaagttcagaagccaaagaggtgctaacaggaaagcgaagaacattgatgattttaggctcctactgactcaggtaacctgttaggcattgtaagcatattaactcatttaggcttcacaacaatttttcaaattaactatgatagccatttcccagaaaagagctcactaacatttggagatgttgcataactcatggaaagactgaaactcggggctgtttggctcccattgttttccttatattattccactcctaaggtacccaaaccacagagcgttctgaagcaaaattgcctgtggatctggaggcaaaga

SEQ ID NO: 483729 - DNA, 534 bp, Homo sapiens
ggggctctccgctctggagagaggaaagagcggggctgaaccaagctatttcctgaaatgacttagacaagccattcaatgctctttgcccatttacaagaagcagccatttgaggctaccaactttcattctggagaatgggccagagaaaaatgcactttggatgatcaagagccctccatttggtcctcatagagcttcatttgggagtttgagaagttcagaagccaaagaggtgctaacaggaaagcgaagaacattgatgattttaggctcctactgactcaggtaacctgttaggcattgtaagcatattaactcatttaggcttcacaacaatttttcarattaactatgatagccatttcccagaaaagagctcactaacatttggagatgttgcataactcatggaaagactgaaactcggggctgtttggctcccattgttttccttatattattccactcctaaggtacccaaaccacagagcgttctgaagcaaaattgcctgtggatctggaggcaaaga

SEQ ID NO: 483730 - DNA, 640 bp, Homo sapiens
ctgccaatagtggaagaagctctggactgggcatcagtagatttgggtgtgcatgctgattatgcaactttggataagtgactttggaggaatttgtgtcatgttcctaagtcttgacttcctcatctatggaataagggtgttcagcgagatctctagagtgctttccacttctcatactccacggcactgtgtgctaaactaagcaaaacgacctcaaatcacatgagtagattgtgttgactatctttaaaaagaatgaataaactcaggccaggcgcagtggctcatgcctgtaatcccagcactttgggaggccraggtgggtggatcacttgaggtcaggaattggagaccagcctggccaatatggagaaaccccatctctactaaaaatacaacaattagctgggggtggtgcgcacctgtaatcccagctactcaggaggctgaggcaggagaatcgcttgaacccgggaggcagaggttgcagtgagctgagatcacaccactgcacttcagcctgggcgaagagtgagactctgtctaaaaaaaaaaaaaaaaaaaaaagaataaatttaatctgtgaacattataaattcaggagcataaaatacttcagcctgcgttcttcatgatc

SEQ ID NO: 483731 - DNA, 612 bp, Homo sapiens
ggaaactgatgcagagatgttaagtaacttgccaaggaccatacagctaataaatggcagagctgggataaaaaccttggcagtcaggctcacagttacaatgctgtactgtttctcattattgcagttagcacatctacagagattagggataaaaaagcagatctgaaatcattcttgaccatactttaaggctaattttgatgttaaagatgacttagacctatcgggttgcctaaaacaagaatgtcagaagacagagctgtatcatcttcccaggaggtaacttctctacacacctgggaaaagcaaaccaggaagactaatgacttgaagttactgaaacctcttcattaatgttcatcaaattggatttcagaaacatttgttgagcttgtggaagtataaaataaataaaagtaataattcctccctgtaaggatctkataacctataggaaacaatatttttcttttgaaactcttaagtttaatgtgataaacactatgatagagataagcacaggatactgagagaacataaggaactcccacctaatcttggctgagtggggagctcaggaaaacatcctgggagatttcaactgaactg

SEQ ID NO: 483732 - DNA, 533 bp, Homo sapiens
cgtccaggctgttcttaaactcctggagtcaagtaatccacctgcctcagccttccaaggtgctgggattacaagcgtgagccacygcgcccagccaggtgtcatatcttaattagtgcattcccactatatggcactgtgattgctctataaatatttgttgaataaatgaatgaatattgccatcagatcaatgcctaaaagagttctaggaatactggagaatgggagtattggttaaaataacgatggcagttgacattctaagggaaaagggcaagtaaaagtagtatgaggggaaatggactatcagaaagcagcataattcatgtattcactcattcattcatttgacatttactatgggcaaggcaaataagataatcaagacatagtacctgtcctcatagatctgtcttataatcaaaaggtgaaggtttgggggtggagtgttaagaactggtagaaaataggagtaagatactgtgtcactaaagagtaattctaaatctattgttaaaatataaggacag

SEQ ID NO: 483733 - DNA, 631 bp, Homo sapiens
ttttatctgttttatattctccatgtttctctctgtgtgctgcattctagctaatttcctcatagctatcttccagttttagaatattctttggctgtttgataaattaagagtttcaaaaattcaaaaattgtatttttttatttctggaaattccattcatttatttttctaacttactttttatgtagtttttcccttctcatgtttcaattccttctttgatgctctccgcagtcatcagaaaatcatttcaaaatgttactgctctgtttttcagtccccatttcattctcaatcctagagatttttttttaaaaaaataagaattcaactaggttaaaaagaaacttttttgggttatattttatctgttatttctagatggtttcagtgggaagattttcaggattttcttaccattttaaaattttaatactaaaaaaaaatttatcctgatttagaattgtgcctatcagagcaagtccataccttttgggctacctactgtttaacycctgaagtgagcaaccatctactgggatgggaacattgttatttccttgttgttattaaatagtgaatgtcagatgaaagcaattcttagataccttaaataggttctattcct

SEQ ID NO: 483734 - DNA, 579 bp, Homo sapiens
gcaaggtcactagacagataaactcaagtcataaaacatgttttccttgaaaagtaagaaacgatgtaatgcacttctcaattaattgaataactatctttgtttcttgcttctgtaatatgcttccccctgcacagatctcccccaaccccatgaaatgcttaaaaggtaacttaactctttgttcagggctcagtcctttggatgttaatccgactgggccagtacacctaaaataacaaatatcctcctctaccccatcggtctctctgattccttatcaatcctgctacactacagtataccagagaagttccagcattttgcaaaggtagaactttggttggctctacctaaatcaggctttgattagctaacttaacagaccattaacataatttctggccaaagcattaaatccacaatcccaggtgagtatggccatatcagtaagttcggcccagccaactctcgatctaacaaccttagaatccaccctcacacaatgcttctgagattcctggcaatgtagattagtaatttcttgtaactsttctggtttataaactatctcctctt

SEQ ID NO: 483735 - DNA, 570 bp, Homo sapiens
ttctagaagtgtcttagttttgggatggggtagtgggttcctgtttttttctgcccatcagcctccctccttctagtaagtgtgttttcctttgccttgactccaggcctccaactccatgtttggcccatgttagacaactccatgcttcaaagaagcaccatgacccagagcactctatcacctatgacaatggcaattggttcgggaatgggcatgtgacccaggcttggtcagagttctgcaccatctctgaccatagtaattggtgggggactgggcatgtgacccaggcctggccaaycagagttctgtatcacctcttaaccagagtggattgttcaggaattaactaactaactagagcctcaaggcactctgacaacagttcattctggattttttcttttaatgtctgagagagaaaagtccttatttttttctactgaaattgctaaactgttggtacttagcctatagtacgtggagaccaccttaaggagagaatctgcctaagaataaccaccaagggaaaaacagagctgagagagagcacaagaccaagtgctg

SEQ ID NO: 483736 - DNA, 672 bp, Homo sapiens
gacatgattgcagaagatgtggtgttaacaggggttagaaggcaatgaagttgtcaaggtggattgaaaagtgaggaagaaggaatgggctaaatagggaaaggtctatgactggaggagagtcttagggcttgggaagaacaaggagaagtagaaataagagacctgagagacaacatcaagggacagcaaaatggattcatataagagtcagggaacattgactgctgtgtcacttgaaggttttaaaaattaagaggattgggattgcttgagcccaggggtttgaggatgcagtgagccatgattgtgccactgcacttcagcctgggcaacagagcaagactctgtcacaaaaaaaagaaaaaggagaggattgaagatgaaaggatgatgtgcttagaaaatctaatggaaaccatgcaaaagtccctagaattaatgagaaaactcagcaaagtggctgaatataagacaracacattttttaaattgcctattgatttattaacagaaaatgggaagaaaatgtcatctacatagccaataaaatatctggcactaatattggaaagaaatgcataggagccttataaagaaaactataaaactttactaagagagataaaagatggcttcagcattcctggtgaagagactgaatattataaa

SEQ ID NO: 483737 - DNA, 672 bp, Homo sapiens
gacatgattgcagaagatgtggtgttaacaggggttagaaggcaatgaagttgtcaaggtggattgaaaagtgaggaagaaggaatgggctaaatagggaaaggtctatgactggaggagagtcttagggcttgggaagaacaaggagaagtagaaataagagacctgagagacaacatcaagggacagcaaaatggattcatataagagtcagggaacattgactgctgtgtcacttgaaggttttaaaaattaagaggattgggattgcttgagcccaggggtttgaggatgcagtgagccatgattgtgccactgcacttcagcctgggcaacagagcaagactctgtcacaaaaaaaagaaaaaggagaggattgaagatgaaaggatgatgtgcttagaaaatctaatggaaaccatgcaaaagtccctagaattaatgagaaaactcagcaaagtggctgaatataagacaaacacattttttaaattgcctrttgatttattaacagaaaatgggaagaaaatgtcatctacatagccaataaaatatctggcactaatattggaaagaaatgcataggagccttataaagaaaactataaaactttactaagagagataaaagatggcttcagcattcctggtgaagagactgaatattataaa

SEQ ID NO: 483738 - DNA, 624 bp, Homo sapiens
agcttgtgtctgaaggcaggcccccttcatccaaaatgccacaagcccgggatgaaacaaaactggtcctggggaaaagggcaggagagaaggggtcatcttcccatctcctgtttctgggctctgaccactattggaggattctagctgtctggcagacatatcacctttaactttagaacttctgcaatttccaaatactacattgttttccaagtaagcagaccaattctaacttaagcttgggagttggcttaaaatggactgaggttcatgaaaatcctactgctctctgttagatagcaaatcccagtacagcacttgctctctgccagacactgtgctgagtattttatacattttaaatcatttgctccttacgacaccccatgagatagattgtgttataacattattcccgtgctcaaattaaggaaatgaaagcatagaggagttaaatagcttacccaaaggcacacagcaccaaaatctgatctttgtactggagacaaaaagagatttcaagaggatctcaaacatgasagggttaggctgtatacacacagcagaattgcactaaatgcaaaagcattaggaacaaattagacaaaagcagcttatctc

SEQ ID NO: 483739 - DNA, 542 bp, Homo sapiens
tatatattgtttcagattgatattaatccttttacagtttgtcttctaaacccttctagcatttacctttgtatatgagatgaggcaataactcagcttacttttcttcacatacaaaagcaattttttttttttttttttttttttgagacagattcatgctctgttgcccaggctggagtgcagtggtgcgatctcagctcactgcaacctctgcctcctgggttcaagtgattctcctgcctcagcctcccaaatagctgagattacaggcacatgccaccacacctggcttttttttttttttttttttttgtatttttaatagagatggggtttcatcatgttggccagggtagtctggaactcctgtcctcaagtgatccccccaccttggcctcccaaagtgttgggattacaggtgtgagccaccacgtctggcccgtttttttcttttgagacagggtcttgctctgtcacccagtctggagtgcagtggaacartaatagctctctgcagcctcagactcctgggctcaagt

SEQ ID NO: 483740 - DNA, 469 bp, Homo sapiens
tttttgtattttttttgtagagatggggttttaccatgtggcccaagctggtctcgaattcctgggctcamgtgatctgctgacctcagtctcccaaagtgctgggattacaggtgtgagcccagccaacttgattattctttactttttctgggcccatgtagctacagaacaaggagaagcgcctttagaaacaatcacctggaaacatagctgttgcctgttgagcaccttctagcatcaggtgctgtctttaagcctctcagagccctgaaagatgagtggtggtattcctttttgagagatggggaagtgaggatgcagggaataacttgtccagaaacactcagccagggggactaggggagggacagctttgagacttgaacctggtctgcctcacagcggagccatcatgaagcccttttcctagagggctgtcaccctattgaaagagcctgctagcagc

SEQ ID NO: 483741 - DNA, 146 bp, Homo sapiens
gtggtttcttaaccttttactgcctgccttccctgtgctcttggcttttggcataaatccccgtcaaatcccatcaaatccccaaaaccaccccatgarggtagaactcttgggcccatttggtgaatgaggaaaccaaggctgag

SEQ ID NO: 483742 - DNA, 653 bp, Homo sapiens
tggaacagcattccaggcagagggaacagtgtgtacagtgatcttaagatgagtgagaattagaatgtttgaggaactgggagatggacaggttgctagagcagagaggatggaaggagagaggtggggaaggagatggtcgagtgccaggtcaaggtgaggagcttgactctcactcccttggtgggttttaaggacaatgacaggttccaatgtcccttgtaagaggtcactttggctgctgggtgttaaatccattccacaaacagttctccagtgcctacctggagccaaacatggcacctatggtttgcctaccccgaactgagagtcaggctctgttctcacctctgttcggyacacgaggatgctggggttcaaagggcattgagttatcttcccaagacttccccattaagagtggagctggactggaatgcaggtctccctggtccctgtcctcctgttccctgccggtttctttcctccctccagcaacacaactgattaaggacattgtccattaaagtgggttgggttgatctcccagtcagcgtaggatggaagccatggactccagtggtgtcttgccttgcccagagctaccacagggtcccctgacaagtgactgtgacaccatggggatacctggc

SEQ ID NO: 483743 - DNA, 653 bp, Homo sapiens
tggaacagcattccaggcagagggaacagtgtgtacagtgatcttaagatgagtgagaattagaatgtttgaggaactgggagatggacaggttgctagagcagagaggatggaaggagagaggtggggaaggagatggtcgagtgccaggtcaaggtgaggagcttgactctcactcccttggtgggttttaaggacaatgacaggttccaatgtcccttgtaagaggtcactttggctgctgggtgttaaatccattccacaaacagttctccagtgcctacctggagccaaacatggcacctatggtttgcctaccccgaactgagagtcaggctctgttctcacctctgttcggcacacgaggatgctggggttcaaagggcattgagttatctkcccaagacttccccattaagagtggagctggactggaatgcaggtctccctggtccctgtcctcctgttccctgccggtttctttcctccctccagcaacacaactgattaaggacattgtccattaaagtgggttgggttgatctcccagtcagcgtaggatggaagccatggactccagtggtgtcttgccttgcccagagctaccacagggtcccctgacaagtgactgtgacaccatggggatacctggc

SEQ ID NO: 483744 - DNA, 550 bp, Homo sapiens
attgcaatccccaatgttggaagaggggcctggttgggggtgattggatcatggggacagatgtccccctcgctgttctcatgatagttctcaggagatctggttgtttaaaagtttgtagcacttcccccttcactctattcctcctcctccgggcatgttagacatgcctgcttccccttcaccttccaccatgattgtawgtttcctgaggccaccccagccatgcttcctgcacagcctgatgaactttgagttaattaaacctcttttctttataaattacccaatctcaggtagttctttatagcaatgtgagaatggactaatatgctagacattgccacatatccctccggggggcgggtaacatgtccctcattgagaaccaggtcctcagaactgaactcgtggcacaaatgctatactcaatcctgatgagctgtcgtataaatatgcatagtctttacactaagtattgcacacttgccctagtccaatagcaaagaaacacaaatacactgaatatacagaaacagagtggcactga

SEQ ID NO: 483745 - DNA, 447 bp, Homo sapiens
ccaatcagagctgatcaatgtcaacttgggcyatttactagagcttatccccagagtattggctcgcttctctgcagcaaccctgagctgataaaatgacagcctggatctgagggcagccatcttgctgccatgcacttgagaaagaaatggatgcctaagaaagcagagcagagattgagaaggagttgccagacattgtctgaaaccctagatctagtcccgggacctacagtaacagacatggacagattccttttagtgacttaggctggtgtaagttgggtctctgtcacgggcagccataaacgtcttagcacaaaggatcgaagtgcatctaagagtggcgcctcagtatctccctttaatgtctaacctaatagagtgctattattcacactcatcaaagtcgtgaaggcaagaagggaacaaccaccctagaaaaac

SEQ ID NO: 483746 - DNA, 649 bp, Homo sapiens
aagatgaatgaattgacattcccagcagtgcacaaagatacttgtcttctatactctggctatcactttgtattatcaagttttgattgttgcctatttcaggattttcataatggtaaggaaggctgatcctcttttcctatgcttcaaagccatctgaatttatctttaaggcttcctctccctgcttttgtcttctctcttcttcccaacatttttggattgttggtccttttctaatttatttgcaagagctctttatatcttaaggcaattagtcgtttgtcatgtgctgcaaataatcatctcagtttgtttcttgcccttcracattatttaggatttttcaaaatttgttttcaatttgtacataaattttgtcagaagttttttcttaatggtttctaggttagaattttgttcatcaaggactctgccactccaaatattctctgtagtcttttaagcataacaatagcttaaaagtggaaatgttaacttatttttatttttttgaggagtaggctcgctctgttgcccaggctgcagtgcagtgcaatggtgctatcttggctcattgcaacctccaccttccgcattcaagcaattctcctgcctcagtctcctgcacagctgggattacaggtgc

SEQ ID NO: 483747 - DNA, 503 bp, Homo sapiens
gctcttgttgtttaatatggcctccaagcacagtgctgaaatgctgtctagcattcctaagtgcaagaaggctataatgtgccttctgaaaaaaacatatgtgttagataagcttctttattggctgtgaattcaatgttaataaatcagcaatatatattaagacaactttaaaagaaacactcataaaacgaggttacaaactcatcaactgattaaaataatgtgactcaggactcakagaaactaattccataattccctcagaagcaatggttcagtacttgctaactcagtgtttgtgataatgttacaaaacatactacaaataatgagaactagttggtttgaattttacaaactaaaattaatagttcttcaaaatggattagatatagggatggtaaggatgagctagcaggaaagaagtaaaaggaaaaccacaagactgggtaatacagtcagctaacatatccttgtccagagtcttaatgttaccctgc

SEQ ID NO: 483748 - DNA, 633 bp, Homo sapiens
ctgtcatatccatgttccaggtggaaaggaggaaagaaggccagttaaatgccaaaagggccccacctcctagctgagtcagctctcttttaaagagatttccaaaaagctcagtacagtgacttctgaactgtgatctcacccttatctgtaagtaaggataggaaatgcccttttagcgcattgttgctttcaacaatacagagattctgctagcaagaaaggagaggggtagtggggagaatgtacattggctaggctgctagcagtctctgtcagagtaagcttactgccattttacaccgaagggaactgatcctcaaaagtgctaagtaaatgatcccaaatcacacagctatattttaaatcgagctctattcaccactctgtgcagtacttgtgcctgaaattctaggctttctttctgtagtgttgatctcaygctttcttttgtgcatgttgaattattattctcctcttggaattttattatcactgcctagctgcaaagagatgcttcagtatcattaaaaggacagggaacttgaactaaacaacttcccacatgtttgtattggggctgatcttgctgaagttgactgaagtttttgtaggtaccatttgtagaagtct

SEQ ID NO: 483749 - DNA, 562 bp, Homo sapiens
aaaataaggtataaacggcatctcagattttcttctccacatgccttaccaaacaattcattgttttaaaagtgatttctcagaatatgagataatcacattcaaataaagccctaagacctccttaaaagycaaatgaacttgtcccataattcttggctcccctccacttacagaagcaatccaactaagataactagttaacacttttttcttttatttgaaccagatacagttttagtaaaaatacgttattttgtacactacagagaaatgtcaaaatccatgtttaaacaaaaaaacaactattggagctgaattgataaacagctatggagatagtccgcaacatgggaaataaactgtgtggtaaaggttggcaaaacaacttaataatttagaaatgcattacatgtaaggcaattttaaggataattccaataactagtacgttcatttaatgctgatctgacaaagttttacactacatgcaagtaggtattatggtaaaaaccacaattacttttgcaccaacctaatagtttaattcttaccacgttct

SEQ ID NO: 483750 - DNA, 570 bp, Homo sapiens
ggaagccttctgagtgactaaatagatgagttaaagcagtattctgtattgcagtacatatttcctctgaagcccaaagaggtctactaagcatactgcttctttccttgtggcaggaagtgtcaagtgcaacaatatattcttcatcttaggggaggatatcccagtattgcccactcccgtgactccagaaaacaacatggcagtcctctgaatcttcatggggcttatctcctaccatttagtactagggagtcatctagggtacttaccacttcttgctcaaaagatccaaataacatgatgttatcaatatagtaggccagtgatgttccacgaaataacaagaaaatcagtactatgcaggcacattatgacagagagcaagaaatgtaacacagctctgggtcaagacaataactttgttacwgtataaaagcaaactccttttgattctttctactgattgagattgagcaaaaacacatttacccaattaatagttggatattgaatacgagtgactatgttgatctgttccaataaagataccacatttggcatggcagc

SEQ ID NO: 483751 - DNA, 566 bp, Homo sapiens
aattaaatacttgtttccttctttccctgtttttagccatatatttaatcagaaatcatcttgttgcctagttcatgaacccagatttgaacttaacctgtaaaacaccttagttaagaaaataatgtcagatcatatacttcaataaaattccaattaaattctctgagtttaaaggcttctayaaccgttataatctttagcacagagaagagaaatgaaatagtggatcttaaacaaggcatagaaataactgatctgacataagacatataaattttctaagggtaacaagtattttttatcaaaaatcaggaaaaggttaggcaaacagtagctcatgcctgtaatcccagcattttgggaggtccaagtgggacgattgcttgaggtagggagttcacaaccagcctgggcaacatactgagacccatctctacacaaatagaatcgggaaaaaataaaagatgagagaagattaaaaaacagaaggtcatctgggccatgaaaagaataaaattccttttgagaaaaacactctattaagacagtgcaaaataaattca

SEQ ID NO: 483752 - DNA, 501 bp, Homo sapiens
gtctggatctaagaacctgggagagttcagggaatttttttagtcttatattgtgcaggctcatacaacactccactcacctccatgaattaaattccactgagctaatggaaaaacatacaccctccgacaatgtcatagctatgcttgcaagagctcagaaaaaaaaaactatggtaacaacctagttctatgaggtttttcttgatacaactcatttccatgccaaatgtagcttttctttggttatgtttattgctttcacttgtagaaaaacatmtcacattatacagcaatttttcatcaagatcacctgacaacaatataataatgcagtacctttttaaaaagtgttaaccctttgcatggaattgtcctgacaatcctatgatagctaggattaccaccctactttacgaatgaagaaacacaagtgcagacaggataaacaggacatccaaagtcagttagctgggaagtggagagccaggatctaaacgt

SEQ ID NO: 483753 - DNA, 501 bp, Homo sapiens
gtctggatctaagaacctgggagagttcagggaatttttttagtcttatattgtgcaggctcatacaacactccactcacctccatgaattaaattccactgagctaatggaaaaacatacaccctccgacaatgtcatagctatgcttgcaagagctcagaaaaaaaaaactatggtaacaacctagttctatgaggtttttcttgatacaactcatttccatgccaaatgtagcttttctttggttatgtttattgctttcacttgtagaaaaacatatcacattatayagcaatttttcatcaagatcacctgacaacaatataataatgcagtacctttttaaaaagtgttaaccctttgcatggaattgtcctgacaatcctatgatagctaggattaccaccctactttacgaatgaagaaacacaagtgcagacaggataaacaggacatccaaagtcagttagctgggaagtggagagccaggatctaaacgt

SEQ ID NO: 483754 - DNA, 501 bp, Homo sapiens
gtctggatctaagaacctgggagagttcagggaatttttttagtcttatattgtgcaggctcatacaacactccactcacctccatgaattaaattccactgagctaatggaaaaacatacaccctccgacaatgtcatagctatgcttgcaagagctcagaaaaaaaaaactatggtaacaacctagttctatgaggtttttcttgatacaactcatttccatgccaaatgtagcttttctttggttatgtttattgctttcacttgtagaaaaacatatcacattatacagcaatttttcatcaagatcacctgacaacaatataataatgcagtacctttttaaaaagtgttaaccctttgcatggaatygtcctgacaatcctatgatagctaggattaccaccctactttacgaatgaagaaacacaagtgcagacaggataaacaggacatccaaagtcagttagctgggaagtggagagccaggatctaaacgt

SEQ ID NO: 483755 - DNA, 501 bp, Homo sapiens
gtctggatctaagaacctgggagagttcagggaatttttttagtcttatattgtgcaggctcatacaacactccactcacctccatgaattaaattccactgagctaatggaaaaacatacaccctccgacaatgtcatagctatgcttgcaagagctcagaaaaaaaaaactatggtaacaacctagttctatgaggtttttcttgatacaactcatttccatgccaaatgtagcttttctttggttatgtttattgctttcacttgtagaaaaacatatcacattatacagcaatttttcatcaagatcacctgacaacaatataataatgcagtacctttttaaaaagtgttaaccctttgcatggaattgtcctgacaatcctatgatagctaggattaccaccctactttacgaatgaagaaacacaagtgcagasaggataaacaggacatccaaagtcagttagctgggaagtggagagccaggatctaaacgt

SEQ ID NO: 483756 - DNA, 582 bp, Homo sapiens
gtgtgtgtaggtcaatagaaaaggaaagttcttttcaggtttcaaagcattgtcttaataaccaactatatagatcaataggatccttttttttctcatttcgaaaggaaccacagattactttgcaaaatgaaatgttctttttgttcttgagaagaaayttaagaccctacccctgattatgtggatgtctcttattgcagctttccttcatttattttacctgctagatacaagaactgttctagagatgggatatggcagtgaacagaagaaacaaatctctgcctctacagagcttgcattgtggagacaggcatgataactatgtgaaatatgtagtattcgtgagatgccttcaagtgctgtggaggaaaaggaaacactggaaggaattaggccatctggtagggtgagggaagccctcactgagacggtgacattggggtaactaccagagataggtgagggagcaagctatgtacatatggattggaagagcattccagacagaggtcatagcaaatgtggaggcctggaggctggagaaatagcaaagaggccaggcggctagaagaaagt

SEQ ID NO: 483757 - DNA, 514 bp, Homo sapiens
aaaaaacctgttaacaaagatacctaatttaaaagtaaattaatttaaaaggtaaccacttacaaaaatggtttccaggtccagggtaatgatgccctttgtaagcagccattagtcccgggtttatgccaatctataaaacaaaacaattagacatttcatcttaaaaagcaggacctaagccttagcgtttctatggaggagtggtggacaaaattgagttgattaaaatacaaatttaattcagcatcataagcaatatcatttatcaattactactcttgatctgaacaaagtatttcatatatgggaaagagattttctttattttaaaagttttgctgttattttaaaaaaccagyttgactcctttatgatcccaggcctcgcaccctcaccaactgggctgctttgagtctggaaagacaggtcctggaacaatcaatctgagcccatgtccagccacaattctgattctcaactttcaacaagaagctcgctccacatcacctac

SEQ ID NO: 483758 - DNA, 347 bp, Homo sapiens
caaatcctcaatccacccaaaaccctccacctccactgctattgtcctctctgagccactgtcatctctggcttggactattgcagtagcctctaacacctgtctctgcctcatgcttgtctccttacacacattttccacacaccagattgattttggtcttttaaaaatattaatcgaatcatgtcattcccctgcttaaaaccctccactggcctcccactgcacttaatagaatccaaacctaatgttatggcctgcaaagcccagagtggccccacctggagtccatcgccgcccagccacaccggytctctttccctctctaagtcattcaacttgctttc

SEQ ID NO: 483759 - DNA, 513 bp, Homo sapiens
ctgaggccagctgggtgcagtggctcacacctctaattccagcattttgggaggccgtggtgggtggaccacttgagcccaggagtttgagaccagcctgggcaacrtggtgaaaccctgtctctacaaaatatacaaaataccagtcagatgtagtggcatgcacctatagtcccagctactagggaggctgaggtgggaggattgcctgagaccaggaggtcgaggttgcagtgaactgtaattgtgccactgcactctagcctgggtgacagagtgagaccctgtctaaaaaaaaaaaaaaaatgctaaggccaacatcagggaagcttggctgactggggttgcacagctctgcctttgcttcaagattgcaggtaatttgggctcattccctagtcctagcataggagataaagtcagagtggtagactgtgtgttaccatttctctgaatggtctgaaggatctctttgtagtcggctgatcataaagccagaaggaggtccagcta

SEQ ID NO: 483760 - DNA, 513 bp, Homo sapiens
ctgaggccagctgggtgcagtggctcacacctctaattccagcattttgggaggccgtggtgggtggaccacttgagcccaggagtttgagaccagcctgggcaacatggtgaaaccctgtctctacaaaatatacaaaataccagtcrgatgtagtggcatgcacctatagtcccagctactagggaggctgaggtgggaggattgcctgagaccaggaggtcgaggttgcagtgaactgtaattgtgccactgcactctagcctgggtgacagagtgagaccctgtctaaaaaaaaaaaaaaaatgctaaggccaacatcagggaagcttggctgactggggttgcacagctctgcctttgcttcaagattgcaggtaatttgggctcattccctagtcctagcataggagataaagtcagagtggtagactgtgtgttaccatttctctgaatggtctgaaggatctctttgtagtcggctgatcataaagccagaaggaggtccagcta

SEQ ID NO: 483761 - DNA, 513 bp, Homo sapiens
ctgaggccagctgggtgcagtggctcacacctctaattccagcattttgggaggccgtggtgggtggaccacttgagcccaggagtttgagaccagcctgggcaacatggtgaaaccctgtctctacaaaatatacaaaataccagtcagatrtagtggcatgcacctatagtcccagctactagggaggctgaggtgggaggattgcctgagaccaggaggtcgaggttgcagtgaactgtaattgtgccactgcactctagcctgggtgacagagtgagaccctgtctaaaaaaaaaaaaaaaatgctaaggccaacatcagggaagcttggctgactggggttgcacagctctgcctttgcttcaagattgcaggtaatttgggctcattccctagtcctagcataggagataaagtcagagtggtagactgtgtgttaccatttctctgaatggtctgaaggatctctttgtagtcggctgatcataaagccagaaggaggtccagcta

SEQ ID NO: 483762 - DNA, 546 bp, Homo sapiens
cccccttctcgttggcgccccagctccgccgcttggcctttcgggaagggtggaggaccagaagacggggactaggagcgctctgccgacgtcagcttttgtctccagtattttcgggggctggtggacgcgtgggcgatagggtgctgtccttggggtgctgtgtatatgggatgatgacgcttatcagcattatctagtcctttccaccccgaaattcgccccgattaaagactgtgttgcattatcaggtaatgagatgtgagggagggtctttgaaagtggaaracctgggcgtcgaggccactgtgccatcttgggcctcagtttccttatctgtgaaatgagggtgaatgtaaagctgctatgtaaaatgtaaagctctacataaaccactctctgcattactttggatatatgagaatattaacgtttgacgtctacgagactagatcccattcgagcatcacctcccataaccttacagactaacccctcttttaaatctcagtggttcgtaatcttacagactaacccctcttttat

SEQ ID NO: 483763 - DNA, 566 bp, Homo sapiens
catttctctgaatggtctgaaggatctctttgtagtcggctgatcataaagccagaaggaggtccagctatggtggaaaaatctaagggtaaggtgggtaatgaagagctggcttaagtggtgtctgtgactgtgcgacaggagaacaatcatacagaaaaaccactcacagccataaatgcaaattaggtgttggaaaaccttaataaagactgctaggcagaaatgctyggtgtaatcatcagcaagctttccagtgtgtaaccagagctctggatgtgttcgttgtgactgtggatgatagcttaatggttaacagtatgtatgggctctggagccaggctatctgggttcaaatcccagttctgcatttatttctgtgtgaccttgggtaagttatttcacttctctgtgctccgtttcctcatttgacaagggctataatagtatttcctataggatgattgaaaaagaaggttgttgaatcatataaaacatttagaaagatacctggctcatgttagctctgattcttgtcatcatcatgttgcctgtgcaggactgga

SEQ ID NO: 483764 - DNA, 566 bp, Homo sapiens
catttctctgaatggtctgaaggatctctttgtagtcggctgatcataaagccagaaggaggtccagctatggtggaaaaatctaagggtaaggtgggtaatgaagagctggcttaagtggtgtctgtgactgtgcgacaggagaacaatcatacagaaaaaccactcacagccataaatgcaaattaggtgttggaaaaccttaataaagactgctaggcagaaatgcttggtgtaatcatcagcaagctttccastgtgtaaccagagctctggatgtgttcgttgtgactgtggatgatagcttaatggttaacagtatgtatgggctctggagccaggctatctgggttcaaatcccagttctgcatttatttctgtgtgaccttgggtaagttatttcacttctctgtgctccgtttcctcatttgacaagggctataatagtatttcctataggatgattgaaaaagaaggttgttgaatcatataaaacatttagaaagatacctggctcatgttagctctgattcttgtcatcatcatgttgcctgtgcaggactgga

SEQ ID NO: 483765 - DNA, 515 bp, Homo sapiens
gcagtggtgcaatcttggctcactgcagcctctcagcctccgcctccaggattcaagcaattctcgtgcctcagcctccccagtagctggaatcacaggtgtgcgccaccatgcccggctaatttgtgtgaggcagggttttgccatgttcgccaggctggtcatgaactcctgacctcargtgatctacccgcctcagccttccaaagtgcagggattacaggtatgagccactgtgcccggcctgcctccaagttccgacttgttgtctaccaaccaatctatcttctctaatatttccaggctaatttgtaaagcaccagtcaagtaagtcatcccttgcttacattctctcaacagctccctattgccttcatgatagaatataaattctttgggattaaaaaacaagtttcaactgtccccatccagcctcatctctcaccatttccttgttatatcccagactccaaggacacagaattgctctgtttctggccatgccatgcttgtgt

SEQ ID NO: 483766 - DNA, 474 bp, Homo sapiens
cttaggattcattacctgcatccagatcatttccttagggcagtgaaagccatcataaagctatgctcactaaagaaccgagtacctatgaaagtagcacccacyggaatgtccccttctgctgaactctagctgtctttgctcaaccctgatcatctttactatctgtctcactaattgtcagatgttccaacaatactttgcaaagcccatataaattgatggcaaaacgaaactgcaaattgtgccacagttgcaggatttcttggagttgtgaaaatgacgctggagagccattagaattctatgaaaagccattgacaaatgaggatctggccattcttgagttaaagaaaaaaatgggcaagagggatgacacagtcgacactcaaaagagaatgatttgagtgctgtgggtgaagatatgcccttgtgaaaatgcatgaagcctttggataattttgcaaaaatgac

SEQ ID NO: 483767 - DNA, 532 bp, Homo sapiens
atggatgggtgaatgaccgaatgggtgaatgagcgaatggtgaatgagcgaatgggtgaatgagtgagtgaatggatgaattaatgagtgagagaatggatgagtgagtgagtgagtgagtgaatggatgaataaatgagtgggtgaatggatgaatgaatgagtgactgaataaatgaatgagagagtggatgaatgcgtgaatgaattaatgagtgatcaatgaatgagtgaatggatgaattagtgaatggayggatgaatgagtgaatgtgtgagtgagtgagtgaatgggtgagtgagtgagtgagtgagtgaacgggtgaatgagtgactgagtgaataaatgaatgagtgagcgaatggataaattagtgcatgagtgaatgagagggggcactcaagcccccacaccgatattcacagatattccagaagctccacggagcctctgggagctcagaggagtgagggaggttcctgtcctcctctctctgatctccaccctgaggtccagggccagggagactca

SEQ ID NO: 483768 - DNA, 532 bp, Homo sapiens
atggatgggtgaatgaccgaatgggtgaatgagcgaatggtgaatgagcgaatgggtgaatgagtgagtgaatggatgaattaatgagtgagagaatggatgagtgagtgagtgagtgagtgaatggatgaataaatgagtgggtgaatggatgaatgaatgagtgactgaataaatgaatgagagagtggatgaatgcgtgaatgaattaatgagtgatcaatgaatgagtgaatggatgaattagtgaatggacggatgaatgagtgaatgtgtgagtgagtgagtgaatgggtgagtgagtgagtgagtgagtgaacgggtgaatgagtgactgagtgaataaatgaatgagtgagcgaatggataaattagtgcatgagtgaatgagagggggcactcaagcccccacaccgatattcacagatattccagaagctccacggagcctctgggagctcagaggagtgagggaggttcctgtcctcctctctctgatctccascctgaggtccagggccagggagactca

SEQ ID NO: 483769 - DNA, 602 bp, Homo sapiens
agccaccattccccaacgtgacctgtgtgtgaggtgaggaagcttagggccattgccagctcctccctctcttggctctttgagagtgttacacttggacatgcagccraggtcctcagtctcttccagcctagtggagatgagggggaactggctgccctcacatatgggcgagactcaaaactcgtgacagtgacttttagttcagccttgcagataatcacatgcagaccgatctactgtttataacacacctgcttctgccacagaaagtagtacatcattgagaataaatagatggatagggaaataatgtctacaaacatatacagaaagtcagccttcccattttggattcattgtcaagtaactggctaaaggctggacctggctgttctgagaaaaaggtgagacccacggagttttggcggaaaaagaaaggagccgcaggatagcccatcacgtgtaaggtctcctccctaggtctctgtgtgaggtgagggatctattttaaggtccttgttgaggctctctagggtgctctactgcttcatccctctccaggagaactgcccatccatgccttcatggggacacccctg

SEQ ID NO: 483770 - DNA, 594 bp, Homo sapiens
agtaatcatctgcgagggtcatttccaggcccaatgcctactttctagaaacataacattacccaaatacagagytgggccctagttgcagctagaggagatggaggcaagaaggggatctgtgtccattggggaggctccagccaaggccagatttgagctggacctgcaaattagtgagggcagaagagcgcggtaaccgccaggaatgagtgtggtgcaaagtgacaaaatcactctggaaatttctttaaatcagcctcaagtgcagatccctgccatgtttatttgccacgtagaacactggcatgtcatctcccagcaggcccagctcaggtgtagaggatttccttgggcaggggagcagagcaccatcatgaaatagctgacatttaggggccgggtggtaggaagaagacaaaacttgaaatccgagagtcacattcaacttcggtgtgattctcacactcagagagggccccagaaacaatacttcggagggaagaacaggatcaggtcctgggtcccaccctcaccccagggcatacactcagacagaaccaatttccctcactgtctgtctcttgcggcatg

SEQ ID NO: 483771 - DNA, 605 bp, Homo sapiens
aatcatctgcgagggtcatttccaggcccaatgcctactttctagaaacataacattacccaaatacagagctgggccctagttgcagctagaggagatggaggcaagaaggggatctgtgtccattggggaggctccagccaaggccagatttgagctggacctgcaaattagtgagggcagaagagcgcggtaaccgccaggaatgagtgtggtgcaaagtgacaaaatcactctggaaatttctttaaatcagcctcaagtgcagatccctgccatgtttatttgccacgtagaacactggcatgtcatctcccagcaggcccagctcaggtgtagaggatttccttgggcaggggagcagagcaccatcatgaaatagctgacatttaggggcygggtggtaggaagaagacaaaacttgaaatccgagagtcacattcaacttcggtgtgattctcacactcagagagggccccagaaacaatacttcggagggaagaacaggatcaggtcctgggtcccaccctcaccccagggcatacactcagacagaaccaatttccctcactgtctgtctcttgcggcatgtacttatgttgacc

SEQ ID NO: 483772 - DNA, 582 bp, Homo sapiens
agttggtcaaatctaggtctcatctacaataattattaaaataataacaaatgttgtaacaatgatcacagcagacttaatgagccccccctgtgtgccagcccccctgtgtgccasctcacactgtgtgccaagcacttcatatgcatgttctcacttaactttcttcacaacacccaggggtttcgaggggacatttaccatgtttgggccacctgacatgagatacaggggaatcacaccattgcgtggatcctggaggtggaggcagaggaagctgaagtgtggcaaatccgctatcttcccatcactggtggctgggatgaggcatgtcacctaggcttgacctatcagatgctcccagcagagactttgcaccttgggagagaggtgcagagatgcgggacagttggtgttgttcccagcagaggctgcagaggctggtggccgtgctggtgaggtcctgtgttagtggcacccacagcagccatgtcctaactggcaagcctgtctggtggcactctgtgcctgctgctgtctggacagccttggttcctgcttttttctgagccagttctccag

SEQ ID NO: 483773 - DNA, 613 bp, Homo sapiens
ggtcactggaccagctccatcgggctctcaagacaagaggcattggaaagcttgtacctatgcatggtggctgggaggtgaatattttcataaccacttgactgagacagcactaatgtattatacaacctactcactgaaagttttagtacagtcatggagttggacaaccatcatcacaaccaaytttaaaacattttcatcacccccaaaaagaaaccccatacacatttgcagtcactcttcattcccctcatccccctagcatctgctaatcgcttatttcctttctgtctctatgaagtagcctcctctggacatttcatttaaatggagtcaaacaatatgtggtcttttactttggcatctttcaaaggctcatccacattgcagcatgtatcagtgctggattcctttgtattgatgaacaattttccattgtatggatagaccacattttcttcctccattcatgggatgtggaatttctttaggttgagaatcccattggaacttgatgaatctaaagttgacttaaatgtaaggcagatatgccactcttctgctaaaaataccctgcacaacaaaacaaatgaatcacacagattcattg

SEQ ID NO: 483774 - DNA, 498 bp, Homo sapiens
gtgcctagggggtactaatcctgatggctgcctcaaggaccatgacaagatgcaaaagccatccattgaactggcagaggggcaaagtggatctccaggtgctcacctgaaggagacagaattaggggacacaaaytggggctcaagaagagttactgagttgtcttccagccagtagcctcagggttcatgtcagactcctagaggagggggctaaaaattaaagcaaatccagtgaggagaggtggcatcacccatactttgatgttggtatgttctggatgttaggctaatcaatgaaatgcaaaagtggcactgcttttatcctcctcacctgcaaacgttctcctcccctctaacttctgtgacatattggaaatgcactataatatggtagttaagtggctcagccacttaccagctatgtgaccattgcacatcatctatctgcttagcttctcatctataaaatggctaaataatagtatgtacttcata

SEQ ID NO: 483775 - DNA, 603 bp, Homo sapiens
tgctactacaatcccctgcctactcacggctcgtgtcttcagaagccaaggggtcgagacccttagcagtgtcctcctgagccaggatgttctgcaggaaatccgctacctgaagctggctgcagagcagcttgtctttcttctgagagtcctgctcagagggagggcagagacagggaacatccttacctccttacaggtttccttaagtctgctctctgccartgctgccctgtatctcagtaagaggagccaggaccagaccctggcttctgaaaggctcgctctcatcttgtacataccaccacaaactcaaccaggatcttggctggcagttctgcctcctcctgcaggcctacaggttccaagatgcctgccacctcagccaggaccctggaggggcaaggaaacacaggaaattgcagtttcttgtggtgctagttctacagttcgtgtgtgtacacaaacaaatgtggatgtgtatatcagtatatatagtattgagagtcttgccttgaccagagtttacacaagggcctgaagggtccacagcctgcaaccaggaatggcgtgcatggagggcacacggtggtaatacgtgcc

SEQ ID NO: 483776 - DNA, 606 bp, Homo sapiens
tcctatgcatttccagctacaaaatgtgacccatgatgaggtgagtgaagtcaaatcagcttttcaagactatatgtaaaataacatgaatagaaagaaatacttcaaatttatagaatgttaatctgtatagtctttgaggttaaattgatttagtatctttgactaaaacttatgaatcagtgagaatttgatggggaaatatgagcatgtaatttcgatccatcatctatctttatttgttggtttagagctaagcatatgtcagtattcccagtataggtctttcaaggtatgtctctgtatgtaagggtaatatamccttgtgagtatgagtatgagtgtgagtgtgtgtggagaaatcaattgcttattaatagctttaggaaatggtattagttatttagttgcctaattgggggagtagttttcattcattttgcttttcttttttttttttcaagacagagtctcactgtcatccagtctggagtgcagtgtggcatgatcatggctcattgtaatcttgaactcctgagcataagggatcctcttgctttagcctctctagtagctggggctgcaggtgtgtgccaccatgaccag

SEQ ID NO: 483777 - DNA, 519 bp, Homo sapiens
gctgttcatctttgtatctgcagcccctagaaaaatgtacatgtaaaaaatatacttgtaggaacaaataaataatactaattatgctcccttcccaatttaagtccgctgagctgtttctcagcttcttcatctctgcaggtgttcttacttatattatttgaacgacttttttttttttttttttttttgagacagagtcttgctgtgtcacgcaggctggagtgcagtggcgtgatctcgtttcactataacctctgcctgctggttcaagcaattctcctaccttggcctcctgagtagctgagattacaggtgcctgccaccatgcctggcccatttttttttttttttttgkatttttaatagagatggggtttcaccatgttggccaggctggtctcaaactcctgacctcaggtgatccacctgcctcagcctcccgaagtgacaggattacaggcatgagacacagcgcctggccctatttttacaatgttttaactgttttttttccct

SEQ ID NO: 483778 - DNA, 610 bp, Homo sapiens
ccatgtaagacctgactttgctcctcctttgtcttctgccatgattttgaagcccagaaatgtggaactgtgagtcaattaaacctctttcctttataaattacccagtcttaagtatgcatttattagcagcatgagaacagactaatacacctctatataatattgtgcctatagacaacaatrttgtattgtgcacttaaaaattttaaagagtagatctcatgtgaagtatttttagcaaattataatgcgtaataataaagaaatatgtaagggttatatggggtcttgtattattttttatttgctatatgttgaaaactattaatagtcttaaagctgctaatatcacataataagaggaccaattgactgttggtcatggcattatggtggtcaacttaacaagaactgtttcagtggtcagactaggataaaattctgctttggatatgttcaaaagaaaataagaagaattatcaagagactacagaaaactattaagaagaataatgtagaaggaaacaaagaattagagaatagtaaggaggggtatgtgagatcaaactttaaaaaatgctgtgaattatttcaatatattttgata

SEQ ID NO: 483779 - DNA, 610 bp, Homo sapiens
ccatgtaagacctgactttgctcctcctttgtcttctgccatgattttgaagcccagaaatgtggaactgtgagtcaattaaacctctttcctttataaattacccagtcttaagtatgcatttattagcagcatgagaacagactaatacacctctatataatattgtgcctatagacaacaatgttgtattgtgcacttaaaaattttaaagagtagatctcatgtgaagtatttttagcaaattataatgcgtaataataaagaaatatgtaagggttatatggggtcttgtattattttttatttgctatatgttgaaaactattaatagtcttaaagctgctaatatcacataataagaggaccaattgactgttggtcatggcattatggtggtcaacttaacaagaactgwttcagtggtcagactaggataaaattctgctttggatatgttcaaaagaaaataagaagaattatcaagagactacagaaaactattaagaagaataatgtagaaggaaacaaagaattagagaatagtaaggaggggtatgtgagatcaaactttaaaaaatgctgtgaattatttcaatatattttgata

SEQ ID NO: 483780 - DNA, 286 bp, Homo sapiens
gggaacactgctatgataattaacttgtgtctctgggtgtttgaaagacagtagacaaatgcatgacttacatytataaacaaactgaactagaggtgacagtggctgaaggagcccaggcagcagagagcaggatttgtggggttattaaattgctcatactgatgattggtacgaggtgtgtgattcctggcagccagatgtggaatggcatcctaatcaggagaggtgacaaatgcagaccctgaggggagaatttaagcagtaagccaaagacaagatcgcc

SEQ ID NO: 483781 - DNA, 617 bp, Homo sapiens
acccttaaggatggggaacataaatcccactacaaatatgtatattcttctcccaacaatacttatctattcttttcatatctcaactatagattaattcaggtcaactggaaaatgtgatctcatctgcaataacaaatctgagatggtctctagcagaacaatttcttataacttataaggcatagagataaatcaaagtgattgagaatgcttacagcctcagaattgtcccacccttgagasttggtatgtagcagagattaacttctaaccttatatacagtaattcttcctgaatatcttggacaatatctttttagctataatctctcccttgagatcacacttatcttttaagaagtgattattttatgagaataaatacagaaagctgaggtcagctatatatcttctaagatatttaactagaacaagggtcttgatatcgtgtgatatggaaaccctgagaaacaggcaaaatgtgatgtaagcattattttacctcctttactttccctcttagtgcttttatagatcagtttctttttatgcctgcccatgtgagtaatcaaaacctttcatggaaccttagcactcagatctacatttcctca

SEQ ID NO: 483782 - DNA, 478 bp, Homo sapiens
ctgagatggtctctagcagaacaatttcttataacttataaggcatagagataaatcaaagtgattgagaatgcttacagcctcagaattgtcccacccttgagacttggtatgtagcagagattaacttctaaccttatatacagtaattcttcctgaatatcttggacaatatctttttagctataatctctcccttgagatcacacttatcttttaagaagtgattattttatgagaataaatacagaaagctgaggtcagctatatatcttctaagatatttaactagaacaagggtcttgatatcgtgtgatatggaaaccctgagaaacaggcaaaatgtgatgtaagcattattttacctcctttwctttccctcttagtgcttttatagatcagtttctttttatgcctgcccatgtgagtaatcaaaacctttcatggaaccttagcactcagatctacatttcctcag

SEQ ID NO: 483783 - DNA, 476 bp, Homo sapiens
agctcgcagagagcaggtacttggtccccttggaggcgtttcccgggtgtgcagtggcaacactggtcctagcaaagaaatgtgtgagtgtgagtgtgtgtgtgtgtctgtgtttgcgcgcgcgcatctccgggcagtgtccgagcccgaggtggggagagcggcgcagggagccagggaaaaccaaagtccgttccctgcttcaggatcgttttctagatgtgcgcaaaatacagtcccctccccccacccctcccacggtgagctgcgcccaggtmgtctcccggcggggcgggtggcgtctgcgctgcgggccgcgccggccgggcactaggcggccggcgggccctgtaagttctccgagggccacttgcacagcaggaggggcgagggccgtgtacgtggcgctggccgtcgggcgggctagaggggaccctcagagcacccgggagatgggggtagaagcggcagagacc

SEQ ID NO: 483784 - DNA, 525 bp, Homo sapiens
ggttcatttgctgcttatggaaatatgtttgacagagtctttttatttttctaggatccttagtcagagagatatttattcttaagacaatatctcaattaattttaaacatgagcttaaagtggcaacatataaaatctctagtattgtaaaaccttgttaccatagagcacgccttttcctatatcctttttgataagcaagtgtactttgtgtgcatttgagtataactcttacacttcatatgttggagggagtaaccattttgtatgtktttttctttatcattttgcttctctaattcatatcttctgcggctggtcacagcctatgcttaaaccaagaggacatgatggatgaaaaagaaaaataaggaaggcatttacacagaagcctggttgtacctttagttaatcagcatttttctttttaaaggtggttagatttctcagaatttgttgattcccaggagaaagcagatgttggggagaatagtcagttacgtgtaaaaataaactagtagtt

SEQ ID NO: 483785 - DNA, 517 bp, Homo sapiens
gtggttcctctaagtagttataactacatcaaatcagaggaaggaagcaagcaatgaatgagaggaagcaactatatcgagggatgttggcttcttataaagcatgtagcacaggttcagtgggtttgatgccttgtattctggtctagtggaagtcctagcatgtaactcttaaaatccttagtgcctagcacaataaaaaatagtgttggggctttcayttgaaggtaattaaatatgattgagctttttcttagcttctgttgttactgtccttggagattctttcagctctctaagactctaataaatctctttctatttaagcaaatcacacagattaataacggacactgatttaggttaaaaactacacttgtaaaaatagagtatcccaatttggtacctagtgatacgggggtgaagcagaggaaggccagctcctagaaggaaaggaagaattaagtaggtggggagagagaaagagagagaacctgaaagaaagactgggggcaag

SEQ ID NO: 483786 - DNA, 557 bp, Homo sapiens
ctgggcaccaactctattgtctgtctcctcctagacgaggatgttgccttactgggcctgagtcaggcttgtcaatgtcctctttaagtggtgggcataatattgtcctgcaagttcttttggaatggtgatgtgagcccaaggacragaatgaatgggcaggtaaacagaaagcattggcttgccaggtctagcacagcccagccttgctgcagaccttcttcacaaccctggggacagctctgctgggctgtgctgcatctggctcctgctatgggttgccccctggaataggtaagattttgtgcctctggctcattaaatgcagaccttaatctaaccttacaaggtaagtgttctgctctttctagttagtacagaaatgctgcatttgcttttaagtaagtgagaagtgatttgtaaagatgtttcgaactcaggactaactgcctccagagatgcaggaagtaagaccagaacagtaggtgggggccaagacatagatggaggccctgattcccaggcttaggacctgaactttgattctgaggacagca

SEQ ID NO: 483787 - DNA, 471 bp, Homo sapiens
ctcagagtgtggcttgggctcttaacctgggttgatactggttgagctgtgtgacactgggtgagctttgtgatcttgggccagttacttaactgctctgtgcctctagaacatggggatagctctcgtcgtcacttcctaaggccttgtgcagatgcatgggttacccaggtaaaggaggtggcatggcacatggcacrtggcttgtaatgtggtcgcagagctccccttgtctctgtctgcagcttgctccctgtgccacccaggctctggcctgaatctgagggcttcagtcttatccagcacaggatgtatctgtaggtgggctctgtgtccccacagcctcttgagagggagggagctggtagatagtctcccacccctggcagagtccctgcataggtcttgactagctgcctctgtcccaccattctgacagcccccgcaggtaggcatggttatctatacctc

SEQ ID NO: 483788 - DNA, 592 bp, Homo sapiens
acaaacaagagcaccatcagggctaccaatataacactaccaatactaaccacaacagcaacaccaccaatactaacaacaacactaccaatactaacaacactcaccaacactactaatattaacagtaccaccaacgcactaccaatgctaacaacaaaaaactaccagtaccaacaacactaacaccaacaccaataccaacaccaacaccaccaacaaaactaccaccaccaacaacagcactacaaatagcaacaacaataccaacaccctcacccacccaccacccctcccaacatcatcaccatatttgtgtttgcctgatgactgtgacagatgttaccaacaagtctgaagttgactggagagcctgaggagcccactgaagccagaggtgttgmagctgattgaacctatgttgtgttcacagcaagaaatccccaaagaagtagtgactggagtgactgccctacctgtctccatccatccaaagacatttggaggcattcatgtatgtatttcccccaggtagtctcactgctggctctctcattttgttcaggtctctgctcaatgtcacctccacaga

SEQ ID NO: 483789 - DNA, 592 bp, Homo sapiens
acaaacaagagcaccatcagggctaccaatataacactaccaatactaaccacaacagcaacaccaccaatactaacaacaacactaccaatactaacaacactcaccaacactactaatattaacagtaccaccaacgcactaccaatgctaacaacaaaaaactaccagtaccaacaacactaacaccaacaccaataccaacaccaacaccaccaacaaaactaccaccaccaacaacagcactacaaatagcaacaacaataccaacaccctcacccacccaccacccctcccaacatcatcaccatatttgtgtttgcctgatgactgtgacagatgttaccaacaagtctgaagttgactggagagcctgaggagcccactgaagccagaggtgttgcagctgattgaacctatgttgtgttcacagcaagaaatccccaaagaagtagtgactggagtgactgccctacctgtctccatccatccaaagacatttggaggcattcatrtatgtatttcccccaggtagtctcactgctggctctctcattttgttcaggtctctgctcaatgtcacctccacaga

SEQ ID NO: 483790 - DNA, 570 bp, Homo sapiens
gttgtgaatagtgccaacgccagataattacatggattatggactgcattatctaatcaagaatcaagatgcatgccctatcttttgctcttaaaagatggcatgagaaaaacaaacaaaaaaaatggaagtaaaatattaggattctaataactccccaatcaagaaaactgtgtttttgcacatgaagaaataagtgtggtcattgtgattttggaaaaatatataatctcacactaagaacagtaatgtaaacagcacatggacaattagctataaatctctagaaagcaattctttatactgaaggayaagaaccaagatattaatatttatgggtacacacacacacacacacacacacacacaaaacaagaaacatgatgtggtatggccttgaaccttgggtttggctggccaaccaaggggaaaacccctgacccaagctgtcctgggcacattctctttttggtatttggaaatggagacgagaaagctgagtcagaatctacgtgtgtgacagtccctgccatgtgtaagcttgggcattctggggaggccatgttttgc

SEQ ID NO: 483791 - DNA, 570 bp, Homo sapiens
gttgtgaatagtgccaacgccagataattacatggattatggactgcattatctaatcaagaatcaagatgcatgccctatcttttgctcttaaaagatggcatgagaaaaacaaacaaaaaaaatggaagtaaaatattaggattctaataactccccaatcaagaaaactgtgtttttgcacatgaagaaataagtgtggtcattgtgattttggaaaaatatataatctcacactaagaacagtaatgtaaacagcacatggacaattagctataaatctctagaaagcaattctttatactgaaggacaagaaccaagatattaatatttatgggtacacacacacacacacacacacacacacaaaacaagaaacatgatgtggtatggccttgmaccttgggtttggctggccaaccaaggggaaaacccctgacccaagctgtcctgggcacattctctttttggtatttggaaatggagacgagaaagctgagtcagaatctacgtgtgtgacagtccctgccatgtgtaagcttgggcattctggggaggccatgttttgc

SEQ ID NO: 483792 - DNA, 668 bp, Homo sapiens
taagaggcttgtgcttataaactgtgacagtacaatatacatcctttcaacagacaactctattttctagtggtgattccaaacagaattgcacttttccttttctcaaaagttgacagcaccaaacttgcaagctgaaagccaggccctgagaaggaggcatcacttgaccacttagtgataggtcccatccaaggtcttagcaaccttttattcgtctgattttagaaacatcagaccagtagggagaagccttccctttgttctcccatatacttgaagaacattttctgttttctttggccaccgtgagggaattacaagccttggaaagttttattacactgcatccttctctcgccctgttgtacgtgatgtgagcatcaaaggatctgggcaccaacaacattttgtctgcttggaaataaatatttttataaaatgaattgatggcaagagcttttcatttagagcagaaggagcccagctaagtgattatggaaagatgtttgcctccaatttaaaagaatcatagcattaagttagtacctgttgtccttttaaatrgcaaaagaaagaagggctgttagaaaaatcttgctttttagagcagaaaacccatgcctgccaaacatgactgattgaaaagccatacagtacaactgctg

SEQ ID NO: 483793 - DNA, 539 bp, Homo sapiens
tttgttggcttttgtataccagatggggatgaaggatttattacatttcctcagtaaccccaacaccttyaccaagagcatgatcttggtcagggtttgcaatatctagtacatattaggtgcttaataaatcatggttataactatatgtgtgcatacatcggtggatacagtttaggtgttagctgtatatgtgtaactttgggtaggaaggaagggaattctactattcactagctgagctgctgccaaagggtgggtctctgatgccctgtagcctgtactgatgttatctctaataattacaatgggccagagatggtacttggcttgggggttgatggattctcttctccttcctactactgcctgtgcaatcatttctactatagtgaattcacaaatgggaccatgaagaagggaacaatttattcaaaatcattggtgataaatcaaaattatagagattcagatataggaatattgtgccccctgatctagttacgttgtcctgtcagcctgtataggaacatgaggcc

SEQ ID NO: 483794 - DNA, 539 bp, Homo sapiens
tttgttggcttttgtataccagatggggatgaaggatttattacatttcctcagtaaccccaacaccttcaccaagagcatgatcttggtcagggtttgcaatatctagtacatattaggtgcttaataaatcatggttataactatatgtgtgcatrcatcggtggatacagtttaggtgttagctgtatatgtgtaactttgggtaggaaggaagggaattctactattcactagctgagctgctgccaaagggtgggtctctgatgccctgtagcctgtactgatgttatctctaataattacaatgggccagagatggtacttggcttgggggttgatggattctcttctccttcctactactgcctgtgcaatcatttctactatagtgaattcacaaatgggaccatgaagaagggaacaatttattcaaaatcattggtgataaatcaaaattatagagattcagatataggaatattgtgccccctgatctagttacgttgtcctgtcagcctgtataggaacatgaggcc

SEQ ID NO: 483795 - DNA, 668 bp, Homo sapiens
taagaggcttgtgcttataaactgtgacagtacaatatacatcctttcaacagacaactctattttctagtggtgattccaaacagaattgcacttttccttttctcaaaagttgacagcaccaaacttgcaagctgaaagccaggccctgagaaggaggcatcacttgaccacttagtgataggtcccatccaaggtcttagcaaccttttattcgtctgattttagaaacatcagaccagtagggagaagccwtccctttgttctcccatatacttgaagaacattttctgttttctttggccaccgtgagggaattacaagccttggaaagttttattacactgcatccttctctcgccctgttgtacgtgatgtgagcatcaaaggatctgggcaccaacaacattttgtctgcttggaaataaatatttttataaaatgaattgatggcaagagcttttcatttagagcagaaggagcccagctaagtgattatggaaagatgtttgcctccaatttaaaagaatcatagcattaagttagtacctgttgtccttttaaatagcaaaagaaagaagggctgttagaaaaatcttgctttttagagcagaaaacccatgcctgccaaacatgactgattgaaaagccatacagtacaactgctg

SEQ ID NO: 483796 - DNA, 619 bp, Homo sapiens
ctgcttaagcctaaatcttgtgcctgtaggtggaraatgactggatactattaccctgatagctgatgataatatttctacatccgttgctaagcttcttaagtttcttcttcactttagcagtgtttcgcatatcattttctagaaaccgtactcaatgtgccttaggtaaaaagtaagattcgatactgcgttcatgggagattatctaggactaagctgctgagcgaatgtctcagcctcactcatccagtctctccataaatgcacctttatgtatctctcaggggtaaagtgggtcacttgatgttgtttcagaacatctggaaaacagtcgctggggtggaagggctgttaaagctctttgtgctaaggctcaggggatataatgaaaacatggatgtgacacataccaaatgattctaaaacatccacttgtttgtaagtacccacactactcattatctgcttttacttcaaataagagaggtttggcaaggatgctgagttcagatatgtattattgctcctcacaagcttaaaatcccttttctggcattttggggcaatcgagaagctaagagcgactgaactgaatatccattttgcagtcctaacc

SEQ ID NO: 483797 - DNA, 619 bp, Homo sapiens
ctgcttaagcctaaatcttgtgcctgtaggtggaaaatgactggatactattaccctgatagctgatgataatatttctacayccgttgctaagcttcttaagtttcttcttcactttagcagtgtttcgcatatcattttctagaaaccgtactcaatgtgccttaggtaaaaagtaagattcgatactgcgttcatgggagattatctaggactaagctgctgagcgaatgtctcagcctcactcatccagtctctccataaatgcacctttatgtatctctcaggggtaaagtgggtcacttgatgttgtttcagaacatctggaaaacagtcgctggggtggaagggctgttaaagctctttgtgctaaggctcaggggatataatgaaaacatggatgtgacacataccaaatgattctaaaacatccacttgtttgtaagtacccacactactcattatctgcttttacttcaaataagagaggtttggcaaggatgctgagttcagatatgtattattgctcctcacaagcttaaaatcccttttctggcattttggggcaatcgagaagctaagagcgactgaactgaatatccattttgcagtcctaacc

SEQ ID NO: 483798 - DNA, 676 bp, Homo sapiens
cccctggggaagtgacatttgagctgagatctcaaggacaagacagaacagtgcattcatacaagggtgaaagattatttttcagccaaggaaatggcatattcaaagaccctggggtggaagggtgacactgtcccacatgagaaatgagaaaaaaatcaatgaaaaggaaaatggctaaagatggggctggtgacatggacaggaatgaaatcaggcagggcttgaaggtagtcttatcccaggagcatgacaggcttgggcggtttgtgccaagagcttttctaccatttatctagtaggaaccacatagcacttgcgttgccagacactgcccagacacatttaatttatgatttgcaatcaatctaacattctttcaacaaagacattttagccactccttgtaggtgaggaaattaggacttagaggggttagagatgggccaggtccatgtagtcagcagtatgggcccaggtctctaacccagcccagcccagcccagcccagcctagcccatgtcctggctytttcctctgtgccatgctgccttcccacccatggaccaaataatgaactgctaaaagtttgtgaggtttgtgccacattgtactttttccaattgtttgactctttgggagaatttctaagttactaattgataatattaaaata

SEQ ID NO: 483799 - DNA, 637 bp, Homo sapiens
taaaaaaagaaaaaaagactaaacttggttgaagcttcaaattgttgcatctactttagttcaagtcaataaacactttagatgatgtggaagtccatggaagggtttagacttttaatggtgccctggtttatctctggcatgataaacaaaatgctggggccattcactgttaaagaacaataaaaacattccagtgaaggagtgctcggagagaaggcatgtggagaaacattttgcaggaccttaaggaagacacgtattttctatcattcyggaagaaagctattcattcaacaaacatcaactgagcacctattctgtgctggggacttttctaagcatttgtagtgctttgggagggaaaactaaactctctttctgccaggtatagattctagcagaattgattaccttcttaaatcctctttgcaaagagaaggaagctgaagcttagcaaagtgaactaagtaaccagagattacccacacagaaggcagtgaagctgaataagagcccgggccatgtggctccagagcccctattcttcacctaccgtatctcagttgccttcaccattttcaacctttttctggctcaaaggtctattaatctgggtcattgtgaatttatattt

SEQ ID NO: 483800 - DNA, 637 bp, Homo sapiens
taaaaaaagaaaaaaagactaaacttggttgaagcttcaaattgttgcatctactttagttcaagtcaataaacactttagatgatgtggaagtccatggaagggtttagacttttaatggtgccctggtttatctctggcatgataaacaaaatgctggggccattcactgttaaagaacaataaaaacattccagtgaaggagtgctcggagagaaggcatgtggagaaacattttgcaggaccttaaggaagacacgtattttctatcattctggaagaaagctattcattcaacaaacatcaactgagcacctattctgtgctggggacttttctaagcatttgtagtgctttgggagggaaaactaaactctctttctgccaggtatagattctagcagaattgattaccttcttaaatcctctttgcamagagaaggaagctgaagcttagcaaagtgaactaagtaaccagagattacccacacagaaggcagtgaagctgaataagagcccgggccatgtggctccagagcccctattcttcacctaccgtatctcagttgccttcaccattttcaacctttttctggctcaaaggtctattaatctgggtcattgtgaatttatattt

SEQ ID NO: 483801 - DNA, 594 bp, Homo sapiens
tcaatgtctaccttgtattacaaacttcatcaaaagtgctttggcaaaattaattggctaaagattcagcagtatacggaagccagaacatctacagctacgtttgcaggaygactggtttgagtataccacactgaagctggattactccaggaagtgtgttaagcacggcacagagtaaaagagaaaggtccaccaccaggttggccctgtgggcttcctgggttttaaggtggcattgtttagtaggcagttggataaaagaactcaaagctcaagggaaaagacgctagacaaataaacagatttcaaagcagcaaaagggtataagaggaggagacccgagcgccaaaggccaggcctcggaaatagtaactcctctcacactgattgcctccttctctgttttgcttttgcatcaaactgtgcatcatctcatctgattctaactcctccttacacaacccttatcttgcccgttaaactattagatccttgaggtcaggagagtataacataatgttctgatatcctattgttcacccaaaatagaagccaggaattgagggaactatctaaattctaccaccaaat

SEQ ID NO: 483802 - DNA, 606 bp, Homo sapiens
acttcacctctcggtagcagtgaagtagaggcacacagagtccacttggctttgtaaaaatctaagcaaaaggacagtgaagatgtcaagttagatgatgatggtggaaaacaaggagtgttttattcaaagtcagtggaaatttatttcaagtaaacataggaaagttaagaaaaaaggtgtgtagagactgtcaattgcccaccccaaaacattttgcactttcgtcctttccaatataactcccatttattgaaacagcactgtgtcccgatcttttgaactccatttctctgcctcccttgtagatcagagtggtcatgcgacactaccctgctcaattcaatgtcagcaaagattattacatgttgctttcaggaatgctccccttaaagggtggcagattcagttggcagatgccctttgattctgtgatcatcctcttcctttctacctgaaatgcagaagctgcagctagagttcaagcaactatcttgagaacataagaatgagcatcacagagaatgtgcacaccgacccttgcttyggtctatctagcttataagtgtgaaaaacattgtgagataaaattgacaggccttataa

SEQ ID NO: 483803 - DNA, 631 bp, Homo sapiens
aaatcctaacctatatccagtagccattggaaatctggcctcggtttgtctccacgacctcaattttggcatatgtaaaattgattttacttcttggctcacttttttattccctggaagtatcttctgttcctacttcattgatcttaactcccacattcaagttaggcattctgttgccttcagctaactaatttcatatctgtctcattctcactgccttatttgactttaattttggcacatctggtatccctgcccccatttttgccccgctcaagtctgtctttyacactgctcctggttacctttctgattacttgggttagggttatatgaatatattcactcaacattcattagttcaacacatgtcaattgaatgtctttggtgtgctaggcactattctagatgtcgaagatgagcagtgagcaaaacagagatcctgttcttatggagtgaaaattctaatggtggtggtaaataaatagacaatgtcagatgaaaatgaatgctaataagaacaaatatggtaggtgatagggatacaatataggagagcagagggattctattttctatagagtctttggagaaggccttattgataaggaggctttggaccaggga

SEQ ID NO: 483804 - DNA, 618 bp, Homo sapiens
tccatgccagaagtaaagatgataaaaaacaatccagacaaaaactataactaagagtcagtaaaatgattgcagttcctggaagccaagcacaaagcagttgtcctaaaaagatttgtttcaaagttataaaacaagaccaaacacatgtgtaattttaaatggactcagagaaaaaagtcaaagctgttaactctgaggatgccacctgcataacmtagcatgtctggagctgagattcttccacccagcagatagttgtgtgtttgcattgacactgtgtttggtacagtaagaggaaaaggtacagtaatgaagcacagagcagggaaagccgtgcctacaacacccagggggcacggtctccaatgaagtagtttccttatttcacctctagggactggcaaaagttacgttgaccttcaggggttaagtgataactcaaattggagtgcctctttgtctgtctaaggacaactttttttttttttttttttgagacagtcttgctctgtcacccaggctggagtgcaatggcgtgatcttggctcaatgcaacctccgcctccccggttcaagcgattctcctgcctcagcctcccgagtagctgggattac

SEQ ID NO: 483805 - DNA, 616 bp, Homo sapiens
tgtctcagttctgtttttcttcaagaatgtcaaatgagcagatatcactgtgaacaggcagtaagttggaattgaatgccaaaaaagtagcaatttatttttacataaaagtggattaatactattgagctctactttgatgtattattcatatcttgaagttatttatgcttatatatctcaaaaaaagacatggaaaaccatggaaaataaccatttgacagaaacacataatttatgatataatcaaaactactgacagtgtatcacaatactttcttagtggttgagcagaatgcaattaaacatttgtaaaattagatcaaaagcagattartccaaagtacaattaaaagggtagttaaaaaacattaaaactagacataatcttcttaatgacagtaactactatattagaccctggaaataaataaataaacttttcatcctgaggaacacactgctacttttttttttccctttgagatggagttttgctcttgttgcccaggctggagtgcaatggcgcaatttccgctcaccgcaacctttgcctcctgggttcaagtgattctcctgcctcagtctcctgagtagctgtgattacaggtatgtg

SEQ ID NO: 483806 - DNA, 614 bp, Homo sapiens
ttagtgtgatcctttgcaagtaagaagacactcttaactttaagagttgccagagttcttgcactggttcttttgcatctgtcaggtctgatgtccctttattctttgaagttgttgtcctttgaatggggctttttgtttttatgttctttattgcccctgagggtttgactgtggtacgagttgtgtatagtcgaatggcttcatttccagatgctttcagagggccaagtttcagctcagcaatcctggactgcatgctccaccctgggtggctggaatcaggcccttagctttgtcctctggcccttgaggtgcagcaccggctgcactgcagggctgagatgctcccagaccactggcaacagcactccatgggggttgtgtgcaaaagtgcactggcaggcagcatgggggcagtgtgtgaaggtgctccagtggggctgtggcagagtcatggccaaatgtattccagtagggcagcgattggtggggggcatcttggagggacacactctggtgggrgactgtcagcaaaagtgttgtggtggggtgacaggggttgcctgcaagagcactatggccatagcgactgcaaaagtgctttagtgaga

SEQ ID NO: 483807 - DNA, 614 bp, Homo sapiens
ttagtgtgatcctttgcaagtaagaagacactcttaactttaagagttgccagagttcttgcactggttcttttgcatctgtcaggtctgatgtccctttattctttgaagttgttgtcctttgaatggggctttttgtttttatgttctttattgcccctgagggtttgactgtggtacgagttgtgtatagtcgaatggcttcatttccagatgctttcagagggccaagtttcagctcagcaatcctggactgcatgctccaccctgggtggctggaatcaggcccttagctttgtcctctggcccttgaggtgcagcaccggctgcactgcagggctgagatgctcccagaccactggcaacagcactccatgggggttgtgtgcaaaagtgcactggcaggcagcatgggggcagtgtgtgaaggtgctccagtggggctgtggcagagtcatggccaaatgtattccagtagggcagcgattggtggggggcatcttggagggacacactctggtgggggactgtcagcawaagtgttgtggtggggtgacaggggttgcctgcaagagcactatggccatagcgactgcaaaagtgctttagtgaga

SEQ ID NO: 483808 - DNA, 614 bp, Homo sapiens
ttagtgtgatcctttgcaagtaagaagacactcttaactttaagagttgccagagttcttgcactggttcttttgcatctgtcaggtctgatgtccctttattctttgaagttgttgtcctttgaatggggctttttgtttttatgttctttattgcccctgagggtttgactgtggtacgagttgtgtatagtcgaatggcttcatttccagatgctttcagagggccaagtttcagctcagcaatcctggactgcatgctccaccctgggtggctggaatcaggcccttagctttgtcctctggcccttgaggtgcagcaccggctgcactgcagggctgagatgctcccagaccactggcaacagcactccatgggggttgtgtgcaaaagtgcactggcaggcagcatgggggcagtgtgtgaaggtgctccagtggggctgtggcagagtcatggccaaatgtattccagtagggcagcgattggtggggggcatcttggagggacacactctggtgggggactgtcagcaaaagtgttgtggtggggtgacrggggttgcctgcaagagcactatggccatagcgactgcaaaagtgctttagtgaga

SEQ ID NO: 483809 - DNA, 649 bp, Homo sapiens
ctgcacctgggccagaactgactaaggcctgttacgtccacaagtgacgttacacatttaggagcattgtcatcaagaggaatcgttttgaactttggctgcctgttggtgtctcttggggagcttttaacaaacaccaaccaccaggccccacctcagaatccacctcaaaccaattacatcagaatctttggggatgggagctctatattgtatgctttatgttatttaaaagcttccctggatactctaatgtgcaggtcagggaggcaattcttgttctagataaattattctcaaaatgtgtttccataaccattagcatgtgcaccactgggaacctgaatgttctttactgactaaaatatgatgacagagatataagacccaygaaatgatgagaccaattttggaagaattctggtctctgggtttttgtaagaagatgtttcttaaataaccctttttaaagaattgttttattttgatttagaagcaacgtctccattcaccatttcttagccttctttgcagcacttatataatccgtctaatctgtgttttaacaagaaaggcgtggatctacttttgcatacttaatgaggtcctttcatggtaggcatcacaaaatgtactgtagttctacccc

SEQ ID NO: 483810 - DNA, 649 bp, Homo sapiens
ctgcacctgggccagaactgactaaggcctgttacgtccacaagtgacgttacacatttaggagcattgtcatcaagaggaatcgttttgaactttggctgcctgttggtgtctcttggggagcttttaacaaacaccaaccaccaggccccacctcagaatccacctcaaaccaattacatcagaatctttggggatgggagctctatattgtatgctttatgttatttaaaagcttccctggatactctaatgtgcaggtcagggaggcaattcttgttctagataaattattctcaaaatgtgtttccataaccattagcatgtgcaccactgggaacctgaatgttctttactgactaaaatatgatgacagagatataagacccacgaaatgatgagaccaattttggaagaattctggtctctgggtttttgtaagaagatgtttcttaaataamcctttttaaagaattgttttattttgatttagaagcaacgtctccattcaccatttcttagccttctttgcagcacttatataatccgtctaatctgtgttttaacaagaaaggcgtggatctacttttgcatacttaatgaggtcctttcatggtaggcatcacaaaatgtactgtagttctacccc

SEQ ID NO: 483811 - DNA, 633 bp, Homo sapiens
ggtatgatgggtgttgtggtcaagtggcactcacaccaaagaatgtgagacttcttttttggagaggagggaggaggaatggtcctcattgccagtgacaatgatgagggaggaagacatctacctgtcccaggaatgtgggaaggaaaaattggccaccacttgataggtctctggggaaagtgggtggcctgaggggttttttttcactcargaataagagtaacaaggtgaagaaaatggtcagaaaagagattaagggtctagggtgacttttttggattcagactatgaatttcagaaggcagaaggaagcatatgagggcacagaaatggatgaaagattagatcataaatctcagtttgtcctgcacagtcatggcttattaatgtcattccaaggtatctgtttcttaatagcaccttgtttcattctaaaaagtgttctaccttggaagttaaattatataatcaccatacccgagagaataagaatttcagagacaatggataacctgagaagtttagatttttggttgtacaagtcatgacaggagtaatcctgaagagctcttagaaagtttgagagtaatgtgttctaatgccagcccttttcctggggttggtccctta

SEQ ID NO: 483812 - DNA, 632 bp, Homo sapiens
catttatttaattgaagtccacctgtaaagaggaatttcctacttactctcatgtatttatctggttgtttatataagcatgggtctttaatgcttattttgttctttatgttatagtccaagaacatgtaattattttgctgctcaaattctagctgtggccattaggagctctttccagttgattcwtgtgacctttggtatgctgctatttcttttctttttccctgttcttcctttcctttcattttcaaagtgtcaaaaccatgaaaaagaaagactaagaaactgctatggtgtggaggagacaagtgacaggacaagaataaggaaaataaatagcagaataaggataaggaaaagaaataaggaaataagcatttccttatttttgatatgatgacatgatttaggcttatcatgtattttttcctgtaccagacatacaataaatcatttcccaaggatttttggaatcttttatgaagaattttatttagaaaagaagacctgggttctagatatggtcattactaccggggcatcagaggttacagaaagaataaaacaaaacaaaaagagagacaaacaaaagtgacaaaggaaattcccaagataaggttaaagagaag

SEQ ID NO: 483813 - DNA, 632 bp, Homo sapiens
catttatttaattgaagtccacctgtaaagaggaatttcctacttactctcatgtatttatctggttgtttatataagcatgggtctttaatgcttattttgttctttatgttatagtccaagaacatgtaattattttgctgctcaaattctagctgtggccattaggagctctttccagttgattcatgtgacctttggtatgctgctatttcttttctttttccctgttcttcctttcctttcattttcaaagtgtcaaarccatgaaaaagaaagactaagaaactgctatggtgtggaggagacaagtgacaggacaagaataaggaaaataaatagcagaataaggataaggaaaagaaataaggaaataagcatttccttatttttgatatgatgacatgatttaggcttatcatgtattttttcctgtaccagacatacaataaatcatttcccaaggatttttggaatcttttatgaagaattttatttagaaaagaagacctgggttctagatatggtcattactaccggggcatcagaggttacagaaagaataaaacaaaacaaaaagagagacaaacaaaagtgacaaaggaaattcccaagataaggttaaagagaag

SEQ ID NO: 483814 - DNA, 459 bp, Homo sapiens
taagttaattctggacctgggaagagagctattattaatctctctaagctacaaatagtataaatacatttttaaaatattctgtttttaaatcttgtgacctgaagagctcaatttgtggaatgaattttttgagacatatgcaagaagactttaaaaaatcatgtaatcaaatgatttaatgyctgtgttttactttgatcttttttgctttttaggtattctgtttacatgtttctgtgtcactgctaagagaacagtcaagaaatgttttccagaagacatagcccagcaaaatttaattgtatcaaatactgaaggacctggagaagaagtaacggtaaatcagatttcacatccctttgaattgtacggtgaacaaatgatgacagattattactcaacaatgtcaatgataatatcactaatgtttattgagcacttactatgctaagcaga

SEQ ID NO: 483815 - DNA, 633 bp, Homo sapiens
cagcagagcacagcgagggaagagtgacaggagaagaaaacaaaaggacagtcaatggcaaatgatgtagggtctaaaaggtcatggtaaggagtgcagattttgttctgagtgcaaagagaagcaacagcctgatgaagaagctgtggagtggcgtaaactgatatttatacagaatcactctactagttatgtggaaaataggttatagaagagcaagagtggaaaccaagagactgattgggagactacagcaggaatctaagagtggggtaatggttacttgggctaaggtaataatgktggagaagatgaaaaatggttggattaagacaattctttgaataacagtatcttggacatccatccattcatgcatgaattcaacaaatatttactgaatgtgtatcatgtaccacacacagagcagtaaacatgatcctcatgaaacattcaatctaaggtaagacatatttgtaatttcaacaaagtaagacaaatgtaatgatagggaagtacagggagctatgggagagcagaggtaatagtgatatctaaaagccaggtgaggtcacctgaagagcggctacaagtgagacaggctaagaggaggcagagcttaaatgctgcaaa

SEQ ID NO: 483816 - DNA, 611 bp, Homo sapiens
gctttccagagcttttaaccaagagcctggtgactttactgtggccccttcccctagcaggtctttatttccttcacagactggaaactcctttctgcttatcacagtggtttggtttagtttgtcagcttcctacttcataaaactttagaatacagcacatgctttgaaggcaaaaccagaagttcatgaaatccctccagtctctgattttgtcactccagccccacacaattgctaaaaactctgctactttctttcttcccaagcagtggccttctgctttggctgagcctggattctcagcytccagcctgtgtccagtagcttcaaatgctccctgagaaaaatgcggctagagctggtgttctcctctttagattttaatctatttcttctttattctgaaactctctgcgagctctaaacagatagattttgtattttatccagagcttcttattggccttggtgagaatattggtctagcataaaccactccatcctaccatcctgctctcatattttattactttttttcttccttggtctctgtgttagaatgtaattttcacaaggtcttatattcatctccatttttagtttttaca

SEQ ID NO: 483817 - DNA, 541 bp, Homo sapiens
ttccttcacagactggaaactcctttctgcttatcacagtggtttggtttagtttgtcagcttcctacttcataaaactttagaatacagcacatgctttgaaggcaaaaccagaagttcatgaaatccctccagtctctgattttgtcactccagccccacacaattgctaaaaactctgctactttctttcttcccaagcagtggccttctgctttggctgagcctggattctcagcctccagcctgtgtccagtagcttcaaatgctccctgagaaaaatgcrgctagagctggtgttctcctctttagattttaatctatttcttctttattctgaaactctctgcgagctctaaacagatagattttgtattttatccagagcttcttattggccttggtgagaatattggtctagcataaaccactccatcctaccatcctgctctcatattttattactttttttcttccttggtctctgtgttagaatgtaattttcacaaggtcttatattcatctccatttttagttttta

SEQ ID NO: 483818 - DNA, 541 bp, Homo sapiens
ttccttcacagactggaaactcctttctgcttatcacagtggtttggtttagtttgtcagcttcctacttcataaaactttagaatacagcacatgctttgaaggcaaaaccagaagttcatgaaatccctccagtctctgattttgtcactccagccccacacaattgctaaaaactctgctactttctttcttcccaagcagtggccttctgctttggctgagcctggattctcagcctccagcctgtgtccagtagcttcaaatgctccctgagaaaaatgcggctagagctggtgttctcctctttagattttaatctatttcttctttattctgaaactctctgmgagctctaaacagatagattttgtattttatccagagcttcttattggccttggtgagaatattggtctagcataaaccactccatcctaccatcctgctctcatattttattactttttttcttccttggtctctgtgttagaatgtaattttcacaaggtcttatattcatctccatttttagttttta

SEQ ID NO: 483819 - DNA, 613 bp, Homo sapiens
taaagatgtaacaatgatagaattgcacggaaaactagaaaaaagtatggtcttctgatattctatcacatcacacactaaaggcctcataaaactcagatattttatctaaaaatgttattttcatcataggaatgatcaaagcatgagactacaattgtattaaaatctgcttgtatcacaagcacaggtgctaaaaaggaggggaaaacatcctgatattgtcaacgtatgttttacttttcgtcaacatgcacctcaacttgatatgatgcagattgaaggaaatcacccataattccatatgaagaagscttgtgatattttatgggaaactaaatagagaaaatgctaacagaaaccctattaagcatgaagctttatggaacaaacacaaatccagtggtgaaagatacacactcgagttctgtttgttgtcttggaacaacacggtttagaggtgactagcgggtgaggagaacatatgcgagttcaccaaagagaaaagctgaatgaggcaatgcctcttcctgatcatatctcttactcagataactatataatttattgtccagtaaagggtatattaaaaaatcatattaaaagtcatgca

SEQ ID NO: 483820 - DNA, 592 bp, Homo sapiens
aaaccacagaggaatcttctactattcttcctccttcacttcacatatcaatacaggcactaggcttgtcctcagaaatgcttgtgaaaacccctccaatttgccactgccaaggtcaggctctcattttctagattactttgagtgactcttcgacatttgtcatacaagacctttcacaatctgaccccaatgaataccacyattgcccattacacgtgaccatatgcatcacatataaaagcttacatgaagctttaattccataaacacatgctgagaacttaatacatgaagaacagtagtttaaattttaggagtactaagattaaatcacatatgttcacactatggtagaaagaagcaatcataaaccaattatctatctaagcgtatgctatatgatataacaaagatagtgcaagagagagatgtggacaaggaagaaagtgaacgttttccttgtcatgaggcagggaagagttcacagagaaagatatatttgaacagaaaacacaacgattgtagggtgcataagacttagcaaggcaggtatggagaatgagacaatctctggtgtataggagttccc

SEQ ID NO: 483821 - DNA, 592 bp, Homo sapiens
aaaccacagaggaatcttctactattcttcctccttcacttcacatatcaatacaggcactaggcttgtcctcagaaatgcttgtgaaaacccctccaatttgccactgccaaggtcaggctctcattttctagattactttgagtgactcttcgacatttgtcatacaagacctttcacaatctgaccccaatgaataccactattgcccattacacgtgaccatatgcatcacatataaaagcttacatgaagctttaattccataaacacatgctgagaacttaatacatgaagaacagtagtttaaattttaggagtactaagattaaatcacatatgttcacactatggtagaaagaagcaatcataaaccaattatctatctaagcgtatgctatatgatataacaaagatagtgcaagagagagatgtggacaaggaagaaagtgaacgttttccttgtcatgaggcagggaagagttcacagagaaagatatatttgaayagaaaacacaacgattgtagggtgcataagacttagcaaggcaggtatggagaatgagacaatctctggtgtataggagttccc

SEQ ID NO: 483822 - DNA, 664 bp, Homo sapiens
tctatgtttaacatagatcatagctgagcttttccctttagcaacaatgctacccaggagaaaaggagatgcaaaatattcatgtcttcccaaaatgtcagttaacagcatgtgcatattgcatgtccctaatggcttggttggtaaatgagccgaaaacatcaccttgttactgtgacatagtaaatattgtcagtcaaagcctgaccttttgctttccctccacagtaagcgtggatgtgtgtatcctttatggcagcatttgaacatatttcagtatttctaataagtacaagtacccttcctagaagtaacaaacccctttaatttatcttcactgtccaacttcttgaacggytgctgtccctgctttgtaatttccctttctttcactaaagagaaatgattatggtgaattccaccctcatcactctactaaaaaagactcctggactttaccaacaatgttcctattgctatattacacggccaccttcatgccattgtttaacttgatcttaatgtagcatttgacactggagaccactttccttagagcaatttcaattttcttggcttctatgacacattgctcctactttaattcatttttagggatgctttttctctgtcttctctgcaaatgttccttcctccattctgt

SEQ ID NO: 483823 - DNA, 548 bp, Homo sapiens
cacctaactcttccatccatatatatgatttttaaaaaaaaatcattaacaatatttcttcaattgtatctgcaaacttattcaatatatttaaccttagcatcttttaagtacccaaggctgkcttactatttctcaccttcattggactttaaatctctcttaataaagttttaaaaaatgttcttttctatattgcaaatttttctctgtgattaaaataaataagaacaaaaaaggaacataagttgagtagtttggtctcattaaaccatctgcccaaatgattgtacttaggccatctttggtcttgttctaattttgttttataataccctatttttttccttgtactataatcataagaattgaaactgaatcatgtttccataggcatccttggttctatgtttctctttcaatacttgaaattatgatttccaaaatctgagctcaacagaaagcttcttttaaaactcattttgtttttatagaaatctgctcttttccgtcaatttaaggtaacttggcgattgtattaattttag

SEQ ID NO: 483824 - DNA, 617 bp, Homo sapiens
ataaaaaggaataaactacagacacacaccaaaacatggatggatttcaaaatgcttatattgagtaaaagaagaaagagaaaaacacactcatattgtatgattctattcatacaagatttcagcacatgcaaaatacacagaagtgacagagagcagatcagatgcaaaatgatcaaaaagcagattaaataatttcagcacatgcaaaataatcaaaaaggcagagagcagatcacatggaaaataacaaaaagtgacatcgagcagagcagtggttgcctggaactaggagaccagggagtcaacacagggtgcaacaaaactttggggaagatggatactgattgctgtgatggttccaygagtgtctatatgtcagaacttataaaatgcatatttaaaatatgtgcactgtattgtatgtttatcatacctcattaagatgttaacaaaatagaggaaactgccagatttagcttggaaactggtcaatgaacaagactcaggaagcaggaaacagggctgtctcaaaggcagcaacaggacaagccaccattggcacgttgccactgcaagatgagtgtgtcactcactgcagcatcccacgagagaga

SEQ ID NO: 483825 - DNA, 487 bp, Homo sapiens
atagacatctgtaaagatttccattgccactcctattgaggattagggagaagttaagaggcttctatttgattttagttttcccctcacagtcttaaatgtttgagatacatgaagagaaaatataaataaaatttaagggatattgcagaaaagtagaaaataagyaaggatttttagtgttaacttttctcccaaaaccgaattgaagttgcttcataactttaagaactgttaaattttgtaggagataatatggtgcaatcttaatgtgcatattttcctttcagacctctgttttctatggtattgtagacatttgtatttgtatggtaaagaaaatagtatgtgcttttgtaacatatagttttatatagactgttttgtagtgaagaacacaaaagatgcaatttatacaatttgatctactaattttattaccaagtttagcttactaagtacagaagcaaattttactcagaaaatg

SEQ ID NO: 483826 - DNA, 548 bp, Homo sapiens
tctggaccttcctgaagcactgctcgggctaatatcgctaatcacgttcccatgaagtatttagatgaagatacagagaccactcatcttggtactctcattgttcacagtgcattgcaattctctagttcagttcccttcctagggatgacaaatacatggtgtgtgtgcccccatcctccccactctccatatccaggacagaccttgttaatggatcatgacattcatcctactgagcccaaacagccaggaacaatccatcaggctgggcacacaaggtaaaaccmacttattatgcctgactcaagacatctggaatcactacttcagcacacagccaaatgatgacccagctcatgcctgaccaccttcgtagatgggaaatatgatctcatggagacagcatattccattttaagaactctgttagagttttttcctttacggacacttctgggtgaacatagagacaacacacctgggcctgctgtgactgcctcttcccaaatttttatgaaataatcctgaagatacaaacaacagac

SEQ ID NO: 483827 - DNA, 548 bp, Homo sapiens
tctggaccttcctgaagcactgctcgggctaatatcgctaatcacgttcccatgaagtatttagatgaagatacagagaccactcatcttggtactctcattgttcacagtgcattgcaattctctagttcagttcccttcctagggatgacaaatacatggtgtgtgtgcccccatcctccccactctccatatccaggacagaccttgttaatggatcatgacattcatcctactgagcccaaacagccaggaacaatccatcaggctgggcacacaaggtaaaaccaacttattatgsctgactcaagacatctggaatcactacttcagcacacagccaaatgatgacccagctcatgcctgaccaccttcgtagatgggaaatatgatctcatggagacagcatattccattttaagaactctgttagagttttttcctttacggacacttctgggtgaacatagagacaacacacctgggcctgctgtgactgcctcttcccaaatttttatgaaataatcctgaagatacaaacaacagac

SEQ ID NO: 483828 - DNA, 480 bp, Homo sapiens
cccttgcagaaaaaaaaaatgacaaaaatcctggggaaatttttactaactgcactgatgaaaggcatggatggaaaggcacaatttttgaaatacacaccatatgtactaccctttcattcataacagcataaatgccstccaacacacacaaaggtaggcaacacaccagcccctcagtctgttaaattttacttcatgcccttattcctgcacttctcaggaaagaaatggaagccaacctccaggaacacccttctgagatacccagaactagggtcagggcggtccctttctccttccccatcaattgctcttccttatctccattcattttaagaaaataacactggcatgtgctgtgatgataattaggtttcattttaagatacttcactacctgaggaaaggtccttttggtagcaatgtggtttctcatgcccacattgtacaatgaaaaactgcaaagagtctgagaaa

SEQ ID NO: 483829 - DNA, 544 bp, Homo sapiens
ggaatgtggggcctggtctaatgagagttactgccataactggcatttactgagcacatcctayatgtgactctgttctaagtactttctgcatgtcgtgtgttagacatcaagagtcgaggcaccctcattcacattctacacatcatgaaactgagacttgtagaggttaggtagtttggccctcatcacagtgccaggaggtgcgggtgtaagatttgaacccaggaagtgtgattcttgtagcaattgctgtgtggttgagatctggtctgggaagtggggctaacacagaagtgtggataggacagattatttctgcgctccaaagttatgaatatatatactccaaaatatgcttcagtgactgagtgagacataaatgggttactctgtcagtgatcattatattactccccatccctgcatgcatgttagaaaggcacacacaagctggaataatatgaatgacatttaatagactacttacaaaaatgttggaagatctggggaaaactaacgaaggaactttccgtacttgagg

SEQ ID NO: 483830 - DNA, 509 bp, Homo sapiens
tctcattcctccatatcattctctttatatcacgtatygcaatatgatgctcggtcttgcttgtgtctgtttgtttattgtctgtgtcctaactgggattggaattccatgaagagactttccctgctcatcagtgcattcccagtgtccagaagagagcctgcaatggtgtaaatactcaacaaatattagtcaataagtggttgcaggcccaattatacttgaacagagggtagattcaacactgcaactgttccacatgccacacaatgggatttctgctttctgagtacaaggaaaagtactgagaactggcagcttgaacgctggaggcgcccggccccaggattacatcctggttctgctgtttagaagctttgtgtccctggactactcttttaccatcctaagccccagtttcatcatcagtaaattagagagggatatagtagctctctcacttgattgttgccagaatccaatgagacagtgcttgaacagcacacgat

SEQ ID NO: 483831 - DNA, 528 bp, Homo sapiens
agaccgtcaaattgaccatggaccctcagaacagawgctaccccttaacaccaattcagagcatgctggcagcttcttactgcagaaaactgcaatagatattctgcctgatggcattctcaggcacagagagctcattccttgggtgcacagagcaggccagaggagccagagacttgatgcccccaaaagtagccatcaaacattgactgaaacatacggtgcaggcaaactccagttttcttgccctgcaggtgagaccaccagaagtgcagtacttagggctccaggagcccctcagttgcccacagaagtagctggtttattaacacaccctcgataacttccttaccttccctgtcgtattaatttcctgtggctgctgtaacaaatcctcgtaaatgtgatggctttaagcaacagaaatgtattcctttgcagtactggtggccagaagtctgagatcaggatgtcagcagggctgtgctccctctggaggctggagaggagaatcctgccagctctggc

SEQ ID NO: 483832 - DNA, 528 bp, Homo sapiens
agaccgtcaaattgaccatggaccctcagaacagaagctaccccttaacaccaattcagagcatgctggcagcttcttactgcagaaaactgcaatagatattctgcctgatggcattctcaggcacagagagctcattccttgggtgcacagagcaggccagaggagccagagacttgatgcccccaaaagtagccatcaaacattgactgaaacatacggtgcaggcaaactccagttttcttgccctgcaggtgagaccaccrgaagtgcagtacttagggctccaggagcccctcagttgcccacagaagtagctggtttattaacacaccctcgataacttccttaccttccctgtcgtattaatttcctgtggctgctgtaacaaatcctcgtaaatgtgatggctttaagcaacagaaatgtattcctttgcagtactggtggccagaagtctgagatcaggatgtcagcagggctgtgctccctctggaggctggagaggagaatcctgccagctctggc

SEQ ID NO: 483833 - DNA, 528 bp, Homo sapiens
agaccgtcaaattgaccatggaccctcagaacagaagctaccccttaacaccaattcagagcatgctggcagcttcttactgcagaaaactgcaatagatattctgcctgatggcattctcaggcacagagagctcattccttgggtgcacagagcaggccagaggagccagagacttgatgcccccaaaagtagccatcaaacattgactgaaacatacggtgcaggcaaactccagttttcttgccctgcaggtgagaccaccagaagtgcagtacttagggctccaggagcccctcagttgcccacagaagtagctggtttattaacacaccctcgataacttccttaccttccctgtcgtattaatttcctgtggctgctgtaacaaatcctcgtaaatgtgatggctttaagcaacagaaatgtattcctttgcagtmctggtggccagaagtctgagatcaggatgtcagcagggctgtgctccctctggaggctggagaggagaatcctgccagctctggc

SEQ ID NO: 483834 - DNA, 295 bp, Homo sapiens
caggcaaactccagttttcttgccctgcaggtgagaccaccagaagtgcagtacttagggctccaggagcccctcagttgcccacagaagtagctggtttattaacacaccctcgataacttccttaccttccctgtcgtattaatttcctgtggctgctgtaacaaatcctcgtaaatgtgatggctttaagcaacagaaatgtattcctttgcagtactggtggccagaagtctgagatcaggrtgtcagcagggctgtgctccctctggaggctggagaggagaatcctgcc

SEQ ID NO: 483835 - DNA, 523 bp, Homo sapiens
tcttgatttgcttctacaccactgcaatctctgcctctcccgtcacatgcccttcttttctcctgtgtctcatctcccttttcctccttcttagaagggtaaatgtgattgtatttagggctctcccagataatccagatcatctccccaacctaagagcctaatgttattatatctgcaaagattttgcaataaaatgtaacactcatakgttgcagagattaggacagagacgtcttttggtgccattttttagcctaccacatctgcatcactctcctacttccctactggagcttcctgggattatttcccaaacaaattctttgcactcaaatcctagtctcggggttggcttctggggaaaccaaatcaagacaacccccctcagttgcttaagaacatgaagagagactggaattgccaccgtactagactttgaaaaatacacactcgccatgggattagaccacatggtccagggctttctcagtgccacacaatgaaagagagactcctcaca

SEQ ID NO: 483836 - DNA, 420 bp, Homo sapiens
caggcattcacccagggtgcagctccctgttctccatactcccagctccctttccttaaactcaggggatcacagggctctgcctgggtggggtccccttccctgggcctgcgtagcttctctctgggcagcaagctgaggtaatagtaggtatggccttgtttcctgtctctcactttccttcatttcccgatgtccaatgtcttgagagccattatttccacatattttgtgcacttatttaatttgcccagtttcaagtgggaggctacatctccttcctgttactctatcttggccagaagagaccttggttttcaccttaaagtgtgtggggtttttttgttgtttgtttgtttgtttttcaataggartgaaaacagtccttgtccacccacagccagtctgaaattccagagg

SEQ ID NO: 483837 - DNA, 607 bp, Homo sapiens
gctattgctcttgggggctgaggcaagaaaaagcaccagctttagaatcagaaagtcagatgttcaaattctgctctgctattttcaagttttgtaacctctgtttcccattgtaaaataggacggagaatacctactcttcagggttgttatgagaattcggtgtgggtatayattgaatgcttggtgcatcctggttgggtgctgagtaacacccaatcctggataagtcacaggactgtcctgagctttgagcctcaggaaacaggtgcacagccactaggagggctcagacaccttttcatctggctttaggatgttttcctgcccttcagttccttctcacttcaaatcgaagtcatggacctgcttgatcaaggtttggcccttggtatgaggccagagagtatcccactatcctgtgccatatttaaggctttctttgttcattttaggccctagtgccctgttcccttaaggagttaattttattccctccttcatgtctgcttatgtttgaacatgtcttccccatccctacctcctatagggttctagtaattgattcctctaaggccttatgtttccctttgaagagctgactttt

SEQ ID NO: 483838 - DNA, 475 bp, Homo sapiens
gcaaaactagaaattgaagccctgccttctgagcacagaagattttcacttcacatagacttttcataaaaggaccttatcctctttaagtatagaagatayttttttttcaaaaattttctttgcacagtgacatatttactgcagtatttatatgacatcactaaacacagagttgggaatccaaccagctctttgaagcaagaatatgtgaacgtgagtgggccccagcataccacaggcagttagttctgctctaatgtaatgtatgtgtttctacgttaaaaactgcagggcttatgggaaaatggggttagggacacaacattcaaaaactttattagtgacaaataataaaagatgaggaacccaataaaaatggtagcacacagttatacatttcaactcattaagaaatctgtaaataccacagtaaagacgtcacgttgaaaagatcaccttgagaaagacctga

SEQ ID NO: 483839 - DNA, 634 bp, Homo sapiens
ctgggcattaggctctccaccaggtaacagtgccatgtgaaaggcaccctgaaaacactatgtccagttccccttcatttcccattagggcacggtttccagatgccctggaagcccaatttagctgggggctctcaaaatacaagtaaactacagctttgaaatagtcacttattaggtccagaagattttttttgtcaacatcgtagaattttctaagtaggcaatcrtgttttctgagaaaaacatttcttgcaaggcatgtctattatctgataatgccaacatacctgcaacataagactctagttcaatttctacaaattgtgttttttttgccttttagtatgttttctagttttttgttaaaaggtgaatatgatgtactaggtaaaaggaacaacagtaagtaggcttttagtaatgaggtggtaaggtgtagggagaggggaaatattctatagtcctatgattaggtctgttttttagtgagcctgtgccatggacagtaaggttcaccagtatttcttagtaactccccttatgtgggacagggtactggtgggggctggagttgcgtatgtttctcccccaaggtagggtaggctctgataaaatgccagaaggttatgct

SEQ ID NO: 483840 - DNA, 571 bp, Homo sapiens
tttgtattacactatgaagtctttgaagtctgtattctgtaagacactttgaattgccagtgacagaaagccagttcaaactggcttaagttcaaaggaaatatactgccaaatattccagggaagctgaggaacgcacacttcagcaatgaaattttctagttgaatccattctgcatgaagtccacttggcaggcaagatggctgtttgcagttccagacttccatcctcctagtttaacaaccacagtagaaaatgcttctttattttctctttgaaattactaaaaaaagactttgtctgaccttgcttggctcatatgcgcacccttggctcctgccatggttacatgcccattctgtatcctgaatggtgatttcctcaaggagaagaagctgccagacacaaagaagaggtctacttcaaagactgagtcaaatctgagtyacctttgtattcctcctctacaggtattcaacctcccagatttttaatcagtggatgccagagaagcaaagtaacattgtcactgatgaatttatttaatatgaaaagaggccaaggtatgtt

SEQ ID NO: 483841 - DNA, 631 bp, Homo sapiens
tatttttgtattacactatgaagtctttgaagtctgtattctgtaagacactttgaattgccagtgacagaaagccagttcaaactggcttaagttcaaaggaaatatactgccaaatattccagggaagctgaggaacgcacacttcagcaatgaaattttctagttgaatccattctgcatgaagtccacttggcaggcaagatggctgtttgcagttccagacttccatcctcctagtttaacaaccacagtagaaaatgcttctttattttctctttgaaattactaaaaaaagactttgtctgaccttgcttggctcatatgcgcacccttggctcctgccatggttacatgcccattctgtatcctgaatggtgatttcctcaaggagaagaagctgccagacacaaagaagaggtctacttcaaagactgagtcaaatctgagttacctttgtattcctcctctacaggtattcaacctcccagatttttaatcagtggatgccagagaagcaaagtaacattgtcactgatgaatttatttaatatgaaaagaggccaaggtatgttactagaaagaaagaagtaaagcraaagcagagaagattggcaggtaggagagcaga

SEQ ID NO: 483842 - DNA, 471 bp, Homo sapiens
cttttactctgttaaataaaacaaaagctacagtaaaaatacaaaatctgtcttgacagcaccactacagaggtccacatttggcttatggatgtgacttattcccatattaaaaaaaagttttattaaaattatccatcctcagacattgtaaaataacatatgaaaatccgaattttttttcttttggtaagttggaatgtctgactaccctgaactgtcttcctggtgacatccatctactcagagtkgttgccactctttttcaacagagggtcaggatcacatgctctccagttaccctaaagtttcctctacttcttattgccttgtctaaaccaatgctggggtccatcccacagaacctgacccagtgatgcatgaataacatacactgacacagatattctgcctgtcagttcggctaagggtccgggcccctcacagaccctaaggaaggtgctgtaaaaa

SEQ ID NO: 483843 - DNA, 507 bp, Homo sapiens
atgaagatagcaaggaaaaactggaaaactgaataccaatttccaaatcttttaaactttattaagctgttgcaaaattcaggaaaaaatatgtaagatatatctttacttttaaatggcaacaggaaattcttgataacttcaaaatcgtgaaaactagacgtaagtgctatatgcttgtatgttattcataatttataatttgcaaggccttatcttgtacattatttctttcaattcacaaaataatttggtgagatcagtagaattatcatctctacagaatcagcctctacaaatgaagcttaaagaagataatttcccacagttgtttaggtaggaagtggtgaaacctaaaatcccagtcccctaaaacaaagccctttcccttgtatcatgtggttcctctcaaagaagaaaagggaaataagagtatcttgtrttacagagggagaaaaagtaacagtgactgcaaaatggacaatgactaaagcattggaatgacgg

SEQ ID NO: 483844 - DNA, 267 bp, Homo sapiens
aaaagtcatttttcatctatatcttgagacaatgttttctagaactatttrttattgagatttaaatcagatgacttattttctcatatctataacaattgcagtaattataaaatattgattggttggaaataatgaccaaattacatattttgctaaagatcgtgaaattactttagcccataaagaataagctttttaatgctaatgatactgcagtaattatatacactttatattctgttttgagactgtttatttttgctc

SEQ ID NO: 483845 - DNA, 688 bp, Homo sapiens
ctcaagaaagcaggtgcattaattatcacctcagaagaaaacacataacttgtagaaaagttctaaaagtcaaattttaccctaagttattttcattttttggtgagaaatatggttgaattatctgaattcttgctttatgtaaaatcatactgaaggactgtatctttgtagacagagtctgtttctaaccctacttttttatgtgaaactatttttcttatgttacrgaagtctatgacataaagttaaacatgaaaaatctgaggtcaaagactctagcatcacctcctgttggatagtccataaatggcattcctacatacttctgtccccagggtgcttgatgtgctcttatgagttttcatagcttagtgctcttaaaagctaagacaaagaaggcaaatgtgaggacagaacatggggtaaatcaacttttacactcttaatacttcaagaaataaacctttaggctggaaattttatttcaaattgattaggcaaatgatgcttgagaaagctgatgccacttcaaaatcattggcttttgaacaatgtgctcagtttgacttttgaaaaacctttcttccctgccaattgtgttgtctcaaatggttttttggcattatttatctgttgggttattgtatttcattgtataatcttagtgtacctgaaatgaaagcag

SEQ ID NO: 483846 - DNA, 343 bp, Homo sapiens
acaggcaccatctgccatcactatgtccttcctcctagaccagtggttctcaaatggtagtccccagactagcaccaccagcatcacctggacaggcattagaaacgcatattcttggaccctatcctatacctactgaattggaaactctgagggttgccccagcaatctgtagtttaacaagtgttccaggtgattcagatgcacactcaggtttgaaaaccactgttgtggagccttcaaagaccattagaagcrgctcagattccattcaatgagcagcttcaatgaactctctggccacttccccttttccaggatagctgagcgctcgcagtttaaa

SEQ ID NO: 483847 - DNA, 478 bp, Homo sapiens
gtgaagtaagactgtcctgaaatccatgtcggttatttacccttgtggtactcacggccatccagaagggtattgcctccttaagctcaactctggctgactggcggagaagaaagcagagattagacagaggtcacagattctgagcagtgagaccaaggaggcaagagcagatggatctgaggtccctggcaaattattctctgccttatactctgccactagtgttttccacaaagcccagatggagacggccaaggattgtgtgtgtgttttatatatgtatgcatctatacatatataacagctttaatgatatgtaattcacatacatataaaaacatagatgaaaataacttagaattcacataccttttgcccatttaaattgtacagttcagtgtcttttagtatattcccagagttgttcattcttgccataccrattttagaaaattttcatcatcccaaaaggaaa

SEQ ID NO: 483848 - DNA, 583 bp, Homo sapiens
acagcccaatccaagaaggctccttttggaatgaaagaaatggatacacacagacctgagattcatggtcttgaagcagtggcagaagccccgggcaatccccccaacattccaactaaagcctctcacctttcagggtccaacttaactcatccttccattctccagagttatctgacctcctcctcagccctgattccatggctacacatggccttcacaggagtgacccacctcaaacaagaggcctgtgggagatagaaggattccgtgaggagataacatatgcagacgtgaggtcacccacacacagttcacttcctttcacagatacgatgatccaagaatcccaattcttaggattagaagtagctctcagagggcattcaatccccaacagccccctccatgctagatcccaccccttctttgaggcctcagagcttggtggccaytcagacctcctggctactaacagcagcaacaattcctattgcctaccaccattactacctattgcagggggcagagacttggaactgatgagaacgaggggagtgggtgggctggggtctgcagaacc

SEQ ID NO: 483849 - DNA, 555 bp, Homo sapiens
tagaaattgagggaaaacgtcaaacaaggcacaactgacgctccaagaagttaggtcatatgtggaaaagcaatctaaacctcaatctgacttagaagcctaagtcccctccaagacctgagctgccactccaaaggtaagtggttaggagacccttcggccagccaggcacaaggccccaggtgggtgcactgatggaatcatgctgacacaatcccacccaagccctagaaaggccacttccccagcatacaggaagcactcctctgtacatggggctaataatatctagttttcagagtcgctatgaggattaactaagatggcacatgtgagtgcctagctcaatgcctggcacagagaggatgcttgataaataagcactactgtgctstgtaatgtactattaatattagctagttttgccaagatagagtaggccagtgcctgggttgccacgaaagcatttctagcatagaagttgaattctattcccagcgatctcagagcctatgagaacgagacaggcccaggcccagaggaactaggggcaca

SEQ ID NO: 483850 - DNA, 519 bp, Homo sapiens
ggtggtatccaggaatgacaaaatcagggatggtggtggttctggagccatttctctatgaggcatagatgggggttttagttttgagtcaggacagctgtggggactggaataggtatggaaagttctttattttctgctgcttggatccccaagttctagagaaagattaaagcagggaactctgagaggggcccagcctgcactgatcagggagattgctgcctctgcagcttgatgaaagtctggcacagcgtagctcaggccagggagagagatgggcyatcatgtacctgctgggtgtccttgagctccacacttgtctttgacccttagagcctgccagagcaagaaaggctgtagggattgtcccccaagggctgtcactgacacatgggccagtcaaggatgtgcatgtgtggtcctgatcttcctgtaagcaggaactgtaagggagtagattgcaggtgagggctggggcttagcaggaggttggcatgcgtttgtaagctgtgcacc

SEQ ID NO: 483851 - DNA, 421 bp, Homo sapiens
acagtggctcatgcctgtaatcccaacattttgggtgaccaaggcaggaggattatttgagcccaggagttccagaccagcctggggaacattagtgagactctgtctstacaaaaaatacaaaaattggccaggttcggtggcatgtacctgtactctcagctactcagaaggtgggaagatctcctgagcctaagagttcgaggctgctgtgagctgtgatcgcatcactgcacgccagtctgagctacagagtaacaccccgtctcaaaaggaaaaaaaaaaaagtgacaaagcagcatccctttgtcacagagaaaacctggaaactccattgtacttcacggaattactaaaaaatgacaccagaccacacaggctgtcttcccattaactgtttttctgtttgtttttgtttttg

SEQ ID NO: 483852 - DNA, 421 bp, Homo sapiens
acagtggctcatgcctgtaatcccaacattttgggtgaccaaggcaggaggattatttgagcccaggagttccagaccagcctggggaacattagtgagactctgtctgtacaaaaaatacaaaaattggccaggttcggtggcatgtacctgtactctcagctactcagaaggtgggaagatctcctgagcctaagagttcgaggctgctgtgagstgtgatcgcatcactgcacgccagtctgagctacagagtaacaccccgtctcaaaaggaaaaaaaaaaaagtgacaaagcagcatccctttgtcacagagaaaacctggaaactccattgtacttcacggaattactaaaaaatgacaccagaccacacaggctgtcttcccattaactgtttttctgtttgtttttgtttttg

SEQ ID NO: 483853 - DNA, 655 bp, Homo sapiens
tttgtggagaaaaacagcgctttgagaagttgatggaacatttcaggaatgaagacaataacatagattttatggtgagttatttcagtattcaataaagcaaactcagtttcaatactttttttctaaatacacacacacacacacacacacasacacacacacacatatttatattacaaaggacagggaattgcaattaatatgctatagatccaatctagaatgtccctcttaatctgtatttctctttgatttccattttattccttacatacacggtatagtaaagacaaaagtactaatcatagcaaataaaggggaagccgtgcagttggaaacagccatgcctggtgcaaatgctgccattgtttaattgttgatgatgctgcataagaatccttaaggtagaagcaatcttgaccttttttatttttgcaggcccctgccagtgcccttctccagactatattcttaaaaattaaagtgctttggtttgtagagttgactgtatgtatctccaaaatgaatatgcagcagtgattttttttttcctccctgatctctttcctgctttggtaattctgtgagggtataatcatattggggctgtccttggcaggttaggtgacatacaagaacatgcggttccaca

SEQ ID NO: 483854 - DNA, 655 bp, Homo sapiens
tttgtggagaaaaacagcgctttgagaagttgatggaacatttcaggaatgaagacaataacatagattttatggtgagttatttcagtattcaataaagcaaactcagtttcaatactttttttctaaatacacacacacacacacacacacacacacacacacacatatttatattacaaaggacagggaattgcaattaatatgctatagatccaatctagaatgtccctcttaatctgtatttctctttgatttccattttattccttacatacacggtatagtaaagacaaaagtactaatcatagcaaataaaggggaagccgtgcagttggaaacagccatgcctggtgcaaatgctgccattgtttaattgttgatgatgctgcataagaatccttaagktagaagcaatcttgaccttttttatttttgcaggcccctgccagtgcccttctccagactatattcttaaaaattaaagtgctttggtttgtagagttgactgtatgtatctccaaaatgaatatgcagcagtgattttttttttcctccctgatctctttcctgctttggtaattctgtgagggtataatcatattggggctgtccttggcaggttaggtgacatacaagaacatgcggttccaca

SEQ ID NO: 483855 - DNA, 610 bp, Homo sapiens
atttaacttgttgacttaataagtttttgagagactggaagaaggggagaaagactgtattcaataatcaagttggaggccagacgtggtggctcacacctataatccctaccgtttgggaggccaaggcaagcagatggcttgagcccaggagttcaagaccagccttggcaacatggcaaaaccctgtctctaggggaaaaaaaaaaaatacaaaaattagccgagcatggtggcacgtgcctgtagtcccacctccttgggaggctgaggtggaaagatcacttgagcctgggaatgtcaaggctgcagtgagccataattgcaccactgcactccagggtgacagcgagaccctgtctcaaaaaaaaaaaaaaaaaraaaaagaaaatttgattgccttttacttaaaaacattgaaattattgatatttgtggagtaaaaagaggctattttcattaagtaggcatagcattttgaataattgttttatgtagcattcttcattttagattgctttattatgtaaaattgtgggtaatattaaaatatttttgatatgttatgaagcctattttctgtatgtatttctttgatctcctcagtatt

SEQ ID NO: 483856 - DNA, 610 bp, Homo sapiens
atttaacttgttgacttaataagtttttgagagactggaagaaggggagaaagactgtattcaataatcaagttggaggccagacgtggtggctcacacctataatccctaccgtttgggaggccaaggcaagcagatggcttgagcccaggagttcaagaccagccttggcaacatggcaaaaccctgtctctaggggaaaaaaaaaaaatacaaaaattagccgagcatggtggcacgtgcctgtagtcccacctccttgggaggctgaggtggaaagatcacttgagcctgggaatgtcaaggctgcagtgagccataattgcaccactgcactccagggtgacagcgagaccctgtctcaaaaaaaaaaaaaaaaagaaaaagaaaatttgattgccttttacttaaaaacattgaaattattgatatttgtggagtaaaaagaggctattttcattaagtaggcatagcattttgaataattgttttatrtagcattcttcattttagattgctttattatgtaaaattgtgggtaatattaaaatatttttgatatgttatgaagcctattttctgtatgtatttctttgatctcctcagtatt

SEQ ID NO: 483857 - DNA, 399 bp, Homo sapiens
gtgaaatggaactaatttgctatgggaaccctgaatatatgatatagtccttgcatgatcatttacataaatctgcaaaatgaggcatccatattctttgaatgcctttagattccagttactgctttgaaagttgcccgtttttatctttacctgttttctttccttactcttatatttctgtagaagttcactttcaactccaattgaaaatggccagttctctccaatacagaaagttccaagtcaagaaggggtagggactgagataatagttagaaaaatgggggctcttttttcatgtcatccatacccttattgctgaaatgrctttgctaagctaacctgataccatttgataaagtggggaaggtagccagccctgaaagactgatctca

SEQ ID NO: 483858 - DNA, 653 bp, Homo sapiens
agtccatgcactgaaaaagctcatacagtctaaaataggagatgaaacaggcaaaaatgattacagatctaacgtaggagccactcacttccaagctgcaaaaggctataggaatgaaaagtacttaacttctgggtcacttactgaagtaaaaagggttaattttgtttttctgtaaataacattggaatatctaggactacttatttcatggatcttcttaatgtcagagtggcctctttctttaaaggtgccacttatgaaagttcagagggaaacatagcttttgatggcaatggcacttatgtacttgggtagtggagacagtggaagtgtaggctggatacttgacctgggcctcagaactcatgctccagagacagactaacgatggaaggctctccaaactggagtaataattaaagtcatgaggcagacaaactctcagaaggagacagyataaagtaagaaaaccaagagccaaccctggagctttgggaaatactaattcttgcataagatgtgtagccagggcagagcgtgacccatgtggacatcacattcagagccctgaagtcattaacaccagtcttactaactgctctctggctgagtatgaggagcactgcacaagcattactgcaccagtgact

SEQ ID NO: 483859 - DNA, 540 bp, Homo sapiens
agaaaagcaagtcccagaagatatgtttcaccatgtttatggtgctcagaaataaacaaaagaaaacgtgtttttagacttacgtactactgcattagggttgccatgacaaagtaccacatacgaggtggcttaaaaaacagaaatctatcatcccacagttctggaggccagaagtctgaggatcaaggtgttgtcagggctgcttccttctgaggttgaggggaggatttggtccaagtctctctcatcggcttgtgatggccatctcaacgttcccatgatgctctccctataatgcctgtgtctccaaatttccccttttgataaggactccagtcatatcagattgggatccacactaatgaccccactttaacttgattagttttataaagcccctatctctgagtgaggtcacattctgagatacaggaagtaagaatgtggggaggaacaaaattcaacacacaacaaatacatatgtgataaaaccaytgaaaagggcaagtagataataaacatacaattcagagtcca

SEQ ID NO: 483860 - DNA, 573 bp, Homo sapiens
ctgcctgcttgcccttatttgagaagccctaaaaattctttcttctgggcttcagacatcctccagacaccatccaccagggttcatatatttttctaccttttgaggtcttagggaaaaaaaaatacatttcttccttcaatcaccataataaccaccactatcctctacccttctacctcttgcttacactgccagattaatttgtataagacatatgttcaacagaggagggagaaatctattcagtttatcccctgtctattcccgtgaactgtctagataaattctacatggaagcttcggtccattcctatcatcaaagctgctccccatcactgggagaaggggtgaaactggctataattgttccagttaattttagctgaaacctttttaaaaaacggaaagtcagacttcctgttgacaatatgtcattccaatttctctatttaatcatgaggaaaaccaatgttgtaagtggttaagggaggttgtattagtctgttctcatgctactaaygaagacataccagagactgggtaatttataaaggaaagaggtttaatgga

SEQ ID NO: 483861 - DNA, 679 bp, Homo sapiens
atctaaatgatatgttgagcctgaaaaaataatttcaatttgtgtggaagaaaacttcatcattatggccaatgttttgtgaaagaaaagctatatatgccatgtgctacttgatattatagcatattataaagacacaaaaattaaaacaatctttattagcagcaaattgactatgaatggaaatactagaaaactcagaaaagcccccaatataataatttataacatgacaaaggtagtatttgaaagaaatgggagagagaatgctttattatgactgtgacaatggtgatgacaatgacaatgatgatgctgtaacatggtaccgggctggtgtcatcttctcacatcttcccacctgccccatataggtggcctcctgcctcattttaggatgtagaggtgtatrcatccattgtatggtttctagtgttgaggcctcaattgaaacagaggtcaaaatagtaccgattagccacgttttatagaaataggtgtcactggggctttttggagcagcatcagattcaagagacccaggagtgcatgagtgctgactgaccatcgctcccgtgcacagccttagcaagccggactgagtgtgtgggtctgcagcggtggtgagcacggtggggaaagtgtattcaggagactgcatgcagggctttctgggcag

SEQ ID NO: 483862 - DNA, 679 bp, Homo sapiens
atctaaatgatatgttgagcctgaaaaaataatttcaatttgtgtggaagaaaacttcatcattatggccaatgttttgtgaaagaaaagctatatatgccatgtgctacttgatattatagcatattataaagacacaaaaattaaaacaatctttattagcagcaaattgactatgaatggaaatactagaaaactcagaaaagcccccaatataataatttataacatgacaaaggtagtatttgaaagaaatgggagagagaatgctttattatgactgtgacaatggtgatgacaatgacaatgatgatgctgtaacatggtaccgggctggtgtcatcttctcacatcttcccacctgccccatataggtggcctcctgcctcattttaggatgtagaggtgtatacatccattgtatggtttctagtgttgaggcctcaattgaaacagaggtcaaaatagtaccgattagccacgttttatagaaataggtgtcactggggctttttggagcagcatcagattcaagagacccaggagtgcatgagtgctgactgaccatcgctcccgtgcacagccttagcaagcyggactgagtgtgtgggtctgcagcggtggtgagcacggtggggaaagtgtattcaggagactgcatgcagggctttctgggcag

SEQ ID NO: 483863 - DNA, 574 bp, Homo sapiens
ttgccctcatcatattgcaccagggcagttgatgcaagaggagttggcagggttattgctgtaagtaattgcctaatttctgagttagaaatcttgagtttgctttcatgactaaacaaataaacatagatgttgacagcttaccagggtggattggagtgaggctgtggagatattctccttctctctaagtccagcaccatattttaccaccttccagatcacaaagaacagaaatccaaaaaagtaatatccttgcttataatgcagacaaatgaaatggcttggcctcttcccatctcgggaaasttttaaccgtgtgactgctaagggcacagatgaggaggcaggagagtgatcgaagagacacacctacattaggggcctcataacatgcagtgaccagttcattagtgaaacttcctccaatgagtttcctagaattttaccaattagattagtattcattctcactgcagagcatgggatagaattttacagggaaaaggtgctctctgtatgagaaaaccactctattgtaattctgtgtaaatatgtgtataaaacatttgga

SEQ ID NO: 483864 - DNA, 574 bp, Homo sapiens
ttgccctcatcatattgcaccagggcagttgatgcaagaggagttggcagggttattgctgtaagtaattgcctaatttctgagttagaaatcttgagtttgctttcatgactaaacaaataaacatagatgttgacagcttaccagggtggattggagtgaggctgtggagatattctccttctctctaagtccagcaccatattttaccaccttccagatcacaaagaacagaaatccaaaaaagtaatatccttgcttataatgcagacaaatgaaatggcttggcctcttcccatctcgggaaacttytaaccgtgtgactgctaagggcacagatgaggaggcaggagagtgatcgaagagacacacctacattaggggcctcataacatgcagtgaccagttcattagtgaaacttcctccaatgagtttcctagaattttaccaattagattagtattcattctcactgcagagcatgggatagaattttacagggaaaaggtgctctctgtatgagaaaaccactctattgtaattctgtgtaaatatgtgtataaaacatttgga

SEQ ID NO: 483865 - DNA, 589 bp, Homo sapiens
tttgccctcatcatattgcaccagggcagttgatgcaagaggagttggcagggttattgctgtaagtaattgcctaatttctgagttagaaatcttgagtttgctttcatgactaaacaaataaacatagatgttgacagcttaccagggtggattggagtgaggctgtggagatattctccttctctctaagtccagcaccatattttaccaccttccagatcacaaagaacagaaatccaaaaaagtaatatccttgcttataatgcagacaaatgaaatggcttggcctcttcccatctcgggaaacttttaaccgtgtgactgctaagggcacagatgaggaggcaggagagtgatygaagagacacacctacattaggggcctcataacatgcagtgaccagttcattagtgaaacttcctccaatgagtttcctagaattttaccaattagattagtattcattctcactgcagagcatgggatagaattttacagggaaaaggtgctctctgtatgagaaaaccactctattgtaattctgtgtaaatatgtgtataaaacatttggaaagacgttcccaac

SEQ ID NO: 483866 - DNA, 577 bp, Homo sapiens
actcttagctcctagaggccatatgcatgaagagcctcatgaccccatccatctttaaagccagcaacagaaaatttcttttgtatcaaatcatcttcatactttgaatctctggattgtcctgtttctgacctctagacccagatttaaagggctcatgragctgggtcaagcccacttggataatttatctattttaaggtcaactgatttggcgccttaattacatctgcaaaatcattttacagcagtaccaagattagtgtttgattgaataactgggtgtatgtacaccaggttttgggctcttggaggccctcttagaattctgcctgccatagacgtgtgcttgaaaagcctacattttatatatataccgtgttcagtgtttcataaatgtctatttgatcaaacttactgtgacctcaaatcttctatgtccttacaaattgcacaggttttaatgtgtctgaaacaatgtttatattaatatcttgacattcatgaaagtagtgtagtcaaatcagtgaaatttaagacagagaaattagtgccatttaagacacttgcattttat

SEQ ID NO: 483867 - DNA, 574 bp, Homo sapiens
accctttgctagcacaccagtcttaagagggtcagagtctggtagctctggtcttctcagagactgctttaacagaaatacctcatgacctgggcagggcagagtgaactgcagcatttctctgaaggaaagagaaggggccccagagctccagtatcatatctaatagaaaaatgttctgggtgtgacgctgtgtaggaggacttgtttctgtgagggagccttatgaaaagacacacagactaaacgagcaaacaaaaaagtggcagacatgaatgtacttcctgccacattttacacaacatggaggtacttcctgccacattttacmcagagatgaaagttgattttgagaacacaaagatattacagtaaatactttcatctctatagtaacaagagtgagaaaaatcattagggttatgtttgtgtgtgtgtgtgtgtgtgtgtgtgtgtgtgtgtgtgtgtggtatctggctactgtactttaacaataattcctcttgacattatacaaggtcagcaagtcacctcaagaccaccctgctcgagggtttgctttccacacagggct

SEQ ID NO: 483868 - DNA, 633 bp, Homo sapiens
ccctccccacttcatacacacctttctacatccatgttaaaaagccacctgtgaatgtatgtgcatgtgcgcatgtgtgccatttccttattttttttcatttggaatattatgtttaaacttgtcatttaaagcttttgctaaagctatttattrtacccactatccatctggaaaaatgaagttacagtagaccaattgataaacctgagaaaaatagagagaggaggatgttgtgaataatagtaataacattaacaggaccataataaactgttaatttcctgagctaattttaaaagcctatgattatgagtatgaaaactcacttctctctctattgaattgagaaaagtctgtggattatggcaatcatatatgtctgacccttcatttgtatttttaagctttgtttggcaagcatctcttagtatcattttattttttttactttacttagcaaaataaataccttcatgatgaggtggcatgaaaatcccttactataaagaaaaccaaccttaaatactatcctttttgaaatggaactgacctccatggaatagaaagaaggaaggcaataagaaaacagaaatgcctccctgaaacagaacccagaatctaaaaccagtc

SEQ ID NO: 483869 - DNA, 362 bp, Homo sapiens
tgggagcctcagttctccactgtggacctctccacaggctgcttgggcttcttcccagcatggtggctggcttccaagagtgaacatcccaagtgaamaaagcaaaagacaaagatatttttattacttagatttgctagtcacataatattattcccactgttctttattgatcaaagcagtcacaagatcctgccaaggtccaaggaaaggagatataaatcccatcacaaaatgaaagaattgtcaaaatcacataataagagaaacatgtgaatgggagatattattgtggactctatgaaaactcaatttgtcagagttttatttcatccttccaatatgtttaccttttatttccc

SEQ ID NO: 483870 - DNA, 671 bp, Homo sapiens
gctttcacatacccagaatacttttgcactcaaattttgaaaaatagaacaaatataaagaagaaaacaatctctcataaaaccaccaccttgaaacagttattttcacattctgcaacatttctgaccatccatgctttttttttttttttttttttttttttgaagacagagtctcactgtcactcaatcctccctccttggcctctcaaggtgctaggatgacaggcatgagccactgtacttggtcacctggtacacactttaaactaacagctgagatgagagtatatatcatattggaatagtgcttacttcaaatatgtaaatttttcctctgtgatgaaatatttttcataaccaccattttaataattgtatggtactttgtaagtggaaaatggtacaagtgaaacactcttattgttagatatttagggtgtttctaattcctcaccattagaaatgcaatattgccaatactttcctacacttttktttgtttgtttgaatttccaatagttttaggaatgaaaaccatagaagcaacaatagtaggtcaaagagtgtaaaagttcttgatgtatagtgccaaaattatcagagaggtcatataaatgtacatttctcctagaagttcaaagaagtactcatccttccacaccattgcc

SEQ ID NO: 483871 - DNA, 509 bp, Homo sapiens
gcacgtacagcccaccagagcggagaacaggccttctccacggctgtcagtctcacctctagatgtggtacttccagtaggacttcttttggcagacagcggacgactaaaagtaaagatgtatattatttattacatgtactgtacctgaattaatacaaatacaaactacaacaggaaattattacaatgaagaattatttcagagttttcagaattttttgggcaatgtgaaccacaatgttgtaaactccctgattcccaacgaagctttagcaatctattttggactgcctttcaaatacagagagtgaaatagtaactacagacagaaattagaaacacagagcagagatgrtaatatattaagtcacagagtttgaatgacctccatttccaaacttgtctccaggttcacacttacatcctctgagaagactctgaagcactggtgtgtatagttcacactactccataattcacttatgttattctaaaactgtattcta

SEQ ID NO: 483872 - DNA, 490 bp, Homo sapiens
gaagacagatactggggaaccactagaagctctgccacatgaatttattcagcattgaaatttctatttagtagtacctcctccaggaagacttccctgattactcttccctccccagccccatgggtctcttctctcctcctctcccctttcccacactgttctgtctagcactggtagcactggatttaatttaattraatctaattgtccaccttttccaagggactccttacctgcctcctgtcatccaacacagatgaccccaaaatccattttaaaaacctcagagcagaaacaggagatcaaacgaatgagtattaaaagcagataatgtaaggtgaagacaggggaggtcagagtcaaaactgcaggggtgggtgctggaagaaggaagagagccagtgctgacctgtgtccacgccatgtggggcatgggataggggccgacagggaacagcttcttcactggctcccactgcccacctcc

SEQ ID NO: 483873 - DNA, 541 bp, Homo sapiens
tgcagaggctgcctggagcaggcagagctcacaggtgcacattcccgggtgagcccaggtagggcttcagggctggcctgcagccttgcagatgagctgtgcaaggttactgcagaggggcaccacctcccttctgttcccgtgacttatttgactgtctttatgacagtgccactctgtcatataattactggagctttgtagccagtcttaaaatcaggagtgttagttctctttgtccttttttttcgaagttgttgtagatattctaagtcttttgcatttacatatacattttatgatcattttgttatgatgtacaaaaaaatctgcttgagtgggattatgttgaatctgtagatgaatttggggagaactgacatcctaatcctattgagtcttctcacccaagaacatgatataagcctcctttaatttctctcaacagtgttttgtagtttccaaatctttcatcaggtttattccataatttcatattttctgaygctactttcatggtatttaaaggattttaacgtat

SEQ ID NO: 483874 - DNA, 593 bp, Homo sapiens
aattctctggcctcagtctcccaagtagctgggattataggtgcctaccaccgcaatggctaatttttgtatttttagtagagatggggtttcatcacgttggccaggctggtcttgaactcctgacctcaggtgatctgttcacctcagcctcccaaataaaagttatatttgtaaaatttattagtgatgcaaatgcatwaaatctaagtagctcagcagtgttcccataccatcatgtggattcaaagacacccttaggagtacaatgcccattccagtacttcctattgcatctgctttcattattagtagtatcattaatctgcagtttatggccagaaatattttaaggtacttgtcgattttatgaggaaagtttaaacatagttcaaatcatctgtaaattcatttaactgggcatacagactctgccaaacagatccagaccacggaaccccacactgccttgagaactttgccctgcagacaggccaggtaagggtgcatatgtcaatttttctagaaattaccagtaaatatcttccagcccgtgtgcacactctgggttcgtgggcccagcacactgcagc

SEQ ID NO: 483875 - DNA, 593 bp, Homo sapiens
aattctctggcctcagtctcccaagtagctgggattataggtgcctaccaccgcaatggctaatttttgtatttttagtagagatggggtttcatcacgttggccaggctggtcttgaactcctgacctcaggtgatctgttcacctcagcctcccaaataaaagttatatttgtaaaatttattagtgatgcaaatgcataaaatctaagtagctcagcagtgttcccataccatcatgtggattcaaagacacccttaggagtacaatgcccattccagtacttcctattgcatctgctttcattattagtagtatcattaatctgcagtttatggccagaaatattttaaggtacttgtcgattttatgaggaaagtttaaacatagttcaaatcatctgtaaattcatttaactgggcatacagactctgccaaacagatccagaccacggaaccccacactgccttgagaactttgccctgcagacaggccaggtaagggtgcatatgtcaatttttctagaaattaccagtaaatatcttccagcccgtgtgcacactctgggttcrtgggcccagcacactgcagc

SEQ ID NO: 483876 - DNA, 577 bp, Homo sapiens
aactctcttctctcctcccatcagcctgcatggcctggcccaccagcatctctgcagccacatccagcgtccgctgtggccacaggtctctgtacctctccctgtggtgcctccactcttcaagcactcacggggcagcccctgcctagaatggcttctgtcctccttttcccatctgaagcctatctgatttgcagggactcttgagccacctccccttggtgccctcccagagcccctacccctcccactcatctctccagtgcaaatgaggatggcrggccacagccacaggctccagcatgcctggcacatgcagtgcagaagcttgcctgctcagagatggcacatcagagatgctcagcccctacagaatgagtgagccagagaatggaccacctcgtgccaggccccagcaacaggggaggaaggcaggatttcctgttggtaggtaattgaggatggaggtgacaaagttagtggtgggtgaaactggcatccagcctttgttgcaacgaggttgcagctttccaggaaaccctgaggagcagggaggactcagcatcactgccccgtg

SEQ ID NO: 483877 - DNA, 577 bp, Homo sapiens
aactctcttctctcctcccatcagcctgcatggcctggcccaccagcatctctgcagccacatccagcgtccgctgtggccacaggtctctgtacctctccctgtggtgcctccactcttcaagcactcacggggcagcccctgcctagaatggcttctgtcctccttttcccatctgaagcctatctgatttgcagggactcttgagccacctccccttggtgccctcccagagcccctacccctcccactcatctctccagtgcaaatgaggatggcgggccacagccacaggctccagcatgcctggcacatgcagtgcagaagcttgcctgctcagagatggcacatcagagatgctcagcccctacagaatgagtgagccagagaatggaccacctcgtgccaggccccagcaacaggggaggaaggcaggatttcctgttggtagrtaattgaggatggaggtgacaaagttagtggtgggtgaaactggcatccagcctttgttgcaacgaggttgcagctttccaggaaaccctgaggagcagggaggactcagcatcactgccccgtg

SEQ ID NO: 483878 - DNA, 598 bp, Homo sapiens
cagcattttgtttgctttgtcaacagctatatcctcagtgcctacagtgtccccagcagggagctctgctgagcatgttgatgcagcgacacagccagagctccaggcagagtccccatgggtggtggtgtgcactcggcggcacctgtgaggtcacctatgatggcagccatgcagtccagactgtgggagctccacggcccagccccgcacacagccagtaatggcagccctagctccttaccacccaccatgcaccttttagattcaagcatgggctcagkttccttggcctcaatgttctcatctattaaatgggatgatgacacaccttcctcagtaatagtaatgcagatggacagatctccaaattggatgggacagcgggaccagcacacctctgaccccaagtgtcactgccctgtggggtttctcttttggatcctgcgtgtgcacttccctgagccctggaccgcttagtgctctggttcacaagtatccccgatgtctccattcctgaattcagcggaggcagggtgggatgtgcaaaatcagcttcctgcaggcacttctctgacctcatatgaccttcccagca

SEQ ID NO: 483879 - DNA, 489 bp, Homo sapiens
tgtgacaagagggaccttttagctcmctggtccagagtcagagggtcctgactggaatgccgctggacggggcagccactgggtgatgcaggcagacaggccttcctgtgccagtggttaaatgtccttctatggtcagccccgacccatggactctgctcctatagcctgcccaggagcagcttctgaggattcaaagcatcccagacgcatttattctagaaagggtggagaagagctaaaggggcaggtctggggtagggtgggcccaggcacgggagccctgagcagccccaaggaatcaggaggcagggagggcgtggaactgggctccagaccaggcttgtcagggctcggctcccagggcgccttctccagccttgcaacctgctgctatggtgctcctgctccagttcctttgacaaccacttattgacctcccactgggccctaggtgagcctagtcattgagggagatggagccggggt

SEQ ID NO: 483880 - DNA, 492 bp, Homo sapiens
tcccaccctggcaaggagggctctccaagaagccatgagcacactcccaccacccaatccccacaatatacaagttggcaaaacaaggcaaggaggctccaatagaaagggacattcaccagctcctgcccccatctgaaactgtccccgcctttcctctctgaatttgggccgtcacttctcacatgcctgacatttgacaggcttgtctccccaccccagtctcagagcaccacccagcccagcgtctttcagggagtcagtccagtgtggccacactacggagcagcatgtagacggtgcatgctgggcaaggcagggaggggtggccagggcttggcactcccctgtgctcacagagtgacactcagtcccccasccttcccttaatgctagggtgagtgctctccctgagcaggaagcacagaacagctcaggtgtgggacgtggcagggctcagcacacaccctgtgcagagggaatgcaaattgt

SEQ ID NO: 483881 - DNA, 563 bp, Homo sapiens
ttactcagaattgctagatctactgctctcagatttaagctcaaactcctccacccrgtatctggcattcaggtttttataagctgatacctctcctgcttataaatggaatggaaagggaatgaatgagtagagtatggaatggaatggaaagggaatgaatgagtagagtattggcagacaaatttcagagcagtatgaagagttttctaagtattaaaattattcttcaatggcatggattttcttgggagctagtgagcttcctatgaacctcagtgttcaagaacaggctagacaatacttaacaataaatattagaaagagagcctccattatggtggtggaagctggttgagatgagttcagactccttacacctctgagtgctaacacccagtatccttcctgtcttaattggcttgggctgctataacaactaggtggcttgaacaatagaaatttatttctcaccattctagaggctggaaaatctaagttcagagtgccaacattcctgggttccagtgagggtcctcttctgggttgcagactgctgactt

SEQ ID NO: 483882 - DNA, 563 bp, Homo sapiens
ttactcagaattgctagatctactgctctcagatttaagctcaaactcctccacccagtatctggcattcaggtttttataagctgatacctctcctgcttataaatggaatggaaagggaatgaatgagtagagtatggaatggaatggaaagggaatgaatgagtagagtattggcagacaaatttcagagcagtatgaagagttttctaagtattaaaattattcttcaatggcatggattttcttgggagctagtgagcttcctatgaacctcagtgttcaagaacaggctagacaatacttaacaataaatattagaaagagagcctccattatggtggtggaagctggttgagatgagttcagactccttacacctctgagtgctaacacccagtatccttcctgtcttaattggcttgggctgctataacaactaggtggcttgaacaatagaaatttatttctcaccrttctagaggctggaaaatctaagttcagagtgccaacattcctgggttccagtgagggtcctcttctgggttgcagactgctgactt

SEQ ID NO: 483883 - DNA, 518 bp, Homo sapiens
tctccatggaatccccaggcatgcacttcaaaggcaattagcattgctgatcaagcaaacaacttgtaccttactatcttttataggagtatttaaaactttttaacaaaacacatgccttcttcatgtcactgctatgctggtagctcttattttaaatgtattatgacttctaaatgcttttctgccatgcttacatagagccaacccagctacatctcatatttggcaagtttaatgagtttcctctcctatctctctcytccatcattaacattgttcttgagatgttcaagcaggcgtgagctcagcccaacactcataaaccttgtcctcttctgccttttgggtcatgctgacctggtcttggggtaactactctgtggtcacatcctgtttgctagttgagcacccatctaatggtgtctttgcctctatagcatttcctccagattactgatgactacagcacatgggaaagcaccaaaagccagggtacaaggcaaccagagtgtatc

SEQ ID NO: 483884 - DNA, 518 bp, Homo sapiens
tctccatggaatccccaggcatgcacttcaaaggcaattagcattgctgatcaagcaaacaacttgtaccttactatcttttataggagtatttaaaactttttaacaaaacacatgccttcttcatgtcactgctatgctggtagctcttattttaaatgtattatgacttctaaatgcttttctgccatgcttacatagagccaacccagctacatctcatatttggcaagtttaatgagtttcctctcctatctctctcttccatcattaacattgttcttgaratgttcaagcaggcgtgagctcagcccaacactcataaaccttgtcctcttctgccttttgggtcatgctgacctggtcttggggtaactactctgtggtcacatcctgtttgctagttgagcacccatctaatggtgtctttgcctctatagcatttcctccagattactgatgactacagcacatgggaaagcaccaaaagccagggtacaaggcaaccagagtgtatc

SEQ ID NO: 483885 - DNA, 518 bp, Homo sapiens
tctccatggaatccccaggcatgcacttcaaaggcaattagcattgctgatcaagcaaacaacttgtaccttactatcttttataggagtatttaaaactttttaacaaaacacatgccttcttcatgtcactgctatgctggtagctcttattttaaatgtattatgacttctaaatgcttttctgccatgcttacatagagccaacccagctacatctcatatttggcaagtttaatgagtttcctctcctatctctctcttccatcattaacattgttcttgagatgtkcaagcaggcgtgagctcagcccaacactcataaaccttgtcctcttctgccttttgggtcatgctgacctggtcttggggtaactactctgtggtcacatcctgtttgctagttgagcacccatctaatggtgtctttgcctctatagcatttcctccagattactgatgactacagcacatgggaaagcaccaaaagccagggtacaaggcaaccagagtgtatc

SEQ ID NO: 483886 - DNA, 439 bp, Homo sapiens
gctgggctcacacccatattggccgtcaaatgccagggtcctctggaccacagcaccccatctgcatcaggaggtacacagcagtggggttttgactaggaaaggaaaagcaccagtttctttcccaggagtccagatacatgtaactctgaccctagtgyggtagacaccattagtctaattcccatgcatttgatggagagctgcccttaaaacacaggcagtaggcatttacagttttgcaccactaaatgaaccacctgccgttgtcataacagaaggaataaacattcaagacaaaatgcaggtgaaagctattttcaagggtaacaaagtaagctctccaagacgggaagtgttcaagcatcacttggcccagacgtgatagagggaattcagatatctaggtggttcaactagatcaatgctttccaaatgt

SEQ ID NO: 483887 - DNA, 498 bp, Homo sapiens
atttgggagcctgagttggagacagagccacacctggtgcttggtttgagccctggtctttgactttggccagcagaacctgaaacccttggtgatgcagggatgagcacacttcctgagcttggggtggtcagtgcaggcaagttgattgagtttgcacctaatgccctttgggatcttggtcttgacctccttggacttcacaaaggccctgacagcctcagttgattcactcrtggccctgacatcattgacctgcgtcttcttctggcccttcttgtgcttcttagcaaagtgcatgttcctcaggaacttggggcccacccttttaagagatttacatctttgacatagggttttcttgatgccatttctgttctagttgtgtgtagtgtgattcttggacttggccgtgtttacacagtagcccaaggctcccaaagcaactagtagcggtagagaaagcgtccaccctgtttctttgtgctatttcttatg

SEQ ID NO: 483888 - DNA, 498 bp, Homo sapiens
atttgggagcctgagttggagacagagccacacctggtgcttggtttgagccctggtctttgactttggccagcagaacctgaaacccttggtgatgcagggatgagcacacttcctgagcttggggtggtcagtgcaggcaagttgattgagtttgcacctaatgccctttgggatcttggtcttgacctccttggacttcacaaaggccctgacagcctcagttgattcactcgtggccctgacatcattgacctgcgtcttcttcyggcccttcttgtgcttcttagcaaagtgcatgttcctcaggaacttggggcccacccttttaagagatttacatctttgacatagggttttcttgatgccatttctgttctagttgtgtgtagtgtgattcttggacttggccgtgtttacacagtagcccaaggctcccaaagcaactagtagcggtagagaaagcgtccaccctgtttctttgtgctatttcttatg

SEQ ID NO: 483889 - DNA, 528 bp, Homo sapiens
tagatggtcacccggctagacagtcacctgaatggattgtcaaccagctagaccgtcacctggatggatggtcacctggatggacagtcacctggatgaatggtcacctggctagacagtcacctggatggatggtcacctggatagatggtcacccgactagacagtcacctggatggattgtcaaccagctagaccgtcacctggatggatggtcacctggatggacagtcacctggatgaatgggcacccagctggctgctctgagtacagctctcacaaaacctttgcttcccccctccaagttcacgrcctttcctccactcttccctgcccaagcacttctaattaatgtaactttgcctaagctgagatcctggggttctttcagtacctgtcccaggcagtggcagggccaggagaagggagatggctgagtataggcaaatgtctctatgccacacatatatccatcccgttttcccagctggaagtcgcaaatccttttcttcctgttttcagatctt

SEQ ID NO: 483890 - DNA, 551 bp, Homo sapiens
ctgctgggctatgaaatccatcaccatgcccatcccagggccacgctggccatggctgccggccgctaataacagtgagacagggacggtaaggcggttggctccagggaggtgccgggcaccttggacgggtgaattttgctccaagtctgacggccttgctaaactctcttggaactgcattgcaatgtcctagaatggaagtctgaggtgcttccaaacatctctcattccttctccctttcctggggtcagccccgaattgtggtgtgacagccctcctagcctcacctgaccacctctgcgtttttgctcacaggtattgcccctaaacatctcctgcaatcgaattctgtcttggtgcctgcttctcagcagacccgggcaggacttgttcccctgtagctgtgttgtgtgagaaatgatctcctcaggcyttcttttttaaactggaaattaaaaaataaatttccaattctttgtaattcttctgtattaaaatataacatgaataccaataagtgcacttctgaagtgtacagctcattgta

SEQ ID NO: 483891 - DNA, 495 bp, Homo sapiens
gtttcagtctcacatgccctatggtcaggagtatgcttttgcttggaaagcactcggatattaggtgtaaggaatgaggaatgagaaacattggctttacacaggagaatggaggaagcctgcctgataaacagtgttttcaaagcatcagcgcagaggtcgtgcaactccaggccgggggcttcccccgacttgccagcgcaccagtgtctctgaaataagactgcactgcagaaaacctcactccagcaatgcccaggagtccaggctttgggggctaccaacaggggtcactgtctggggccctctacactgggcacatcacatgagttttgctggtcctggtctctccatctgcagggcagaaaggcaccagctcccagtgccctggttcctgggcagatcctgcacccactggctctggcaccacttcataaacgacagacccatttccgccgtgaagaacaatgmacattgatgcgagtgaacacaggg

SEQ ID NO: 483892 - DNA, 492 bp, Homo sapiens
tctttctttgcttttacgagacagggtctcgctctgttgcccaggctggagtgcagtggtgtgatcatagttcactgmagcctcaaactcctgggctcaagcaatcctcccacctccctcctgagtaactgagactacaggtgtgcacaaccacacctggctactttaaagtggagatgggggtctcactatgttgcccaggctggtctccaactcttggcctcaagtgatcttcttgcctcagcctcctggtttcctgacctttctaataattttaactatatccctttctcttttggattctgttgtcttcagccatgaaccttgacccatacaggcccatccccttgctgctcagtgctctcaatgacatttcacaatgatgtgtcttgctgtagggattccatccatttttctgggcacatgcaggctctttcaatctggaaatgtacatctttcagttctgagtaattttcttagatttttttttat

SEQ ID NO: 483893 - DNA, 530 bp, Homo sapiens
actaaagcatttactcaaaaaatatgggtgattggccgggcacggtggctcatgcctgtaatcccagcactttgggaggccgaggcgggcagaacacctgaggtctagagttcaagaccagcctgaccaacatggagaaaccccgtctctactaaaaatacaaaattagccggacgtggtggcgcatgcctgtaatcccagctacccaggaagctraggcagaattgcttgaacccaggaggcaggggttgcggtgagctgagatcatgccattgcactccagcctgggcaataagagcaaaactccgtccgtctcaaaaaaataaataaataaataaatgggtgattgacttctaagtgccaagcatttcccaagggctgggcacaaaagtttctatctatcctttggaacttgagagtttagttggaaaaataggccttaatcaaagaatcacagaaaaaacaaatttttcaggtgcaataagggctatcaattagagatacacagggtattaagggtatgagaggtc

SEQ ID NO: 483894 - DNA, 527 bp, Homo sapiens
gccagtagagttaggaccagaatccctggcctgtctctcctccttggccaggccagtgacaggctgggcagcacacyggactaagcctggctctgaggggaggccaggcctccatgacgggggagaaggccggggggaggcaggggcacctgggtgcccacagagtccaagctccaggttcagccagcctgagagtgcgaggctgggtgggccatcaggatcgatcccgaggggaaggccttacctgggttgcccaggagcatggctgcaaggagcaggagggcccaggtagccatggtggggcagccgctgagatgcctttcacaccctgttttatgggcagggagcctgcagcttaatctttctcaggtcctgccctttttgtatgtcatctcccccgtgtcactgggtttaccacagatacaaataccagtgtgtgaagaagcagctcagggcagtggtagcccacagggtccatgccacaccccactcccacacaactagaatgtggggttgctggaggccag

SEQ ID NO: 483895 - DNA, 527 bp, Homo sapiens
gccagtagagttaggaccagaatccctggcctgtctctcctccttggccaggccagtgacaggctgggcagcacactggactaagcctggctctgaggggaggccaggcctccatgacgggggagaaggccggggggaggcaggggcacctgggtgcccacagagtccaagctccaggttcagccagcctgagagtgcgaggctgggtgggccatcaggatcgatcccgaggggaaggccttacctgggttgcccaggagcatggctgcaaggagcaggagggcccaggtagccatggtggggcagccgctgagatgcctttcacaccctgttttatgggcagggagcctgcagcttaatctttctcaggtcctgccctttttgtatgtcatctcccccgtgtcactgggtttaccacagatacaaataccagtgtgtgaagaagcagstcagggcagtggtagcccacagggtccatgccacaccccactcccacacaactagaatgtggggttgctggaggccag

SEQ ID NO: 483896 - DNA, 527 bp, Homo sapiens
gccagtagagttaggaccagaatccctggcctgtctctcctccttggccaggccagtgacaggctgggcagcacactggactaagcctggctctgaggggaggccaggcctccatgacgggggagaaggccggggggaggcaggggcacctgggtgcccacagagtccaagctccaggttcagccagcctgagagtgcgaggctgggtgggccatcaggatcgatcccgaggggaaggccttacctgggttgcccaggagcatggctgcaaggagcaggagggcccaggtagccatggtggggcagccgctgagatgcctttcacaccctgttttatgggcagggagcctgcagcttaatctttctcaggtcctgccctttttgtatgtcatctcccccgtgtcactgggtttaccacagatacaaataccagtgtgtgaagaagcagctcagggcagtggtagcccacagggtccatgccacamcccactcccacacaactagaatgtggggttgctggaggccag

SEQ ID NO: 483897 - DNA, 591 bp, Homo sapiens
ggatacctcctgagggttggagacagcttcccccaggatatatcaaagctgcctccttactcccccatctcccagcttgggaaagtgtggagaattgagcagatggactttagctagaaatgtttgagaaatactgattagagcttgggcttcagacacaggtggtcgtggagtaaaatctggtctccatctctccctggctgtgtgaccttaagcaaataacttgacctctctgagcttcagtttcttcatctgtgaaggggagatagcaatcctgatttttgagattggaatgagaattgaaggaggtcaccgtgtgtgtggacctgaccctggggaaatgtcctcagactgaggctattcaaggtcatcagaccctcagtcaaactccaatcccagcccagcacaggcccctggggtcgggagctggggccatatcctcccccacaatcctgggccctgagatctgggctagggaacccttcaggcaggggagcatgaggcctttccctccatggctgcccaggctgtgcctggagagaacagatctcggctgtaggaaayggggccagaaaggggcctcggtgattg

SEQ ID NO: 483898 - DNA, 647 bp, Homo sapiens
ttggaaatacagcacaatactttattagttcctatcattaaaaggtccatgaatagaaaatggcttacttgcatttggaccagcccaccaaaaaatcaacattggccaaatgcagatgaaaggttgattctggagtttaaatgcagagtttattaagtaacatgtttattaaattataacagggactcaaaagtgatataaaaactcattgaactgataactagtaagactattttaattattgttaagcttacttttcaatccccctcctttccttcctctttttctctctcactcattaacgtcattgacttttaaagcytaagtcaagattttctctagacttgaataggtctttgccagtctacaatttctgttgtctgcatacacatttcttccagatacattgtctggcaatatgggtaatggtgaaaggaaaagatgaatgggtagaagaatataggaatctatggtattctcttaaatttacatgagatttcaatgagtcttttggggagcagtaaaagatttctgtatttgacattattttggtaacatggaaatgtcactgacagaaaattttaactcttatgtttgttttttatttatgtaattagcatttgcctgtctactatatgcagcagtca

SEQ ID NO: 483899 - DNA, 591 bp, Homo sapiens
agctgggaaaactgctgttcctaatacatagaagggatgtttgcccaagtcaggggcagactaaatgggtgcataagaccgtctttctctataattctttgaaaggagcttaaaaagatgtacattagaaaaagaataggcaaccgtaggtcatctatgctagaatctagaaaaattagaaatcatgatagagaaacaaccactgccttactcttgaatgtcattttactgggggaaaagctgccatttaagaagatatttatatatctataccattacttgaaagattctttaggcttagaagataatgtgtgagataaaaggggggcaacagggatttataaaaaatcactctgtgtgtttgaaagagatcaaaagtgatatgttcaccaagtctgtaacataaaaaggagggaggcaccacttcatgacgctggaaccaagtggccttggtcactctrtgtcagtttctatatagcccaggaagatcatggaactcatgatttcaagaggcagcactagctggacatgcttagatgttcgaaaaggctttgggaaaattcatggctggtggattaacattgagatatt

SEQ ID NO: 483900 - DNA, 620 bp, Homo sapiens
tgctttccactctgctgcttttaataaacagattatcatgaaacaactataacccaactgtttaattgagattaactacttacagactgaagaattcagaaaaagcagagttcagaggctttgctgcagtaatgacttagcaaccttccctggccacccaacttaaactgtacctccyccatcactccttatctcctttatttttttttctccttagacttattaccatctcacttaccataaattttatttatcttatttatcttcccccacaagaatgtaagtgttaaaaggcaagactatttgtggtttgctcactgctgtactcccagcacctaagaacaatgttaccacatagaaggtgaccatttgttatataaatgaatggaaagattcacgaacaagatggtaccttgagaaataaatagagtttaggagactgaagagggtgaacaataaaatgttataggcaattaaaaccccatgagaataggcattggggcataactgacatgggagcctcagggcaaaaggacaatctaacagccatgccacatctgcaggaaggagaagaaaggctcactgaatgcaaagcttctgaaaatggacttgagtggaga

SEQ ID NO: 483901 - DNA, 510 bp, Homo sapiens
catttattcacccaacaaaccattaatgcctacagtctcattaatgtttgttgacagtacatatttgacaatattcgacaatgcaaatcagtacrtatttgacaatgcaaatcaagtcaaatattgttgaaaatgttcaatgagtttatcaaaatggggtgaatgggcactgggccaagtgctggcaaacacattctgggagtctaaaggagtgaacctaactctggccctggacagtctagaaaagttttctttaggaggtaatgcttgagttgaggcttgaaggatgagtgattgcaaaaagaaagttagaaggacatgaaccaacaagagcaaaagatatggaagtaaggattagcttggtatatgcagggttgatggtacacggagtttgaggcagtgtctgaagttaagtggggctggagcagtaggtaggtattaagttactgaggcccatgttaagccacacagcttgctttgcctcatctgggaagtcactgaaagttatca

SEQ ID NO: 483902 - DNA, 603 bp, Homo sapiens
ctgcgcgctcctcatcactggaggatgattcatgctttaccctggaacacacagtgatgtcatcaccaattagaaaatgcatctgggtagccatgaaaaatggcattagcctttaatcaatgactacgtggatccagtactctcggtgatgctcccgatctcatcgggatgagtcatttaccataagacgttaaatttatcaatgaactctcactacatccccattcatgcatctcttgcattacacgtgtgggggctgcctctcctcattcacttgcctattgatgagctaccaccactattttaagccaacaggttcctactcatgacaagcagggttaaactccctcttggcctargaagatgctgtcttctctgtctctcttctcttcctatctgagactgcatgccaagcgctaggagtccaagtttctacaagtccacactcatccatcagttccctatataaagctcgccaaatatacaactccaagcaattagggcctttctaggacttacggacaggtgccagtgaaagcaagaaagactcaccaattcttctctcaggatcccccagagggtcatcccatgagcaaggaatac

SEQ ID NO: 483903 - DNA, 368 bp, Homo sapiens
ctttcatctcctctagcctttctcctggtccagggtcttctcttttcgttcagatgatggcagtagccttggacatagtctccctgctccctgtctttcctgctttggtccttctgggttaatactgctatgtatgatctttaacacacagaacccaagctgcgctttcctagctctttgagaaaaaatccagcatcctcagcttgacttctggggtcttccacaacctgcctgtaacccagccaagcccaccacccccrccacacctgccgtagacccactccacatgaactgctgaccacctggctggctctgtgggtctttctggtgttctctctcactttgacctctttgataggcctccccct

SEQ ID NO: 483904 - DNA, 489 bp, Homo sapiens
tgttctgtgtgatctagaacacccagggcaaagggcggcacatctatgacacttgtgcttcttcaagtacttcagtgagtccaggcctcctcttttcctgctcatccattgatatctgtgtatgggaaagggggctggacagaggggggtatctgaggacttttctagttcttctgacctgctcaggctccttctatagtgaggaggctgtttaggagtcaagaaaccactgatttctacttttcaaagagagagggaaatggaaacaggcacaaggcgctggggactccatggcaaggaaaacagagggagcctcgggaccacactgatgctttctgccgatctgcytcttatccattcacctgactccaccaaattaacagtacttccaaatctcaaatacattcctgcctactcagtgctgtcagcagagtcctgaccaatgctagcccttccccacacagctagagtcctcgggctttgggagca

SEQ ID NO: 483905 - DNA, 641 bp, Homo sapiens
ccaccccagttctccccttcagaggaagtggctgtccatccatccagccttgacggacctccctgaccaagaacatgcttccctagctttttcccaaggttctgcgagagctttcttcccctgaccctgcctcagaacatttctatagctgtgggaccagtttaccctgggccaagtacatgcgacctgtagatcccctgccccagagtagggggagcgggcacttaaggatgcaggtacctggccgggcgcagtggctgacgcctgtaatcccagcactttgggaagccaagctgggtggatcacttgagcccaggaattcaagaccagcctggacaacactgaaaccccatctgtacaaaataaaaaattagccggacattgtggcacatacctgtggttccagctactcgggaggcagaggtgggagaatcggctgagtccaggaagtcaaggctgcagtgagccgtgatcacgcctctgcactccagcctgggcgacaggagtgagatactgtctcaaraaaaagaaaagaaaagaaaatgcagatacctaagcccaacccctagagagtttgttcagtaggatggcagtaggctggagtggctcagaaatctgtattttaaacaagctccctaggt

SEQ ID NO: 483906 - DNA, 496 bp, Homo sapiens
gcgccaggtttagccattccacccgaaacagtcagactcattcctgtctcgggacttgtttttccgcctgcctttctgtgggtacctaaatcctgggagcttgagggcactagagggaaaggggatgggggacgcttcttgaaagagggctgctttgtgaaaatgccccatgccaaataattccagggacaagcctttggggtcgagatgccgcccacccctcccccaacctcagccccagatcgggctttagagcccagcccagcacccaggtggactgrgttgagacagggacgagctccagctctgcagaacccaggggtgactcgccactctcaagcacagtcccaggtcgagaggtggtcggctgaagcctgaacccccctccctgtgtgtttggatgggccgtgttgctatgattaacttattaaaccccctgataattattttaatttgactcgaaaaaatactttgggcggcgttgtgatgtgtttgt

SEQ ID NO: 483907 - DNA, 531 bp, Homo sapiens
tttatcagtttcttccaaatacaactactttacaatacttactcaagatcagatgatgtgctttgctgcaattacctgtgtatagaagacaatgaaaccatcttaactcaaagggttaaaataattattttagaactattctatgtttaatacattccttacagttagatttgaattcttaaagttagatttgaattctttcttcagtctacttataagtatatcaagctttcactaaaaagtaaaaactaaagagaaaacaatctttttcagaaactttcaaatttgaatacayacatggctgtacatacataatgaaaacttttgaatccaagtttatatatttcccccaagaggagggtttgttttctttggcactgctaacaaaaacaaccagcacaattcatttattgtataaaataaattaagcacaagtaaagtatataagttgatactaagatttagtaaccagtaagttgatagttttcactgttggcaagagttaaatatgaaaacaattgcaggcactgc

SEQ ID NO: 483908 - DNA, 623 bp, Homo sapiens
cctttcaaagggttatgtgctaaccccagtctacatgctgtggacatgtatgcagggttttatatgtttaccaaataacactgttaaacccaataaatctttagaaggaccaatttgtcaccagtgctgcatttaaaaaaaaaaaaatctattattattttycagttttgaaaagaattcaggttgttataaaacctaaatgcaaatatatacagagtggaaggtgacagacccgggaattccagcagtgtaacaataaacaacaacaaatagccaaggactgggtaatgtgctcagggttaaataagagtcagtggaagtggagaggtgcatgggacagacagacatttctggggtagacttccaaggatgtaaccatgtgggaagtgaaggaagaggagccatggacactgggtgagagatgacaccagtaaccagcatagagggtgcaggagagaggacaggatggggagcagaacagcaaggaagagccgggaattggcagtgtgcaagaacgtgagtgccctttacagttagggctgccaggcctcctgaccctgggaataaagaaccgtacggtctttctgcatttgtggctgtcaagccagggaagcatctttgtt

SEQ ID NO: 483909 - DNA, 513 bp, Homo sapiens
cagagatgagctagataggattaaagtcttctgtatgctgcatagctatttattctatggatcaaacacttttttttttttgagacagtctcactctgtcgcccaggctggagtgcagtggcgcaatcttggctcactgcaacctccgcctcatgggttcaagcgattctcctgcctcagcctcccaagtagctgggatcactggggcccgccaccacacccagctaatttttgtatttttagtagagacaggtttcgccatgctggccaggctgatcttgaactcctgacctcaggtgatccacccacctcgtcctcccaaagtgctgggattacaggcatgagccaccatacctggcctgatcaaatattcttatagcacttactaaggatgtgttgtttatcaattcattgcctcttgcttccaaatccactctttattgtgctgcttgtgatactagagctggaccctgcaaacacttctctctcmccagctggcatgatgttaagctt

SEQ ID NO: 483910 - DNA, 564 bp, Homo sapiens
gtatgaccttgtgtttaagtaaaaaccgtccttagctcccagtgggatgatggtgttttgtctggaagactgacggatgttatgataataagataatggatactcacttctctcctatctaacccctatttaaaagacattacaccgtaacagtgcttgttacgcaatattatagttgyaaatgttgttatggaagattgtttcaaccaggggaaaagagactggtaataacagtacacttatacaattagtttctgaaactgttgcattgctttggggtttttttttttagcttagaaaagacatttatctttttatttccctttaaagttggctttcaaataaattcaatttcctctttctgtaacttctgaaacagattaaaccagagcatcagtttgcactttgctattgtcgtcactagttttcaccaagagcttcagagaaaagacattactaagtgctgggctgggtattattttctacttatatgtgaccaaataggatgtaacagccaggttctgagagtcgttgtgatactgaccccttcaaacaacagcccag

SEQ ID NO: 483911 - DNA, 577 bp, Homo sapiens
tgctaaggtcacgtacttgtcagcattgaactggcggaagcagaaagatcatggaggactgcatatgggagattttgataggctaggcctgggagtggaatgtgtcacttctcctatttcattaagaacagttcagccttatggtcacgcccacctaccttgaaggctaggaaatgtagcccagctctgcggttggcaagaagaggaaatgggtttcctgaagagctagctgccctctgtcatttgaaattttattaagaccattgaaggtcactttaaaagtaacacgatcactaatatgctgtgtggatcgtcaatatatttttgcctctgagggcaactttcttggtcactctgaagggcttctgatggcctagggtaggtgtttcagtggcagtgttgcacatcgttttgaaaagtgctgtgtgataggcaacttggaaggtaaggaggtgctgtgcttagaagaatggttasacaactcacaaattgaggacaggcatgtggacactacctgggaagactgtgagctaaattgcttcatggaaggtggacatggaatgaaaagtactatttc

SEQ ID NO: 483912 - DNA, 624 bp, Homo sapiens
acacggtgcacctcctgaaacccacaaagcagcagtagggaaccgtggatgacattaccagtcctccccacctaccgcctggtcactccttacaggctgcctttttcttcctaagccaaagccagctctatcattcaggttcaggaaacagaacagccagccactgagagaaaaacctaaaacattcatatataatctaaattattcttacaaccactgttcttactccctgggagctttctaaaccaattttatccagttacctgcttagctaagcaaaacggagcccaaacccctgcttccctcctcttcctcgtgaaaagggagcaggacccagctagagggaaagtgcaagtgaacactgcattaggtctccaaaccgccctgtgcaagtcaccccagaaaggccacctgaaggagggccygtcctgtctgctgggaggccctctttttctcacaaggagagtccatgccttatggataaacagagatgccttttctaggctgtgagagcaccactttggcagtgttcatggaggatatggggttttatcaggcaggaactcagcagctcccacgttcctatttcagtgagccggggagaaaggcaaggaaacccaacat

SEQ ID NO: 483913 - DNA, 493 bp, Homo sapiens
gtgaggtggcgatttgtgtccttcagtgcctcgctctgcacccgcctccgactctgctcagcgtggcctccagggctgccagcaccaaatgcctaatctcactgctctgttgatgcagcattacacttctgtacgagtttgcagtttgttcacctgttggaagcatggaaggactaaatacttggaacacactcttctgccccttgcttggaagttcagaaaactcctggtgatttataacttcatggtggatcactgctaaaatttatgacctttcctartgtgatccaggctgtgtcggccgagacagttccaaaatagcaactggacttttgttgtttgttttaatgctgagccacactgattttaagccattatttctgaagttctaagaatattggcccgttggccatccaccactgcctcacccctaccccaaaagggccaggagctggcagttggccttggaattgtctttcagcctccaaagccg

SEQ ID NO: 483914 - DNA, 393 bp, Homo sapiens
accttgaccttggcttctcctgtggatgtgaagggaaacagtgggaggcttagagcagagaagtgtcaagatkcattcatttttttcaactgttgaatgaatttcattcaatattcattcaaacaaattattggatacctattagtattcaagtgagctaggacaatgttcttgctttccaggtgctcatcaactgtctgggggggataacagttaacaaagcagttaagcaacaatctaaatgttcagcattggtagttcagctcagagtaccataggtggatggattaactgggtcagaaaagtctgggaagcattttggaagaggttgtactagctggtccaggaaggacgggtgagaagggtcatatttttctcctatttcaagtatgg

SEQ ID NO: 483915 - DNA, 579 bp, Homo sapiens
aaaagaacctcatcaaagtcagtaggaaaattcatggcattttacatgctgaagctccccctcctacccccagcacatacagcatgaccaagttgcatttataccyagatatacaaggatggttccacatatgaaaatcaatcaatgtaacatgccacattaacagaatgaaagacaaaaaacaaaaaacttcatcaatgcagaaaaagcattcttataatccaacatccttccttgataaaagctctcaacaaactaggaaaagaaggaaactatctcaacataataatggcaatatataaaaagctcacagctaacacaatacttattgatgaaagaaaaaaacttttcctctaagatcatgaaaaagacaaggatgcccactctcatcatttctattcaacatatgactgaaagttctaggtattgcaattaaaacaagaaaaacaaataaaagataaccaacttggaagagaagaagcaagattatcgctgtttgcaggttatatatgtagaaaactctaaaagcctccacacaaaaaaaattgttaaaacaacaaaatcaacactcaaaaagca

SEQ ID NO: 483916 - DNA, 530 bp, Homo sapiens
tgtataagactttctcatctccctgaccccctaagtactctttgaaggctgggctaatgttcatttcatatctgcacccctataataccttgaacaaagtaagtccttataaaattttctggaataaatgacttctctttgagaaacttttcccaacttgctatttaaagagttctaaataacagataaggtttgaatcagacatctaatttgtcttaagctaaaatattgccacaaagatcttggaagtctgatratcacagtaacattttaaatgcaaaatatctaataaaccagcaagtttctgggaaagctttggtcaaaatggttaccacttttcatgagagacctatttttgttagcaaagaatttgaatttggatgatggctatgttaaaggtagttaaatgggttcagctagataaataaaacaggttcaaattatttggatttgattttaaacttatttacaacaccagtagttaatggctgttttacttcaacaaactctctagctgttattagtttaca

SEQ ID NO: 483917 - DNA, 522 bp, Homo sapiens
gcgttaggtcagagacactatccctaactccagagtagataaatcattttaatttatgggataaattctttttaattttatcaatttagcctgtgaatgtgccctatttaaatttcaaacatagaaggaaacctaaaccttttgttcaactctatgtcagtggcagtgagctgagattgaaccttatcaaagtgatatgtttttctatttatgtagtcttctctgaagatgcggaataagttggttatgaaagttttcttgacwtccagaagttaccaaagcatgctgatatactggatgtgttctgagtaacatagtattacccttctctctaggaatccagaaaacaatacctggcttaatctttaacataaagatgtaaaacatacttctagaagtgcaagtgatgcgtccgctgccttctcccaggcaagtacaatctaccatcatccagccttggtagggcttctcccacgtttctccgaccacataggaagtcccagcagcatgatcaaaacactt

SEQ ID NO: 483918 - DNA, 342 bp, Homo sapiens
atccctgaggcagcctgtttcagcccgcggtcagtactcacgcttgctttgactgacagccaccggggactggggctgaaccatttgctgagcctgcctcttgctcttcgaggctcccgtggagggcaccgctgtccccaggcacwggacggccagcagcagcagcccgggccccggacccctaagcatgttgagacggtgggggagagacgcccgcaccgggaggcaagttgccaccaagtttgcttcccttcgcaacctgcgggaaaaatcccttctaatgcctcccgggggttgtcgcctccaagaaggtgggggccagagggtggggaaggggacggg

SEQ ID NO: 483919 - DNA, 613 bp, Homo sapiens
ctttggcttaaacaatgtttccgcagataatgaaaactttaccaaaatcactctacttcagagggagattaaaagagatattctgagctagtttcattctgtgtgtttgcatacattaatcagatttagagatgatagccttagctctgtgccccggcaaagataagaactatataatacttttttttaaacaaaaatttcacaagaattttacagtaaaattagaaatagctaaataataacctaaacatatcccttaaattaacaagtatatgaggtaagaatgcaatcaacattaattggaacttttatttttgtttaagatttttctccataggtttgttgagacttccatgtggttttggcaaaagtaatgggtatctaaaatttcctgttattgctatagtacrtcatgctgtttgaatattgttaacaactatctttatacattttagcattttataaataattttcaaatatatgtgaacaaggaatttagacaaatgcttcatttaaagctctaaaaatggtcaggaaaccccttaatcagaattttcagtttgcatagaatataattaaaaaaaaattacattccaaatatgtgacattgggt

SEQ ID NO: 483920 - DNA, 579 bp, Homo sapiens
tggttaggaccactataccctccctcttttttttttttttgttttttgttttttgtcttcctttgctttgtttaaacagtgagggttattggtaagaggagagcccgtgtcattcctcactataatgctttctctctgctttggatgtaccgataattgcagttcagggttcctggaacttctaccagtgccactctgacaggcctcaccagaggtgccacctacaacrtcatagtggaggcactgaaagaccagcagaggcataaggttcgggaagaggttgttaccgtgggcaactctggtatgtaaacacgtactatttagacacaggctcccctctgctgtacaccagagatgggcttttctgttgactgtacctttgttgccattgtctttttatctttgggatttaatgcaacacatcaacatgaaataaatgagcaactttatattaaattaatctctcccccacctcctgccatatcctgttgtcttcacaaaatgcatacgtaattgacagactctcaaatggtgatatgattatagatctggaagggatttcaaatattatttagtaca

SEQ ID NO: 483921 - DNA, 566 bp, Homo sapiens
taatgcaacacatcaacatgaaataaatgagcaactttatattaaattaatctctcccccacctcctgccatatcctgttgtcttcacaaaatgcatacgtaattgacagactctcaaatggtgatatgattatagatctggaagggatttcaaatattatttagtacaacactctgagtccttacttstgagtatctgagttgatatagggcacaggtttcctgatgtcttttcccagaccctctccatctcaccatgctgctgtcctcttgagtgattaaatactgaaacgattacctataaagaaaataccccttctgcagacatggggacagttggcttttgctcctgatataaaatgctaccaacattgtgcatttctgtctgcagagaatgttattccaatgttatttccatttttttccaatgttatttccatttttttttctgactatacaggttaaaagcttctatagaggttaaaagatcattaactcttctttgtagcacctgggaaatccttttaaatcaatagcgtgccacctggctgctcaatttgcagcag

SEQ ID NO: 483922 - DNA, 583 bp, Homo sapiens
aagcaattcttctgcctcggcctcccgagtagctgggattacaggtgcacaccaccacacccggctattttttttgcatttttattagagatggaggttcaccatgttggccaggctgatctcgaactcctggcctcaagtgatccaccagcctcagcttcccgaagtgctgagattataggagttagccaccgcacccacctaatctgtgattattaatgtactatgggaaaacaccacttcttgtctttctcctttctcctcctcctccttcttcctttcatttttccaactttttttctaaagacgtataatttttgtaatcgaatgccaaatttttaaaaatagctctctgcagtaagagtcagggtagtgattattggcggaagatgatggggtgagggtagagagatattcttttycttgatctgggtgctggtcttgtggtgtgttcactttataagaattcaaattcactgaactcagtgcttacgatggcacacacttcagtgcgccaatgaagttttttaaaggcccctcaccataacaatttgaaaagtatgagtgaccgtactgtgctcac

SEQ ID NO: 483923 - DNA, 157 bp, Homo sapiens
atgtgatcaccttacaggtaatctgagaatgggaactctccagggttcaaaagcacagttgagaagctgaagaccaacggctaagaagaggtgcagcagacrcacaaatagctgctggaagagtcaaaaaagttttttaactatgaaattcctttct

SEQ ID NO: 483924 - DNA, 592 bp, Homo sapiens
tgtaaacaactctgtgagcagaacccagacatttaaggggaaaagaaaaccagaataaagaatgtgtggtttatttgaggaaatagaccctgcatatattgataaacaaggtttgaaacacacaaaaagcgttcagagatagagcactgtcaaaagcctaacttttggaaaaaattttataggctaagggtgataaacaagatctatcttccatgccaattctaatcggttggtagtgccaactgtgggaaaggattctaaagcttcatctgcattgagctggaaagagtatcttgatcaattagtgaaatgaccttgagcaaggcaacatgcatttgcttattgctaccactgctgtgacaaatggcccaccctttagaaatttttaagtaggagagtttttaaaaatgagatcattattttaaggagattaatttgtctctgcacaggatgattgagaggaggacaagatgtttccagagacacaagttaaaaggctcttattgtcttgttaaatgacaaaatggctaaacacagcacccaaaagatggggaraaagatgacataagctagaggagcactgttctctggg

SEQ ID NO: 483925 - DNA, 269 bp, Homo sapiens
aggcatttcgtgcaaagcatggggccagctccacgaggcatgagctttgtttcatctctcctgtgcagtgctatagatcaggtcctggttcataggaattgctcaatcaaatattttggagagaaaagttaataaataaacatatcagtggctcaggtaatgtcagttccttctctaggcaagacctaatccatctaccttgttttacagatgggaarataagacccagaaaacagaaaggacatgtttaaggccatgcagcaagttag

SEQ ID NO: 483926 - DNA, 683 bp, Homo sapiens
tgtccatgcaatggggccagtcagcggggagcaggcactggtgcctcagcgcctgtatcctcgtccagtcctcccctgggacctttgggaaggggctccggagggaacaggcttcctcccgatcagtgcagcctccccagtaaccatcctggagagcctcatgctctctcccagactcagggatgctccaagccccaaaatccactgtccaagtggcccatacagccgcaaccccagcttgcacacagtttagtgatgaggaactcaccacctctgcaggaggcagctttttaacataaaatctccagatagctcagactcttggaaagttgaattggaagatgctgaaragatagcatggttgccactaaggggcctgaggtctcctggccggagttcaccaagcaagactgtcctttcatcattagcttggaaagtgacagaactggcccatcaccctgactgtcactccaaattataacagagctacagtcaaaatatcctatagccagtaccacctccttcactcaagacagctacctaggacgcatgagaatcactcactcactcactcactcactcactcactcaattaacagaatatcaatggggccactgctctgtgccagggactaagacgtggtagtgaacaatggttcattcaatgttcttttcagtttaac

SEQ ID NO: 483927 - DNA, 197 bp, Homo sapiens
gttcggttggctgccacccttgggagctagctgcctgtggagctccacatttctgtgggrcagctagaagcacctcatccctgtgtccagtgaggagccccctgagggctgtttgcctcccccagccgttgagaccgttgagatgcttctctccttgctgacttggcagcccagagatatccagggctctatttgga

SEQ ID NO: 483928 - DNA, 574 bp, Homo sapiens
agagctgtgaaaggggcagcgtcktggccttgggctgccctggaagaacagctcccggggctgccgggccttcagcctccccatggacctgccttgggacaggctttgcagcttcaaaagcaggcattctcctcttgtggggatggtgttttctgaacagccggagctcctcacagggaatcctaagaggctggtatttgacaggctgccaaaggctggccagcccgatcctgtgctttgcagacagcgaaatggaggtccagctctctgccctattcactcagcaaagcagggtcctgatcccccatgctgattagctttgcatggctcctggctgctctgaccaggagacatggcgggggtcctgagccgggatgggggtagcctgcttggtctcaccccccattcaggggcagtaggaagggctgaggccacgggtgcacctggggccaggccgacagtgatctgttgggcgggagcccggcctctccggctatagagctgcagccacggaggatttgtagcgacttgtaaaggcttaaaggagtccaggagcccggaggcggaggcagcg

SEQ ID NO: 483929 - DNA, 548 bp, Homo sapiens
accaggagaggctgcaaagagacattgtatgaaagaccaaaagcaagacatttcatttcattgttggatggatgggagtccatgagagaaaatgcttcagagagcatcttgcacggggccgagccttcagtaaatgctggtttccttaacgatcagaaggaatgggcttcattatccccattttatgccggggaaaatggaggggctaagaaaacctaagtggtgggcctgagggggcacggcttgtgagtggggagctgaagtgtctcatttctctacccttgcccacatcccaggaccatatgacttcacaacaggaaaaccaaggcccagcgagggcaagtgactgtccaaggtcacacagtcactgtcagaactcagacttgaccccagtctcctgatgccaatgctgacccctcccaatgagcctcagcctgggacgtcactctgaggcccasactccaaggggtgaaggagcccccagcaaggcctggctctgcctgctgccacctttgggagcagtacacagctttagaaggcccacggca

SEQ ID NO: 483930 - DNA, 608 bp, Homo sapiens
cctcgctccccagtgagcatcggccaggcccggagaaacggcgtcgggccatcagcgtctcaggggtgctcrgcttatggtgcacacacgtacctcactgccccagccaccccagccccttggtgttgggcttgtgcaaaggggcaaactgagatcagagaggggaagggacccagctagggtcacccagccataagtgggggtgctagaatttgaactcaggctctggttgggggacagtgagcctgcattggaccaccctgctaggaaagagagaaggagtaggagggcactctgtattgagtccatattgtggattgtgccctggatatttcctttagcactcagtgaaacgctgtgaggtggacactgacatccctgatttccacacgaggccaagaggttctataacctcctgaggtcgcacagctaataagcagcccacaggaacacagccgggatgtgagtaagcagcccatccccactcacagtctgcccgctatgcggcaaccagccggagagcctgaaccctgcccagccctgggagctgctcagcagccctgctcagggccagacggcgccgggcacccctcatgctgcgaaagggg

SEQ ID NO: 483931 - DNA, 562 bp, Homo sapiens
ggtcctagaggcagctctaggcggcaatgggctcttcggcttcctgacttctggtggtccagccactgctgcttctccttctgctggatctttcctggccgacttcactggcccttcaggctgatctgagaccttacttcctccaggcagccttccctgttgtgcgatatcaggctcttccttggtcttcagaragtgcagagaggatcctggttgtgttgcagtctgtaactgcctgtttacttacagcttccccctctaagaccttaagctccagcagggcagggcccatatctgtgttgcttgcgtctgcttctccaaaaccccatacggtgctggtgctcagcaaacacaggttgaccaaattaacttttgataaagaaacaactaactagagcaataatgctccttactgaaactattccagcctcatctgactgtgacttaagccaggccaggagaagatgacttcaatagcatgttattttggtccttataggactacttttacgaaaatgtctgttggtatggtattaatattgctcccccaaaacatctccat

SEQ ID NO: 483932 - DNA, 437 bp, Homo sapiens
ggaggccgtgacacagagccagggagaagggccacattggtgtgggtggtggcagcgaggatcgccatgggcatcagggagccccgagctgggtcctagagctcttgggcctcatattctggtatggggaggcctgggctggggaatggccttgttctgatcctctgccctccctggacgactgacctccctgccccaacccatctgtcaagaaaaggcacagagcttgataacagagaactctctcagccctaaatagagagggtgggcaccttctgaccagggggagccgagaaagacagagtcctcaccagagaaagggrcacacatgggcacaaccaccatgtgtatggcccctggagtgtgctttagagccctggcctccgtggcaggagtgtggaagccaggcctcccgtgtgcatccatcaggccactga

SEQ ID NO: 483933 - DNA, 554 bp, Homo sapiens
ctgtcggggggccgcgctctagtctccctcaaagtcacccttggtggtggtggtcctcttcccaccccaaccaccagtccccgggctgtaggaacaattccaaagtcaaccccaggggaaggctttggaggtccagttaccaactcgcttaccccaattcgggtacctgacagcgcccggggccacgagtgcactccaggcgggggcgtgccagcgcggggcaggggctctcgggtgagcrgtgtgattttggcttcctccccaaggtggtccctacctaggctcagcatttgttcccctctccaaacttactggggctggggcctgcaggggggctgggggctgcagggggcgtcagggagtagcggagggagtagggcaaggagagaggtgagtggactggtggcgtagcggggaaccaggagccaggagaagaaaagctgggagagcgccgagaccgaggagcgaggaagagaggaagagattggaatggaaaggcgagggagagaacgaggagaggcgaataggataggggaaagagagcgcagagcgcg

SEQ ID NO: 483934 - DNA, 419 bp, Homo sapiens
agttataaatgtccctgtcagagcccgggccgagaggccctgctgctggcagaggcgccagggcccacagcgcccaccctaggagcaccccccccccagccgagggcccgtcctctcagaggtcctcccccagggtccagccctcacgacctctgggctctcctgcctcctctcggagagagatgggtctagtacagccttcccctgctcacccctagcccttccaggtgcaaatcttgtggtcccagttaccgggagagctcccagagggcaaggaccattctgggtctgcacccrgcaggaacctgaagcttggtgcacagccagccactcaacgaccactgtaggggtgactgttccaactcagcagcctgcttcccacggccccacccgcccctgcctgtccaccagggcacata

SEQ ID NO: 483935 - DNA, 616 bp, Homo sapiens
tgtttgggattgcctcatatgaaatccaaatccagcccaaccccaatccctgatctccctctccaccttctcttaaaagaccgcacaaccatgctgctcrgtggaggaaaccctcctgtgtggccacagccctggagtccaccccctactcactcccgctactgccacctccactcttcatgctagaaagtgccagaaagcactaaccatgctccaggcatggctgtgagagtgcccatggcttacttcgttgaatccctcccaactagagggatattctccccattttacagatgaggaaatggggcacagagagatgaagtcgctcatcagaagccacaaagaaaggggtaacagagctggaaaacctccatgcctcagcccggtccacagccgcaatctgccagcatcctccacactcatccaccaagagtgttttgagtgtcttttgtgaagtgccagccatatggaacagtttgtcatgcccctgacacgatacccctctcatctgtggccagcctttgcctgcggttgcagcccaggccagctagggccttctcacctctgccccagacttcagagccatgtatacctggctctagtccgccgagccacg

SEQ ID NO: 483936 - DNA, 616 bp, Homo sapiens
tgtttgggattgcctcatatgaaatccaaatccagcccaaccccaatccctgatctccctctccaccttctcttaaaagaccgcacaaccatgctgctcagtggaggaaaccctcctgtgtggccacagccctggagtccaccccctactcactcccgctactgccacctccactcttcatgctagaaagtgccagaaagcactaaccatgctccaggcatggctgtgagagtgcccatggcttacttcgttgaatccctcmcaactagagggatattctccccattttacagatgaggaaatggggcacagagagatgaagtcgctcatcagaagccacaaagaaaggggtaacagagctggaaaacctccatgcctcagcccggtccacagccgcaatctgccagcatcctccacactcatccaccaagagtgttttgagtgtcttttgtgaagtgccagccatatggaacagtttgtcatgcccctgacacgatacccctctcatctgtggccagcctttgcctgcggttgcagcccaggccagctagggccttctcacctctgccccagacttcagagccatgtatacctggctctagtccgccgagccacg

SEQ ID NO: 483937 - DNA, 616 bp, Homo sapiens
tgtttgggattgcctcatatgaaatccaaatccagcccaaccccaatccctgatctccctctccaccttctcttaaaagaccgcacaaccatgctgctcagtggaggaaaccctcctgtgtggccacagccctggagtccaccccctactcactcccgctactgccacctccactcttcatgctagaaagtgccagaaagcactaaccatgctccaggcatggctgtgagagtgcccatggcttacttcgttgaatccctcccaactagagggatattctccccattttacagatgaggaaatggggcacagagagatgaagtcgctmatcagaagccacaaagaaaggggtaacagagctggaaaacctccatgcctcagcccggtccacagccgcaatctgccagcatcctccacactcatccaccaagagtgttttgagtgtcttttgtgaagtgccagccatatggaacagtttgtcatgcccctgacacgatacccctctcatctgtggccagcctttgcctgcggttgcagcccaggccagctagggccttctcacctctgccccagacttcagagccatgtatacctggctctagtccgccgagccacg

SEQ ID NO: 483938 - DNA, 327 bp, Homo sapiens
tcctaggagacacaatgccagtgaacaagcaatgggaaggtggagggttagaggcctggggttaaggcaggtaggaaaggcagataaaatctartctaacacactaagaagttaaaaacacttaacaaaacaaagaacaaccaaagcagtgtttactaaccctccctgcctttttggcatgagaaattcaaataaaaggagaggcagaattatttgctatatggagtccaaaagagaaaaaaatagttgcacagaccaggtaaataaaagaaatgcaaaaatgcaattcaggaaaccctagttttaaaagaaagagattggccaaag

SEQ ID NO: 483939 - DNA, 327 bp, Homo sapiens
tcctaggagacacaatgccagtgaacaagcaatgggaaggtggagggttagaggcctggggttaaggcaggtaggaaaggcagataaaatctagtctaacacactaagaagttaaaaacacttaacaaaacaaagaacaaccaaagcagtgtttactaaccctccctgcctttttggcatgagaaattcaaataaaaggagaggcagaattatttgctatatggagtccaaaagagaaaaaaatagttgcacagaccaggtaaataaaagaaatgcaaaaatgcaattcaggaaaccctrgttttaaaagaaagagattggccaaag

SEQ ID NO: 483940 - DNA, 582 bp, Homo sapiens
tatatcaccttatcctggtttatttttcttcaaagcactgattataactcaggcatgatgtcatgcattaagttgttgacctgctgactgtctcgcctactagaatgtaagcagggcccctgtcaaattcaccaatgtatccccagggcctggaagagtgcctggcacatggaaggtgcttgataaacttgacaaaggaatacatgaatccaccttccttgggtagctgggcgaggggaggcacaaaaggaccccagactctgccctccccagggccagagtgctggggactcaagcccagccaggaagccttgttctcaggctggcacgaggccccaccagcaggaccctcccagcccattcagtgcatgggctccccagaactggaagtgacgcagggcctggcagaggtctagaggagccctgagggaaaagtagcagttgctactctgcccattgtcccccatcgtccttcactccacacaaascctgggaaggccaaggacagcctcgggcgcaaagggtgaaagtagggggagaccaagccagtgaggctgggaggacatgggatcctgcctgcag

SEQ ID NO: 483941 - DNA, 506 bp, Homo sapiens
tgactgtctcgcctactagaatgtaagcagggcccctgtcaaattcaccaatgtatccccagggcctggaagagtgcctggcacatggaaggtgcttgataaacttgacaaaggaatacatgaatccaccttccttgggtagctgggcgaggggaggcacaaaaggaccccagactctgccctccccagggccagagtgctggggactcaagcccagccaggaagccttgttctcaggctggcacgaggccccaccagcaggaccctcccagcccattcagtgcatgggctccccagaactggaagtgacgcagggcctggcagaggtctagaggagccctgagggaaaagtagcagttgctactctgcccattgtcccccatcgtccttcactccacacaaagcctgggaaggccaaggacagcctcgggcgcaaagggtgraagtagggggagaccaagccagtgaggctgggaggacatgggatcctgcctgcagctctgcag

SEQ ID NO: 483942 - DNA, 647 bp, Homo sapiens
ctgcctggtctttatgaggctccttagattttgtgtggacaacaaaggccaggctgccacgattacccaggacactgctgcagccttgcctggcgacagctctgacctcttagcaggatatagtgctctctgctcatgccctttgggggagtgctctttgtccttaagagtccctcaggatggggaggcagcaatccacctggctgtaagctccggggcgttctgaggttgggccctgcctttagagaggatgaagggagraggctgagaaaagcagtcctaggcataggctctggggagaggctagaccccatcatgattgagagggtctccctattaccggaggagatgggcgagaggaccaaggtgtcaggaggctgttgcttgctatctgtgttgggccagtaactctcctgtgctggaccttagtctcctgatctgtaaaatgggtctgagggcagaactcctccgatcccacttggttgctgggagaatgaggcagatgtgggcatgagtcccctaggcatgtgtcccttgaaggcctgggaggctctgggtacagaatgggtagaacacaaagggtttagattgcaagtgctagaagcattttgctgaagctgctctcatccagacctacttccctggca

SEQ ID NO: 483943 - DNA, 520 bp, Homo sapiens
agtgctcagggtgaggacgaaggatggggagttttcagtggcattcccagactcccagatcctctgcagccaggggagtgtggaacactcctggtctggcattagagcccctgcccagcagcatgtgtctttacagggtggttgcattgtgaatttgagagaagtaaaacagggccgggcacagtggctcatgcctgtaatctcagcactctgggaggcctaggcaggtggatcatgaggtcaggagtttgacaccagcctggtcaaagtagtgaaaccgcatctctgctaaagatacaaaaattatctcggcatgatggtggtgcacgcttgtagtcccagctactcgagaggttgaggcatgagaaacacttgaacccatgaggtggaggttgcagtgagccaagattgcaccactgcactccagcctggatgacagagcaggactctgyctaaaaaaataaataaataaaccaaaacagaaaccatctagggagggtacaaggtttctcatctgccg

SEQ ID NO: 483944 - DNA, 574 bp, Homo sapiens
tttccctggtcccaccagcctgactccctttccctcatcaggactcctccacaccaaggaaataacaggtccccctgctcagattcagcctcgagccagcaacaaggggagtcggaggaggcctttagcctattttattggtttattttcttctcacagcaaatatgcccagcctgtggcaggcatccaggcacacccagtacatgttcctgtccttcctccccttgcaggtatggagtgggacccagtcccgacacagactcactgtccctctaaaaccacatccacccccacctcagaaacggaagtttcactgaaggtttcttaggaatttaaaaggcaaggttccttcccastttagcaagactttctgaaaagctcacctcccatcccagggacttttttccctagggccccagcttcagccctcctcccaaatcacagcctcctctttgcctctccagatgaatcccagtctgtggcccacagccctcacattcttaaactaagtgccattagcaggatctgcctggtgcagaatgaaaatgtgaggccctttttcagaaattacgaa

SEQ ID NO: 483945 - DNA, 574 bp, Homo sapiens
tttccctggtcccaccagcctgactccctttccctcatcaggactcctccacaccaaggaaataacaggtccccctgctcagattcagcctcgagccagcaacaaggggagtcggaggaggcctttagcctattttattggtttattttcttctcacagcaaatatgcccagcctgtggcaggcatccaggcacacccagtacatgttcctgtccttcctccccttgcaggtatggagtgggacccagtcccgacacagactcactgtccctctaaaaccacatccacccccacctcagaaacggaagtttcactgaaggtttcttaggaatttaaaaggcaaggttccttcccagtttagcaagactttctgaaaagctcacctcccatcccagggacttttttccctagggccccagcttcagccctmctcccaaatcacagcctcctctttgcctctccagatgaatcccagtctgtggcccacagccctcacattcttaaactaagtgccattagcaggatctgcctggtgcagaatgaaaatgtgaggccctttttcagaaattacgaa

SEQ ID NO: 483946 - DNA, 547 bp, Homo sapiens
ctgtgtgatttggaccaagtaactcgatctcacctcacctgcctgatgagataacaggattttgtgaggtttatatgtatctwtggctcttggaacaatgtctggcacagagtaatttacaagggctcagtaaatctgtcatttatggcctccccatgtcagcagctaggtggctggccacagccctcgtggtggagtgaggctgggatctggggctggccaatgagaggcccaagtctccttgactgggggatcagccatggtcaccagaaccaactcacatcagccctggactttggctggaagttctgggaaagaggtgctctctccctgttgggatcttgttgggattctcgaggagctcggcctggagaagatggcgggcatttttgtcaccacgaggggacagcctgcctgagaaggaagccaacaggaaggaaggtggagaccaggatggagcagggcagctcttgatgacgtcaccaaggccctagatccagacttgcctgaaccaccccttggactgtctggttccaggaaccaatca

SEQ ID NO: 483947 - DNA, 547 bp, Homo sapiens
ctgtgtgatttggaccaagtaactcgatctcacctcacctgcctgatgagataacaggattttgtgaggtttatatgtatctttggctcttggaacaatgtctggcacagagtaatttacaagggctcagtaaatctgtcatttatggcctccccatgtcagcagctaggtggctggccacagccctcgtggtggagtgaggctgggatctggggctggccaatgagaggcccaagtctccttgactgggggatcagccatggtcaccagaaccaactcacatcagccctggactttggctggaagttctgggaaagaggtgctctctccctgttgggatcttgttgggattctcgaggagctyggcctggagaagatggcgggcatttttgtcaccacgaggggacagcctgcctgagaaggaagccaacaggaaggaaggtggagaccaggatggagcagggcagctcttgatgacgtcaccaaggccctagatccagacttgcctgaaccaccccttggactgtctggttccaggaaccaatca

SEQ ID NO: 483948 - DNA, 542 bp, Homo sapiens
ccatcaataagaaacaagcagagaaagggcctacagttcaatttatttttcagttgcctcacaaaaggctaagaaaaacttagtttctggtgaacccaggtagacatgctcattttaaagagaatgaatatatctaggaagagcctggcagtatattcccaaaggcgtgacaataaagttccttaacgtgtagtcagcaccctcaaacgtcaacacgtctggaaaattcggaagcgtttcctcctgtcagcggcccttcaagctacctcatacagggcagcctctcctacccagacccggagcctatcaatcgacgagaaaacagcttcccctcactgggcggtgcgaaccaactctgcacgatcaagtcggatagaggactggmaaccgcgggcactacagggcagtccttaacgtcatatccggttgtcagctcggccgcctccgcctaaccagaagtcgcagatgtgacgatgcaaaaacgcccgtcgggggcgcgtctctttcagcagccaatgggctctgcccaccttcgtcctcgt

SEQ ID NO: 483949 - DNA, 542 bp, Homo sapiens
ccatcaataagaaacaagcagagaaagggcctacagttcaatttatttttcagttgcctcacaaaaggctaagaaaaacttagtttctggtgaacccaggtagacatgctcattttaaagagaatgaatatatctaggaagagcctggcagtatattcccaaaggcgtgacaataaagttccttaacgtgtagtcagcaccctcaaacgtcaacacgtctggaaaattcggaagcgtttcctcctgtcagcggcccttcaagctacctcatacagggcagcctctcctacccagacccggagcctatcaatcgacgagaaaacagcttcccctcactgggcggtgcgaaccaactctgcacgatcaagtcggatagaggactggcaaccgcgggcactacagggcagtccttaacgtcatatccggttgtcagctcggccgcctccgcctaaccrgaagtcgcagatgtgacgatgcaaaaacgcccgtcgggggcgcgtctctttcagcagccaatgggctctgcccaccttcgtcctcgt

SEQ ID NO: 483950 - DNA, 465 bp, Homo sapiens
tgtggcctctgataagcagggaatagaggaagtggttttgtctcaggcctaaaaaccatttgctatctcacagcgcctgttagtaagtcacctccccttcagtgtttaccaaacattcwgaggccctgcacctacagttctgtggaaaccacaacctcattctcctcagttaaaagcccagtctttttatccctttcctccaagtggcactatgggtgacacagagaatttctactctccaatttgggactcggactctgaatgtggtttccaggactctctttcctcttctgatatgtgggtgccaatccaaattcagttcaacaaatacttactaagctctgctaggcattggctcctgtgatagggcactgtgagtgaaaaatgaataagacaaagcttcttccctggagggagatgacccccaaaacgtgatttaagtcctcaatttcctctctctaggtt

SEQ ID NO: 483951 - DNA, 577 bp, Homo sapiens
aagtattctctttgatattctaatgggggatacatgacattgtaaatttcaaaacccacaaaatacagagctaaccttaatgtatgcaaattgtaaaaaatcatttgggaggttggagaatccaagatggaatgcaggctgtggtgaaagaatctagcaaatgtataaaatacactcagtgayggaatgggaaagatgctgacctgagcatccttacaaataagtggagtaggtaagactaaaggcaaaaggcactgtgcataagctctgtggataaaactgtttctcacagggtatttagttaggaattctaaaatcactattatactgtatactggagttgaacaatgcaaatggatcgtggctcttgggagccagatctctcagtgtttgaatgacagtttacagagaagcaatgagagaaaactccaatgagccatgtggtaacagattaagagttgaagtcatcagtataaacacatatttggcttaatatagacagacacaaatacaaatatttataaatatgtgaacatacacagattattatacacaacatatttccttgctctgtcag

SEQ ID NO: 483952 - DNA, 569 bp, Homo sapiens
caactaagcggagatgggaaagttgtgaacttctcactcgaggsggcgtctaaaagctgaggatgtttattttgctgagacattagagggttctgctatatttcattgtagtccaagaaaggcctaccaatgattcagttattcatcatcatcagaacaattcctcatgtgcacccagtatttacatacattttccatttattcctcacaataatttgtaaatcagataaacttactgtatagctgtgaaaattaggattcaaaaaggttatatggcagacagatatgtggcaaagtccagctagaatccaggtcatgtgactccttgtggaggaggctctttctgcctcccttggcctatgaaggaagcagaaggcaccacatacttaaggggaggtcactctgaaagctccacctctcagaattcagccataaatgctgaagtaactgagcagcagcagagtggctatttccaaacactccctgccttattaatgatgaaatgacccagagatagcccccaaatggttcccaaactagattagtgtccccaccaccacccccaaaca

SEQ ID NO: 483953 - DNA, 512 bp, Homo sapiens
agatctataatggcaacactgagatatcaaaaagagagaaacttttatgtaggctctactgggtgagcaggcaaggaggtaaggattaggtttgagaaaggtgcttccagacaaagagtaaatattgaaaggaggtatgtattcattgtgctcctgtaacaattccaaatgccagtggatgaacagaacaaaagttcatttctcccccatgttaaatggcctacaagggtcaacaagaggctcagctccacacaggcttcacacagtcactcagcgactcaaactaacagagatccttccattttatagctgcccatctggaatccatggtcccttcagtctcctcatgggagaaaaacaggaagaattctgcatggatcttttactgccatggcctktaagaaaaatgtatctctttcacagcccattgtccatcatgagacacatgcccacgcaactgaaaggtggctgggaaatgcggaaagcaattagaatatttggtgggcacgact

SEQ ID NO: 483954 - DNA, 511 bp, Homo sapiens
aatcgtagggggtttcaacgtggctttattctgtctcttggcacgaacaagccgactggggcacaagctgcatgtagtgtcagcagggtaattataccttttacagacaatagtggctctgagcaaagcacgagctcatgtgggtggacacctaatgcgcctcatgtggcgtggttacataatgagtggagttgggagcctgcactccaaactcgctgggtcatgctgaactggatgtctgcctcgacgtattcttgactgcggcacatccattttccttacacactgatgkaggccatttgaatcacacatttctacaaataaattatctgtagtttgctctgcaaacaatgattttcattctgtaactttaaaatatgccaatattaaagctcaatgaaaacataaaaagtaaagttgaacaaacttctaagcaaactggcaagtgtgggtggccctagctaaagcgaacacccaggcaagataaaaggtcagtgctcaaacctaatga

SEQ ID NO: 483955 - DNA, 511 bp, Homo sapiens
aatcgtagggggtttcaacgtggctttattctgtctcttggcacgaacaagccgactggggcacaagctgcatgtagtgtcagcagggtaattataccttttacagacaatagtggctctgagcaaagcacgagctcatgtgggtggacacctaatgcgcctcatgtggcgtggttacataatgagtggagttgggagcctgcactccaaactcgctgggtcatgctgaactggatgtctgcctcgacgtattcttgactgcggcacatccattttccttacacactgatggaggccatttgaatcacacatttctacaaataaattatctgtagtttgctctgcaaacaatgattttcattctgtaactttaaaatatgccaatattaaagctcaatraaaacataaaaagtaaagttgaacaaacttctaagcaaactggcaagtgtgggtggccctagctaaagcgaacacccaggcaagataaaaggtcagtgctcaaacctaatga

SEQ ID NO: 483956 - DNA, 554 bp, Homo sapiens
ctgcttttcctactttgtttactttggaaagcttaaactcatttttcttcttaaattcaagaaacttaaatgtttcaggcctcatttattcaccagcctcaaaatattcaagtccttctaaaaaggtaataaaagtttattctctttaatagttggcaatgctctatcaagttctggatcttcatggctgagacacctatcctgaaatatataatgtaaacattctctagaatatctttctaattttgctaaatctgcttagattaattcgagaaagatttgaaaataaatttttgatcttcaattcaagatacaacccttgaatccatccttttttaaatggtgtattttcccrggtaacttaaaagattttacctcagttgaagattgtataatttatataattataaccctgagattcagtaatatcataagcactagtaatgatgtagtgtttgtacaatggcggaagtgtaaattcacacaaccattttgaagaataatttggtttatataaagaataactatagtttccatgtacttgatccagtaat

SEQ ID NO: 483957 - DNA, 598 bp, Homo sapiens
cgttccaaaaagtgcagggtcccattagcaaggtcatttctgcagtgacctgaatgcaccagagtcccaactccctgcctgcaacgatagaaactttgatttatccaaattcccttgttggactttgtcccctccagaaacaccaacgttctgtagaatttagctttccttgcaggtctgagactagggaaagattatgttggtcatgagcacacaagtatcccagcaactggacttgttctatttgctactctcttttgtttaaatattaacaaattttrttgaggatctactatgtgtcaggcaccattctaggcactaaggatataataatacataatggaacttatgcaatagtggagggaagaagattaagagagataaagaaagaggttatatataaaatatgtaatggaattataagctctaggaagaaacataaagcagtgaaagaagacactttcatgaagaagacagacctcataatccagtgtccatctccattcttcatgcgtgactgctcacagctttcacaccgcaccactatcctttcctcttcagcaagctgatgagaatgcccagtgctctttctttgggc

SEQ ID NO: 483958 - DNA, 607 bp, Homo sapiens
gcattaagttggtaaattttagaaataagtaaattcatgtattcaaccattcaataaatatttactgagcaatgacattacacaaactgatgtcactattaaaggatgagaggaaacaggaatggtggagcacatggtttagaaagcagatgagcttcactaggtagcacctactgtgttctgtactaaagtcatgaaatctcaactgaaggtgaccttaatcttactggagggcattaattccctaaattaacctagtccagatatcacattaccaaaaagtacaatgaaaactagaagagaaaatatgtgaggttgtggcattctaagtgtattattggggttctttagattaagactacctcccttacctgaggcaaggtctccttgaagagaaaaatatttaaaaaatgtaaaacatttatctggaactctttgtcttggctatgaatctgtggaatctatagttatttgaagcaytccagacaaaaaatgagtaaggatggcttctgccacagggaggtgggtcagaaactcgactggaggtttctccttggtgaactccaagctcaaaatgaaaaagtcttatttaaatgcctccagccta

SEQ ID NO: 483959 - DNA, 607 bp, Homo sapiens
gcattaagttggtaaattttagaaataagtaaattcatgtattcaaccattcaataaatatttactgagcaatgacattacacaaactgatgtcactattaaaggatgagaggaaacaggaatggtggagcacatggtttagaaagcagatgagcttcactaggtagcacctactgtgttctgtactaaagtcatgaaatctcaactgaaggtgaccttaatcttactggagggcattaattccctaaattaacctagtccagatatcacattaccaaaaagtacaatgaaaactagaagagaaaatatgtgaggttgtggcattctaagtgtattattggggttctttagattaagactacctcccttacctgaggcaaggtctccttgaagagaaaaatatttaaaaaatgtaaaacatttatctggaactctttgtcttggctatgaatctgtggaatctatagttatttgaagcattccagrcaaaaaatgagtaaggatggcttctgccacagggaggtgggtcagaaactcgactggaggtttctccttggtgaactccaagctcaaaatgaaaaagtcttatttaaatgcctccagccta

SEQ ID NO: 483960 - DNA, 477 bp, Homo sapiens
tggtgtcagataaagccaaacagggaggctaggactttcatccccaacagatggaaatacaaaaatataaaaatatctctgggccgggcgtgttggcttacacatgtaatcccagcactctgggaggctgaggcgggcagatcacctgaggtcaggggttggagaccagcttggccaacatggtgaaaccccgtcgctactaaaaatacaaaaattagctgggcatggtggtgggagcctgtaatcccagctactcaggaggctgaggcaggacaatcgcttgaacccaggaggcggagcttgcagtgagccgagatcatgccattgcactccagcctgggagggaagagtgaaagtccatawcaacaacaacaacaaaacaacaacaacaacaacatctctgaaagaaaagggatatccccgaaaaagcttccagtctcagtatcgtttattattaaataatcctaccttataaac

SEQ ID NO: 483961 - DNA, 540 bp, Homo sapiens
ctgagcctggggcggccacggcggctccggcgacagagtagtgtgcttagccaggccagcacagcaggtggggaccacgaggagtacagcaaccgagaagtcatccgggagctacaagggaggccagatggccggcgcctgccactgtggggggacgagcagccccgggccaccctgctggccccacccaagcccccacgcctctaccgagagagctcaagctgccccaacatcctggagcccccacctgcctacacagcagcctactctgccaccctgccatcggcgctctctctgtcgagtgccctccaccagcactcagagaagggccttgtggacactccctgcttccagaggacacctaccccagacctcagtgatcccttcctctccttcaaagtggacctggggatttcacttcttgaggaagttctgcagatgctaagggagcagtttcctagcgagcccagcttctaaatggggtgagggtgggcaaagcyggggtgactggaagatccagaggctggggattaaggaaag

SEQ ID NO: 483962 - DNA, 377 bp, Homo sapiens
atctcacacatgagtacatgcagcatctttctatgtgtgttaacttccccctgggccctggtctttccttgatgcactggctgctggggagcccagcagtgcctgttttccctgygacctacccatcacacttgacaggcaggacatcatggcaagacttcctctctgccaatctgtcctgcaagaccaggcaggccctgcaggatacactccgtcctcctcaatgactagaccattttctttcggaataaagctgttttttcacctgttggctgctgagaaagaaaggacactctgtagtattttttgaagtctcttccactcatcagaaagacccagccaaatatctgagtgggcttacgacttaccatcctgtc

SEQ ID NO: 483963 - DNA, 448 bp, Homo sapiens
caagggcccctccagggtgaacgcccactctagaaactycctcgttgtcatcctgcccaacagggtcctgtccctggatacagactttcaggttggaactttccaggctctaggatcttgtccagaggatgactattactacctcagaaaaaagatacataaaactctgacaaatgatgtagactcagacacaagcggcatccaaaggcagtggtgccgggccaattagacacctgcgagcaaataaaattgaatccataccccacgtgatggctgcttcagggacagggttcaggaagactcactgcacgtcagggtcactgggggacttgtagcctgcagtggttgggggaaagccagtggggtttggtaggcttgttgtggtcaaggaacttcagctcacattgcccactgggccctcgtttgacaggctccccgtgggcagcag

SEQ ID NO: 483964 - DNA, 609 bp, Homo sapiens
ggtgatagatgggcatataggtagaagagagaaatttatacatattttctatatactgtacatacattcatatatgcacaataaatacaagtcatttaattccagtacaccactaactgtgtgatcttgtttaaaccttatgcctcagtttcctcatctgtaaaatagggctaataagagaacctatctcatgagagtatttcaaggaccaaataagttaatacttggaacatgcttagcaaaatatctaaacaatggttaagtgctcagcaaatgttaattattaataaaatatcagagcaatgaagaaggatcactgaaatggcatttaactataaatcacttttccagccttcaaggttcaccaatatctgagggagggagtttctgatgccctggctgggacacctccaggagacaacagctatggagcaaaaccagatccctgagttaatartgcctaaaccaccttggaattcagagcaggaacaccctttggacacctctcacctatttgctgttttatacatatgtagcccagaggaaataggtctcagtgaagtaacctaactgtttggaagacagacattctccattctctgtgactag

SEQ ID NO: 483965 - DNA, 663 bp, Homo sapiens
tgctcttaaaagtaagtgtataagggcagtggtaagtgctctaaaggaataggcatcacagccactgctctctgaaacaaatattattttcatcatttcacagatgaggacattgggatttcagagtgaagtgcaacataacaaaaaattcacagaacttaagattttttagttgtatttctttttgagatatacagatttaatatatctacatgatttggcattcaaaagatattagaaggcagtcagaaaatgtctcctttcctcccctggccccaggatcccagtcccctcccaaagacaatcagcattgccagtttcttgggtgtcttatcagagacaggcagcaacaatcacacacacacacacattttctttctttgcacaacttcagcacgctgcacccttggtttttttttttttcttctaacaaattaatccacagtgagcctccccatcttcttcatggctgcgtggcatttcgttacatgggtggcccacactgtttttagccagtttcccaccagtggtcatttaggttattttcagtcttttaactagcaaaacaaagctgcagagagccactagatatataaaccatttcatactcatgcaagcgtatcagcatgaygaactctcggaagtggaattgctgggtgtatg

SEQ ID NO: 483966 - DNA, 467 bp, Homo sapiens
ctgctgtctcccactctcaacacaggcccctcgagrgcagggccaggcttacccagcctgtactcatggtgaagagaattatcaggcttaccaactagacatgtgctaggtgacaagcagagattccaagaggcctctctcggcccccttctcatcccccagaaccgccaaactgctagtgacattcctgcttcatcattaacataagtcagaaagagtcaatgctgaccaccacccccaccaaaatctctataggaagtgaaggcatatttagctgccaccgcccaggcttattcagatttcccaccgtgccgcaggatgacactgggttacaaccatcccacacgaggagagtgacatgtcccaacttgcttctggcccatgttttacaagaagcttgtccggcaggcaaaatagccctcaacacaggaacacctgttgcagcacctgtcagtagcgtctggcac

SEQ ID NO: 483967 - DNA, 467 bp, Homo sapiens
ctgctgtctcccactctcaacacaggcccctcgagggcagggccaggcttacccagcctgtactcatggtgaagagaattatcaggcttaccaactagacatgtgctaggtgacaagcagagattccaagaggcctctctcggcccccttctcatcccccagaaccgccaaactgctagtgacattcctgcttcatcattaacataagtcagaaagagtcaatgctgaccaccacccccaccaaaatctctataggaagtgaaggcatatttagctgccaccgcccaggcttattcagatttcccaccgtgccgcaggatgacactgggttacaaccatcccacacgaggagagtgacatgtcccaacttgcktctggcccatgttttacaagaagcttgtccggcaggcaaaatagccctcaacacaggaacacctgttgcagcacctgtcagtagcgtctggcac

SEQ ID NO: 483968 - DNA, 604 bp, Homo sapiens
ctgccttccaaaacgtgagataatggggatctcctgcaagtaacattcaggtttactccatccaaaagcagcctttagggttgggatggtaactggggtttcctgtgtcccragaccgcttcaagatcccacatctgtggcctccaggctaatgggaaacggagcaaccacatgacaagaacatccaacaaccttgcagatgcagaaagcttgggtccctcgatttttattccatttttggcccttctctgccctacatttctatggcttatttttgaaaaggcctagctgactttgaccctaattctaaaaactttactcacattttacctgcccctggccctttactaagctggcttgtgtcttcttcccaggccttcctctctaagtaggaggtgctcagaaatccctccagagagttgaggtccaaaatggtgtccaatttacagcttgtacacccctgtgactgtacaactagaattattcctacctaatctaaggttaatttagaacaagaaggcaatgctccctggggtagatctaagtgggcatttgccctgatatcccccagcagaatctgttgtgcagcttacctgggccccgg

SEQ ID NO: 483969 - DNA, 608 bp, Homo sapiens
tggtttaaagacaaagaattaaacctggtgtctggactccaacaatttagcatggctagaattggaagtacggtaaacatgaacttcgtgagttggctgtattctaagattgaagcttcgtggggttctgctggtcacacaacccctggggtcacacttaagattgggggtataaaatgtattctttcactaatctgtgccttccttggctcttgcttacttagatgygagagcagagagaatccttcataaagaacaacaacaacaaaaaaaggggggggaagtttttacattaactgatgtaaaggatttctccttacccctgtggctcatatttatcatctgtgtctgctattgtgttgccatgttcccttttattggacttgggaaagttttctttacagacaaatttggattttctttccaggcagcaagtgcaatgaacagtgttgtatatgtcgttatcagctcccacaccccagtatttgggctcccagtggatgacacggggaagaacagcatctgggttctgcgtgtggttgcagccactcttgtgtcccacatgatgctggcctttatgatgtggagcccttgggttgctgtgtctt

SEQ ID NO: 483970 - DNA, 608 bp, Homo sapiens
tggtttaaagacaaagaattaaacctggtgtctggactccaacaatttagcatggctagaattggaagtacggtaaacatgaacttcgtgagttggctgtattctaagattgaagcttcgtggggttctgctggtcacacaacccctggggtcacacttaagattgggggtataaaatgtattctttcactaatctgtgccttccttggctcttgcttacttagatgcgagagcagagagaatccttcataaagaacaacaacaamaaaaaaaggggggggaagtttttacattaactgatgtaaaggatttctccttacccctgtggctcatatttatcatctgtgtctgctattgtgttgccatgttcccttttattggacttgggaaagttttctttacagacaaatttggattttctttccaggcagcaagtgcaatgaacagtgttgtatatgtcgttatcagctcccacaccccagtatttgggctcccagtggatgacacggggaagaacagcatctgggttctgcgtgtggttgcagccactcttgtgtcccacatgatgctggcctttatgatgtggagcccttgggttgctgtgtctt

SEQ ID NO: 483971 - DNA, 608 bp, Homo sapiens
tggtttaaagacaaagaattaaacctggtgtctggactccaacaatttagcatggctagaattggaagtacggtaaacatgaacttcgtgagttggctgtattctaagattgaagcttcgtggggttctgctggtcacacaacccctggggtcacacttaagattgggggtataaaatgtattctttcactaatctgtgccttccttggctcttgcttacttagatgcgagagcagagagaatccttcataaagaacaacaacaacaaaaaaaggggggggaagtttttacattaactgatgtaaaggatttctccttacccctgtggctcatatttatcatctgtgtctgctattgtgttgccatgttccctttyattggacttgggaaagttttctttacagacaaatttggattttctttccaggcagcaagtgcaatgaacagtgttgtatatgtcgttatcagctcccacaccccagtatttgggctcccagtggatgacacggggaagaacagcatctgggttctgcgtgtggttgcagccactcttgtgtcccacatgatgctggcctttatgatgtggagcccttgggttgctgtgtctt

SEQ ID NO: 483972 - DNA, 673 bp, Homo sapiens
ctctcagcccagggtcctaatgtagcccagtcctgaggtgcaaatgcccttcagaggcagcacctgccacaaggcaagagaagcagaaaggaagcacttgagggaggtgcgaccgaagagggagcaacccctaagaactagctttaccttcgattctagtggcgcgtatgttcagcgcatctgagattcagctcgtctcccaagtccaacgccctccctgactttcccaaatccgtgttgcctctagcctgtgacctgsattaggagcctgactcctcctcctctacatccacatcatactcccttccttgctgtctgatcggatccatcagaaaacctcgtcagtcctacctctgaacagatcctgattctgttcactcctttccattcccactgccatcaccctcctccaaaccacggactgtggcagtggcctcctaactgctctctggtcagctcatgccctcctagagttctctgtccataaaacaactaggggatcttttaaaaacatgaatcctaccatggctctccgatgcctgattaaaacccttcaatggcttcttaaagcagacaaaaatgcaaatttcttatcaaggcctctaaggccctgtaaccatttaactgatttgcttcttcagcctcttacaagctacgtcccccctcgttcacg

SEQ ID NO: 483973 - DNA, 673 bp, Homo sapiens
ctctcagcccagggtcctaatgtagcccagtcctgaggtgcaaatgcccttcagaggcagcacctgccacaaggcaagagaagcagaaaggaagcacttgagggaggtgcgaccgaagagggagcaacccctaagaactagctttaccttcgattctagtggcgcgtatgttcagcgcatctgagattcagctcgtctcccaagtccaacgccctccctgactttcccaaatccgtgttgcctctagcctgtgacctgcattaggagcctgactcctcctcctctacatccacatcatactcccttccttgctgtctgatcggatccatcagaaaacctcgtcagtcctacctctgaacagatcctgattctgttcactcctttccattcccactgccatcaccctcctccaaaccacggactgtggcagtggcctcctaactgctctctggtcagctcatgccctcctagagttctctgtccataaaacaactaggggatcttttaaaaacatgaatcctaccatggctctccgaygcctgattaaaacccttcaatggcttcttaaagcagacaaaaatgcaaatttcttatcaaggcctctaaggccctgtaaccatttaactgatttgcttcttcagcctcttacaagctacgtcccccctcgttcacg

SEQ ID NO: 483974 - DNA, 617 bp, Homo sapiens
atgtaccaaacatcataaatatttatgtctgcttaataatattatagggaatttagttttttcttcagtgtgcttttcatattttctataaggaacttgtattacttcataatcaggaaaaagcagyacatgtactttaatttttttaaaaaagatcaagacttggccctgcttttttttctttgtagtcgagaaaaagacttagaaaatacatgtttagttgaagtaaaataagaacaggatcaatacatcctttttctccctcttctctttgcacatcctctctctgcctcttctcatggtttttcctctatcttctcactccccatgtctaacataacagtaaaatgcatgcagaaaatgagcaagccttctacagcagaatattttattgctgcaaaagctacttggggttaatttgttcataaaacaccactgtaagttatgacaagaacttagagaccacaatgctaatggataatgtaaagccctctggcataccaaatactccttcgctcttagctaacagtcttgaaacaagcaacaggaaccctattacaaggctttctctgtgttatcctagagggtgtaaaattccaggtcccttcattttagca

SEQ ID NO: 483975 - DNA, 617 bp, Homo sapiens
atgtaccaaacatcataaatatttatgtctgcttaataatattatagggaatttagttttttcttcagtgtgcttttcatattttctataaggaacttgtattacttcataatcaggaaaaagcagtacatgtactttaatttttttaaaaaagatcaagacttggccctgcttttttttctttgtagtcgagaaaaagacttagaaaatacatgtttagytgaagtaaaataagaacaggatcaatacatcctttttctccctcttctctttgcacatcctctctctgcctcttctcatggtttttcctctatcttctcactccccatgtctaacataacagtaaaatgcatgcagaaaatgagcaagccttctacagcagaatattttattgctgcaaaagctacttggggttaatttgttcataaaacaccactgtaagttatgacaagaacttagagaccacaatgctaatggataatgtaaagccctctggcataccaaatactccttcgctcttagctaacagtcttgaaacaagcaacaggaaccctattacaaggctttctctgtgttatcctagagggtgtaaaattccaggtcccttcattttagca

SEQ ID NO: 483976 - DNA, 333 bp, Homo sapiens
cacaacacctagcaaattttttgtagagatgggaccttactttgttgaccacactggtctggaactcctggactcaagcagtcctcctctcttggcctgagccactgcaccctgccaggaattttttaaatatcagctatgtttaagacattgagcaggagcttggtgatgaggagttacacacaacagtgtatcatacaatagaccmccatggtacgtagagataagtttttatggctccatggtacttagagataaatttttatttttgacctaggtgggaaaggatttagtaatgaggtgtggcatttgattggacaaggaagggcagaa

SEQ ID NO: 483977 - DNA, 462 bp, Homo sapiens
ggaagccctgtagtcccatttggctcagtaaaacataattgatgcttaaggaatcaaagsggtcaccagcctgtcaagaatttgatggagtttacatgaaactatcttctgggggcggggcggggggaaggaagaatctgatggaatctctggctctcttcacagaagaatacatatacaagttttgtatagaatttcagggagtttgtggatgcctggttaaggtatctccctgcctagggagaagcagtggttttacgtaatagactgtaaatgtttcaaattaccaatcctcacagtaagtgggaccccatggattccctggaatctacccagcacctctcagttcctttgagtagtaggtcttatatccattgatatttattccatttctggtaatgctattaagttcagattcaacagtatttgtccaagtgctttccatcctgagtatacccaaag

SEQ ID NO: 483978 - DNA, 654 bp, Homo sapiens
ctttgaaatttcaaatttttctttgacattttctcctttggtcgcatgaaatttgttaagtaggcaagagacctaatattttgggcactgctctacagttctagaaagtaggttctgaaccctttattaccattgctcagttgtgcaaatttaagcaaggtttttctcctctctgggcctcagttttcctacttggttaaagagtggggtaaattagaccccctgtatcagaatcgccaagctgatttattaaaatgtgcatttctaggccacagccaccccacagagattagaaactgtattagggccatgcagaagagtctgtgatctgcctttcctcagtgtccgccagtgactctcacacggagagcagaggccaaagaggcttccaaggcttcttccattcctgggggtaggaactggaccactcacatttttctcatgaaaactgtytccttcccagtgtctggccttagagaagaagagaggaaggagaagggggtggcatttcttgctacgacgggtgagtgccgctcccccaaatcccttgggttgtctgggttgcagagcaattcctccacttctctagacctctgttctttcccacagtggcgagaacgtcatctctttaatcattatctgatcattaagtaa

SEQ ID NO: 483979 - DNA, 708 bp, Homo sapiens
ttgtacaatgtgtttgtattttaagctaagtgattacaaaatactccaaaagttaaaaaattttaaagtttataaaatcgaaaagttacagtaagctaaggttaatttattattgaagataacttttattatataaatttagtgtagcctaagtgtgcagtgtttataaagtctacagtaktgtatagtaatgtcctaggccttcccattcacccaccactcactcatctactcacacagagcaatttccagtcctgcaagctctattcatggtaaatgccctatgcaagtgtaccatttaaaaatctttcctattttattttatttttcatctgaatgaagatgccaataaaggacttttactgcaggtttgttgcatttaaatgacacaatgtaaggggtaaaaagtgtacaacacataaaaccccagcatcaaacaaacaagcaaaacaaaacaccagcatcactcatttcctctaaattcacagtacaaaagcaaattatggaaatgatgcgagagggaaccaacaatggcatattttcttcttccttaaagaaaatcatagctgtcattaatatttattcccctgtgaagtacattgttctaacttccattccaaggggaagttctgtccttgaggacacccaaaattatgctattacacggccgcatcagcagcatcctgggcactgggagaaaaagccaag

SEQ ID NO: 483980 - DNA, 708 bp, Homo sapiens
ttgtacaatgtgtttgtattttaagctaagtgattacaaaatactccaaaagttaaaaaattttaaagtttataaaatcgaaaagttacagtaagctaaggttaatttattattgaagataacttttattatataaatttagtgtagcctaagtgtgcagtgtttataaagtctacagtagtgtatagtmatgtcctaggccttcccattcacccaccactcactcatctactcacacagagcaatttccagtcctgcaagctctattcatggtaaatgccctatgcaagtgtaccatttaaaaatctttcctattttattttatttttcatctgaatgaagatgccaataaaggacttttactgcaggtttgttgcatttaaatgacacaatgtaaggggtaaaaagtgtacaacacataaaaccccagcatcaaacaaacaagcaaaacaaaacaccagcatcactcatttcctctaaattcacagtacaaaagcaaattatggaaatgatgcgagagggaaccaacaatggcatattttcttcttccttaaagaaaatcatagctgtcattaatatttattcccctgtgaagtacattgttctaacttccattccaaggggaagttctgtccttgaggacacccaaaattatgctattacacggccgcatcagcagcatcctgggcactgggagaaaaagccaag

SEQ ID NO: 483981 - DNA, 506 bp, Homo sapiens
gggtacttctaagtaggaaggcataacagtgtgagagaagtccactcaggtctgctgattaagctatcaataaaggctaagaacattcagacttattaactcmttgaatgagacccctcattctctgtggttctctcaattcaaggtagcaatctgtcatctctgaagttgctcctgaaaatagagggaagatgatggccaggcatggtggctcatgcctgtaatcccagcactttgggaggccgaagtgggtggatcacttgaggtcaggagctcgagaccagcctggccgacatggcgaaaccccatctctactaaaaatataaaaattagcccagtgtggtggcttgcctctgtaatcccaactacttgggaggctgagacacgagaattgcttgaacctgggaggcagaggttgcagtaagccaagatcatgccgctgcactccagcctgagtgacacagcgagatcatgatccacaacaaagctaagggaatgtgtataaa

SEQ ID NO: 483982 - DNA, 487 bp, Homo sapiens
aagattaaaaagatttatatatacatatatttttaaaaaagaccaaacaggttgggtgtggtggctcatgccctgtaatcccagcactttgggaggctcaygtgggcagatcatctgaggtcaggagttcaagaccagcctggccaacctggtgaaaccccatctctactaaaaatacaaaaaattagccaggcatggtggtgcatgcctgtagtcccagctactcaggaagctgaggcatgagaattgcttgaacctgggaggcggaggttgcagtgagacaaggtcatgccactgtactccagcttgggtaacagagtgaaactctgtctgaaaaaaaaaaaaatacagaaaacattcatcttagcaccttctgataaaaatttttaaaaaaagacgctgattttaccttaccactgatttttactaaacttttaagctttagtttaagcaacaggatcacaatttatttcccatcactaacacc

SEQ ID NO: 483983 - DNA, 487 bp, Homo sapiens
aagattaaaaagatttatatatacatatatttttaaaaaagaccaaacaggttgggtgtggtggctcatgccctgtaatcccagcactttgggaggctcacgtgggcasatcatctgaggtcaggagttcaagaccagcctggccaacctggtgaaaccccatctctactaaaaatacaaaaaattagccaggcatggtggtgcatgcctgtagtcccagctactcaggaagctgaggcatgagaattgcttgaacctgggaggcggaggttgcagtgagacaaggtcatgccactgtactccagcttgggtaacagagtgaaactctgtctgaaaaaaaaaaaaatacagaaaacattcatcttagcaccttctgataaaaatttttaaaaaaagacgctgattttaccttaccactgatttttactaaacttttaagctttagtttaagcaacaggatcacaatttatttcccatcactaacacc

SEQ ID NO: 483984 - DNA, 487 bp, Homo sapiens
aagattaaaaagatttatatatacatatatttttaaaaaagaccaaacaggttgggtgtggtggctcatgccctgtaatcccagcactttgggaggctcacgtgggcagatcatctgaggtcaggagttcaagaccagcctggccaacctggtgaaaccccatctctactaaaaatacaaaaaattagccaggcatggtggtgcatgcctgtagtcccagctactcaggaagctgaggcatgagaattgcttgaacctgggaggcrgaggttgcagtgagacaaggtcatgccactgtactccagcttgggtaacagagtgaaactctgtctgaaaaaaaaaaaaatacagaaaacattcatcttagcaccttctgataaaaatttttaaaaaaagacgctgattttaccttaccactgatttttactaaacttttaagctttagtttaagcaacaggatcacaatttatttcccatcactaacacc

SEQ ID NO: 483985 - DNA, 553 bp, Homo sapiens
attgtcaagtacccctttccaatggttgcaccattttgcactgtcacataggagtgcctttttcccataccttccagaatagagtctgtcaagcttctgaatcctgacaacctgatgggtgacaaatgacattttggtgcaattttaatttacatttctcttatagtgaaagttgatcatcttttcatgtatttcagacagcgcttttctatctttttctttgaactgttggcttatgccttttgccyatttttggtattttcatccttcattaaaaaaaacaacatactagagatactagcctgtgatatatgttgtggatattttaccatgactatcatttgtcttttcacttatgtatattttttggtaggcacatttatcaacatattattttattgcatatttatttttgagtcctagaaagccttctcctatacccagattataaggaggaattcatccatgcatacttctagtgcatataaagtttcataatttatttagctctgtgatccctttggagtttagttttatttgtggtatgaggaat

SEQ ID NO: 483986 - DNA, 519 bp, Homo sapiens
cactatgaaggactgaaccttatgtatacatgtgtttgtgatatattgtgaaatcttttaaaattctgtgtttagttacacatgcacagatacacatatacacacacacatacakttatgaaaaataaaattttggctgaggtatgaaacattaccatgcagaatgctatggtctaaatgtttgtgtccccctgaattcatatgttgaaatcctagtccccagtgtgatggtattaggaagtggggcctcttgggaagtgattaagtcataaggacagagccttcatgagtaagattaagatcctcatgaaggagtccccagagagctttcttgccccttccaccatgtggaagcacagctataaggctctttctatgaaccagaaagcaggctttctctaaacaccgaatctgccaatgccttgatcttggatttcccagattcccgaactatgagaaataaatttttgttgtttataagctacccaatttatggtattttgttatagaatgaccaag

SEQ ID NO: 483987 - DNA, 451 bp, Homo sapiens
ctctggtcacactggtaatcaattcttgctcggttctttaatgtgcctttggatattacagtaattgatctcactataagcagtagtgaacagataaatgagtaaagaggctaaaaaggggatacattttctatagatctctcctgagagctgtattggctcagtttatataatattagcaattatgtcttctataattgagtagaaaagcccatgaaaaatgaatgaagaaatgtcaaggattagtcaaattttaaactaatgaaaaagattcactaaatgacttgctgtggcattttattatccaggttcaaaaataagaatatacatacatgaatctcggtgaatttttatttttacttttgcccttctacatttctctccttttctggttatttatatyaacttgccatagtattttcctctacatatctgaaatttttgaaaactc

SEQ ID NO: 483988 - DNA, 605 bp, Homo sapiens
attttacattttgatgatcagttctcattattttgtgttattttcttttttggaaatactgttattcaaagtcaattctttacattctgttcccaaagtccattgtcatctgtgacattaacagacmtctctttccatttcttccacattatagatatgtattcatatttattttctgtagcactctggcagtattgggccaggtttttaaggcttatcattatttgttattgattcgattaacttggttctttgaattctctgtttattctgacctattactgttaaatagatgtaatggcctttgatctcactaatgctaagtagaaattctctatttttttcctgactcattaagaaaatattttctgaagaagattatatttcctaggcccttagatatctcttctcttctgttatgcttttttattttaaatagtgacattgcgacttttatctatttatttatatatgaattcactttggttgctatttcttcttatacaaaactcaagatactgctgaataatatggtaccgctgttctttttaaaaacacagtaccttcctggactctggcttgcggtgcaaaggcaggttagaggg

SEQ ID NO: 483989 - DNA, 553 bp, Homo sapiens
ctggttttaaacaaaatgaaccaaaatttagagaatttgtttacacaaaagctctacaacattttaagacacaagttgatwcacaaagtagttcttcaaaaattcaaagatttctaaaatctgactgataataggcaggaaagagaaaagtgtatactgtcatgctaaactattatttcgcactcaaaatcagttttgtcacaaaattttgtagttcagttttctgagtacatataaaattacttaattttttacaactacactttctaattcaactgatgggggaaaaaaacgacatttggaaacagttattaagtatgtgtgcacccaaccaacttcaagtacattctgagtctattaatatcttaatttagtaagaaagttatttcctctataacactgtgttctaccaaaatttgtatttttattatcattgaagaaaatctccaatattcaatgtcttaacatttatttcatctgtttcacttttgactaaatgaacttacaaaagcattacaagcatacctcagagatattgcaagttgagttccag

SEQ ID NO: 483990 - DNA, 553 bp, Homo sapiens
ctggttttaaacaaaatgaaccaaaatttagagaatttgtttacacaaaagctctacaacattttaagacacaagttgattcacaaagtagttcttcaaaaattcaaagatttctaaaatctgactgataataggcaggaaagagaaaagtgtatactgtcatgctaaactattatttcgcactcaaaatcagtttwgtcacaaaattttgtagttcagttttctgagtacatataaaattacttaattttttacaactacactttctaattcaactgatgggggaaaaaaacgacatttggaaacagttattaagtatgtgtgcacccaaccaacttcaagtacattctgagtctattaatatcttaatttagtaagaaagttatttcctctataacactgtgttctaccaaaatttgtatttttattatcattgaagaaaatctccaatattcaatgtcttaacatttatttcatctgtttcacttttgactaaatgaacttacaaaagcattacaagcatacctcagagatattgcaagttgagttccag

SEQ ID NO: 483991 - DNA, 553 bp, Homo sapiens
ctggttttaaacaaaatgaaccaaaatttagagaatttgtttacacaaaagctctacaacattttaagacacaagttgattcacaaagtagttcttcaaaaattcaaagatttctaaaatctgactgataataggcaggaaagagaaaagtgtatactgtcatgctaaactattatttcgcactcaaaatcagttttgtcacaaaattttgtagttcagttttctgagtacatataaaattacttaattttttacaactacactttctaattcaactgatgggggaaaaaaacgacatttggaaacagttattaagtatgtgtgcacccaaccaacttcaagtacattctgagtctattaatatcttaatttagtaagaaagttatttcctctataacactgtgttcyaccaaaatttgtatttttattatcattgaagaaaatctccaatattcaatgtcttaacatttatttcatctgtttcacttttgactaaatgaacttacaaaagcattacaagcatacctcagagatattgcaagttgagttccag

SEQ ID NO: 483992 - DNA, 553 bp, Homo sapiens
ctggttttaaacaaaatgaaccaaaatttagagaatttgtttacacaaaagctctacaacattttaagacacaagttgattcacaaagtagttcttcaaaaattcaaagatttctaaaatctgactgataataggcaggaaagagaaaagtgtatactgtcatgctaaactattatttcgcactcaaaatcagttttgtcacaaaattttgtagttcagttttctgagtacatataaaattacttaattttttacaactacactttctaattcaactgatgggggaaaaaaacgacatttggaaacagttattaagtatgtgtgcacccaaccaacttcaagtacattctgagtctattaatatcttaatttagtaagaaagttatttcctctataacactgtgttctaccaaaatttgtatttttattatcattgaagaaaatctccaatattcaatgtcttaacatttatttcatctgtttcacttttgacwaaatgaacttacaaaagcattacaagcatacctcagagatattgcaagttgagttccag

SEQ ID NO: 483993 - DNA, 617 bp, Homo sapiens
acttgggaaaagtttggaagtttcttctaaatttaaatatacacttaacatagaacccagaaatctcactcttaggaatttacccagaagaaatcaaaacacatttacaggaagacttgaatgcaaatgtacgtaagttttatttatagtagacagaaactggaaagaaaccaaatatccattaatatgtgaatgtataaacaaattgtggactatccacacaatgaaatactactcagcaataaaaaggaatgaactgacacaagtaacaacatagatgaatcttaaaagcattgtgctacgtgcaagaagccagatatagaagacagcatactgtatgatgttatttatatgaaattccagaaaagacaaaatcatagaaagtagtgcctgagatcagggagaagggtaggtgattgacttcaaaggtatayaaaggagcattgtgggatgatagaaatgttccatatcttggttttggtgatgattacatgactccacatttgttaaaactcatcaaattgcccatttaacattggtagttttatttttttaataagagatttctattttagttgaatttaacagaagaaaaagaaactgaggtgagactgaat

SEQ ID NO: 483994 - DNA, 647 bp, Homo sapiens
ctgttacacagctttctgatctcagtatttaccataataaatctgctcctataattgaggcataccgccctcaaaaacctatttgtaaacaaaattgaacctggccagaaaaaaatgaacgtacttgtttaggaagattgcattgcagaacaggcagaggtgctgcacaatgattcctatggaatcattattaattggtcccctaaggggatgtttagcttgaattgcacttctcagtctgtgtgccatgccatacttatgttcagatggtctcaacaaaatgttcaggtggtagatataataagaagtacggcaagagttcctattatctagaaccatggtggtatagtggcacctcaacctcaaatgatatggcccsctctaggagctaaacattaaggatttgtggaaactattaatagctcttaacaagatcaaaatttgggaaagaataaaaaagcgtctagaaggacactctacaaacttgtttttggatatagcaaaattaaaagaacaaatattcaaagcatcccagggacacctgaccttaatgccaagaactggagtgcttaaaggagctgcagacagattagcagctagtaatccattaaaatggataaaaacacttggaagccctgtaatttcaa

SEQ ID NO: 483995 - DNA, 653 bp, Homo sapiens
tctttcggatttgggggttgaagagcaaaaagaaagaggatataagagaagcttcaggggtgattgccaaaaatgtttcccacccaccaatttcttaaactaggagcatctcaagggggagctgaccacatggtcttgatttactaaaacttcactcattaggctggtatcctttcaagcatattggacagctaacaggcgagaagcttttcaaagccccttcccctccatactggggctggcagggggccaggagggaggccccagagcagaagcacttgtgcagccacccccagggsgctgttcctgctgggttacaatctccccactgaaccagaagaaagctctactgaggatcacacatggcacagatgtggtcacacatggctccaaagtccgaacggaagtcttggcactggacccaggtgtgatggacacatgtgtgcccaagggtatagataagaatatgggcaggaccacacacaaccagccccctatgggtgtcatctccccacacaggcacacatgtgctcacacacacacacacacacacacacacacatacacacacagaggcaatggtccccgcatgctggagaggcacatccagagagctcagtctctgcctacagctagaacatcttggacttcca

SEQ ID NO: 483996 - DNA, 632 bp, Homo sapiens
tttcttaaactaggagcatctcaagggggagctgaccacatggtcttgatttactaaaacttcactcattaggctggtatcctttcaagcatattggacagctaacaggcgagaagcttttcaaagccccttcccctccatactggggctggcagggggccaggagggaggccccagagcagaagcacttgtgcagccacccccagggcgctgttcctgctgggttacaatctccccactgaaccagaagaaagctctactgaggatcacacatggcacagatgtggtcacacatggctccaaagtccgaacggaagtcttggcactggacccaggtgtgatggacacatgtgtgcccaagggtatagataagaatatgggcaggaccacacacaaccagccccctatgggtgtcatctccccacacaggcacacatgtgctcacacacacacacacacacacacacacrcatacacacacagaggcaatggtccccgcatgctggagaggcacatccagagagctcagtctctgcctacagctagaacatcttggacttccaaactccttgtaaattagatgttgaatctgtgcacaggctcttgctacacacactgaaagacagcaaaag

SEQ ID NO: 483997 - DNA, 241 bp, Homo sapiens
tctgaagacttcttaaaatgtagagcctgatcttgttctccattctattcctagtgcctaagatagtgccaagcacacagtaggcatttaytgtaatatttgagctgcatcaactgtgtcagttagatcctggcatactgaatggaataattgagattataatggactatttcaaaggtatatgtgcagggttaagagaaaccaacaagaaatgataagatgctaaactagtaacagagcc

SEQ ID NO: 483998 - DNA, 577 bp, Homo sapiens
agtgggcaagacaaacattaatcaaatcgtacaaccaaatgtgtacatataagtgaacaatcatttctatgmaatagcgagtgctatgaaagtatagaaaaagggaatttgattcagtctgagagccaaggaagtcttctgtgaagaaatgaccttacatccagtcaactgaataggagttacccaggcaacctgaggaagacagagggagaagtgtgtctaaaaaggtgaacagctgtgctaggaatggggcactttaaaggtactgaaattatgccaggcgtagagggagcaggtgggatgcctgacgcaagatggggccggagaggtagtcagattatgatctttaggctacaagtaatgctaactgattaaagggttttaggcatcaaagaagcttgatcatacttgcatttttaaaaggttattctggttgcagtggggaggagagactgagctagaaaagagggctgcgcaaagccagttaggtggttacacagtagtccaggcaggaaaagatgttaacttggattagggcgatgttagcacagatgcacagattatgggtagatctgag

SEQ ID NO: 483999 - DNA, 577 bp, Homo sapiens
agtgggcaagacaaacattaatcaaatcgtacaaccaaatgtgtacatataagtgaacaatcatttctatgaaatagcgagtgctatgaaagtatagaaaaagggaatttgattcagtctgagagccaaggaagtcttctgtgaagaaatgaccttacatccagtcaactgaataggagttacccaggcaacctgaggaagacagagggagaagtgtgtctaamaaggtgaacagctgtgctaggaatggggcactttaaaggtactgaaattatgccaggcgtagagggagcaggtgggatgcctgacgcaagatggggccggagaggtagtcagattatgatctttaggctacaagtaatgctaactgattaaagggttttaggcatcaaagaagcttgatcatacttgcatttttaaaaggttattctggttgcagtggggaggagagactgagctagaaaagagggctgcgcaaagccagttaggtggttacacagtagtccaggcaggaaaagatgttaacttggattagggcgatgttagcacagatgcacagattatgggtagatctgag

SEQ ID NO: 484000 - DNA, 580 bp, Homo sapiens
attgggaggtgtgtgaggatgattaagttgttgaagatgactctcaggtttctcgcttggactagaaccattgtgttcatagtggtcccttgyatggaggagagagagtttcaggagggggatggggctttcattcagttatgaagtaataagttggagtatctaagcagaccacatttaatttaagaacacttgggtatgaacaacacttccccattaaattacttgtggggttccagctctgccatcagggccctctcactccagcatcgtggcctctgccaaggttgttactctctttttgtgtccctgggctgctgaaatcttctcaccgtattgccatggaatttgtaacgtgcttccttctgcttccctaccttaggcaggtttgggtctgagtgggttttggaatgagtattgttaaaggaagttaaaatgaagaccaggcctgtgaaatctctgagcgcacaaaaccagttaggccttatatgttacctcagccttgcttaaattgcagacataagcagaacaagtagagtcattttgataaatgtttatgttagaagtaaaacttaacccc

SEQ ID NO: 484001 - DNA, 533 bp, Homo sapiens
aagcacttactgtattttgctgaacgttaaaattatataaatgtactacagttgcctcaagatgttaaaaagtcagcttttcaaatctagtcacggcctactcatatgacagacccaattcaaatgagcaaaattgaaaagttacacatacagacaacttctcaaccaccaggctgtttagtttaagttagaagtcagaagttctgagactctccttttacccaccttgagcaaccgcagcaagttttcccttttcttcagggctgagctgcaacatcgtatttataacaggaagaagtctctctctttcactacctggyttcaagaaaatgaactgcagcaagacgttcttcaagtattccaggttagctgcagacttctctcgctcttgattcctttccaatcttcttatttcacttttgagaagctggtgttagagaaatgagttaaaaatgggctttaggagcttctgattaaatatggcagactgaactcatgtatttttcttctcttccccccaaatttcccccttc

SEQ ID NO: 484002 - DNA, 464 bp, Homo sapiens
tttcttcagggctgagctgcaacatcgtatttataacaggaagaagtctctctctttcactacctggtttcaagaaaatgaactgcagcaagacgttcttcaagtrttccaggttagctgcagacttctctcgctcttgattcctttccaatcttcttatttcacttttgagaagctggtgttagagaaatgagttaaaaatgggctttaggagcttctgattaaatatggcagactgaactcatgtatttttcttctcttccccccaaatttcccccttccctccatatggcaataaaggaaggaattcagttaactacagcagctgcatgtgaagcatttcaaaggagtttatgacatcaccgtataaaatccatttgacatgaaaaccggaactccaactatgagatagtttcaaagctgcatttgcctagaaagtggattgctgcgtatgaaccaagtgt

SEQ ID NO: 484003 - DNA, 533 bp, Homo sapiens
aagcacttactgtattttgctgaacgttaaaattatataaatgtactacagttgcctcaagatgttaaaaagtcagcttttcaaatctagtcacggcctactcatatgacagacccaattcaaatgagcaaaattgaaaagttacacatacagacaacttctcaaccaccaggctgtttagtttaagttagaagtcagaagttctgagactctccttttacccaccttgagcaaccgcagcaagttttcccttttcttcagggctgagctgcaacatcgtatttataacaggaagaagtctctctctttcactacctggtttcaagaaaatgaactgcagcaagacgttcttcaagtattccaggttagctgcagactyctctcgctcttgattcctttccaatcttcttatttcacttttgagaagctggtgttagagaaatgagttaaaaatgggctttaggagcttctgattaaatatggcagactgaactcatgtatttttcttctcttccccccaaatttcccccttc

SEQ ID NO: 484004 - DNA, 533 bp, Homo sapiens
aagcacttactgtattttgctgaacgttaaaattatataaatgtactacagttgcctcaagatgttaaaaagtcagcttttcaaatctagtcacggcctactcatatgacagacccaattcaaatgagcaaaattgaaaagttacacatacagacaacttctcaaccaccaggctgtttagtttaagttagaagtcagaagttctgagactctccttttacccaccttgagcaaccgcagcaagttttcccttttcttcagggctgagctgcaacatcgtatttataacaggaagaagtctctctctttcactacctggtttcaagaaaatgaactgcagcaagacgttcttcaagtattccaggttagctgcagacttctctygctcttgattcctttccaatcttcttatttcacttttgagaagctggtgttagagaaatgagttaaaaatgggctttaggagcttctgattaaatatggcagactgaactcatgtatttttcttctcttccccccaaatttcccccttc

SEQ ID NO: 484005 - DNA, 464 bp, Homo sapiens
tttcttcagggctgagctgcaacatcgtatttataacaggaagaagtctctctctttcactacctggtttcaagaaaatgaactgcagcaagacgttcttcaagtattccaggttagctgcagacttctctcgctcttgattcctttccaatcttcttatttcacttttgagaagctggtgttagagaaatgagttaaaaatgggctttaggagcttctgattaaatatggcagactgaactcatgtatttttcttctcttccccccaaatttcccccttccctccatatggcaataaaggaaggaattcagttaactacagcagctgcatgtgaagcatttcaaaggagtttatgacatcaccgtataaaatccatttgacatgaaaaccggaactccaactatgagatagtttcaaagctgcatttgcctagaaagtggattgctgcrtatgaaccaagtgt

SEQ ID NO: 484006 - DNA, 616 bp, Homo sapiens
aaagtcctttgtgggtagatatttgttggttggttcatgttagcaacttttctagagatcatccagggagaggtgcttcttaagaaacaagccaccacataggtcgtcaagacttaaaactggttaggattgagtaactgacctatttatttgcagtactttctgcctgttgtgggcagtgtctctgaggccacacagtgctttcagacctgccttgtgttgcagaaccccatggacactgaggttgagcgtggggccattcctgccttctctgggctgtccctcagtacacctctgcctggggctcctgagtggccactctcttttgcctgtgggctttgggaataaaactaggatagttttccctcagatactagaggaggaattttttattgatacataataattgtacatatttatggggtgcatrtgttattttgctgcatgcatgtaatgcataaggatcaaatcggggtaactagcatatccatcacttcaaacatttatcatttccttgagtttagaactttcacaatcctcttctagctttttgaacatgcgcaataaattattgttaacattagtcaccctacagtgctgaggaacccaagaacta

SEQ ID NO: 484007 - DNA, 531 bp, Homo sapiens
ttgaggacctcgcacaatcctaattcttcaccaaaagccacctagcagacctgctattcagacgaatctgacttttttggtattttcaaacaacagcctcccaccctacttcaatggctattctgatgccactgccgtggcagtagtagtttcagtcaaatttgtttgcatttcttagagtgacattattaattcctgaaaatgatttaacagtatcaaaatgcctgaatataaaagttgagctatggtgtttattcggaattaaaccactcccttgtcctcttgaaaaaataacatatttcttttagctttactctgttgtagctaaataagataagtgactgcaggtagtctttttgggagaattgtgtgccgcctaaactttcttttcttttcttttytttttttttttctttcgagacggagttttgctcttgttgcccaggcttgagtgcagttgcacaatctcggctcactgcagcctctgcctcctaggttcaggcgattctcctgcctcagcctcctgagcag

SEQ ID NO: 484008 - DNA, 348 bp, Homo sapiens
tgtgtctgtcctttttccataaggagttttctcgcgggcaaatggtgagggagggatgtaggttgttatctttgtagctatcttatttagcaataaaacaggaggcaagtttgcctgacgtagtttccagcttgactttttccttggcttagtgatttagtttcctttcgcattgctaactcaatcacaggagacaggagtgtgractgaatatagcaagaatgccaaagtatgtaacagtttccttagtcatgatagagactgagaaacatcggctcacctaagctttgaggttagctggagtccagtagaagagttataactaaacactggcccttgtctgtttcc

SEQ ID NO: 484009 - DNA, 633 bp, Homo sapiens
cactgcaactgccaccttccaggttcaagtgattctcgtgcctcggccatcagagtagctaggactacaggtgtgtgccaccatgcccagctaaattttgtgtattttgtagagacagggtttcgctgtgttggccaggctgatctcaaactcctggcctcaagtgactcacccaccttggcctcccaaagtgctagaattacaggcgtgagcaactgcacctggccgaaatttagtatctaaagtttgaaaaagtcttttgtatgcagaagtcagttaaaggatcaagtatttcattctaggtttttaaaaaatatttttcacaaaattttttaatccatccagaatacattttggtatgtggagtgaaataaaaacctaattccttagaaggaatttctttcttcattggtttctgtttcaaactttactgagatggtatagcttagttggtgaaacaatagatctggaacgagactccctgaattaaaatttcagctctgctctgttacttgttctgtgaccctgaggtctcttaagaaatcggagtctgtgactttgagttccttcatctatttatgcctcagagtcctcacttgtaaagtgttgaygctaatatacttgggggttgtt

SEQ ID NO: 484010 - DNA, 558 bp, Homo sapiens
cctatctgacctcaaaattagtacaactctttccattgagctatgcaatttcagaagtcaactaaataataatctaaaatactcagtttcagtttaactcatgatmtagcatttaaggtgaggcccatgatactgttcatttaatgctcagtttactacatattttagaaaatcaattgtttttgctactattaactccgtaattcaagcaaattgttaccaactaattcaagaaaattattttcactcagatgctccctaattttgcctgaataactatcaagtatgggatttatgtagagaaatgttaacatatatgacattttgtgccagaacggtattatattatttagaatggtctgatattttttaatctagcttatatttatttgtgatggtcgtatagtatttaatctggctcatatgaagttatttatgaggccgaggaaaatatctgaatatgggacagccaacccaaggtagataggttacccggaactgacatgttgccactcagttaccttttgtggtaagaaaagagagtttgcagaaccacaa

SEQ ID NO: 484011 - DNA, 558 bp, Homo sapiens
cctatctgacctcaaaattagtacaactctttccattgagctatgcaatttcagaagtcaactaaataataatctaaaatactcagtttcagtttaactcatgatcyagcatttaaggtgaggcccatgatactgttcatttaatgctcagtttactacatattttagaaaatcaattgtttttgctactattaactccgtaattcaagcaaattgttaccaactaattcaagaaaattattttcactcagatgctccctaattttgcctgaataactatcaagtatgggatttatgtagagaaatgttaacatatatgacattttgtgccagaacggtattatattatttagaatggtctgatattttttaatctagcttatatttatttgtgatggtcgtatagtatttaatctggctcatatgaagttatttatgaggccgaggaaaatatctgaatatgggacagccaacccaaggtagataggttacccggaactgacatgttgccactcagttaccttttgtggtaagaaaagagagtttgcagaaccacaa

SEQ ID NO: 484012 - DNA, 604 bp, Homo sapiens
tggagtctgttttcttaactgctagaagagaaaataactcacattttctctagggtgcactgttggcctaaacaagggaaaaaagaaaaattaaaacctaaaagttaagaaaaattagtcatacggttagagaggtcagagcttatttctgttatacactggaatccagtttgaacataaaacctttcacatcaggtattatttttcttacaattccamttatgttcagcaagtatatcccaatgctcttctgtgctgtcaagacaagcaagatcctattgtgtgtgctatcattggtagattcctcgtctaggcactcttggccagtgttgagtccgaatgctgttattatgtgaaacaggagaactctagggcacattagtatggaattttatctttcccttgaccgaatatatgtaaagtggcacttatacaagtcccatgtatttagcaaagatatacattttttatgttctctattgtaacataggagagggttattgggggaaaggcatgtatgctctctgaggcctgtctgtacttttatgcagatagttagaatgccactcatgggcattctcaaaaaatatggcctatgtaagtt

SEQ ID NO: 484013 - DNA, 619 bp, Homo sapiens
gctctgggtggggatacgcttggcataaggaatacttaagacaatggaaagaaaaaaggcagtgactgtgattctaatccaaacaccatattgttcgcaatagacagttaatttgccatctaatctctctctctgagcatagccccttagtaaccacattcatataatttgttttttcatttaaaattccactggaacttaaaagtttattaaagtgaatggactactccatctgagatgtaactgaggatatattagcagaagcaggctccttagcatctgattaaaatctcagtgttctaagcwttggaagtaatactttttccaagcagcaacaaactggataaaaattatcagacccatgaacagagtcatttagcctcattctcttgttttaaagtgttgattgcctgtaagttagtagaataatctcctctcctctctagccaccagagtaagcaaaaaggaaacatctcataagtccacagcctgacaacagccatagttctaatggctctttgaataaggaatacttccacattagaaggaaaaacgacgacaactatgattctaaaaatggaaagcacacacacaaaaattaaaagctcaaatggtaaaa

SEQ ID NO: 484014 - DNA, 505 bp, Homo sapiens
cttgaaattaacaatagaattgggtagcaggagctctggatccagaacagctctgcagaagtgtcctcaattgggataatacaaccagaactttattcccctcatgaattatcgattagatataggctgaccctaataagagtcatgaacttggacaagagtgtctcttcacctgatggcaaaacccagagagaggtagctatcttccacccatattcccagcagagaaaggcaaggagtcctgaaggggagaggtctgatggcacatccactctagtagtagatgcatctactacagatgctcataaaataacttagatagaagcttaatgctgatggtggggcttagggcatacctgaacctttgtgggcacacaagtgyccagggctcactcagatgtacaagatcccaaggctctaataccaacaggacagagctgcaaatgtcctcccagcttcccctcagagcaagtctcagaaatggccatgtgaaattacacatcct

SEQ ID NO: 484015 - DNA, 599 bp, Homo sapiens
gctgagggaacagaggcatggggagcctaagtaactttgatggtttcaaatctagaaastagtcgaacagggattcaaatcaaaccccaagaattgagcttcaaagtgcataatctcaccattctgctttattatcaccgaggaaattagtgtaaaatggatatgctcattatagacaatgtggtagatctgaggtagaattgcagaaagcaagcatagaaaacaaggcccctccaggtctttttgtttttttgtttgtttgtttgtttgtttttttgagtctgtcacccaggctggagtgcagtggcgcaatcttggctcactgcaagctccgcctcccaggttcacgccattctcctgcctcagcctcctgagtaactgggactacaggcacgtgccaccacgcctggctaatttttttgtatttttagtagagacggggtttcaccttgttagccaggatggtctccatctcctgacctcgtgatccgcctgcctcggcctcctaaagttctgggattacaggcgtgacgaccgtgcccagcctccagctcttcttcctttatgctagtagagttttcaggattctgtagactcta

SEQ ID NO: 484016 - DNA, 593 bp, Homo sapiens
ctaggtaaagtgcagtggtgtgaatcttcacagcaggcttgtggagaataagcatctccagataattaagtaatgtcctggaaataaaaagttacagtgagactgagagtacagggaagagctggatggggtctggggtgtatgcagtcctcctgggtctggccttgcatctcaggcaacaaggagtctaaagaggtccaaagagagtaagcagtcagtgaaataacaggtctttgtcttcttctgatagcccttatcccactgtcctttaacaccagcaaagctgccaggccaggaagcaggacatctaatctgagtatggtccagatwgcctgtacagatgagaaggctgtggtatggtggaaaagggaaatacaatagaaacagcacagacactgtatatagataaatttaggacttctactgaaaatcacttcaaatcacaaatagagacccagcatccactgcacaactatgtatgaaaagctttaaaaagcaaggacattggtggaaatgtgaggtcatcactgggcagccctaggtttttgctggctaaaaagccagtgggtttgagaaagcaagcataggaaccc

SEQ ID NO: 484017 - DNA, 581 bp, Homo sapiens
ttgtttacacatacctctgtgccctatgagaaaaacagacagttcaaaaggaagaaacagcagtgttggtcaaggagttagatgccctttggtgtcrgttttaacacctagatgactgcatttgaaattaggaatgcagggttttcatgccatgcatttccatgtcattatgttttcaggccacgagaacaattttgatataaaacaatattgctttgaaaatagagtgctgtcccttggaatgaaggcaaatgaggatttagaatacttgcaggttgttctgtcagtactaatttgagtgctaaagttctatttgcaaacctaagtaaacaggaatgtagacagcttgaacaagatgaaattgtgatatcgcccaaaggaacaagctgatcagggaaagctcagcatgcatttgaatcaagagcatgtgcaacaacggtaactctgcttcaagtagtctgggctggaccgggacaagggaggcttaacctatgacacctggtatttgagggcagagagccatacaccagtcattctgagagcctctccagatttttgcagcacatgggaacttgtgctaa

SEQ ID NO: 484018 - DNA, 581 bp, Homo sapiens
ttgtttacacatacctctgtgccctatgagaaaaacagacagttcaaaaggaagaaacagcagtgttggtcaaggagttagatgccctttggtgtcgrttttaacacctagatgactgcatttgaaattaggaatgcagggttttcatgccatgcatttccatgtcattatgttttcaggccacgagaacaattttgatataaaacaatattgctttgaaaatagagtgctgtcccttggaatgaaggcaaatgaggatttagaatacttgcaggttgttctgtcagtactaatttgagtgctaaagttctatttgcaaacctaagtaaacaggaatgtagacagcttgaacaagatgaaattgtgatatcgcccaaaggaacaagctgatcagggaaagctcagcatgcatttgaatcaagagcatgtgcaacaacggtaactctgcttcaagtagtctgggctggaccgggacaagggaggcttaacctatgacacctggtatttgagggcagagagccatacaccagtcattctgagagcctctccagatttttgcagcacatgggaacttgtgctaa

SEQ ID NO: 484019 - DNA, 632 bp, Homo sapiens
cttacataatcaaaaacctcagagcctaatagcatccagggtctttgtggttgaagaaaaacctcttgaagtcacagaaagaaaggtttcccttttatgtgaagatcttgatcttcggtaaatccagcagcactttcccaattaactagggctctctgcttgagcagatatcctaactaaggtggcaaagtgatgttgtttggactcataaggattcaatcttatagaaaccaccagagaatggtgactgagtcaggggacatggatagaaggaacaaatgtgctttcctacgtgaggaaggtttagyttccagggatgtcaaacattattccaacaagcactgatccaggagagctaatcaacttgaagagtaggatgtagactaaatatccaaatccctgtgggcaagagaagcaaaacctatatacacacatataggtaagagttaaaggaaaattctcttcccccttaaggaatctcaagtctctttcctcttaggttataaagagtagtctgtgtccagagctgtgtagaatacaaaatattttttcctgctaactaaaaatgacctctcactgttagactatgtttgctatgaagaaagagaatttgttttggaaaatttctcttt

SEQ ID NO: 484020 - DNA, 392 bp, Homo sapiens
atcttgtcaatgaggtccaactgtactgttctttgggtgaytgaacatgacctctggggtatgtctgttaaggcaaaggaaaatttcaacacagataattaatagtctgggatttctccctacatcttttccttcttttctggctctgtcctttcagatttaacactcagattgaatgctttctcttaaaattgatgctttgctcatttcctgttgcctttctttggctgccataattcttcacccatagggagataaaagcaacacattcagaccactgttgcagcactggcaatgaggtggatgtaatctgtagttcaggggtctatattcacatgtgaatctcaactgaactgcaaaaagacatttttctcaaagatgtaacatgttgc

SEQ ID NO: 484021 - DNA, 392 bp, Homo sapiens
atcttgtcaatgaggtccaactgtactgttctttgggtgattgaacatgacctctggggtatgtctgttaaggcaaaggmaaatttcaacacagataattaatagtctgggatttctccctacatcttttccttcttttctggctctgtcctttcagatttaacactcagattgaatgctttctcttaaaattgatgctttgctcatttcctgttgcctttctttggctgccataattcttcacccatagggagataaaagcaacacattcagaccactgttgcagcactggcaatgaggtggatgtaatctgtagttcaggggtctatattcacatgtgaatctcaactgaactgcaaaaagacatttttctcaaagatgtaacatgttgc

SEQ ID NO: 484022 - DNA, 648 bp, Homo sapiens
tgtaaattttggttcttactacaagtgacattctctctttcctctgcgtagttgatgaaatggatattttgaatccctttcttttctttcttgaggtcaaactgaaaaagatttctcccattgttctgtgccacgatgtttcctatgtgtcgttaataagcatcattatgccctgctagctagttaagagcaccatgatattaccatgtaattacattataccaagtattgttttttctatacataaccacatacstcttaagagactttcctcagctaaatttctgtgaacacagtgacaaaagccttcaactgagaagaagatccagtatttttatcttattttgaatgtgtaataacaacagatattcctgaaacagagaaatcattatttttttaatttactagtatcagattttctttactatattccatgctcttgtaaattttcttggctattagagaagtacattggtaactaatctttatggaaagcatttaaacaaaagtgattgattccctaagcagtaaaaatataactctgtgttagagttctgcagaccatctcttccaaagtttaggaaagttggatttgaccaagctttagctcacagcccctactggagagttctgatggtttgcagatcc

SEQ ID NO: 484023 - DNA, 627 bp, Homo sapiens
ttttttcatgttctatatgttcattcttcatattatatatgttcttccaatttttagcaaaccatttsatgcagctttcctccttgattttatttacttactagaataaatttagagccaaggattggttcaacattgcaacaaactgaagaatagcattcacatctctacatgaaaatctgaggtcttaaacataatttcttttaaataagtgagatttccagttaaagagaattaaatgcaaggacatgataaaatattgaggaacgcaaatgatataactctacaaatgcaaagagaaggtgcgagaagacatcagtggtgtggaagtttcaatagatctttgaaaaaactgaaaggtgatggagaaattatagttgattaaacaagacacaggaagccaaagtttaaagggtgtgcagaggggaaagaaatgatatgagagtcagttgtccatatggaatcaggagaggtgatggaagcaaaaggtatgggaacatggggtgagaaatgctgtggaaaattggatgatttggatgtctgtattggaaacacttctcaaacatcccttagccccataacccagaatgccaggcagaaagctgtaggtcatttatgatgttaagc

SEQ ID NO: 484024 - DNA, 605 bp, Homo sapiens
tttgacaggaccatttgagtgtctgctagcattgggtgtcagctagaatgcctaactggccattgctgaccacccttcccctgcccccaccaatkccattccctggttcttgaaccacaattagggcctttccctctctcttcctttaaagttctttacgaggtgggtcttctggttctcataaataaagcagttctgtatagtgacctcagccctgtgggtgatcacagcttagatttaattcaaggcccccagcaacctttacactccctttctcttttatctgtgtggcttttaggggagattttatatagtgtgtaaggaccaggtagaaggaagtggtattgctatcattttgtcattgggaagtgtaagatggaaagggattggaagctaaaataacttaaaatattgactctggtttcaaaaatgtttggattttaaaaggttggcagttaaaattattcttttcaacattttaggcttatttggcctcttagtttcctctgaatctataagacatactatatttttacaaaagtgttttaaaatatatattttttcttttcttggcaattttataggtaatgtgtgaagtgctgttt

SEQ ID NO: 484025 - DNA, 594 bp, Homo sapiens
aaactgagagaagctaaaagacaggggtgtgaaaccaagattgcacaagagatagccagtctttcaaaagaggctgtttccaaaaaaaaagatgaatgaaaatgaagaagttataaatattctccttgttcaggagaaagagatcctgactaaacaggaggagctcctgggcatggagcagtttctgcgccggcagattgcctcagaaaaagaagagattgagtgcctcagagccgagactgcggaaattcagagtcaccagcagcagggcctaagcgagactgaggagtactcctccgagagcgagagtgaggatgaggaggagctgcagatcattctggaagatttacagagacagaacgaagagctggaaataaagaacaaccatttgaatcaagcarttcacgaggagagtgaggccgtcatcgagccgcgcatgcagccctggctgctccagttgcagccagacagggccaagcagcaggcgcaggaggacgaggagcccgagtggcgcggaggtgccatccagacgcccaagaatggcatcctcgagccagtagcagctaaatagccaccaaaggcaggcaagaagcc

SEQ ID NO: 484026 - DNA, 610 bp, Homo sapiens
tattattagtggagaatccaaattgaggcaagtaaaaagaaagtttaaagtcctcacagcctttcttccctgtgcagttgttttatctattccttctttagaggtgaaaaatctgaaactccaagacactacatattatatcgatagccccatatctattttatacaagagtcgagtattgttcaaggtaagaaaattgatgagagggtcagagtacagtcaatgtcaaaacagaagtacaagtctggcttactcaaattatagttacaacttaatggtgacacttgccctgaaactaggatatctagtttaaagtatttttttttcctttatactttaagttcttgtgtacaggtgcagaacgtgcaggtttgttatatacatatacatgtgctrtggtggtttgttgcaccccatcagcccgtcatctacattaggtatttctcctaatgctatccctcccctagccccccacccccgacaggctccagtgtgtgaagttcccctccctgtgtccatgtgttctcattgttcaactcccacttatgagggagaacatgtggtgtttggatttctgttcttgtgttagtttgctgagaatgatggtttc

SEQ ID NO: 484027 - DNA, 576 bp, Homo sapiens
cacacaaaactactcatcaataaaaggaaaatgcttctaatttattaaatacaacagtccaacttaaatatatagtaacgcaacataaatgacagagctttttaaatcaagcttacattgtagttgtktgaatatttttacattatctaatcatacaattttgaagcccatgcccctgcatgtagtatactgtagatcttatgtacatatttcatatatcagcataatgatatatacaacgtagaatatagaataatgcctactgcttttatgtacataggcaagtagtttgcatgtaatgtataaagattatttatgtaaactacaaatgaaaattagtggcattagtttttaacatgttctacaaaaattggttcttttatgttttgttttaatttaaaagcagagaaatgtcaaatcaaaaaggtgtgtttttcaaattaacaagtattttctacacatggacaaagaagaatatttgttaattacaattaattattaattacacagtcaggttaaacataaatgtccttggtataataaaaatcaaacattccaaaattttacccacattta

SEQ ID NO: 484028 - DNA, 646 bp, Homo sapiens
ctgggctaaagtaggaaataggcaaagcttatggtgtttccattttgctgtccagttcctcactactgttttcttcccttaccaaaacttcttttcatggtgctaacagaactgaaaatttaagtgatcatcccaagagtcttagtgatgaaaataatatgcmttgaagaaggaagctgtgatagtggaagttcgtgctctgagtagggcagggagggcttcttttctttcattcttcaacacactttcctgtcattgccaaaatcaattcaatcattctgtgatttgtagaccattaatatgacaaaaaagcatcaaaagattttttccactttttttttaaaagaaattataattactagcccttactaacaaagattagcaagcatttcctgcctgtttggttgacagtatgtcttgctttttatggtttagctcccaaggaaatacaatttggatttacagcataaagaaggagaggtaaaaccaagcagggttgattccttttccatcaggcttacatataaaagtataaaagtatatataaaagtatatatatatatattttaaaaagtatatatacatatatattaaatttttgtttgtagtactctcattaaatatttgatgtgtatttttaggtgtg

SEQ ID NO: 484029 - DNA, 646 bp, Homo sapiens
ctgggctaaagtaggaaataggcaaagcttatggtgtttccattttgctgtccagttcctcactactgttttcttcccttaccaaaacttcttttcatggtgctaacagaactgaaaatttaagtgatcatcccaagagtcttagtgatgaaaataatatgcattgaagaaggaagctgtgatagtggaagttcgtgctctgagtagggcagggagggcttcttttctttcattcttcaacacactttcctgtcattgccaaaatcaattcaatcattctgtgatttgtagaccattaatatgacaaaaaagcatcaaaagattttttccactttttttttaaaagaaattataattrctagcccttactaacaaagattagcaagcatttcctgcctgtttggttgacagtatgtcttgctttttatggtttagctcccaaggaaatacaatttggatttacagcataaagaaggagaggtaaaaccaagcagggttgattccttttccatcaggcttacatataaaagtataaaagtatatataaaagtatatatatatatattttaaaaagtatatatacatatatattaaatttttgtttgtagtactctcattaaatatttgatgtgtatttttaggtgtg

SEQ ID NO: 484030 - DNA, 568 bp, Homo sapiens
ggcagtgtttaccaacattctctctattaggaatccatttccttttgccatttggctagaattctcaagtggtatcaacacaatagtcccatggtatactcaacattcagttttgaaatatattattagtacatttaaactataaatatacagatcctcaaaggcaggattgtattatttatctttttactccccagtgcttatcctactgtctgatacattgggagtactcaataaatttttatcaaatgaaagaatgaatgaattaaaccacaaattaccctcttctaagaacataaatgtttgatttmattttactcagctattacttcatatatatgtttggaagctggattagattgtctctaaggcccttcccagcatcaatttgggttatgtggaaatcattttgtatctctacgattctttcctttatttggttgtggtagataatggggtggtactccttccctcctcagttgttacctctgccgagatggcagagagaaacattttcaagatttacttttcttttttatttattctgcttagctttctagagattgta

SEQ ID NO: 484031 - DNA, 636 bp, Homo sapiens
ggtgacaaaataatctgtacaacaaaccccgtgacacaagtttacctatatgacaaaggtgcacatgtacttatgaacctaaaataaaactttaaaaaaaaagaaaaacttggatatcaaagaaagctctggctatttctttgaaagaaagaaggggacaatgttttcatttgttcaaggataaacayagaattcataaaacaagacatggttaatatttccatctgtggttctgcataataaatttgtaacaagtcatcagatacatttgtcatgagatgaaatctctcattctgtaagttcttccaagcagtcctaatcaaacctcttgtcaagtctagcatcaaaggaaagaagtcatgctattttaaggcagctctcaggtctaccaaagtctaaatacgctcaatgccttccaaagtacccagcagcatttcaccatgttgaacactgaaaacctctaaggttactaataaattctttttaataaatagaagaatgatacgccagaatagtggctgatattaatgcatttgattttgtacctcaggaatcaaattcaatgataggtgattttagcttgggctaaaattaatccagaacttctgcacttcttgataactctttttctctctc

SEQ ID NO: 484032 - DNA, 636 bp, Homo sapiens
ggtgacaaaataatctgtacaacaaaccccgtgacacaagtttacctatatgacaaaggtgcacatgtacttatgaacctaaaataaaactttaaaaaaaaagaaaaacttggatatcaaagaaagctctggctatttctttgaaagaaagaaggggacaatgttttcatttgttcaaggataaacacagaattcrtaaaacaagacatggttaatatttccatctgtggttctgcataataaatttgtaacaagtcatcagatacatttgtcatgagatgaaatctctcattctgtaagttcttccaagcagtcctaatcaaacctcttgtcaagtctagcatcaaaggaaagaagtcatgctattttaaggcagctctcaggtctaccaaagtctaaatacgctcaatgccttccaaagtacccagcagcatttcaccatgttgaacactgaaaacctctaaggttactaataaattctttttaataaatagaagaatgatacgccagaatagtggctgatattaatgcatttgattttgtacctcaggaatcaaattcaatgataggtgattttagcttgggctaaaattaatccagaacttctgcacttcttgataactctttttctctctc

SEQ ID NO: 484033 - DNA, 636 bp, Homo sapiens
ggtgacaaaataatctgtacaacaaaccccgtgacacaagtttacctatatgacaaaggtgcacatgtacttatgaacctaaaataaaactttaaaaaaaaagaaaaacttggatatcaaagaaagctctggctatttctttgaaagaaagaaggggacaatgttttcatttgttcaaggataaacacagaattcataaaacaagacatggttaatatttccatctgtggttctgcataataaatttgtaacaagtcatcagatacatttgtcatgagatgaaatctctcattctgtaagttcttccaagcagtcctaatcaaacctcttgtcaagtctagcatcaaaggaaagaagtcatgctattttaaggcagctctcaggtctaccaaagtctaaatacgctcaatgccttccaaagtacccagcagcatttcaccatgttgaacactgaaaacctctaaggttrctaataaattctttttaataaatagaagaatgatacgccagaatagtggctgatattaatgcatttgattttgtacctcaggaatcaaattcaatgataggtgattttagcttgggctaaaattaatccagaacttctgcacttcttgataactctttttctctctc

SEQ ID NO: 484034 - DNA, 598 bp, Homo sapiens
ctctttggggatttacctgagtcatctagcatgagtgactacatttttgttttgtctggtctgctaaggcatagggcaggagtctagtccaaaataatgacctcccataaactttgtttaacagcacttataactcagtttttgtctcatgtcattgtatatcaatagccagagatatggccattagattractcagcatttatgctgtggtaccaacaccttccctatcatgagcctagccaggtgaaaaagccaaagtcttcctgtatctgaaacgcatcctgtcgctgctcctctgtctaaaaatcaaagtccacatttatactcaattcaggcaccagaaagtctagtctccattattccatttctacctaaagtgtcaattagttccaccagtccatttccctgttcagcacaagacataggtctgatttttcctaaactcatctttctgtgtgcatttaactggatacccaatgacagtttttggtgttatcataaatttattcaactttttgacacttgcagcttaaaaacaatgtcaaaatcttatatctgatcttttaccaattcctatttcctttactaaccttacta

SEQ ID NO: 484035 - DNA, 574 bp, Homo sapiens
gcatgagtgactacatttttgttttgtctggtctgctaaggcatagggcaggagtctagtccaaaataatgacctcccataaactttgtttaacagcacttataactcagtttttgtctcatgtcattgtatatcaatagccagagatatggccattagattaactcagcatttatgctgtggtaccaacaccttccctatcatgagcctagccaggtgawaaagccaaagtcttcctgtatctgaaacgcatcctgtcgctgctcctctgtctaaaaatcaaagtccacatttatactcaattcaggcaccagaaagtctagtctccattattccatttctacctaaagtgtcaattagttccaccagtccatttccctgttcagcacaagacataggtctgatttttcctaaactcatctttctgtgtgcatttaactggatacccaatgacagtttttggtgttatcataaatttattcaactttttgacacttgcagcttaaaaacaatgtcaaaatcttatatctgatcttttaccaattcctatttcctttactaaccttactaaata

SEQ ID NO: 484036 - DNA, 574 bp, Homo sapiens
gcatgagtgactacatttttgttttgtctggtctgctaaggcatagggcaggagtctagtccaaaataatgacctcccataaactttgtttaacagcacttataactcagtttttgtctcatgtcattgtatatcaatagccagagatatggccattagattaactcagcatttatgctgtggtaccaacaccttccctatcatgagcctagccaggtgaaaaagccaaagtcttcctgtatctgaaacgcatcctgtcgctgctcctctgtctaaaaatcaaagtccacatttatactcaattcaggcaccagaaagtctagtctccattattccatttctacctaaagtgtcaattagttccaccagtccatttccctgttcagcacaagacataggtctgatttttcctaaactcatctttctgtgtgcatttaactggatacccaatgacagtttttgstgttatcataaatttattcaactttttgacacttgcagcttaaaaacaatgtcaaaatcttatatctgatcttttaccaattcctatttcctttactaaccttactaaata

SEQ ID NO: 484037 - DNA, 584 bp, Homo sapiens
tgtgcctggccaatgagtagtgaacaagttcatgtagattttcatttttacttgattttacacattcaaaattttggcaaaattattcaacatttttatttaattgacaaaagacagcagttattttgcctgcacccttgtttactgcataaggatcagtaatgatactaagcagggtctgtgtgctaggtactgttatctcataagaattatcccagaaaaaaatcattcgatattaaaaacaggttttattcactggtgagcaagtcaacatagtgtttactcaatctaggtataattctcgatgttgaccctttaagctgatggaaaaacaacattaatttatgctcactcacctaggatggagcctatatttagtccagaccacacactaacatttattgagccaaccatgaggtgctgattttcagcctggttggttagtaagcatattgyaccagttgttcaatattttcaatatcacacttttagccatgtaaccagccaaggcaagtccttctcttaacaatcaatgtcatataaaaaagtctgatacttcttcctatcaaatttgatgtggggta

SEQ ID NO: 484038 - DNA, 525 bp, Homo sapiens
gtcctaaaggtttgatattccctggatataaattcaaggcaggaatgcttaaaacagtcagaaggcttagcttaaagctgaatgcagctggtatatggatgtatcaatatgcataatcacttcaaatctgctctgtcagtagacaggtaagctcttgsttctctgtgccagatacttggacaggcaccagaacagccttcttactctaaagctccatggcttctttaaacatcactgagccttcctctcttctcagaggctaccatgacacctacgctcagaaagccattccaggaataagtctcccttggttaagaccttcagctagatgtttttaagcattgggaaaagaatgtgctgaaaccgtattgcatcaaacagtatgaaattcgagtacttagggccaaggcagaagcaattctcctttatattcatgaagagattttgttttatagcattttgcagatatgataacatctgtctgcataaccttcccacaagggatggcagtgggaggacgattat

SEQ ID NO: 484039 - DNA, 334 bp, Homo sapiens
tcttcttggaccaccctaaatttagattctgtatcattgctacatgctcccatagcatccagccctttcttcatcatagcacytacactgccttatatctggggtcatttttagactgtgttctttgctacattagaaatccatgagggtagggatattatctgtcttgtccatcaaggaatacccagctcctaggacaaggccatacccataaaatatgacatgaaaatcaccacattctccaaaattgagataccaaccattcttcagtgaacaaatgaatctgattctctatctcacataactttaggaaatacagtatctatttgggttt

SEQ ID NO: 484040 - DNA, 334 bp, Homo sapiens
tcttcttggaccaccctaaatttagattctgtatcattgctacatgctcccatagcatccagccctttcttcatcatagcacctacactgccttatatctggggtcatttttagackgtgttctttgctacattagaaatccatgagggtagggatattatctgtcttgtccatcaaggaatacccagctcctaggacaaggccatacccataaaatatgacatgaaaatcaccacattctccaaaattgagataccaaccattcttcagtgaacaaatgaatctgattctctatctcacataactttaggaaatacagtatctatttgggttt

SEQ ID NO: 484041 - DNA, 334 bp, Homo sapiens
tcttcttggaccaccctaaatttagattctgtatcattgctacatgctcccatagcatccagccctttcttcatcatagcacctacactgccttatatctggggtcatttttagactgtgttctttgctacattagaaatccatgagggtagggatattatctgtcttgtccatcaaggaatacccagctcctaggacaaggccatacccataaaatatgacatgaaaatcaccacattctccaaaattgagayaccaaccattcttcagtgaacaaatgaatctgattctctatctcacataactttaggaaatacagtatctatttgggttt

SEQ ID NO: 484042 - DNA, 570 bp, Homo sapiens
aatttgttatttcacatgtaaccatgagtaaaattttcttagtcttttttatgcagtgtaatacaggtttgacattttaaaaaagtgatgatgtgtgacagcagcaagagtacttttgaatgtgactatatgacctgtcaaagaatttacatcaggtctttctgaagtgctgtcattctcattcacaatacaggccctcaagcccctcactgccccacagtaaaggctgtcacccagtcagcaccaatttcattctygtgtgatattgctgatgtgtatcatgctcttgttaaattcactgtaggtcaactaactatttcttctaagtgactcaatcataaaacataaggcccacaaatacctagagaggtatagtaactggcatgtttatgatagttgcattaggaacctgatgaattggggtagaatctgaatttaacttgaatatcagtaagaatgaaattgtaaaaattctaataaatttattttgtatatttgtatattttttcaaaggaatttggttaattactttaaattactggctgtcttttgattaaaatgggttgattt

SEQ ID NO: 484043 - DNA, 509 bp, Homo sapiens
tgcttggactacaggcatgaaccactgtgcctggccaattgcaatttacctataaactatacttgtattattgtttatcacttacatgtttatttgcataactcaattgatatatttttctttttgttaatattgcataacttggattcgtatagaatgtaccataattttcacaatataattaatagaaatatactttttcacctaataatatttttaatcctaaatcatgtttttaaaagccagttaaattccctatgtggccaggcatggtggctcattcctataatctcagcactttgggagtctgaggtgggaggattgcttgagaccaggagttccagaccagcctgagcaataacaagatcttgtctctacaatttaaaaaaaaaatttaaagtgagagataagtgtacataatttatttccattgtcattccatattakgtatgtattgttaaaatacaaatctctaaatgtcataaacatggtcaaagattttacttagc

SEQ ID NO: 484044 - DNA, 583 bp, Homo sapiens
gataacacaagcccttgtaaagagcctgctcaaagttcccaaatttatagaaaatgtagataccattaaaataataagaactagaaatagttccatcttctccataatagttcttcataaaatgacagcaatctattttagtgccaggagacactgagttagatctaggcaaagcttttctcttgtagaatgtgtgtgtgtgtatctgtgtgtgtgtgtgtgtgtatctgtgtgtgtgtgtttgtgggtgagtgtagttcccatggaattagggggttttgataaaattatgggaaatgttattatactctgtaagtcagcctggttaaatgtgatagaagacaatctttaataaattctcctatttatttgtctttagcaaaaaaaaaaraaaaaaaaaagtgaaactatgcatataccttgatttgcctcccaaataatccattcttccctggtatgccctattaagtacaacgtgcttatgcattttatctttaataagcaagttgtagtagtagaaaagtttaagctttgttatgaaaagttaaaaagtcattttgtccttgatgcaaatctttccttc

SEQ ID NO: 484045 - DNA, 669 bp, Homo sapiens
gtaaaactgttcttttttgttttataggcagttctttcatgccaatggtatgaacatgctcaactatattggtggagtcagggatgtattcaaatgacagccaycataatatcctcttccctaaattcactccagttggtgagtcctgatagttatacttgtctctttcttcaagtcccaagagccctgaagtcttacctaccatttagcttcggctgctgtctcccaagtttgctgtacttgcttatatgtctctgaatccccaaatctcccagcttttttttttcttatcaaggtcataagcatcattgaaataatagaataggtacgtatatattattacagtgattagtgtatgaatttgatctctttgtgatcaccacgtttcataaatttatttccctttagcatcacccactgtattttcctaaagctaggtaaaaaattcacaaaaccttacagcatgggttgaagaataggaatagactttattgaggaactctgcagccaaggtttcataagaatagaaaccacaggccttctaattttgaatagcatcacacagtcctcacgcgagggctctctctaagatgtgtaacatatgtctgcattccaaggaagagactccatcaagacatttctctcccttttttatagagcaattggcaa

SEQ ID NO: 484046 - DNA, 603 bp, Homo sapiens
atgcgacacatactgagccttcatcaccctcaaaaagtctgtgcaaatacacgctgatcaccaatggagacttttggaagattaattttagttcttatggactttctgatttgtcttcaggcatactaagaataactttgctcctggtcctgttaatgagcataatcacgaaagcacgcggagcatggctttgggtcatcaaaggacgaacctcccagagagatcctctcaaatccaagttgaatataattgagaagacatactggtcattttttttcacccatggaggaggagcttcataattcaagaccagcttcccgaattcagtcctcattgytgccacaactaactcaactttcattcattgaaaatgtaataacattagttaaaagttattggttgctaacaatgtgtgaagcatgttctaagcattttccagctattaattaatttaatcaccacaatcaatttctaagacaggtacttttattgttcccattttatgaatgaggaaactagggagaagagaggtcaactaacttacccaagcgtgcacagtaagtggtggagccactggctgcagggtttgttctttaaaccgtt

SEQ ID NO: 484047 - DNA, 603 bp, Homo sapiens
atgcgacacatactgagccttcatcaccctcaaaaagtctgtgcaaatacacgctgatcaccaatggagacttttggaagattaattttagttcttatggactttctgatttgtcttcaggcatactaagaataactttgctcctggtcctgttaatgagcataatcacgaaagcacgcggagcatggctttgggtcatcaaaggacgaacctcccagagagatcctctcaaatccaagttgaatataattgagaagacatactggtcattttttttcacccatggaggaggagcttcataattcaagaccagcttcccgaattcagtcctcattgctgccacaactaaytcaactttcattcattgaaaatgtaataacattagttaaaagttattggttgctaacaatgtgtgaagcatgttctaagcattttccagctattaattaatttaatcaccacaatcaatttctaagacaggtacttttattgttcccattttatgaatgaggaaactagggagaagagaggtcaactaacttacccaagcgtgcacagtaagtggtggagccactggctgcagggtttgttctttaaaccgtt

SEQ ID NO: 484048 - DNA, 474 bp, Homo sapiens
tgttaggccccaagagtgggccgagagacacaccccactaccgtggtgaagcacatttcctgtggtgtctgtgcccctgctgagttgtgggggtgaggcaagtaatgtcggcagtcatatacagatttagtgcaaatcattcaggagaaggacattccttcttcccaatgtgcaacccgctcctgcctgagcgttccagtttagagagtacctgctgcagtcaggcagaagtgtaaagccttttctgtttgataagagactggccaagatgcatggctgaggggttactggacaacyagagctacctgtggacttggcaatccactggtccctgaacctgggtaagtttctgggcagagccacatttattgacggctatgaagactggtcagtgaaagtgaaacctgtatctctacatcttggcttcagccgcttggctctctgcttaggcactgtgtatgtctgttccatacc

SEQ ID NO: 484049 - DNA, 604 bp, Homo sapiens
ccaggcctgagaagaaccccagagacttagtgaatctgtctctggggcatctctccttgtaatggggctatgagctgatgcccaggctctaaggagacagtgctggctggtgccacccaacaggaggwttcatcctactctttgaatcccaggaagactctcctggggtttcagctcttactcccactcttacaatcataggactcgcatgaggagcctgggaagtgaaagctggggccatgtgtgacagcagctatgagaagcagagaactctcaggccccagtctgcagccccagacctctcatgccagtgctcagggcactgaattgtcatgacttggtttctcctggcagaatcgcgggaggcacagagttggaagttggatcactccccaaatgagttgttgaggctccgtgtgacatgatgacgtttgctgggccactcagcaaattgttcccccagtagacctgcctcacagctcaacagtctgtcagctgcgtttattgggaacctgctagcaatgtgaattggtaggcagtccaagcactgcagtagcagttcccaagagttgcggactaagttatctatctatcaaatcctgtc

SEQ ID NO: 484050 - DNA, 420 bp, Homo sapiens
acaaaacaatacaaaaattagttgagcatagtggtgtatgcctgtggtcgcagctacttgggatgctgaggtgagagaatcgcttgagctcaggaggtcaaggcttcagtgagctatgatcacactactgcactctagcctgtgcaatagagtgagacctgtctcaaaaacaaaaccacaacaaacatgtgtctggcagcataaaacatataacatacatatgctatttatgtgtgagtgtgtatatgtctgtaaatatgccttataaaatgccaccaatrtgcatttatttgtctcacacaacaagaattctggggcaggggagcccagggtcctttctctttccctttctgttctgttcacagcaagctggcattcactgccatgcttgtcacctcatacacaccagattttgctgca

SEQ ID NO: 484051 - DNA, 619 bp, Homo sapiens
tttatttagctgcttgatcatttcgcttgtgctctgggactggtccctaacactttcctcttgctggctctgccacctctcctcttagctggggcctcccttttcaggayggggattaaaagtcagaacctccattacctctactgacctttggaaatggagcttttcttcagacctcaagacattgcctccttttactttcctagccttgtcttcctcctgaggaaagtgttctcagagaaagtcccctttcacatctgtccattgaatttagctaacatttagggacagcctgccaaggggtggactctctagctggtacaaaaatgaggcaaacacagtttctgttctgtccggcccttcagagagtccctgtcttgtgggatgcatagatacctgcatagcacctggcaatgtacctgacacatagcaagccctcactaagtatttgtcaaatgaactgagtgagtggttgactgcacagcaacttcgatggagagcagtctatggtaaatgctgtaggagagaaaaggacaaaatgtaagggaagatcgaagtgacagacattgcctgtgcttggaggcaccaagaaagacttcatcaggggcaatagagagga

SEQ ID NO: 484052 - DNA, 619 bp, Homo sapiens
tttatttagctgcttgatcatttcgcttgtgctctgggactggtccctaacactttcctcttgctggctctgccacctctcctcttagctggggcctcccttttcaggatggggattaaaagtcagaacctccattacctctactgacctttggaaatggagcttttcttcagacctcaagacattgcctccttttactttcctagccttgtcttcctcctgaggaaagtgttctcagagaaagtcccctttcacatctgtccattgaatttagctaacatttagggacagcctgccaaggggtggactctctagctggtacaaaaatgaggcaaacacagtttctgttctgtcyggcccttcagagagtccctgtcttgtgggatgcatagatacctgcatagcacctggcaatgtacctgacacatagcaagccctcactaagtatttgtcaaatgaactgagtgagtggttgactgcacagcaacttcgatggagagcagtctatggtaaatgctgtaggagagaaaaggacaaaatgtaagggaagatcgaagtgacagacattgcctgtgcttggaggcaccaagaaagacttcatcaggggcaatagagagga

SEQ ID NO: 484053 - DNA, 619 bp, Homo sapiens
tttatttagctgcttgatcatttcgcttgtgctctgggactggtccctaacactttcctcttgctggctctgccacctctcctcttagctggggcctcccttttcaggatggggattaaaagtcagaacctccattacctctactgacctttggaaatggagcttttcttcagacctcaagacattgcctccttttactttcctagccttgtcttcctcctgaggaaagtgttctcagagaaagtcccctttcacatctgtccattgaatttagctaacatttagggacagcctgccaaggggtggactctctagctggtacaaaaatgaggcaaacacagtttctgttctgtccggcccttcagagagtccctgtcttgtgggatgcatagatacctgcatagcacctggcaatgtacctgacacatagcaagccctcastaagtatttgtcaaatgaactgagtgagtggttgactgcacagcaacttcgatggagagcagtctatggtaaatgctgtaggagagaaaaggacaaaatgtaagggaagatcgaagtgacagacattgcctgtgcttggaggcaccaagaaagacttcatcaggggcaatagagagga

SEQ ID NO: 484054 - DNA, 598 bp, Homo sapiens
aacaagttctctcattatcttccttctttttctgcctagtcactgaaacagtcattgaattgttgtctcatgcctgtgtgctaycaagcaccatggaatatggaagaaggaatagtggttgtgccctccctctctctggtgaggctgcagcagggagggtcagtgaggactcaagaaagacccacaatgcagcaggttgaggttgatgtaggcaggaagccattaagattcaaccgagcatgtgagttaagaagcagtatacagagagcatagtaggtctgagcagaaccaagacaaaaggcagcaatctctgagccagaaagatcatgctggactggcagcatcatctttggggaattcgtatcttacgtctctaaaccttaatgtgtaatgtagtcaacacaagcttaactgcctcttgtctcccccaagagcacttccttccttccatcactttcctgctactaagacatagaaagaaggacactacaggaaattcatgacaaactcacagagccaccatgctgcactcacacatccaccctgcaaggacctaccttcttcttggagggatgaagcaggctaacctcagagtcac

SEQ ID NO: 484055 - DNA, 598 bp, Homo sapiens
aacaagttctctcattatcttccttctttttctgcctagtcactgaaacagtcattgaattgttgtctcatgcctgtgtgctatcaagcaccatggaatatggaagaaggaatagtggttgtgccctccctctctctggtgaggctgcagcagggagggtcagtgaggactcaagaaagacccacaatgcagcaggttgaggttgatgtaggcaggaagccattaagattcaaccgagcatgtgagttaagaagcagtatacagagagcatagtaggtctgrgcagaaccaagacaaaaggcagcaatctctgagccagaaagatcatgctggactggcagcatcatctttggggaattcgtatcttacgtctctaaaccttaatgtgtaatgtagtcaacacaagcttaactgcctcttgtctcccccaagagcacttccttccttccatcactttcctgctactaagacatagaaagaaggacactacaggaaattcatgacaaactcacagagccaccatgctgcactcacacatccaccctgcaaggacctaccttcttcttggagggatgaagcaggctaacctcagagtcac

SEQ ID NO: 484056 - DNA, 560 bp, Homo sapiens
tatataggctactttattatgcttgatctcagtacttattcacatggcttattatcatggaacatttttatagctttcattctcgtctgtgacagttttactagagtgacaagctcattggtctgaaataaataggggtaatgagagcatttgagtcttcatattcaatgccatgaaaaagaaaagatggaaattacatatgggtaagaggtaaagattagatgcttgaaaaatacatttccaaattcattaagatgaatttggaagatacacaacttcattaccaaggcttcctttccttcattgatgtttagctcttataattaatatcaygcaaatggggcacagacacatacttcactagtgccaaggagtatatttacaaaatagggttatttgtgggggaaaatatggaatcccagaagtatcaaagcaacatgattccctgagagatgtgcttaggtcaagcctatagtgtttcagtggatcaccccaacttcatacactccgcatattttttagcgaaaggcggcagagaatatctgggtaactttgtaaca

SEQ ID NO: 484057 - DNA, 536 bp, Homo sapiens
ttcattcatcattcaacaaaagtttattaaaagccagctatgttcagtgtcctcaacttccacagttgcctgcgctcaaccaaccccatactggaaaggatgaaagtaaactgattagtaataaggtgttaatgactgacaaaacttaagccattactctatcccaaacattattatattttaacagagcctgatgacttaactcattgaaattatatattattataacattaggtcagcagcccctgtagtaggttgatggaggaaatattttggtaattcttgacatatttcaaagaatttttccatatactcattccatatccccatccatatgatatcaaaactgactaaaaaatgagaaatgtagccaaatagcacttcttaatggtttctttgtgccaggcactgtgctagttgctggtaatgtacaagcagataggacacrgttcttaccttcagggactcagagcccagtggggaagagagaaggcagcaacatctagcagcgaagggctgtgtggaagtgaatgcag

SEQ ID NO: 484058 - DNA, 668 bp, Homo sapiens
taaacacactatgtgtgctccccttccaagcgctagcaggccactatgcatgcagacagcacactccaagggaagagccagggagaaggaatgaaagatcctggaagtatgtcaatgcataaaattccaagtcaaagatcaaacagcgcacttgatttctcaagtcacctgcttggccctcctccaagtgtactttacttcctttcattcctgctctaaagctttttttaaaaaaactttcaatcctgctctaaaacttgccacagtctcttcttctgcctaacgcccctcagtcaaattctttcttctgaggaggcaagaattgaggttgctgcagacycacatggatttgccaccactaacacagccagcccccacatttaatcatctccaatgtgcctaggaaacctggtgcctggatgtctggccactcttatcatactgctgggtcctataagggaggacctggtgactatatctgcacagtttataagatatttatgtaggactttacatgttgcaaactaagtgatatgtccaagactcctcagctcttgagcacagcagataggacaaaaaagtaggtatgctggccatgagttcatgtacctgtgaggaaggagaaaggaagaatgtggtgactctgttgcctaggcagaccctcagca

SEQ ID NO: 484059 - DNA, 541 bp, Homo sapiens
acttctttcttcttattaccaatctgggtcttcttacaccatcctcccagataacaaatcagaaatctaattattatcttagaatcctttttctttttcattcagtacaccttattatgcactataacctatgtactatcccrgttaatatctcttgaatacactcttttttgcaattaatgcctttgccttacttcaagttacagtcatctttcacctagactactctaacatgctttttactgatatccctatacccatacttgtaatcctaaaaaatattttctacattgttcagtgacatcttccaaaactgcaaagtagaaagtatcatttctctgatagtagcccactagtggctccccattgcctattggatatagtctcagctcttcagtatggcatatataatttggtctctataatttttcagattcgtctcctgtaatttctcctcatatttttacctttaagtcgtgccaggataccttcctgaatactatggcatttcatgattctgcattactttctaccatctttt

SEQ ID NO: 484060 - DNA, 441 bp, Homo sapiens
cactgttccccagtgctatcctggcctcttcacctacatttacaattattacaatatttgttgagaacctgttatgtgccaagcatcagtttaggtgcaataataaacttagagatgtatgccattttatgtttacgcttgcagttaggtttattttattagggcgacaagacttatttacttgaaataaaaatcaggaaacaaaagagcacttaatctgaagccaagatattctataggccagtagcttttaaacctttcaatgtaaagaatatgtgtgtctatgtatatttggaaataatgtctcacggaatattygtcatcactatgtttaataaactctgatattttctatttatccccatattcctattctgcattattacatttaaaatacactattaggatgacaatattttttgtcagcagcagcttacctaa

SEQ ID NO: 484061 - DNA, 610 bp, Homo sapiens
agaaaaccgcagctggaggcttagttatatttattatattccagacaggcaagtgtcttccgggttaggaaatgagaagggtttgtctgccagcttctgctttcctgtgcctccttggtcagtttgcctccagttcagctagatcccaaacccatggacttcccctgagcttgagtggtgggaaaagccctaggtatgggaatggaaacaagtatgaaagtaaaggaataatggaattactgaagtgttttgttctctagagaaagatgaccaatggaaaaataaacacaactaaaacttaggcaccaaactaactgaggaagagggtaggtggtagtgacctaaggaagtgaaaatttgctcagattattttcttattcaggagatagacatagatattgayaagcattagtgattaataagaaaaagaaaacagcacaagtttgagtctgataatttgatgtgtttaggggaatgagtaagggaaacaaaacaaataggacttgtggaaaatcaacttctctaaataagatggcaaagttaagtttccaaagcagcaatttcaataaatatgaatctatgaaagtaattaaataagattcagaagcac

SEQ ID NO: 484062 - DNA, 610 bp, Homo sapiens
agaaaaccgcagctggaggcttagttatatttattatattccagacaggcaagtgtcttccgggttaggaaatgagaagggtttgtctgccagcttctgctttcctgtgcctccttggtcagtttgcctccagttcagctagatcccaaacccatggacttcccctgagcttgagtggtgggaaaagccctaggtatgggaatggaaacaagtatgaaagtaaaggaataatggaattactgaagtgttttgttctctagagaaagatgaccaatggaaaaataaacacaactaaaacttaggcaccaaactaactgaggaagagggtaggtggtagtgacctaaggaagtgaaaatttgctcagattattttcttattcaggagatagacatagatattgacaagcattagtgattaataagmaaaagaaaacagcacaagtttgagtctgataatttgatgtgtttaggggaatgagtaagggaaacaaaacaaataggacttgtggaaaatcaacttctctaaataagatggcaaagttaagtttccaaagcagcaatttcaataaatatgaatctatgaaagtaattaaataagattcagaagcac

SEQ ID NO: 484063 - DNA, 627 bp, Homo sapiens
ctggaaggcgactggtaataaagtcataaattgagccaaagcctcttcagtccttggccagcttctggaccctgatggagagagaagggagccctcagacatttgtccccagagaatgagaagtgggtgtggctggagctcctagggaccctctggtttctgcttctgtttccatggaggccataaaaaagggtagtggccgagcgtgcatgtgacatgcattctctccagcttctccacccccgggtgtaatcctgtctggcttccctgagccctgtgcacaggagggattctggagaagcttgctgcaagacccagyggtgtcctcattcctttgttttacaaccgtttgccgtgttcgcatgccgcagttgtcaggagtgctatccaccatctgggtccatttctgggtctcctcatgtggggtgcgtggagaggctgtactttccagccttcttgaagttaggcacgtccttggcacttgatttctgccaagatctgtgagcagaagtgaggtgtgtctctttctgatgggagcctcaagagctggtgagcaattttttgtctgcatcccctgccagggagactggcgggttcttcaagggagggctcgccagcctgggcccc

SEQ ID NO: 484064 - DNA, 595 bp, Homo sapiens
tgctctgtgttgtcctgagagcaaagacataaagctcacaccgcccaccactacctgagaaaggtccaatggtcacagggcttgtttcctaacctccccccaaccccagtcaacccaagaccgcccacacttgagaacaggggctggaccaaggctggctgctcatcaccacccaagctatgttcaccacgtgaccacagggctgtggcatggagtgatgagacatccttgggtgtgtgcctggcacattgcatgagtgtcacctgctgctgctgctgyacccatcacgccatgtaggaggatctccttcctcttacgctgcctccagcctatgagaggatgtaggtaatgactatgctcacaaatatcacaaatgctcggtatacagcaggggctcaataaatgcttgttagaggcaaccagagcacagccagatgtgtgcgtgtgtatgtgctgactgtaccattttccagatgtgtgtcccacagcccatcactttgcctctctgagcctctgttacctcatctgtaaaatgggaggactcattcttgcctggaagggtgagtggggcatccccagggctcctgcgcctcag

SEQ ID NO: 484065 - DNA, 533 bp, Homo sapiens
caccttgatattggacttcaggctccagaactgcgaggaagtattagccccccagtctgtggtactttgttatggaagccctaacaaatataggacccagcaagcagaagatgtggaacttcttaaaaaggaactggccacagagaaatggtggtaacactcagatcacagaggagggaggaatggggggaacacagggcaaagggaggagcacccttagggaggatggtggatgcaggacatctccaggaaacactgcacccctgcccaactcaagcaggcaccatttcagacttcacttcttcaggatggtgcacagagagggctgggcttggagccacacaccttgtcaggctgtctctgagctcactctgtgggcttccgcgggttkctttgcctctggagcctcaagagttgcaaggatttaaataatgattcttttgaatgtgttgtgtaaactgaactactataaaaatgtaagtaattgttttggtggtggttgaagcatcatgtggtttgatgcctctggtagc

SEQ ID NO: 484066 - DNA, 509 bp, Homo sapiens
gaggcaggaggaacatttacaggacttgctcagcactggagaggaaccagatctgctcctgaaatgattccttattccaaaagtttgttgatgtaactgcccaaacttagcccaaattcagtctaatctgggaccttagcattttcatgtgcctgcatccagcagaaggaatcatttcacgacttcctccaggagaggaagtgggtttagagtaataaggatctgctttaggaggtaggtggggattatggattccagagatgggacagggttatgatgggaggagaatatggtggacaggttcctggggccatcacctcaatttcagtacctttagttctgtaaacagaacacctatttcattcactactgtattcagataagacctgaggagggaggaagaataaatgccccaaccaagagtgtgtgctaaggagttgggcaagctactgggccctcctaggctcagtttcgytaaactgtggataataagtttaggataatatctc

SEQ ID NO: 484067 - DNA, 474 bp, Homo sapiens
tttctcctcccctctgattcgaggagagagccattctgctctgcttactagctgcctgtctgcatctggggacacttacaaacctttgatgcctgtttaytcccctactcgccaagatttgggtccagatggcctggtgaggtggtgctgggcctgatggttgctaaatgctccctgggtgatcctggcactttctagagttgagcaactaccttgttaccccagacccagccctgactctgccacactcagggatctcctgttaatagggtccagcctccttagaagacagtttaacaacatattttgttacctgagcccatctttggggtccaccatagctgcctaagtgacttgaggagatatttcttccaaacccagacaaagagcctcattcaccaccagcactcctggtggatgacatcctccctgttaccttatgcaacacgggttccctgtgaccatttggaaagt

SEQ ID NO: 484068 - DNA, 474 bp, Homo sapiens
tttctcctcccctctgattcgaggagagagccattctgctctgcttactagctgcctgtctgcatctggggacacttacaaacctttgatgcctgtttattcccctactcgccaagatttgggtccagatggcctggtgaggtggtgctgggcctgatggttgctaaatgctccctgggtgatcctggcactttctagagttgagcaactaccttgttaccccagacccagccctgactctgccacactcagggatctcctgttaatagggtccagcctccttagaagacagtttaacaacatattttgttacctgagcccatctttggggtccaccatagctgcctaagtgacttgaggagatatttcttccaaacccagacaaagagcctcattcaccaccagcactcctggtggatgacatcctccctgttaccttatgcracacgggttccctgtgaccatttggaaagt

SEQ ID NO: 484069 - DNA, 374 bp, Homo sapiens
atatagtctgttataatatatcacatatataaataatatatatataaatcaaacataatacagttatatagtatataattataagtagaattatattaagcatatactagattatattgtaattagcaacaattgattactaatrcttttcctccctaggtagctattattgagcactctctagtaagccatggaatataaagatgttatgtaattttgattttgttaggctaatttccagcagttaagtatagttcaattagtgttctgttttgactatgtaattcaaaaactatgttttgtaaaaactcacaaaaataagaacaagaacaaaaaaagcaatgtcatttgagttattgaaggagaattcagcc

SEQ ID NO: 484070 - DNA, 578 bp, Homo sapiens
actgtctcctacccgccgagctgtcttccataacactctcccctaccgcgccacgctgtcttcattaacactatctcctgccctgccacacaactctgttttcctagaagtcaccagtgtgaatttttccctttatccatatgtacattttttgtttctgtgtgtctgtgtatatacatatgcataaaagtgcatagataaaatacatatccttttcaaaaaatcttaagtggggctcttgctatgcatactgttctgtaacttgttacttggattaacactgtatcttasacatctttctatgtagagcgtatagatcttccctgttcttttaaatggctgtataattgtctatggaaggacttaatttatttaacccataccttgttgatggcttatttgtgttttgcttttattttttcctctttgtttttgctgctacaagcaatgcttccttccatcttagcggatctgtctttgtacccttgaatgagaaagttgctggatcaaaggatgtattcattttgaattaggtgttgctaatttttcctccaatgatacactgatgtatcccccct

SEQ ID NO: 484071 - DNA, 578 bp, Homo sapiens
actgtctcctacccgccgagctgtcttccataacactctcccctaccgcgccacgctgtcttcattaacactatctcctgccctgccacacaactctgttttcctagaagtcaccagtgtgaatttttccctttatccatatgtacattttttgtttctgtgtgtctgtgtatatacatatgcataaaagtgcatagataaaatacatatccttttcaaaaaatcttaagtggggctcttgctatgcatactgttctgtaacttgttacttggattaacactgtatcttagacatctttctatgtagagcgtatagatcttccctgttcttttaaatggctgtataattgtctrtggaaggacttaatttatttaacccataccttgttgatggcttatttgtgttttgcttttattttttcctctttgtttttgctgctacaagcaatgcttccttccatcttagcggatctgtctttgtacccttgaatgagaaagttgctggatcaaaggatgtattcattttgaattaggtgttgctaatttttcctccaatgatacactgatgtatcccccct

SEQ ID NO: 484072 - DNA, 570 bp, Homo sapiens
tttgaaaggcagaattaagtttggacgtctaagttctaatgcacctttagggtgattgtggctgccgtgtttcacccagtgatttatttatagggcttattcattgtaattcattgtatggctggccaggcaaaagcatcctttttctccttcactgcagtttgtaactgactcactggttagaagtagtaacctttscagagagacaaaggactttctcaggcaagggtatatgagcagctttaaaatataatgtggcaaaggaaagaataagctgtagtctagttggtcagagctagttgtttatgaacagattgtaaggctggataatttgacttcaagtctgtactcagcaagtctttatgtttcataaccattaaagtccatgctttgagcatttttgataaaaaatgtgattttaaaccaggactagttttcacaagttaaaggagttttaaaagaaaccaaaatattggtacaaattaattacaggtttatgcatttcgaaggcagataccctgattaacattgagggtatcaattgtttaagataaaatatttgagaattat

SEQ ID NO: 484073 - DNA, 570 bp, Homo sapiens
tttgaaaggcagaattaagtttggacgtctaagttctaatgcacctttagggtgattgtggctgccgtgtttcacccagtgatttatttatagggcttattcattgtaattcattgtatggctggccaggcaaaagcatcctttttctccttcactgcagtttgtaactgactcactggttagaagtagtaacctttgcagagagacaaaggactttctcaggcaagggtatatgagcagctttaaaatataatgtggcaaaggaaagaataagctgtagtctagttggtcagagctagttgtttatgaacagattgtaaggctggataatttgacttcaagtctgtactcagcaagtctttatgtttcataaccattaaagtccatgctttgagcatttttgataaaaaatgtgattttaaaccaggactagttttcacaagttaaaggagttttaaaagaaaccaaaatattggtacaaattaattacaggtttatgcatttygaaggcagataccctgattaacattgagggtatcaattgtttaagataaaatatttgagaattat

SEQ ID NO: 484074 - DNA, 525 bp, Homo sapiens
cttggcctcccaaagtgctgggattacaggcatgagccaccgtgcctggccggggtggaacccttataaatgggacytgtgactttataaagaggccccacagagctgccttgctccttccaccacctaaggacataataagaaggcagtgccatctgtgaatgaggaaacaggttgatatggtttggatttgtgtccccgtccaaatgtcatgttgaattgtgtattaggattctctagaaggacagaactaatggaatatatatatacatatatacacacacatatatatacatatatatatgtatatatataaaggggagtttattaagtattaaagttccacgataggccatctgcaggctgaggagcaaggagagccagtctgagttccaaaactgaagaacttggagtctgatgttcgaaggcaggaagcatccagcaccagagaaagatgtaggctgggaggctaggccagtctctctttttgcgtttttctgcctggttatattccagcagtgctga

SEQ ID NO: 484075 - DNA, 587 bp, Homo sapiens
ggtcttcgatttatctactaatatagtcatgaaattacctttgacgtcccctgaaacccagctttctgctagactgtgatcctttatccwcagatcctgaaacatccatagaaagggaaccccaaagtgcaagtgcacacacacaaacacacacacacacacacacagtctttctgccttcctaaatctaaaaggtatagtaacaccataaattaaaagaaaataaaattaattttcagcaaaattttctcattctctaatatcaggtttcagttagatattaatatttaaaatatcttctaatacattattctaccttccatttgaggaaaggaacaaatgtaaacacagatatggtcccctcccctttgtaacctttcttttctttccattttttaatagctgcaaacttacaggacttctgcctcttaaatcaagtattactaaatttctacttcagcaccttctgggatgacaagattccaaatatgtaataaaaataaattgccattaatagctaggtctttggcagagttactggcctgttttgtttacttacccagtgccggtgtgatgttctactttgg

SEQ ID NO: 484076 - DNA, 506 bp, Homo sapiens
ggggatagagaacgggaatcttgttcacacagttctctccagtacccagcatggtgacccagaacatgtacatgtaaggcatttgtacatgtaatyaattagcaggcatgttttgaacaccagcttcattaggagtgatgccatatttgaggcagaaacatagtatgatggagaattcaagaggctttggactcatagctcttagctgaattctggctttatcagtactacctttgaggctttaagcaagttacttaacttttctgagcttactttctcaaataaaaagcaaggataactaaaatgctttggaaactttcctgtgagaaattgatgtgtaaatagataattaagggacatgctaggagttgtgttacaggcatgaacaggaacacagaggaggggacaaccaacacagctcaagaggtcacagaagatgtcatgtaagccttttctttttctcagagcctctggcattgacgtgcttggagatacctgaaaattgg

SEQ ID NO: 484077 - DNA, 506 bp, Homo sapiens
ggggatagagaacgggaatcttgttcacacagttctctccagtacccagcatggtgacccagaacatgtacatgtaaggcatttgtacatgtaattaattagcaggcatgttttgaacaccagcttcattaggagtgatgccatatttgaggcagaaacatagtatgatggagaattcaagaggctttggactcatagctcttagytgaattctggctttatcagtactacctttgaggctttaagcaagttacttaacttttctgagcttactttctcaaataaaaagcaaggataactaaaatgctttggaaactttcctgtgagaaattgatgtgtaaatagataattaagggacatgctaggagttgtgttacaggcatgaacaggaacacagaggaggggacaaccaacacagctcaagaggtcacagaagatgtcatgtaagccttttctttttctcagagcctctggcattgacgtgcttggagatacctgaaaattgg

SEQ ID NO: 484078 - DNA, 506 bp, Homo sapiens
ggggatagagaacgggaatcttgttcacacagttctctccagtacccagcatggtgacccagaacatgtacatgtaaggcatttgtacatgtaattaattagcaggcatgttttgaacaccagcttcattaggagtgatgccatatttgaggcagaaacatagtatgatggagaattcaagaggctttggactcatagctcttagctgaattctggctttatcagtactacctttgaggctttaagcaagttacttaacttttctgagcttactttctcaaataaaaagcaaggataactaaaatgctttggaaactttcctgtgagaaattgatgtgtaaatagataattaagggacatkctaggagttgtgttacaggcatgaacaggaacacagaggaggggacaaccaacacagctcaagaggtcacagaagatgtcatgtaagccttttctttttctcagagcctctggcattgacgtgcttggagatacctgaaaattgg

SEQ ID NO: 484079 - DNA, 506 bp, Homo sapiens
ggggatagagaacgggaatcttgttcacacagttctctccagtacccagcatggtgacccagaacatgtacatgtaaggcatttgtacatgtaattaattagcaggcatgttttgaacaccagcttcattaggagtgatgccatatttgaggcagaaacatagtatgatggagaattcaagaggctttggactcatagctcttagctgaattctggctttatcagtactacctttgaggctttaagcaagttacttaacttttctgagcttactttctcaaataaaaagcaaggataactaaaatgctttggaaactttcctgtgagaaattgatgtgtaaatagataattaagggacatgctaggagttgtgttacaggcatgaacaggaacacagaggaggggacaaccaacacagctcaagaggtcacagaagatgtcatgtaagccttttctttttctcagagcctctggcatygacgtgcttggagatacctgaaaattgg

SEQ ID NO: 484080 - DNA, 589 bp, Homo sapiens
ttgcaaaccatacatagtagtatacttgatcaatatgtaaatgttataaattaaatattccaccacaaacaaagtaacatttatcatcaagagagaagggatagtaaaaacattaatgaaccagtccagggcgaccaacatagacaaaaataatcttctggtctggcctgtggtggctgtcggtcttgcaaggaagagtctttgatatgggcagagctttgggttgcagatgccagatgcatatcacgagtgatagcaagatggtgtctgttaaggtggacttttcaagctgctgaggtyctgctcttttaatggccaccccagagtcctctggtgagaactgatagtggaaaagtgtgcttggttatgtccttatctggttggatgtagtctttattgattaggcaaaatatctgttctcttttggcaaggggccttttgaaatgtaagatggagtctgtttctgagatacagttacttatgtcatgggggcgctatacaaagtgccacacttaagaccacagagggattctctcccatggaatacaactctgtggagcacgagtccatgaagcatagtttatactga

SEQ ID NO: 484081 - DNA, 642 bp, Homo sapiens
ctgcctctgctggcagatactccaagctaccaactaaacaaaaatacaaacaaaagcataattaacaggcttcttccactctgcactatgtagatgagaggtgcaatgttctgaaaaactttgatgcgttaactcagaccatttgctgatactcattggcaggcaacaggttcctactaaaggcagtaattcataaccaccatcagcatgtgtgcttaccacacttttgtccctcccctggtggaggtcagagccacagtgaccaggatagagcctgctggggattttcacttaggcccaccctctagtccctctctgacatctttgccacmctagggactcaaaaccatctatggcctggttgagcaacagcaacacatcagggggtcaggcttggagaccacacaggaaggccttatccacctcctttgggcttggctctttctcctgctcctcagccatggccgacccattatttagcaacatctctattttatcatgctcattatactgcagtgttcttcattttcatctcattattgttggcggggtcatccagcggttttgtcacccaggagactgggagggaagctgtacactcagctctcttccccaggcttggctaatccatcatctgacaat

SEQ ID NO: 484082 - DNA, 472 bp, Homo sapiens
ggcacaagctgtttctctgaataatgcaaccatggaatagtgggagtaagagcactggacagggagccaggaagcccaggtcagcagatggatgagagagcccaggaggaaggaaggagatgggcaagcctcctggcccagctctgcaggaaaccagctatgggctgaacacagaggtccccagatccacccgtgtcaggcaggctccagtaggagtcagcaaacacgggggtcagggatggtgtagcaggcctctggcctcacaccacaaaatctactgattagattagccaggacgygccatcacaggggtcagggctttcttccgcttcaacttttcggcaagctcttgcctccaccatcctgggagaggtgggctaactcctgtgaaaggcacttgggtcatctttcagggggatgctgcttcctcctccctgccccgccctctatccaggactagatggatttgctg

SEQ ID NO: 484083 - DNA, 574 bp, Homo sapiens
catggtggaggtcaagaggaaagacccctgttcccagagaaagcgatggtccratcctccactagtgtcagcaggctcaaggatggacacagacttgaatccagtgtaactcaccccttacgccactcagatccactcattttctcccattatattgactcttatactgtattatagcaattctgggtttgttttgtttttgtgtgcagacaagacaccctcactccttccctaagagggagatataggtccttacagtcacagttgaaatcccctgggagaattcaggaatgaggttcagtgaaacaagagtccttaatagacattcatcctccatcatctctctcctgcaccacccatgctaaaattcccttgtctcctaccagcatttagtctggtccaggttgattgcttggtggagttacccagcccttcaggccccttgtcctccctgtgcttggtgggttgcaccaagcacaattcccattgactgtaattataggacttagaagtactgagagacatccaaatacattgcctgaattttggaaattctttttaatgatcccttata

SEQ ID NO: 484084 - DNA, 508 bp, Homo sapiens
cccctgttcccagagaaagcgatggtccgatcctccactagtgtcagcaggctcaaggatggacacagacttgaatccagtgtaactcaccccttacgccactsagatccactcattttctcccattatattgactcttatactgtattatagcaattctgggtttgttttgtttttgtgtgcagacaagacaccctcactccttccctaagagggagatataggtccttacagtcacagttgaaatcccctgggagaattcaggaatgaggttcagtgaaacaagagtccttaatagacattcatcctccatcatctctctcctgcaccacccatgctaaaattcccttgtctcctaccagcatttagtctggtccaggttgattgcttggtggagttacccagcccttcaggccccttgtcctccctgtgcttggtgggttgcaccaagcacaattcccattgactgtaattataggacttagaagtactgagagacatccaaata

SEQ ID NO: 484085 - DNA, 609 bp, Homo sapiens
tggtccctgcccccatctctgctctaatctaatttcctgccacgttccttctcattcactatgctcagtctcactggccttctttcaattcctgaatcctgttgactctttgtgtttgctcttccttctacctggaccactcctcttgcagatcatttaggtctctgctcccatatcttctccycagagaccttttcttgaccatcctataaaatgttgtccccacctcccagacaccttcccatagaatccctcgtaaaagcaggcctgggtggtcaggcatgcccagacatgtactgaatcctagcagagtttaggctcaaacaggagtacccctaagagttccctcccaaccctgcagcatacgcatatggagccctgtctgcagtgatcggtgtattgtctccacctcccagacactgctgtgttgaggaataatggctgagagtgttcagcattgaaggaaaacaccaaatctcaagcaatgtaattaaagacaaatccatatttctactggagacatcatagtgcaactatagaacatcaaagagaaagaatgacttgaaagaacttcaaaagtattactttagcaagaaagaatatgagcca

SEQ ID NO: 484086 - DNA, 609 bp, Homo sapiens
tggtccctgcccccatctctgctctaatctaatttcctgccacgttccttctcattcactatgctcagtctcactggccttctttcaattcctgaatcctgttgactctttgtgtttgctcttccttctacctggaccactcctcttgcagatcatttaggtctctgctcccatatcttctccccagagaccttttcttgaccatcctataaaatgttgtccccacctccyagacaccttcccatagaatccctcgtaaaagcaggcctgggtggtcaggcatgcccagacatgtactgaatcctagcagagtttaggctcaaacaggagtacccctaagagttccctcccaaccctgcagcatacgcatatggagccctgtctgcagtgatcggtgtattgtctccacctcccagacactgctgtgttgaggaataatggctgagagtgttcagcattgaaggaaaacaccaaatctcaagcaatgtaattaaagacaaatccatatttctactggagacatcatagtgcaactatagaacatcaaagagaaagaatgacttgaaagaacttcaaaagtattactttagcaagaaagaatatgagcca

SEQ ID NO: 484087 - DNA, 609 bp, Homo sapiens
tggtccctgcccccatctctgctctaatctaatttcctgccacgttccttctcattcactatgctcagtctcactggccttctttcaattcctgaatcctgttgactctttgtgtttgctcttccttctacctggaccactcctcttgcagatcatttaggtctctgctcccatatcttctccccagagaccttttcttgaccatcctataaaatgttgtccccacctcccagacaccttcccatagaatccctcgtaaaagcaggcctgggtggtcaggcatgcccagacatgtactgaatcctagcagagtttaggctcaaacaggagtacccctaagagttccctcccaaccctgcagcatacgcatatggagccctgtctgcagtgatcggtgtattgtctccacctcccagacactgctgtgttgaggaataatggctgagagtgttcagcattgaaggaaaacaccaaatctcaagcaatgtaattaaagacaaatccatatttctactggagacatcatagtgcaaytatagaacatcaaagagaaagaatgacttgaaagaacttcaaaagtattactttagcaagaaagaatatgagcca

SEQ ID NO: 484088 - DNA, 588 bp, Homo sapiens
cttaggcaatggtggagcctggagctaaaacatatctggatccctgaaccgccatttggaggaacgtcatctgccaatcaggagcaaccaaagtagattgttccacagattagaaataaacctattgagttaagccattgaaatctgaacagtatgtatcaaaagctagagttactttaaccaatacactaacagactatttgaagcaatgttctcgaatttctgcgtttatggcatactttcaaatgtgagaatttttgccggcacaattgaagggaccacattccacacaaaagatcacactactcacttcagcattgtgttactgcctgagtgcatcaatttacttgtcttttacatataaaggaagcaaaattcccgcatttgtggagagcatgtgatctccctgtggcatagatgtgtaatgatgctatcactctcgcaacacattctaccrcagctacactgggtcatgcgacccattcagctcatcatcccattcctgtccccaccagactgggttgtcacaaaagttaattttacccactgctcaatattctggctgctcacatgtaagggttcacaatt

SEQ ID NO: 484089 - DNA, 565 bp, Homo sapiens
tttaaatttttttgtacagacaaaaaayttaaatggcctgtgtttcccaggctgttcttgaactcctggcctcaagtgatcctcgtgcctcggcctcccaaactgctgggattacaggggggagccacagtgccagccagagagaacatttctaaggagagaatgatcacagagtccggcgcaccaccactctgccttatgcctagtgagaggggcttcactgagactgctgggagacctggacatggggcctgggagtaatttggaagggagccctgtggactgggtgggggccaagcccctggggaagcaagtagtgagaggctgtggctggagctgcctgcttgttgcttggagcacaggacaagaagaggtgtgtgccagcaaataacccattctgctggattctgtagcatcaaagggtgtgtgaatgtttcagaagctggtctgagttacttagatccagtccaagaaaatgaagctgagggagagtttgcctgcattgaggtgcagctagtggtgaggacggggaccagggactctcatggagcatccacctgaggga

SEQ ID NO: 484090 - DNA, 295 bp, Homo sapiens
gaacactgtgggcactcgctcagtgtgggacaagcgtgctggctaaagtccctccccttccctccctcccctccctgtcctccccacctccccctgcctcccacccccaccccccaccccattacctcactgctgccagccttccctttcccatcagtcctccgttaggcgcagagccctggctcctgcggggccaggctggacgtggcttccagtgacagggccctttgtctcacaggtgggaggctggcgtgcgaccttcatcrgctcccacgtctctgcctccgtgctctgg

SEQ ID NO: 484091 - DNA, 565 bp, Homo sapiens
agcaaggcggagagacagacagacagtcagagaggctggtcatacacgcactccgyaaggccccctcttgcctacccgtccgctacatgccccaaaagcctgcggaagcaagaagagcagggactgtgagacccatttcgcagatggagaaactgagacggtggggcatcaggtcagggtctggggctgccagtgaggagatgagctgattcttgggcaaggcgcttcccagcttcacaaacggaagggaggatgagctgggtctgccaggttctaggtggcagacctctctgggcctcagtttccccatcagtaaagcatgatgatccctaaggtcccttctggcctccaagtccttgagtcggtgactgggaaaaggggtggcccagcaggactaggacctggccacctccgtgccctccacagaggtgcagacaccagagaaagagcctggggttggcagggggtcaaggacgaacctaagagttgggcacctacgcctgtgcacgactgcctttcctgtcacctgctgtcctggcctgcagacctggaggggcctaacacg

SEQ ID NO: 484092 - DNA, 607 bp, Homo sapiens
gtcagaccaagtgacctctcaggccctttccggccaggcgttctgggatgggaacagatttcctttctcccttccccctggaggggggtggttcaggcctaagtgactcaggacaggccctatctctcagcacagcacaggggtcctgccctgggggcrcctgcttcgctcctcaggtttcacctcccacccttttagagcacaggggagtgtggggcctgggccctggggagctgagggtctgacccgccctgcttaggaaaaggacagaaaatgtctggaggacccccccttcactgcggacatgcgtgagcaggtcagcaggcccccagcatcctcaccatggggtgcccctgcctgtcctgcaccctcacactcaagtctgcccgcaagggagcctgctgggtgggtgtgggaggtcaaaccactgcccgcactgcctggcccatgaggaggccggggcctctccccaccttgccctgctttaggggtcccgtgatcatatggaccacctgcccactgtcatctcctcagcagccaggggcactaaccaaggtcaccagcaagtgacgggcatggccacagtgcacagggccctcaggaacag

SEQ ID NO: 484093 - DNA, 589 bp, Homo sapiens
cctctcaggccctttccggccaggcgttctgggatgggaacagatttcctttctcccttccccctggaggggggtggttcaggcctaagtgactcaggacaggccctatctctcagcacagcacaggggtcctgccctgggggcgcctgcttcgctcctcaggtttcacctcccacccttttagagcacaggggagtgtggggcctgggccctggggagctgagggtctgacccgccctgcttaggaaaaggacagaaaatgtctggaggacccccccttcactgcggacatgcgtgagcaggtcagcaggcccccagcatcctcaccatggggtgcccctgcctgtcctgcaccctcacactcaagtctgcccgcaagggagcctgctgggtgggtgtgggaggtcaaaccactgcccgcactgcctggcccatgaggaggccggggcctctccccaccttgccctgctttaggggtcccgtgatcatatggaccacctgcccactgtcatctcctcagcagscaggggcactaaccaaggtcaccagcaagtgacgggcatggccacagtgcacagggccctcagga

SEQ ID NO: 484094 - DNA, 464 bp, Homo sapiens
gggctgggaacgaagcatgaagtgagagagagatgtgggagtgtcaagtgagacagcaatcccacccaaatgatgggagaacagcaacaagaacctgattcatgatttttttaaaaaaaaattgaaaaataaacaagtttcctctgttcacaggtcagccatcacattataaaaatgtgtattacataagcagtaaaagacgacataaaagagacaaaaygccagcttcatagtgaagagtaggtgaaggtaagaaaagagatttaaaatataattcccccaaagcttggcaagctatcaatagcatcaagaagttaagaacttaaatattttccaaattgaatatttaggttaaatcaccttgtctatcttaacgggacaaaaggaagagaagattcacagtagaaactgaaaatgaaaaaactataatatcacaatatagaaaacagaggggcaacctcaca

SEQ ID NO: 484095 - DNA, 582 bp, Homo sapiens
agacaggcgccaaactgctgcctccgtcttgccttctgaagccatccacgcctccttcatcctccatcttgcttctgccttcattctttattcctgcaaaaccttcctggggggtcctggggtgcacgctggagccgcctggagtggagaagggaaggccgccctgctccctggctccttcgtgttgctgcgacctcagttattgggtgacctcctgaactgcccttgtctcactcatccaggaggaccctggcgagagtggagkgaagacccccagggcgggtgtcagaggctcgggttccactcaagactctgctcctcccaagtatcacgggtactggggaagcaggggcttctgttgctgggatggctgctcttggcactaacgccctgaatctttcctctttgctcctggtccagactgggccagggacagcgcccagcaacacacacaggttgtgctgagtggtccgctttggttctgctgttgggctgccagtggagggcaggggagtccgtccgcttcttgaggacagtccggggtcctccactgatctctcttctcacctttcaggtcttttg

SEQ ID NO: 484096 - DNA, 598 bp, Homo sapiens
tccctgtgcaccctggtggagtgcctttacttcgtcagcatgtacggaagcgtcttcaccatctgcttcatcagcatggaccggttcttggccatccgttacccgctmctggtgagccacctccggtcccccaggaagatctttgggatctgctgcaccatctgggtcctggtgtggaccggaagcatccctatctacagtttccatgggaaagtggaaaaatacatgtgcttccacaacatgtctgatgatacctggagcgccaaggtcttcttcccgctggaggtgtttggcttcctccttcccatgggcatcatgggcttctgctgctccaggagcatccacatcctgctgggccgccgagaccacacccaggactgggtgcagcagaaagcctgcatctacagcatcgcagccagcctggctgtcttcgtggtctccttcctcccagtccacctggggttcttcctgcagttcctggtgagaaacagctttatcgtagagtgcagagccaagcagagcatcagcttcttcttgcaattgtccatgtgtttctccaacgtcaactgctgcctggatgttttctgctactactttg

SEQ ID NO: 484097 - DNA, 598 bp, Homo sapiens
tccctgtgcaccctggtggagtgcctttacttcgtcagcatgtacggaagcgtcttcaccatctgcttcatcagcatggaccggttcttggccatccgttacccgctactggtgagccacctccggtcccccaggaagatctttgggatctgctgcaccatctgggtcctggtgtggaccggaagcatccctatctacagtttccatgggaaagtggaaaaatacatgtgcttccacaacatgtctgatgatacctggagygccaaggtcttcttcccgctggaggtgtttggcttcctccttcccatgggcatcatgggcttctgctgctccaggagcatccacatcctgctgggccgccgagaccacacccaggactgggtgcagcagaaagcctgcatctacagcatcgcagccagcctggctgtcttcgtggtctccttcctcccagtccacctggggttcttcctgcagttcctggtgagaaacagctttatcgtagagtgcagagccaagcagagcatcagcttcttcttgcaattgtccatgtgtttctccaacgtcaactgctgcctggatgttttctgctactactttg

SEQ ID NO: 484098 - DNA, 627 bp, Homo sapiens
tcggaggctcaggccccctgagctgggcctctaagaaccacagccacagagtcaggctctgcagacccagaggtaaggctgcctggctgccccaaaccccagacactcctctccttgcctgcaggctgccctctcccatggccaccctagacagagacccacccgtgatactctgagggagccagactttcacatgcaacggggcatttggggctggttcgggtcagtgtctacgggtggtggatttagtgaccaccctcctcccacttctttctctgcacgaggagttgggagcctgcctggtggagttgagtgatgcccgtcatgtgcacttgggtctaccaatgtgcttaaggccagatgggcttcctaagagacaagggtgggtggacctaaccaactatcatccccagcgatgttcaaacataaaatcttatctatgtgcagcatgactctctccaggtgacagaaagggctctagacagctgagaggamctgatcatgtagggagggacggggaggggagccaggacccaggagctgcatggctgtaagaggaaggtccttggagggtatcagcagtctcagtgtgatgtgacaactatggacctgtgggtgtgccctggg

SEQ ID NO: 484099 - DNA, 554 bp, Homo sapiens
tgctctttctgcccctcagggatgggggttagttcccrggaccaaatgtgagatgaccacctctgtgaacagcacaagtatccactgaaagccccaaccctgagctcttggtcccaggggaaggaggacacaggtcagaagaaccagggacagccagcctgacccagcccaagtgcttagcaaaatgcttagagcccggccgcctccctccccggggcccactccatgctgactcctggtaacctctgggcaggagtcagcctcccctggggaagattagcatccggacgcctcggggtggccctgtttgctatctggggtggggtgaggatgaccatctgttctggtttgcccagaatggatgggactcctggggggactctggaccttcagtgttaaacccagatagtccctaagagtgaagagccgtcactgcaggtcggcaagggagctttggggattaagccctctcttcagtcggggtttcccaccctgactccacccaccaaggaagggcattgtcctgttgggttgggcttcccccacccccaccc

SEQ ID NO: 484100 - DNA, 554 bp, Homo sapiens
tgctctttctgcccctcagggatgggggttagttcccaggaccaaatgtgagatgaccacctctgtgaacagcacaagtatccactgaaagccccaaccctgagctcttggtcccaggggaaggaggacacaggtcagaagaaccagggacagccagcctgacccagcccaagtgcttagcaaaatgcttagagcccggccgcctccctccccggggcccactccatgctgactcctggtaacctctgggcaggagtcagcctcccctggggaagattagcatccggacgcctcggggtggccctgtttgctatctggggtggggtgaggatgaccatctgttctggtttgcccagaatggatgggactcctggggggactctggaccttcagtgttaaacccagatagtccctaagagtgaagagccgtcactgcaggtcggcaagggagctttggggattragccctctcttcagtcggggtttcccaccctgactccacccaccaaggaagggcattgtcctgttgggttgggcttcccccacccccaccc

SEQ ID NO: 484101 - DNA, 610 bp, Homo sapiens
tgtcctactgagatccaaggacagtccttagcccctgctaaaaggaagaggtggaattagttagtcccctctgtggaatccagaaaactcctctaaaagttgctcagcaaatatttaatgaagctgaacagaagtcataaaccccagttcccttgttttcttgcctgtagtggagtttctgacacagccaagggtgtggatgtgggtggagctccaaggtcaatcagcgtggtttgaaattttgccaaaggacctggagagggtggcaagctgctgggtggcagaacatcacggaggaaccatgtccacccagccccagcccccagccagagagggacgaggaatgtggcctcaagcctacaccgtgcaggagtctgtccagcttaccgtgtccttgtcaagccccagtcctcctctctctgyaggagccagaaggtcataaatccaaggagcccagtcccatttcttggccttcagggctggggagggagagggtgacccttggtggctgtttatggggccggtcatcatctacctgaacgggaatagtcaattcttctgcagtctgacgggaacattgccaaggtcaaaaaacctgtgaagacattgg

SEQ ID NO: 484102 - DNA, 482 bp, Homo sapiens
ctgctgttgtatcccatgagagtccctgtgaccacaaataaatacctggatggagaggggctccccaactccagagccaacatggccacctcagccttgcccagacagccccccaacaccctacggggctttkcatgtatccttcctaaagacatgggcatacatatctgacttccccaactctcctccccgatttcctcaccaggcaacttggcaacctgcctcacctttacagacacgcgcagttgtcacctcctccagggagatctctttgactcatctcaggtggggctaaatggccctcgtctatcctcccccggggtcctgcgcttgcctttctcacagacccagcacccctccaaaacagtcgttctgcaatagtgggggaaaggtgccctgggacccaattcttaactctggccatgaacgagggtacatctactgggattccctttgcctggtgaggattggagttgggggag

SEQ ID NO: 484103 - DNA, 482 bp, Homo sapiens
ctgctgttgtatcccatgagagtccctgtgaccacaaataaatacctggatggagaggggctccccaactccagagccaacatggccacctcagccttgcccagacagccccccaacaccctacggggctttgcatgtatccttcctaaagacatgggcatacatatctgacttccccaactctcctccccgatttcctcaccaggcaacttggcaacctgcctcacctttacagacacgcgcagktgtcacctcctccagggagatctctttgactcatctcaggtggggctaaatggccctcgtctatcctcccccggggtcctgcgcttgcctttctcacagacccagcacccctccaaaacagtcgttctgcaatagtgggggaaaggtgccctgggacccaattcttaactctggccatgaacgagggtacatctactgggattccctttgcctggtgaggattggagttgggggag

SEQ ID NO: 484104 - DNA, 658 bp, Homo sapiens
tgttaaattaatgttgctattttgtattttattggttttgtataattgttgatatatgatttctaaatgtgctttggttttatagtattataagagctatcagcataagaagtgtatgcttaattttatatttgtatacattcaaaagacataataatcaaaaccatttaggccatagtttcaagtaaacatgtcgcagtgaagtttgttgtagagtcttctttcctgaatagcaagaaaatgtacaaagttagtttttaaaaatttacaaatttagtttcttaatatttctataaatgagttctttataagaagcttgtatcattctcacaaattaaaaataataatattttagcmagctatttttaaaatataatttaagcccacacttccacatttggggtaagtgataattttttcctctgaaagacaacaaatactaacacaggcccagacttggcttttgtgagtcaattagtgatccgaaggtgagtggtatttaaacgtatgatgagggtaagatttgatttattttacatatatatcttctggtatctgtgtgtgtgtgtgctttttttttttttttttttttttttttttttttttttgcaattttggataatacatgtccaattttagaaagagcagaaaacacaga

SEQ ID NO: 484105 - DNA, 334 bp, Homo sapiens
ggtcactggtcaccaccactcgcccagcagacaggctgagcctakttatgcagcagcaccagccagtgaggaggaacacctttgagaacatcctgtcatgaaccctcgcccaaacggacttccagccccagggcatttggcctcactgcaacaggatgccaggggtggatgcgggggcaggggcagcagggtggggggcacaaccctgggggtttgcacatctttttgctctgcctttctcactgtcagcttctggggctgcccgctggcctttcaggcagacatcccacccccacctccaccccccaccccacagtggccctgggggcaccag

SEQ ID NO: 484106 - DNA, 435 bp, Homo sapiens
gttcagggtgggacgcaggtcactggtcaccaccactcgcccagcagacaggctgagcctagttatgcagcagcaccagccagtgaggaggaacacctttgagaacatcctgtcatgaaccctcgcccaaacggacttccagcmccagggcatttggcctcactgcaacaggatgccaggggtggatgcgggggcaggggcagcagggtggggggcacaaccctgggggtttgcacatctttttgctctgcctttctcactgtcagcttctggggctgcccgctggcctttcaggcagacatcccacccccacctccaccccccaccccacagtggccctgggggcaccagagattgagagccactggtttaggcattaacccttctgctgggatgtaccctcccttcctcggactctgccctgtgctcagccat

SEQ ID NO: 484107 - DNA, 608 bp, Homo sapiens
cagcaactcacaaaatttactagagagaagatggtccaggatattactctctggaacatgcagctattgaaggtttcagggaaaataatcttatgcacacctattgctgctaacgctgctgatgatcaacattaccgtggcaattcagtgaaagagccctaaataatgttggcttctgaacacttgcttagaattggcagattctactttttctcttttcaaaaattatgttatactttggtgcttccaaaatttttgaaacttccacattttctctagatttcacaaaatcactgacartggatggtggtcatataggtgaatttttatttatttgttttattttttattttttaagtatcccaaaccacggtcaattcttctcaacttttttatgtgttgaaacttcaaattttcagataaattgaaagcatggtgcccatgagactctgatcgggaaaacagaggtacactcattattttagcagaaagaattcagcataggagatatgttcaacagacactggaggactaaaacctagatgcacggaaaaggggtccacagagtttatagccagacttcaaaaagcagagcaggtgctgcccag

SEQ ID NO: 484108 - DNA, 464 bp, Homo sapiens
ccccagacagccctaagaaatgtgccactgtgtcggtggtggggacaccatggaaggtgacatgcacagcttcacatggyggctgccctatgaagacgtgggacaagcagtatcttgattttagaaaaaaaaaaaaaaaaaagaaaagaaaagctgtgcttcttctcagccactggttcatttttgccttaaggaccagttgactttacaagtgataatatatgtagtttttctttgtcttagctataaaggagagaaaagacaaatgtgggtacaatctgtggtaaccctgtagaaccatatggcattcattctgcacactgactgtgctccagagtgtctcttctctgctctctctcttactttctctttattcccttatttttatcactagatttttaaaaatcttattttagtaaatggtccgctgacagccaactcagatccattttggaaagacatag

SEQ ID NO: 484109 - DNA, 464 bp, Homo sapiens
ccccagacagccctaagaaatgtgccactgtgtcggtggtggggacaccatggaaggtgacatgcacagcttcacatggtggctgcccyatgaagacgtgggacaagcagtatcttgattttagaaaaaaaaaaaaaaaaaagaaaagaaaagctgtgcttcttctcagccactggttcatttttgccttaaggaccagttgactttacaagtgataatatatgtagtttttctttgtcttagctataaaggagagaaaagacaaatgtgggtacaatctgtggtaaccctgtagaaccatatggcattcattctgcacactgactgtgctccagagtgtctcttctctgctctctctcttactttctctttattcccttatttttatcactagatttttaaaaatcttattttagtaaatggtccgctgacagccaactcagatccattttggaaagacatag

SEQ ID NO: 484110 - DNA, 464 bp, Homo sapiens
ccccagacagccctaagaaatgtgccactgtgtcggtggtggggacaccatggaaggtgacatgcacagcttcacatggtggctgccctatgaagacgtgggacaagcagtatcttgattttagaaaaaaaaaaaaaaaaaagaaaagmaaagctgtgcttcttctcagccactggttcatttttgccttaaggaccagttgactttacaagtgataatatatgtagtttttctttgtcttagctataaaggagagaaaagacaaatgtgggtacaatctgtggtaaccctgtagaaccatatggcattcattctgcacactgactgtgctccagagtgtctcttctctgctctctctcttactttctctttattcccttatttttatcactagatttttaaaaatcttattttagtaaatggtccgctgacagccaactcagatccattttggaaagacatag

SEQ ID NO: 484111 - DNA, 464 bp, Homo sapiens
ccccagacagccctaagaaatgtgccactgtgtcggtggtggggacaccatggaaggtgacatgcacagcttcacatggtggctgccctatgaagacgtgggacaagcagtatcttgattttagaaaaaaaaaaaaaaaaaagaaaagaaaagctgtgcttcttctcagccactggttcatttttgccttaaggaccagttgactttacaagtgataatatatgtagtttttctttgtcttagctataaaggagagaaaagacaaatgtgggtacaatctgtggtaaccctgtagaaccatatggcattcattctgcacactgactgtgctccagagtgtctcttctctgctctctctcttactttctctttattcccttatttttatcrctagatttttaaaaatcttattttagtaaatggtccgctgacagccaactcagatccattttggaaagacatag

SEQ ID NO: 484112 - DNA, 588 bp, Homo sapiens
ggtgtttggttttccgttcttgtattagtttgctaagaatgatggtttccacctttatccatgtccctgcaaaggacatgaactcatcttttttatggatgcatagtattccatggtatatatgtgccacattttctttatccagtctatcattgataggcatttgggttggttgcaagtctttgctattgtaaatagtgccacaataaacatacgtgtgcatgtctttatagtagaatgatttgtaatcctttgggtataacccaataacgggatttctgggtcaaatggttatttctagttctagattcttgaggaatcgccrcactgtcttccacaaaggttgaactaatttatactcccaccaacagtgtaaaagagaaccagcaaattaagaatgcaatccaacactgttggtgggattgcattctttgtttgctggttctcatttaagatctagcgatctgtgccagaggagagttgctctaatggctgggcagtgcttatagctcttttacttttagaaggaaacaagagacaaagaaagctggggaattctatagaaagttctacttctagtttcaatcc

SEQ ID NO: 484113 - DNA, 563 bp, Homo sapiens
gcatacaaatatacagcatataaatttaaatatgggccaggtgtgatagctcacgcctgtaatcccaacactttgggagactgaggcgggcggatcatgaggtcaggagattgagaccatcctggctaacatagtgaaaacccttctctactaaaaatacaaaaaaattagcctggtgtggtggcacacgcctatagtcccagctactcgggaggctgaggcaggagaatcgcttgaacctgggaggcagaggttgcggtgagccaagatcaygtcactacacttcagactggggtgacagagcgagactgtctggaaaataataataattaaatatggtgtagagaattagataatagtagtcccatttcctgtccttcagtatgttgatttatgaatttttgtgatatgaattgtggctttttaaaagtaaccttttctttgttctctgtagtactgaaaagaggaaaagaatgatatcaactggctcagaattgaatgaagattaccctaaggaaaatgattcatcatcgtaagttactttaagggcctttatagtgtta

SEQ ID NO: 484114 - DNA, 559 bp, Homo sapiens
tatggcatactttaccactagtatctgtgtactagtcacaatatttgcttctcatttttcaaagctttttataatacagaatgaaaatgccatcaaccctgttatatacagatccacttcacctccctttatttgtttttatctgagaaggagtctcactctgtcgcccaggctggagtgcagtggtgcaatcttggctcactgcaacctccgcctcccggttcaagcgaattctcctgcctcagcctcccgagtagctgggattagggtcacacaccaccatgctcagctaatttttctatttatctcccgttatttggaggtyatttgtcactacaaaactttgaaagagttatgttttgtttcacagaggtttaatcttcattaaacctacccagctctgtgattgttttgggcttctcagtttccatagtgtctggattttctggcatttcttgaatatcatcttctgcaaatccggtatctgggctgctagttggcttatcatcatcttcatgactcagagatggtgaagcatctctcttacttatctccaaga

SEQ ID NO: 484115 - DNA, 528 bp, Homo sapiens
tgcaacaattcaaacaagagatgatagtggcttggtgtagggtagtggcaatgaaagtggtaaaaagaggtcacattctggatgtatttccaaggtagagctgaaaggacttgcagacatatgagatgtcaggtttgagaaaaagaaatacaaagctgggcacagttgcatacgcctgtaaactccagcaatttgggaggccaaggtgggagggttgcttgaggccagttcaagactagactgggcaacayagtgagagcccgtctctagaaaaaatttaaaaattagctgggtgtggtggcatgtgctcgtagtcctggctactctagatgctgaggtgggaaggattgcttaagttcaggagttagcaggctatagtaagctatgactgcaccactgcactccagcctgggtgacagagcaagactctgtcttaaaaaaaaaaaaatttttttccctcatattcaagaatatattattaatacactgaattgccttatattaattaaaaagcagtcagtttaaact

SEQ ID NO: 484116 - DNA, 504 bp, Homo sapiens
tgtggaaactgcttgtagtgtgcctggtccagccatagccttgcagagagcccacactggcacctggaactgcccaccctgctgcagcagcaggcgtgtctgactgctcagtagccagaccccatgctcgctcacacacccctcaccactccatgcctgacttgcccttggcaggtgtgggatccaggctggtagcatgagctgagcgcagttgccaggccgagtgggcagaacgagcccagcaggcctgagcaaaacttgggcaaaggcacccccagccacagaggtktctggcaagaaaaacggcactccatagatcccgtaacagtatgtgaattgtatttcaatatagctgttaaaaaattatcattatcagctccatgattatctactaagaaaatcaaagagaataaattttaaaatgaattaaaagtgagagcatagaaagttgccaagtgaaaaatcaacatacaaaatcactttccagtacaccagcaatagcca

SEQ ID NO: 484117 - DNA, 517 bp, Homo sapiens
catatggattaggattagagaaaagacaattccctaaaggaaaaaaaaaggaggaacattgttactagaggactgagaatgggaaagccaaataaaatctgtaactagggccgggcacggtggctcacgcctgtaaacccagcactttgggaggctgaggagggtggagaacttgaggtcaggaattttgagaccagcctgaccaacatggtaaaaccccgtctctactaaaaatacaaaaattagctgggtgtggtggcatgtgcctataatcccagctattcaggaggctgagacaggagaatggcttraacctggaaggtggaggttgcagtgagccaagatcgtgccactgtactttagcctgggtgacagagcaagactctgtctcgaaaaaaaaaaagaaaaaaaaaatcctgtaactaccccagtataccatagcaggagtcactggtgcagggggagaactgcttcaggcagacggactagattattttttacagaacctttacagtct

SEQ ID NO: 484118 - DNA, 625 bp, Homo sapiens
accaaaggtaatgccagcccctgaaggagaaacrgcagctccacttttccctccttggggaatcttacttccctaacctcaccttcacgggcctgactctgctagtgtcttcactccatgccttcactctccagtttctaaatcagctctaaggccacatgttagggtctctggtcactgggtttcctacacgcttccttggctgacctgcaggaaggctgggctgggacagcagcctgtggtcaggttggagcttgccgggagccctgtgtctatgtggtctctgacacagtggtcacaggtgtgagcctgtccatcctcacacttgctacaaccatgaatcctacatataggggaggagagcagggtgggctgtaaaaaggagttccgcattgcccaagagctacttacgatttagataagcctgtccagcgtgggtctccaaacttgattcccacactcacctgaagtgatgtgtggactctgtggaaaggttggggcctcaccaggcacccccattcatcagtccagcacgataagagctgagccaagattattgctccttgagaagactgctgagatcagaatgacaagccccgtgcatagacagggtgggtgccgggag

SEQ ID NO: 484119 - DNA, 508 bp, Homo sapiens
agccaggatttgaacccaggtttggccaactccagaatctccccttgtgaactttgggttcagtgccactgtcagtgcagagctggccattcctggataaggcagggcactgggacttctggaattggcaccttgtccaggagtgcacaagggtgtctcccacagccaccaggacctccaactcagggctcactgtggggtgggctggcaggctggggagcatggcaggataaattgtccctccctctcccctcaggtggaaaactctgaggaacattccctgtcctctcccagaggtgcccccaggtgggcctctgtaacttagtgggaacccacttattagcacccccgtataggcttctgtctcttcccttctatcccttccttgtcccactccccactcctggtatcccttctttaaaaactacttgcacacaaatccttgtcctggcrtcaccttctggggagcccaatgtgagcagcctgcctgggagggagccctgggtct

SEQ ID NO: 484120 - DNA, 369 bp, Homo sapiens
aataggcccttcatagggctacgttgagcaagctgcattcattaggccattaagaacattaaagcacaaaagacgttctaatgggtgacagatgaatgctcatcctggtaattttttttttttttgagacaatgttttgctctgtcccccaggctgcagggcagtggcgtgatctcagctcactgcaacctccaccttccgggttcaagcgattctcatgcctcggcctcccgagtagctgggaccacaggtgtgtgccaccatgcccagctaattttgtgtgtgtatgcgttttttttttttttttgagataagagtctcgctctgtcgcccaggccagastgcagtggtgtgatctcagctcactgc

SEQ ID NO: 484121 - DNA, 422 bp, Homo sapiens
caaaagaccattgactacactcagtttttgcacaaggagaagaaaatgcaggaggaggaggtgtccacactatgcaaggacctcacagccctaaagatcatgaaagggaactataagcagattgtgaaggcacaccaggacaacccccatgaggggaggaccaggcctctgaccaagtcaaggtcagtgtgtttcgaggtatcaygaactccctgttccagtccttcaatgtcttcatctctgtgaccaacttctaggagctgtcagcctgtgtcttcagatagattgaggagcactgcaagccacaggccatgggagatcgtgattggcatccagcaccaattgaaaaaccagctttactgaccagttcttgtaaacctgcagaacagcaaacaagaggcccttgagtctctatttggcca

SEQ ID NO: 484122 - DNA, 422 bp, Homo sapiens
caaaagaccattgactacactcagtttttgcacaaggagaagaaaatgcaggaggaggaggtgtccacactatgcaaggacctcacagccctaaagatcatgaaagggaactataagcagattgtgaaggcacaccaggacaacccccatgaggggaggaccaggcctctgaccaagtcaaggtcagtgtgtttcgaggtatcacgaactccctgttccagtccttcaatgtcttcatctctgtgaccaacttctaggagctgtcagcctgtgtcttcagmtagattgaggagcactgcaagccacaggccatgggagatcgtgattggcatccagcaccaattgaaaaaccagctttactgaccagttcttgtaaacctgcagaacagcaaacaagaggcccttgagtctctatttggcca

SEQ ID NO: 484123 - DNA, 480 bp, Homo sapiens
gttatatgcaaatactacattttttatataaggtagttgagcatccatggattttagtatccttgggggtcctggaaccaatcccctcccatactgaggaaggactgtacacagaaaaaatcaagatttacatagtgatataggggaggaggcagtggactcaaacctgtgaaaaatgtcaaaaatgggttagagcttagaaaaacactgaagaataagaataaggtttatttttatgtttgcagagatcaatcaggccagaaragacattggaatcaacataggattagcatagattagaaaattacatgaagaactatttcaagttatccttaaacaaggcactaaattagattatatggagatttattttaagggactaaaagaaaacatcaaaatgtattggttgctttatttcatttcataaatcaaattacggatgtagtatagtacatgtattttatgtttcagctaaggaaa

SEQ ID NO: 484124 - DNA, 582 bp, Homo sapiens
agggaactcacaggagctgcttgaatatgcgaacgggtactgcttggagtgttgagaaagcagctccagacccaagccctatccacatcctcccattttacattgcccagggccacccacctttgcactgcagcttgtgtgggtaaggaccctggcagacctggaacgggagtcttagcatgggtaagtctctgaatttctctacgcccctccctgttaccttttcagtatgctgggaattataacagcttacagggttattgttaagattaatgagcacatactgctaacagcatatattaatrgcttggtaaaataggatgaaaactaaaatttattttgcagcagaattccccttaggaacagatctagtttgttggataaatacgttgatgaactacttcagggattgcagtggcactgagataggagaggaaagcagaaggaagatggcaccctggggaaacttggtggtaggggaggtgttctggctggttactggctttggtgttgataaagattatctttaaataaggggagagttttagagatggaggtgggtaaagacaacagcgatggaca

SEQ ID NO: 484125 - DNA, 629 bp, Homo sapiens
ttccccatggctctgagcctcccagcactcccgctcagcctggcctggtgctctggtctcttcttctcatggtgtttctctctgagtagggctctgtgccayctctcctcctcctcctgtttcttggcttttttctagctgcctgccttttccctggcacacttctatctctctaattctttttcttatacacatgtggcactcagtccttcaatttattgggagaagcagagtgggctgaatattgagagttttcattgtttccctttcttcggaaaacataatagcccaagatgcaaaagcacaccataatttatccattctgtgctgacaagccagtgactgcttggagacagctatgggatgggagagggaatgcagagggaccctacttgctttcagtgtcatccaaaagtggtgagatctattgacatttagaccatctcacctttaaggagtgagttcagacagctctatcattgtattgattataataagaacctataccatttcagagcatgactgcgggggcaaggattcgtcttcccatttttcagattgtgaaattctgaaacagaggcatttgtcttaggctgactcccacagcagagtagaagtctcagttcagg

SEQ ID NO: 484126 - DNA, 629 bp, Homo sapiens
ttccccatggctctgagcctcccagcactcccgctcagcctggcctggtgctctggtctcttcttctcatggtgtttctctctgagtagggctctgtgccacctctcctcctcctcctgtttcttggcttttttctagctgcctgccttttccctggcacacttctatctctctaattctttttcttatacacatgtggcactcagtccttcaatttattgggagaagcagagtgggctgaatattgagagttttcattgtttccctttcttcggaaaacataatagcccaagatgcaaaagcacaccataatttatccattctgtgctgacaagccagtgactgcttggagacagctatgggatgggagagggaatgcagagggaccctacttgctttcagtgtcatccaaaagtggtgagatctattgacatttagaccatctcacctttaaggagtgagttcagacagctctatcattgtattgattataataagaacctataccatttcagagcatgactgcgggggcaaggattcgtcttcccrtttttcagattgtgaaattctgaaacagaggcatttgtcttaggctgactcccacagcagagtagaagtctcagttcagg

SEQ ID NO: 484127 - DNA, 633 bp, Homo sapiens
gcttaaaaattaaggtaataatatttatataaaattatgaagataacataacaccaggcatcttaatagtagcatatccaaaattatactatgtgttttctgcttgtggaactattcctcctccaatctttccagcacaataaatggcagctccttcctccaaatgtgcaaggcgaaagcgttcagatcatctggtgctcttctcttaccttctcatcatatccatattctcaggaaytcctgtttctctgataattgtatgtagaatctgaccacttctcttcatcctcacctctatcactttcatccaagaaaatattatccatctctccttaattaaggcaacagtagatgctttatcagaatatctaagttgtttaacgccaaagaagcttgctgctatcatccaagcagtgattcagggatccagtctcctacatcctcatggttgtgcatcttcaatgttagcatctaaagctgcagaaagaaaagagcagagcacggtgggttgcacatcagaagttttgtggaccaggcctagaagtggcatacattacttctacttgtataatatcagccagtgctcagtcagatagtcatatctgactataaagacatctgagaaataatcca

SEQ ID NO: 484128 - DNA, 544 bp, Homo sapiens
ctcagagctcactcttttacctccttcaggtctacgttcaaactccagcttattaaagtcttccttgaatagcctatataaaatggtaccctcaatcacctgtctctccattctttttattattacgcttaatgtatgtatttgtttctttgtttagtgtctctcttccaagattagaatgccttctctcatggcagaaaaaatactgtggccgggtgcagtggctcacgcctgtaatcccagcactttaggaagctgaggtgggtagatcacctgaggtcaggagttggagaccagcctggtcaacatggtaaaacccagtccctactaaaagatataaaaattagctgagagtggtggcaggtgcctgyaatcccagctacttgggaggctaaggcacgagaatcactggaacccagaggcggaggttgcagtgagctgagaccgtgccactgcactccagcctgagcaacaagagtgagacaccatctgagaataaaaaataaaaaataaattaagaaaagaataaaaaatgttttatcct

SEQ ID NO: 484129 - DNA, 541 bp, Homo sapiens
atatgtgtgcaaaaataagcaccctatggggctctttttaaattagccagagtgcacagagaagtctttgaaaagaaaactctgggggaaaaacatttttcttgatttcataaacactcattgtttaatcatctgaagaaaaggcaaacttatgattaaattccccctcctcctaaactgatgaactcttagttcacctcctctccccagcctgatgtacttaaggaggcaggagaagtaacttgaaaaccagcctaccagagaagcaagaagtggcctaggaggtcctagcctcaaactggatgcacacacataaggctgcgccttgcaggtctggcacagaaaatagtgttgtcaagytgcagccatagtatattaatatgctatttacatttcataagcagtggataactggcttcagtttattttgctaacttaaaaaaaaccattaacttctaggacatcacacctaaccctttcctctcccccatgagcaagacagtcatagaatttcaatcaggacccttagaacctctgagac

SEQ ID NO: 484130 - DNA, 416 bp, Homo sapiens
tgtgattattgctgaagcctggaagcctccacagctttggcagaaagccttgtgtaagaatattgctgaaagtatccccagggatatgatatgtcacaattatgttgctgcttttgttgttactgttgtcagttctatggctaccatttactgagcacctactctgtgacctgcagtttgctaagaactttatgtatagtaagttattcaatcctcagataarctcaccagttaagtgctattgtatgatgagttcagagagtttaagcattaagcccagcactgtccaataaaactctctacaatgctggaacagttctatatctgtactgcccaatatggtaaccacttagccacgtaagttattgagctcctgacttgtaggaagagcaaatgaagtgaatttttatttactt

SEQ ID NO: 484131 - DNA, 416 bp, Homo sapiens
tgtgattattgctgaagcctggaagcctccacagctttggcagaaagccttgtgtaagaatattgctgaaagtatccccagggatatgatatgtcacaattatgttgctgcttttgttgttactgttgtcagttctatggctaccatttactgagcacctactctgtgacctgcagtttgctaagaactttatgtatagtaagttattcaatcctcagataagcycaccagttaagtgctattgtatgatgagttcagagagtttaagcattaagcccagcactgtccaataaaactctctacaatgctggaacagttctatatctgtactgcccaatatggtaaccacttagccacgtaagttattgagctcctgacttgtaggaagagcaaatgaagtgaatttttatttactt

SEQ ID NO: 484132 - DNA, 648 bp, Homo sapiens
ctgcaggtctcactatattctaggaactgttccctctctttccccttcagccagaaccagtaacggcttcccacttttgccaaccctggggtgctttactgactactgacggtttcccttaaccctgcttacacttttgtaaatgattttactaaactctcttctgccaccctttttgagtgtgccatttgttcttgctagggactctgttggatacactatttgatgaatttaaagaataagaattatttgctcatttatgaactaataataaagagaaatgatatggtatttcataaagtagttatcacatattcttagccacaaaaaaatgcagcaaattgcaaattgtacacagcaggtcctcatatgatatcattttgttcaacattgttttgttataatgttgatgaggaaaaaaagaaaatccctggctgggccactgtcaatgtggagtttccctattctccccaggcctgggtgggttttctcttgggactytggtttccttccacatcccaaagttgtgtactttagattaactggcatgtctaaatgaccccagtctgagtgagtgtgagtatgcatgtgactgcaccctgcaactgaatggcatgttgtccagggttcgttcctccctcacaccct

SEQ ID NO: 484133 - DNA, 400 bp, Homo sapiens
tggcatgaatatcataatggcaatctatctctacatgctgaggagactaatacaataagttgatacatgtcagatgctttgaacaacacctagcacagagtaagtgctcaataaatgttcgttatagtgatgctattattctttcccaaatttttgcacttctgccaaagcaatggcaaaatcaataaataaagggaactaaccaaaaaaactctggggaaagtgctgaatttggcaaaactgggaatcaggcagctcatattctttggcatccactttccattttgctgtctcctgtgagtgtccaagctcgtcctgtaacactgcacccaagctcaaaattattttctgtgctcytcttcacacctaccctcatcaatcaactttcacctacgccggt

SEQ ID NO: 484134 - DNA, 400 bp, Homo sapiens
tggcatgaatatcataatggcaatctatctctacatgctgaggagactaatacaataagttgatacatgtcagatgctttgaacaacacctagcacagagtaagtgctcaataaatgttcgttatagtgatgctattattctttcccaaatttttgcacttctgccaaagcaatggcaaaatcaataaataaagggaactaaccaaaaaaactctggggaaagtgctgaatttggcaaaactgggaatcaggcagctcatattctttggcatccactttccattttgctgtctcctgtgagtgtccaagctcgtcctgtaacactgcacccaagctcaaaattattttctgtgctctycttcacacctaccctcatcaatcaactttcacctacgccggt

SEQ ID NO: 484135 - DNA, 582 bp, Homo sapiens
acttacacatcaaaatgaatttatcatgttctcccctagtcaaaattttagcctaagaggaagaaattgatgccagaatgtagatttagatagagaatcctttactgtctctctattttcattttctttcttttttttttttttggttttgttttgtttttgagacaggaacttgctctgttgcccaggctggagtgcagtggtgcaatctcagctcactgcagcctttacctcctgggcttaagcaatcctcccacctcagcctcccaagtagctgggtccacaagcgygtaccactttgcctggctaatttttgtattttttgtagagatggggtttcgccatgttgcccaggctggtcttgaactcctgagctcaagcagtccacccacctcagcctcccaaagtgctgggactgcaggcatgagccatcgtgcctgaacaattttcatttttcttttatatgttactagctttggaagagcaggctttccccttattcaaatctctgggatggactttctctaaggcatgatgttctttttcctaagggcactaaacctcacagctcagtctaaatgg

SEQ ID NO: 484136 - DNA, 550 bp, Homo sapiens
gaggctgataaaatggtcaccaaactgacctaatccagcagctgctggattgggtccaaggccagaggtcagaagagaggatgtgccacctgggaaggtgcaaaaacttgagaaagacattggactttatcaggccagaaaaatgggggttgatcartgcatctctggaggtacagggtgaccctggttgaaatggaggtaaccttttgcatgcatacgtatagagctctcagcactcttacctttaccctcccatattctaatgtgctttccccagggaagaaaatgagtagccgcaatgagtatacctggaattacatgtaaccctgaaatgtccatgggactatgtggtttgtgactgtttgtacaatgcctatcaaatcaagaaaaaggctgagactcatcgtttgtgtttttcatttgaaatcctaatggttaaacttgaacctggtggtcaaactaacaccccaaaatatcaaccccacataaatcagagacctgcaagggcacagtagattctgtatcttccggccttcaaatcggggcagct

SEQ ID NO: 484137 - DNA, 585 bp, Homo sapiens
tgtgtaatcagagtaggtaggagcttctccaattgaaaatgggttattaacaagtctttccactgaccaaatctggctttaacccacgttatatcttcactgatttgccattctttctaaaatggagtgtagaggggaaaaaaaaagcaaaaagcccaactggtactgaaatattatgtattgctgtgctgagaaagaaatgcctaaaaaccaccacyacagcccaccagtgctttgacagcagaggttttgttaagcagaccacattgaccctctcaggaaaaaaaaaaacagttaattcaagatctggtcccagatcaggttccaaacgagaacctgaaaactacagggggaaaaaggagtaagctcccttttcaatcactatccctcagtagatcccaaactcattaagaacagtgtttttaggacaagactttgtctctgattcaagaatctttcaagacagtgacacataacccttaaattgaatcaatttcacaacgaattgcactgtaacttaggtcaatattctaaatgctctctggcaactgatgttgagaattttgagaggaaaagaagtactca

SEQ ID NO: 484138 - DNA, 616 bp, Homo sapiens
tttggttgattacgggcctgcaaacacactgccctatgttaaatagagtgaaacaaaattacatcactaaccataacattttctaacatataatgtttcttttttgtcatasaagatacttcaaaggatggcaaacatccagagggaattgcaaaattcaggcaattactcagattctctaatcccaaaatgttttcttaaaatatttttgcaaatggccacataattgtctatctaggttttgcagctttcatcctaaaaaacaatgccatttagactgtgctttaactttaggtctgaataagtgatatcatgattataactctctctgtctctcttaataatgtcttgttttcagtaaaagagatcaagaacttggtgataatggaatgggaaacaaaggaacagtaacaagtaaccgccccaatagggcctttatcccttggttctccttggctcaaaacacccccctgcaagggggcaaacatttctctggggagatgatccaaccaacagtttgagaaaaatagtgcttctagaagccctttggttgtgagaatgaattgaggtgattagaagggtgcttgcgtggccagattctttgtttcagtactaa

SEQ ID NO: 484139 - DNA, 497 bp, Homo sapiens
gcaccagagtccagtgatcagagcctaggcacagggcctggatctgcctgtctggccctggacccaggccggcccctccatgtgctcagcttcagtgtcttcatccataaaagggggtgaatgatagcacttgccctgtggagatcttgtgatgattgaaggaaataatgcaaagcgcttatcatggagccctgagcaaacctcaggaagcaggtgtcactccccacrtggccgatcgctcctggtttctggaaaagtggccacgttcaacaccccacaattctagtatcctctacagcaacgcaggggtggacagtgtgagcatattagagccacaggttccaaagccccagcacctgtcactcttgcctccagcccctgccatgttgagtcctcagaggtccactgcccgcctccgccccaggtctaaagatccaggagttaaggcctgagccaggcagagagccttgcttctgagagggcggggcagaaatgtg

SEQ ID NO: 484140 - DNA, 527 bp, Homo sapiens
gcaggatggtggccaggtggctgcttctacactgcacttcgcccaagcatgctggggcatggaggagctcccactccagctccccagatggtctgggcaagagacccacagagtcccttctgaccctcccctcgcagggctgtgacagcacttgtgagctacaacacctgctccaggcataaggggaccatgtgagagcatgtggtatgtgtgtggggggtcggggggaggcgygcaggtgtgtcgtgtgccacgtggcagccatgctctctctgctctggggaagaaacctgcttctggctggctacgccctgcacctgtgctcccctggtgtgcttggtgtgtgcatgtgtgtctgtgtgtgcttgaggatgactgacctttgctccccacagcctctccaccccctaggggaagctggggagagcaactgaagcccccgtggaggcggcggaccccctgaccaccaggccttgggggaccctgggcgacctggcctgcagcttctgtccagcctcacacggccc

SEQ ID NO: 484141 - DNA, 605 bp, Homo sapiens
gtaacgagataacacatcacagtgaggcctgaacccattagtggctggtaatgagcaggtgtcccacagggaggctgataaacggcctgtctgtccatggagagagaggtttgcaggaaagcacgtgtgggctccactgccaagctccaggggcattaattgtctttgctgttttaggatcttgataggagtgaggaagccacaatgacacccccaaggagggtgtgtgtgtatgagagagagagagagagagagagagagagagaggagcactaggcatggtgtggaagattggggttccagtcccattcattcttattcattcattccgcaaacactcattgaacacctttggcaggctaggctgtatgtctagggctgttacgtgtccctggatctagggtaatgaaatctactgaagagggcatgaaggaaggggacccacgtatgtaggccgcctatcttgtaccagatactctgcttgttgctcgtagatgcatgatctgagccttcatgatatcccagagggggtgtgtgtgatactattatyatccccagtatgcagatgaggctcagagaggttatgtaactggtaaaacgtcaca

SEQ ID NO: 484142 - DNA, 619 bp, Homo sapiens
tagattgtttccaatcgtttgccattacattgtgttctaattttagatgccgccaggaagctctccaggttagggccaggcagaaaacagatagatggcacactgaacagaggtggtttatgagacgatttatgaagtgagggcaggaagaaggacaacctagaagagatgggttaatgacagaaaagtcattaactctccctgaccccgaagcgaaaggtcaagggaaggagggtttctccagccagtgagagctgtagttacaggagaggctgcctgacaggagccatggtcttccgcgagtggtgtgttggtaaatgttaaacacctggctgtctgggaggggtggccctggcrtgtaccgtttgctgatttctgtgccgtaggtacttacaccagggctttaaaggcaccagtgtgacggggtgacacccatacagcccactgtgagccagctccagcatctactgctctaggcccctgcttcctgccagggcctcctattggctcaaccccaccagaagccagagagcagggaagcctggttgatgcagtcctcagaggctggtgcaggttggtgaaatccacgggctgtgtagttttggacctgacatttcag

SEQ ID NO: 484143 - DNA, 641 bp, Homo sapiens
ttgaggagagatcatgcgcctgaatggaacccagacattcaagttacctcttaccagtcccttgggtagccattctgtccccaaaaggaacatgaaaaatcttaaagccctaagcatgtttttagcatgcacttcatttaaatcacatctttctagactcagcaatagagggttttttttggcacacagttgttgggtgatacattcatccctgtaatactttacrctgttagatttgcctatcatgttgtggtccccatagttctgaagtattatccaacatatttgttacacttccccatctgtatcacttgctaatatgactttcatgacagcaatagatttttctaagtcattagtaaaactgttgaggagaaaagaccaatgacagattcttgtgggcttatccctagtaacttctatccatatgacatcgatccatgaaaccacactctttgggtaactgctttaataaattataaacctataaagccaacaactcagaaatacacataaaattaataagttatactaaaaactaaggtcatgaaaaaagaagaaaagcctgagaaactttgatagatcaaaggaaactaaggaggcttgataagtaaacacaacatggcatcctgaatgggatt

SEQ ID NO: 484144 - DNA, 609 bp, Homo sapiens
gtcagtaaaacacggttacgttaaaaacataaataatgtctagtcccttgggatgcaaagaggtccagattttctcgttcttttcaactccttagctgtgaaggctacatcctgcacttattaatctgtgtattgaggggggcggacccttgattcttgtctttgataagctctgctcakccatggctggattaatgcatgtccacatccacattacaggattcagtaagaaaagaaagtcagctcacactgtgtggttaaagataatggaaatgtgcttattagaagtcttccagagagaaaatttcttaattacttgcttttgatcaaaatgagggtaaacagaagcaattctgaagcaagacttgttattgtgtttttctgaacacagtacgcaagtctgacaattaggaagcagttttctgcagttctttcacatttgtttgagtctcacagagtttgcaaccaaactaataaagaagggagccatctcacatagtttttagaagaaagtgatacataattatggagtttaccaagaacaaatctcatcagagcagcttaatttttttataaaaatgagttacttgtccagttggtctatagact

SEQ ID NO: 484145 - DNA, 481 bp, Homo sapiens
cagtaaaacacggttacgttaaaaacataaataatgtctagtcccttgggatgcaaagaggtccagattttctcgttcttttcaactccttagctgtgaaggctacatcctgcacttattaatctgtgtattgaggggggcggacccttgattcttgtctttgataagctctgctcagccatggctggattaatgcatgtccacatccacattacaggattcagtaagaaaagaaagtcagctcacactgtgtggytaaagataatggaaatgtgcttattagaagtcttccagagagaaaatttcttaattacttgcttttgatcaaaatgagggtaaacagaagcaattctgaagcaagacttgttattgtgtttttctgaacacagtacgcaagtctgacaattaggaagcagttttctgcagttctttcacatttgtttgagtctcacagagtttgcaaccaaactaataaagaagg

SEQ ID NO: 484146 - DNA, 524 bp, Homo sapiens
gtgtttaattccttatttaacgatcttttatcaattttgagataatgaccaaactctcagaaagtctgtgagatgacagtctaggtattacctaggctccccactccataagcttcatgctttcagaaagctctctcatcactctttgatggagagctatttccaagagccatacaatttcctgacattcttctttacttgttgaagacagtttctcttgagaaagtacaatatcttaagtacttcaaaaacactgtgaatgccactactgcccttctgaatcaagctttctttctcatcggtagtcttcycctctgacctgctttttactgacttttacgccctttgtcccaggcagataaaacactggtgtggaaaaggtcaaattcagcatgccaaaataatatatatttctatatttccaatgaaaagaaaggcaaattgatagataatattcatcaatctatctctgagtttcctgaggaagtgacactagaaaggtgaggttatgaatagtctttgat

SEQ ID NO: 484147 - DNA, 655 bp, Homo sapiens
gtgtgtcaggtgacataaaatttttgccattatgcataygtgtgtctacaaatgactaggaaagtgatgcaagtatcaatttaggggttacaaataaattttagcaagtaggaaaattcacaaatatggaatctgtgaataataaggattaactgtatgtgcattcataatgtactgcaatggaagcgtaacagggtacaatagaaatgcagggaaagagaacttaatgtagtgggtggtaaagcacagaagatggaaaagctgtcagagaggaagtcatgcttaagcaaaaacttgtgaagtaaacatgaatttgaccaataggcaaacaaggaaaggatataccaggaaggggaaacatgtgaggaaagaatacaaggcagaacaacctggtgaggaaagaccctgaaaggcttcgtatgccatgctaaggaggttagattttattttttgtaaatcgcaggggatgatatcctgcttaattgagtagactctctcaatttgcatttctcttctattagccacattgcttctccaacaccaagtactaggagagtgtaaatgattattttcagaactgcaattgtttgccctatcccttttgtaatttctcctacttaaatttcatttcctaaatatggcttgcctgaaagct

SEQ ID NO: 484148 - DNA, 655 bp, Homo sapiens
gtgtgtcaggtgacataaaatttttgccattatgcatacgtgtgtctacaaatgactaggaaagtgatgcaagtatcaatttaggggttacaaataaattttagcaagtaggaaaattcacaaatatggaatctgtgaataataaggattaactgtatgtgcattcataatgtactgcaatggaagcgtaacagggtacaatagaaatgcagggaaagagaacttaatgtagtgggtggtaaagcacagaagatggaaaagctgtcagagaggaagtcatgcttaagcaaaaacttgtgaagtaaacatgaatttgaccaataggcaaacaaggaaaggatatwccaggaaggggaaacatgtgaggaaagaatacaaggcagaacaacctggtgaggaaagaccctgaaaggcttcgtatgccatgctaaggaggttagattttattttttgtaaatcgcaggggatgatatcctgcttaattgagtagactctctcaatttgcatttctcttctattagccacattgcttctccaacaccaagtactaggagagtgtaaatgattattttcagaactgcaattgtttgccctatcccttttgtaatttctcctacttaaatttcatttcctaaatatggcttgcctgaaagct

SEQ ID NO: 484149 - DNA, 536 bp, Homo sapiens
gtagggcttttgagttgactgtatttttttgccctatgactattttaagatttttcttctttggttctatgggatttcacctcaatgtggcaaaatctgaatttattttaattaatttgacttcagagtcattgaacttcttaaatatttggcttgatgtcttttgtaagatttggaaacattcacagctaatttctcttcagatattgctcttgttctattttctgtctttatttcttctaggactccaattacatgtatgttagatattcttactgtgttccctgtttttcttaccttctcttttgcaattcccatccatgcacttctttgtgcttcatcctaaatatctgctcctgactgatcatccagtttrctacttctttcttcagactcatcttgtctgcagttaaacccatctaatgagtccttaattttagttattttttttttactttctgttataatttttcacttctctgacaaaattctcagttttgtcttttatcttcttgaatatgttaaggatagttatt

SEQ ID NO: 484150 - DNA, 619 bp, Homo sapiens
caatttcaaattggtttcttttctagcccagcttaatattaagtaaatatgtgcctataagtgtctctagctagattattacctaaagtggtgcatgcaastttgcaggtgcagctccgggaaacgaaaatctactttggtgatgaatcttcctatccaatgggtaaacacatgttttaaaattgaatgcatggttatccccagagtacaagaatgttttcaaagttagaccttttttgtttaacatactttttaatttagtgctccaagctatagagatacagaaatgaaatggccacagtccctgttctggaggaacacctatttaaaaagaagatagaaccatatattataacgtaccatgaaaataaataacggagatttgcacagtgtacaatggtaaagggctcttgtttacgagtggagggggcagtaattttagggactagggaatgaaaattacccccgaggaaatcaaatagggactgatgagacaaatgcctttgctttatttttttaaatagcaagttcaatttcctggttcaagaaatagcttctattctctaaaaataataaaataatgttcccctgctggcataaacactaacggaagtagcgg

SEQ ID NO: 484151 - DNA, 619 bp, Homo sapiens
caatttcaaattggtttcttttctagcccagcttaatattaagtaaatatgtgcctataagtgtctctagctagattattacctaaagtggtgcatgcaagtttgcaggtgcagctccgggaaacgaaaatctactttggtgatgaatcttcctatccaatgggtaaacacatgttttaaaattgaatgcatggttatccccagagtacaagaaygttttcaaagttagaccttttttgtttaacatactttttaatttagtgctccaagctatagagatacagaaatgaaatggccacagtccctgttctggaggaacacctatttaaaaagaagatagaaccatatattataacgtaccatgaaaataaataacggagatttgcacagtgtacaatggtaaagggctcttgtttacgagtggagggggcagtaattttagggactagggaatgaaaattacccccgaggaaatcaaatagggactgatgagacaaatgcctttgctttatttttttaaatagcaagttcaatttcctggttcaagaaatagcttctattctctaaaaataataaaataatgttcccctgctggcataaacactaacggaagtagcgg

SEQ ID NO: 484152 - DNA, 619 bp, Homo sapiens
caatttcaaattggtttcttttctagcccagcttaatattaagtaaatatgtgcctataagtgtctctagctagattattacctaaagtggtgcatgcaagtttgcaggtgcagctccgggaaacgaaaatctactttggtgatgaatcttcctatccaatgggtaaacacatgttttaaaattgaatgcatggttatccccagagtacaagaatgttttcaaagttagaccttttttgtttaacatactttttaatttagtgctccaagctatagagatacagaaatgaaatggccacagtccctgttctggaggaacacctatttaaaaagaagatagaaccakatattataacgtaccatgaaaataaataacggagatttgcacagtgtacaatggtaaagggctcttgtttacgagtggagggggcagtaattttagggactagggaatgaaaattacccccgaggaaatcaaatagggactgatgagacaaatgcctttgctttatttttttaaatagcaagttcaatttcctggttcaagaaatagcttctattctctaaaaataataaaataatgttcccctgctggcataaacactaacggaagtagcgg

SEQ ID NO: 484153 - DNA, 629 bp, Homo sapiens
gccaaaccaccagtctttgaaaggtgatgtgaagatctaaaaacacagtaaaaatgtaacagaagccacacatgtaactttaaatttttatagctcccttaataaaataaaaacaggtgaaattttcataatatgtttaactcaatatagccacaacattatcatttaaaaacataatcagtacacatgctcgctcacttgggcagcacatatactaaaattggaaagattacaaagaagattaacatagcccctaggcaaggatgacataaattcgtgaagcggttcatataaaaatttcttttacctattcatgcgatattttacttttttaatatataatctcttctaaatctgtgtgtttcacatgtayggtgcatcttggtatgggtttataaatttccacacctctaattcaatcctgggaagaagttactctatgagagaacctggattatagtggttctcaaacttacaattccttaaaaactgtcaagccatattctgaaaatataacacaaatttgttgctgcaagaccatgtttcaaatgaagctagggtatgctttatgctccgccatccttacgaattacctccatgaaacttaattgttaagcacagggagtacc

SEQ ID NO: 484154 - DNA, 581 bp, Homo sapiens
tttttattacgttaaagatcaaagcaattagtcaatgaaatgaatcactaaacaaactataacattttaaaagttaactccattttgacacaaacttcacaggacaggttttgcgggacttccgtcttctttttggtccctctcttaacagagctagtcaattcttttgaaattgttctgtcctttttacatgtatatagttttgtaaaacaaattaaatktcaacttcttagtattctgagagactgctgttcttaaaataaatgaagataaaatatgtaggtaaatattcactaacaaggtaagttcaagattaatcatggcaatacagattataatagccctgtactggaaacaaccaaaatgcccatcagcagtagaatgggtgaaatattgtgtgatagtcaatggaattctacacataatgaacatcatctactgctacataaaaaaaaaaactcacaaattagtgagtgaagaggccagtcccctagacatcacacaatgatttcatttatataaagttcaaaactaggaaaaattaatctatggtccgagaaatcaggataatggtgaccagg

SEQ ID NO: 484155 - DNA, 581 bp, Homo sapiens
tttttattacgttaaagatcaaagcaattagtcaatgaaatgaatcactaaacaaactataacattttaaaagttaactccattttgacacaaacttcacaggacaggttttgcgggacttccgtcttctttttggtccctctcttaacagagctagtcaattcttttgaaattgttctgtcctttttacatgtatatagttttgtaaaacaaattaaatgtcaacttcttagtattctgagagactgctgttcttaaaataaatgaagataaaatatgtaggtaaatattcactaacaaggtaagttcaagattaatcatggcaatacagattataatagccctgtactggaaacaaccaaaatgcccatcagcagtagaatgggtgaaatattgtgtgatagtcaatggaattctacacataatgaacatcatctactgctacataaaaaaaaaaactcacaaattagtgagtgaagaggccagtcccctagacatcacacaatgatttcatttatataaagttcaaaactaggaaaaattaatctatgrtccgagaaatcaggataatggtgaccagg

SEQ ID NO: 484156 - DNA, 350 bp, Homo sapiens
aaatctattattttttttcctcttagaaagcatcatgtaactatgggaatgtttcctaaactcagtatttctggaaaaggaacacagtcttaagcattttgagtgagagaaaaaatgctggcatattaaaccaagcccctggcactatctgtytttagcagacctgttcttccctctcttcgtccttccttctctcctccctttctcccttgccttattcctccttctctgtttctgtctctcttttttgttttcttttcttctttcttttaaagaaaattattttctttacttgatgtttcaaactgagacaatgttaaactaatggacttaattctctggcttgcagg

SEQ ID NO: 484157 - DNA, 221 bp, Homo sapiens
gaaaaagaactacacatgtggccacagaagtgggctgactatgaatactagakaggaaacaggagtttcacatggcaaagaggacattgcacatgggattaagaatcttaaagtgaggaagttctcctggattacgagatgagcctgatatagtcacaagggtccacaaaggtgaaaaacgagtcgggagagtggaacggagccatgagcccaggaaggca

SEQ ID NO: 484158 - DNA, 477 bp, Homo sapiens
tttccaaatttctatgttttcctccaactttctacaattcacaattctttatacttgtataacctgaaaatgcaaaccaatcctataaaacaagtcagagtatttcctagtttatttagacattcagagttgcacctggcaccactcaaaagcatgagcccatagctgaccataaggataatcctggcagagaaattctcaggttcctgggaggaaatggcacacacgattgctgtgttgagcctcgcagtatgatttcttcctcgcgctgcaggaaaataaccctaggagaaagtagtaaacagctatttttaagtcyggcctagtttacttgaactcatttcttcctttggcacccctcattggcaaggacaaggcctcccattaagatgttatttactggatgggagatctctaaagcatctccagacagtgtatctacagctcaggtatatttttttcttggagcaaaaacac

SEQ ID NO: 484159 - DNA, 557 bp, Homo sapiens
gctaggctgacctcactgcctccttgcttgtaggaaaggccaggcctcaggaccagcacctgggccagggtctatggagagagcctatacagcatcccatgaggtcccaccccgcccaagccataaaacgcctactctggagaagcaggaaccaagatcttccaagatgtcatggggaatgcaagatgtccccctctgctttctctgtctctggattactctgtatcccagccayatgaaagaaaaaggcaatccaaattgtaaatgttagagctccagtcactcagagacagacttacagcaactcggtctcaggtctaatttcccagggagtactatgccactattggcccatcttgggccaggcacccatttttggaccaaccatctatgccatggctggggtgggaaggggtgggaggatatcacagtaagtgaacatgcccttcccactgccaccatacatgttagtctgttagaaggactaacaattcctagaaacactgtgaacaaataactcaacaggtatccattaccagggcagcatgagaagcagg

SEQ ID NO: 484160 - DNA, 492 bp, Homo sapiens
agtacaaagatgctttacatttagtttgaggggagtgggtagagaaggaaggagttagttwattatctgttaaagtaactccagatgaagaactggaagtaaaataagatcataggggcaaacaaagtcaccaccgtttcatgggtgatttttgaggagagaatctaagtttacacagagttttaaagatgaaaggacaccagttttcctgcacccttatattacccagcatatcccccaccccggtgctgcactgcaccccaactccaagaaaaagataaaaataaatgccagtgaagacctctgggcatatcttgaggcatcagtgtaaatgaatcctatttgttacataacagctttattgagagataattcatataccataaattcaaccacttaaagtacacaatagattttagtgtattcatagccatcatcacaatcaactttagagcatttttatcaccctaaggaaatctcttctgcattagc

SEQ ID NO: 484161 - DNA, 643 bp, Homo sapiens
gaacacagccatgcttattcatgaatgtattatctatggctgttttcacactacaacagaatatgtggcctcctggctacatagcctgaaatatttactatctggccctttatagaaaaagtttgccaattcctgtttacaaccacacacactctctgcactaggaaatatacacacatgcacatatatgtgtactgatgtttttgttacctgttttccaaatcaggttattaaatatatcaagccagagaagattatacaacggaagagtatacctctttcctggagcatcaaggagttacattatcctcaarctgacctctccctacatttgctttccagagtcacaggggctcttcaagccagtcacctccactctcatcccaggttcggagcccttctgtttagcaagcatggcgaccatcttcacttatccactagagggtatccaaacactgcttatgaagactaaggtgatacaaccggaccctgttgaatggcgagagatcagagtttactgtctggatgagttcctacacttacaacgccttgcacagaggtggcagggcatggaagaataaactggactctcacccattagtaccagacgttgcctggaaacagatctgacaagaaatgcaat

SEQ ID NO: 484162 - DNA, 593 bp, Homo sapiens
ggaggagaaaatacaggtgctttaactcaatggaaattaggcatgttaaaagtcagttataaatcagaacagataaatttacattggctcttcattaaaaaatacatattccaatttttaaaaactgagacagtaacaaattttacattgttttgtgtgattcatgtaatagagtaacactacatgtttttcttgtttatcagattaataaatgrcctgcttcatatggaactaaaacatctctttactgcaggtaacttaagacataatgtaagacaaaaaatatgcaaagtctaataactggttctttttcgacagcttagttacacaacccatccaagaagatatcaaattcctacaacacaaaaaagctgcagcaacgtcaaaaactaaagaaagcaaaataaactaagtgatggccttttcttcctcacctgcaatgactgcatttgtggaagctactgcaggaatgattctttttactacccctgaaaaaacatatcaattaaaatatggtcatttctttaaaataaaagagttctcttaaattagaaggcatgattattaaataccattttctaaaacttgatttt

SEQ ID NO: 484163 - DNA, 593 bp, Homo sapiens
ggaggagaaaatacaggtgctttaactcaatggaaattaggcatgttaaaagtcagttataaatcagaacagataaatttacattggctcttcattaaaaaatacatattccaatttttaaaaactgagacagtaacaaattttacattgttttgtgtgattcatgtaatagagtaacactacatgtttttcttgtttatcagattaataaatggcctgcttcatatggaactaaaacrtctctttactgcaggtaacttaagacataatgtaagacaaaaaatatgcaaagtctaataactggttctttttcgacagcttagttacacaacccatccaagaagatatcaaattcctacaacacaaaaaagctgcagcaacgtcaaaaactaaagaaagcaaaataaactaagtgatggccttttcttcctcacctgcaatgactgcatttgtggaagctactgcaggaatgattctttttactacccctgaaaaaacatatcaattaaaatatggtcatttctttaaaataaaagagttctcttaaattagaaggcatgattattaaataccattttctaaaacttgatttt

SEQ ID NO: 484164 - DNA, 593 bp, Homo sapiens
ggaggagaaaatacaggtgctttaactcaatggaaattaggcatgttaaaagtcagttataaatcagaacagataaatttacattggctcttcattaaaaaatacatattccaatttttaaaaactgagacagtaacaaattttacattgttttgtgtgattcatgtaatagagtaacactacatgtttttcttgtttatcagattaataaatggcctgcttcatatggaactaaaacatctctttactgcaggtaacttaagacataatgtaagacaaaaaatatgcaaagtctaataactggttctttttcgacagcttagttacacaayccatccaagaagatatcaaattcctacaacacaaaaaagctgcagcaacgtcaaaaactaaagaaagcaaaataaactaagtgatggccttttcttcctcacctgcaatgactgcatttgtggaagctactgcaggaatgattctttttactacccctgaaaaaacatatcaattaaaatatggtcatttctttaaaataaaagagttctcttaaattagaaggcatgattattaaataccattttctaaaacttgatttt

SEQ ID NO: 484165 - DNA, 593 bp, Homo sapiens
ggaggagaaaatacaggtgctttaactcaatggaaattaggcatgttaaaagtcagttataaatcagaacagataaatttacattggctcttcattaaaaaatacatattccaatttttaaaaactgagacagtaacaaattttacattgttttgtgtgattcatgtaatagagtaacactacatgtttttcttgtttatcagattaataaatggcctgcttcatatggaactaaaacatctctttactgcaggtaacttaagacataatgtaagacaaaaaatatgcaaagtctaataactggttctttttcgacagcttagttacacaacscatccaagaagatatcaaattcctacaacacaaaaaagctgcagcaacgtcaaaaactaaagaaagcaaaataaactaagtgatggccttttcttcctcacctgcaatgactgcatttgtggaagctactgcaggaatgattctttttactacccctgaaaaaacatatcaattaaaatatggtcatttctttaaaataaaagagttctcttaaattagaaggcatgattattaaataccattttctaaaacttgatttt

SEQ ID NO: 484166 - DNA, 523 bp, Homo sapiens
tgctagccctgagagttccctcatgctaattactaaggcacttcttcctctcctagcagttacagccaaagccaaattttggccttggcttgtggagtgtgtgacctggattccaggccccacttaccccctcagccaggcaccaactccacacctatatacagtggccctggctgcagaggcaggcaggggccagaccctgcgaagccttgtagaatgtttaaagaattctgtttttagtttaagarcaatgaaaagaaaatggttgggtgggttcatatttgcagtgatccctctggctgattaaggaccacagagaaacatcgccaatttagagaagtccaccagagagtatattgttccccactttttcggtgagtcagccttcctcagaaaccacacttcaaaaatagctttttcggctagaaaattggaactcagtgcaaagctgcctgtactcctcaggaaatattttgctgcctctttggtggttctttttggccttgcagcctgacaggagtca

SEQ ID NO: 484167 - DNA, 622 bp, Homo sapiens
ctgctagccctgagagttccctcatgctaattactaaggcacttcttcctctcctagcagttacagccaaagccaaattttggccttggcttgtggagtgtgtgacctggattccaggccccacttaccccctcagccaggcaccaactccacacctatatacagtggccctggctgcagaggcaggcaggggccagaccctgcgaagccttgtagaatgtttaaagaattctgtttttagtttaagagcaatgaraagaaaatggttgggtgggttcatatttgcagtgatccctctggctgattaaggaccacagagaaacatcgccaatttagagaagtccaccagagagtatattgttccccactttttcggtgagtcagccttcctcagaaaccacacttcaaaaatagctttttcggctagaaaattggaactcagtgcaaagctgcctgtactcctcaggaaatattttgctgcctctttggtggttctttttggccttgcagcctgacaggagtcaccaaatgtggccttgagttgatccgaggatttctgttatggcaaacttttattgccaactttgcaattggtggccttggacaaatttattaacttgta

SEQ ID NO: 484168 - DNA, 438 bp, Homo sapiens
ctgaaattcaactgagggacacacataaagatcaaagcactgctactgggaatcggcacggaaatttacaaactcaccataaccaatgcaagagtattttttccctgcccaggcagggaggggagtaaattatgtggcgctggccaggttagaaaacacttcgattaaatctgtctcaccagcatagaattaagcatctgataagaaatagggtgtgtagtaaaagggataaataggctgtttgargtcaacaacctctttccagatcttttaagagccaattattctgccaaaatgactggagtgcttagtacaatacctgacatgtagagttatcattaaaagtttgcaattagtactactgtctcagtgtttgcaaaaggccacaaaacggtcttgtgtccttttcctgtgtgtttaaggtagattgccttttca

SEQ ID NO: 484169 - DNA, 549 bp, Homo sapiens
cgcgggcctttgtgtggcccgggcgggcgcgagccgcggcggaagccccgccccggccgtggggacgcgcgggtcgggccgggcgcgcggggttgggcggggcgcggcggctggcctccggatgggcccagtagccttgtcgcacctgccggcagggacaaaggcgcactacgggtcggaaactccccgcgctcctctttcccgctcgtcgcggggcagcttcaaagctgtcaacgtttccctcagtccccaataccagtgacaggtcgggaaagtccttcatttcctccgttgctcagggcctcttttttttgttgtkgtttcttgacggttcgacacaaactcttagtgattttctttccgtattttttccgggtattttaatcaatgggacttgtatttatagtagaggccagatatttcagcttctcaacaccacaaagaatccgggattttgggaactgtgtatatttcttggtttggggaagcacagttttgttattataataagttttaatttaaaggggaagaaagagttgcaaaaatata

SEQ ID NO: 484170 - DNA, 531 bp, Homo sapiens
tactattcagccaggcatgatggctcatgcctataatcccagcgctttgggaggttgaggcaggaggattgcttgaagccaagagtgtgaaaccagcctaggcagtgtactaagaccccacctctacaaaaaaaaaaaaaattgttttaattggctgagcatggtgacgtgcaccagtagtcccagctacttgaggggctgaggtggaaggatcatttgagcccaagagttcaaggccgtaatgtgctatgatcatgccactgcacttcagcctgggcaacagtgagatcctgtctttaaaaacaataataataataatattgatttgtggagtcagtaccattcattattactactttctttattcttcattccattttgctattgagaagtcatccrccagtatgattgtagttcctttaaaggttatctgtcttttcttttctggctgtctttagtatccttttctcttttgtattttgtagtttcattgtgatatatttagatgtggatatctttatagaatttgcg

SEQ ID NO: 484171 - DNA, 624 bp, Homo sapiens
tttcacttagggccgtagttccaggcttaagggcggcggggtttaaccgggagcccagcccttctgtatcaatatcacaactttctgaaatacctggacgatcatttactatttgctcttttcttgcctccaaaattgaactcactaaacatctgttaactgcttacatgawatcatcatgttattatcataaggaatacaaaattgagtcacacaacgtgcataaagtcccaaaagggcttaaaatctaatgaaggagacaggtatacctgttaatttattaaaagctacatctttgagtgctgagtgaaagagaagtccactgtactatcgtactatttatgagtttgattgaagtagcatgtactttcaattgtggatatatgcaagagtacataggggagaaaaaacttaggtagaatttggaagatgaaaataataacatgataaattattttgaataacatttcaatatcaacaaacttattcctcataatcttataataaattgaaagtgatttaaaagtgatttagtagggggaaacatatttgtttcatgtaaatgtacatgcattactctctttaaactactgtggcaatatattaatggactgtgaaatcatt

SEQ ID NO: 484172 - DNA, 624 bp, Homo sapiens
tttcacttagggccgtagttccaggcttaagggcggcggggtttaaccgggagcccagcccttctgtatcaatatcacaactttctgaaatacctggacgatcatttactatttgctcttttcttgcctccaaaattgaactcactaaacatctgttaactgcttacatgaaatcatcatgttattatcataaggaatacaaaattgagtcacacaacgtgcataaagtcccaaaagggcttaaaatctaatgaaggagacaggtatacctgttaatttattaaaagctacatctttgagtgctgagtgaaagagaagtccactgtactatcgtactatttatgagtttgattgaagtagcatgtactttcaattgtggatatatgcaagagtacataggggagaaaaaacttaggtagaatttggaagatgaaaataataacatgataaattattttgaataacatttcaatatcaacaaacttattyctcataatcttataataaattgaaagtgatttaaaagtgatttagtagggggaaacatatttgtttcatgtaaatgtacatgcattactctctttaaactactgtggcaatatattaatggactgtgaaatcatt

SEQ ID NO: 484173 - DNA, 488 bp, Homo sapiens
gtaaattagagccaaagaaagagcttctccctttactggtgtgttcttacagcccacatgagtgtggcagtaatatttaacttgtcagtcaagatgtttgagaaaataatcayattaatgagtcttaggcaggaatgaaaggatatgcctggcatacttgtttatgaaatttgccagactcattaaaagtcagttacatcgtattagtaataatggacatgttgctataaacacaagagcttggccatttctagttgtaattaccagtgataaatttgactaaatataaagctatataaacaatacaatcaaaacttttttaagaaacagtaacagaaaacattttgtttaaaaatctccttaaaatgccagaaatatattttcctacctatcagacataatatatattgataaaaaactagaaataacactccttgtccataatacaaagacatgcaaaattaacatctttaatgaaataataattt

SEQ ID NO: 484174 - DNA, 625 bp, Homo sapiens
ctttccagaaaaatagacttacaaaattacgcatataatttcacagcttcatggaaagagatatttcatggccctcaaattaagaaagatggatatatagaatatggacagtctcacagtggaccagaataatcagagttaacaccttaaattcacaaacatcccagggagggttgctcagttgactgcaaccatcagggtgcaactgtgagctggctaagctttcctttccttgaggctgatcctcaatgacacagcttctccttgggctctgtgcttttaactacgctcgtggggctgcccaaaccaattctatcattcattcttttatccgacacattagaagtcacaggtagcacataagcctcgctagattagctaaatttgtttctttagggcagttcagcgtctctcttctaatgacttgattgtcttaaagctgtactttcagaaggcaattatatctctgctatatccctacttttagaaratgttagtgttcatgtactgacagcactaattcttttaaaaaattattttatcatagcaagaacgcttattatgagatctacccttataacgaatattcagttgcacaagacagcactgttgactatacacgcaa

SEQ ID NO: 484175 - DNA, 554 bp, Homo sapiens
gtaatcagtttttttctatgaaaactgatatataattggattattatatataatatatatttatataattggatagaattctaaaaggatcatgcctgccttacacgaatatctggttatgttttaaaaacatcatgagatttcaacagtcctatcacttcttgttgaagagaataatttctcatcaatttkgcttcactgctcttcaagagctttacatgtgtatatgtgtgtatacatagatatacacacattttacacacacacatctacatatacaaactatatcggacaaagaaaaagcatcctcctttcacacaatgttttgtgaacagtggctcagtttggttctttggcaactcctcctgtcaattgggaaacagattagcttatataatttgtagaattcaagttggatcagaaaattgcaaaagcgtgagactcattacagaaggatttggtccatactgatttaggaggcaaagaaagtcaaagtttagagactattccagagagagaaacgaatgcacagaggagggcccttcatgctgggt

SEQ ID NO: 484176 - DNA, 616 bp, Homo sapiens
gctgctatatatcatatgctaatgtatatttcttgctggtaaacatgtttttatctacaacggtgaaatgtgaatggcaacttttatattcttttgctcaatgatggatatgcstttttatttttaggaaacatttttaatatctttgtgtttattgattcaattcttgagtgcttttaaacaaaccttcctttgagcatagcggtagtgtaactcataacccagcgagtcattgtcatatatatacttatatatgtatatatttatattcttatatacctatttatttatatatatttctgacaatcatttttatgaaaatgaaaaaatagattgagagatagaggtagacatttgtaaaagaatgcatctttgagcagttcagttttaaaatattcctgcctttgctcaacagaagatagtaggtactctctgagcttgagcgtatgggagtatgaaaaataatgtaccaaacctgaaagatgtaaagctgatttgaaggccacgtctgaaatgttttgttaaactagacacatgacagaatgaacaattgaatgaacacgtgtaaagatgattgtgtcagaggcacctttgggaaaacagaggaaagtctcca

SEQ ID NO: 484177 - DNA, 616 bp, Homo sapiens
gctgctatatatcatatgctaatgtatatttcttgctggtaaacatgtttttatctacaacggtgaaatgtgaatggcaacttttatattcttttgctcaatgatggatatgcctttttatttttaggaaacatttttaatatctttgtgtttattgattcaattcttgagtgcttttaaacaaaccttcctttgagcatagcggtagtgtaactcataacccagcgagtcattgtcatatatatacttatatatgtatatatttatattcttatatacctatttatttatatatatttctgacaatcatttttatgaaaatgaaaaaatagattgagagatagaggtagacatttgtaaaagaatgcatctttgascagttcagttttaaaatattcctgcctttgctcaacagaagatagtaggtactctctgagcttgagcgtatgggagtatgaaaaataatgtaccaaacctgaaagatgtaaagctgatttgaaggccacgtctgaaatgttttgttaaactagacacatgacagaatgaacaattgaatgaacacgtgtaaagatgattgtgtcagaggcacctttgggaaaacagaggaaagtctcca

SEQ ID NO: 484178 - DNA, 644 bp, Homo sapiens
aagtatgagacaagtgttctgtaagaatctcagtcgtaacattcactagctggtgacttttagccatgtaaatgcttagagctttaagagttttgtgtttaaaatgggaataatgataaaactttgtgtgatcagcatacagattaataaataaagatgwtcctagcctggaatttactatgtgtttaaatatatgacaaaccgtatttccccttgtgtgtaattcctccccacaaaaacagcaacaaaggaccatcattagtaatgagggagcttcaattctacatgtgaaaacaatttaaacaatacaccatatagtgaagtactaaattacagaataaaataattagaatagagtttcaaacataggcaagggctaaagaggttaacgtcatatgtgagaaattgatgagcctttcaaagaatgggtatgattttactggcttttcctcatgttcacgcttaagttcaatgtccttagcttaacattcaagaaactttcctctctgaatcctggccacctaactggcataatcccccttttttgtctttataccacccctggatcttgccatatttgtagttgtaacaccatcctagatgtcaacaatgtgaatttcaatcagcacatattgtagtctgca

SEQ ID NO: 484179 - DNA, 517 bp, Homo sapiens
gccagctcctgacccaagacacatgtctgtggacagaaatcctatccctgcctcagttccaggtagagaatggtggccttgttgaaatagactctttctggctcacattactgctggccatctgctgcagtctcaaaccacaaataaacctcagcatcaggcatttggtgacaacatgggycttgaacattactctgtgctgctttggtctcagtaactgtgggattcaggtgggcctagcattatagtggttgtggcagccatgagaatgcccaccccattcttctccaaccccagtcagaatagcaaagaaagagacattgttcacatgggagaatgagtggcacaaaatcttgccttggagtttaaagcctggactacatgggaaagcccagcaccagacagagatcttcagcacctgagtacaaaccagagaccatgggtaaaccctctggacctgcactgacctcagatggaaactcagaccaagcaggatagacaacattctttagggact

SEQ ID NO: 484180 - DNA, 517 bp, Homo sapiens
gccagctcctgacccaagacacatgtctgtggacagaaatcctatccctgcctcagttccaggtagagaatggtggccttgttgaaatagactctttctggctcacattactgctggccatctgctgcagtctcaaaccacaaataaacctcagcatcaggcatttggtgacaacatgggccttgaacattactctgtgctgctttggtctcagtaactgtgggattcaggtgggcctagcattatagtggttgtggcagccatgagaatgcccaccccattcttctccaaccccagtcagaatagcaaagaaagagacattgttcacatgggagaatgagwggcacaaaatcttgccttggagtttaaagcctggactacatgggaaagcccagcaccagacagagatcttcagcacctgagtacaaaccagagaccatgggtaaaccctctggacctgcactgacctcagatggaaactcagaccaagcaggatagacaacattctttagggact

SEQ ID NO: 484181 - DNA, 669 bp, Homo sapiens
gcatctgcctttagaggcaacatatttattttcctctgaatacatagggaaattctgtttgctgttccattaagtaaataaatgctgaaaatacctacaagacaaatagagtcagttagcaaaaatttgtcaggaagtttatatagaaagctgttaactatgattttgaaaatattgtagcattgtatgtgtgggaagaatgggttaaaaagttaaagagtactttaacattctaagttttttcatatgctacatgtatttgaataaataaatatatgtatatccatacacatgtcagcaagactatatttgagtttatttatacatatataaaataaaagaatattaaagctaagcaagataaaattatatcaaaaaaggagaaaaataaagaatagcaagcaattcttttacctatagtcatttgttctgtttggaattttactttctagttattatagattttcatctcctatggtatatagtttaccagataaaaacatttttaactttagtctatggttaacacaaaaatatgtatgtacagctctccctatttaaaagtttaggagaaaagacaacatacaayttcaattataaaaactgtttctttttatccatattttaagcctcccaaaatgaaaataatgcctaatgacaaattcattg

SEQ ID NO: 484182 - DNA, 669 bp, Homo sapiens
gcatctgcctttagaggcaacatatttattttcctctgaatacatagggaaattctgtttgctgttccattaagtaaataaatgctgaaaatacctacaagacaaatagagtcagttagcaaaaatttgtcaggaagtttatatagaaagctgttaactatgattttgaaaatattgtagcattgtatgtgtgggaagaatgggttaaaaagttaaagagtactttaacattctaagttttttcatatgctacatgtatttgaataaataaatatatgtatatccatacacatgtcagcaagactatatttgagtttatttatacatatataaaataaaagaatattaaagctaagcaagataaaattatatcaaaaaaggagaaaaataaagaatagcaagcaattcttttacctatagtcatttgttctgtttggaattttactttctagttattatagattttcatctcctatggtatatagtttaccagataaaaacatttttaactttagtctatggttaacacaaaaatatgtatgtacagctctccctatttaaaagtttaggagaaaagacaacatacaacttcaattataaaaactgtttctttttatccrtattttaagcctcccaaaatgaaaataatgcctaatgacaaattcattg

SEQ ID NO: 484183 - DNA, 561 bp, Homo sapiens
tgcgtaagggcctggccatcttggtttcaaactctggcttcatttctcaccacacgggcagaactttcctttcccagagtattaatcacaactccattctgtgtgtggaggctcagcgctaagaaatgtttgttctgagtctttggaacacagatcctggtttcccacctgggctgtctggggaaatggaagctccagagctcagcagtttcgaaggttccctgtcacctgtagaayggagcactcgcctcttctgtcagaggtgggtgtactgccgattctaggacgtagacatttaccaagtgctcattaagaggactggagaattctgataccctagttaaggtgagccaaacagtccagactttatcattttttttttaaatgtttctccttgggtccatctttctacctctgtgaatacaatctgcaatacgatttttttcagttttgaagagttatccaggaccttactgtacttttgaggtcgccattttgaatgtttgctcccatcctagatgattcttaaaatctcaaggctggacctcggcactccaaagc

SEQ ID NO: 484184 - DNA, 530 bp, Homo sapiens
tgcagccacctccttgatctctttcacagtttcatacaagcagtcctccaccatgttttcttgggaggagctgtccttgagcacttcatagggcccttccatccccagcccctggtccccgtccacacttctcgcygtgagcatggtatccactgcgctctcgggagggattctgggcagctcccgactctgatgacattttggtttccctgtgctgtcctgggaatccagcagatccgaggccgatgtctggacttcctcgtaatgctgcatgcacgtcagagtactgtcctctgaaagaactaaagcagcacacacattaaaagcggagaaaggcaagtctttcaataattattaccgagaatcaggtaatataaagttaggttaaatcaagatgcgtgctttttatttaagtctcaggcacaaattatagttgttatgaccatcagttggtatcctacttcaatcacagtttaaaataaagctgttcattatatctttcccaatacaagatttaataagttatcttg

SEQ ID NO: 484185 - DNA, 558 bp, Homo sapiens
cttttcgcttttcatctgtcccatatccaaactccatagcccagggcacctatttccttttggagaattgctcttgcccccaaatgttatcttggcagagggtaatagttgcctctgactagggaagctgcccctccaggaagtgagcgtgtgaccttgtttggccagtcggtgctcccctctgggactgtgaatcacaagtaagcaacacaaagatgttagagatgggtagaaatgctgcctactcctgctgtgggtcctgagggctggctctcacattgcccctaatgcctgcrggttccaagcctgaagctgattctctgagctcctgacatacttacaatcacttaccttttatgtaaaatagtcagggtgcacttctgttgcaaactattcagaatccagactgaaatacactcaaatttacaatgtaaatgtggccaaaaacatctttgtggccctttggtctctcattcccctccctcttagcttctcctctgctcccaaacttccaagggtcttaggctgctttcactgtgcaggcctctctcatcatgg

SEQ ID NO: 484186 - DNA, 445 bp, Homo sapiens
ctgttactttcccattctgtagcactgaatggccaaggaaaggccacccttctcctaacacaaataagaaaaccactttaaaagtctttcttgggagagagtaactgaggagatataggtcatgggattcaaaagagcagatatgtaggaagaacaggtctagagatatgatgttaaaaatgaggactaaatttaataaaattatattgtatttgggattttgctatgtatgtgtatcctataacatcatgcataagacttaaatatgcaccataaaatttatttttaaaaaagaatatctgaaggcagcctaaagaactgcaacatcaacaacctttataggttgagttcttatcagacacagaatactgtggtggataayatgtggggtcataaaaaggtttaagtaaagctttgggaaacctggcaatgaacctcaacattc

SEQ ID NO: 484187 - DNA, 576 bp, Homo sapiens
cagctgcattaaactcttttcaatcgtctcaagcctccaaccacaactaccacactgggctggtgacattttcactttataaaaagatgaagactctccaattaaaggttctctacatgctcatcatccactccaccaaagcccccataccagggaaatatatggtaattcttcaccccagtacyctctatccttatctatctttccttccttgagacttgtttcatttgccatctcccctttattgtattttcatgctctccaacgctatgtattttttatgctatgcctatacatttaatcaagtttcttttggccaaaaatttattttttcatatttcagctttcattgtagggtcatctatactgaatcttttaaaaagtccataagtagatggtcaggctaactacatactgtaaattatatattatttattgtgcattatatattaacttaatttagaagctgcctggaatcaggctgaaaattctcttgccaaacagaggaggagatggataaaggtagagaaccctgaagatggtcatgcttttaaatactaggagtcaactaaattg

SEQ ID NO: 484188 - DNA, 637 bp, Homo sapiens
tcttaggaataaagatcagtagacagagcatatgtagaggaaaatagtatatatgtacatatgtataacatttatatagagacagatatttaaatttctttaactataaactattacaaataatgtataactatgtattgtagaatttatgtcatttatataaaaagaagaaatacaccattgtaaagtctttacactgtttgtgaagtagcatattacttgaagagaaaaataaaagtgtgcattactagagaaagacatgcataatgtaaggtggaatagatccaaagtcaaaacaggagatgaatattgagaaaataagcagatgaatattaagaaataagcactttacatgaaagaagtcaggaaaggaagcacagggactaaagcacatgtgtgaatataaaacacatagcataataaaagtattaaacccaaccatagtgaccactatatttaatrtgatggactaaacacaagtcagagattatcatactggttaaaaagcaagaacaaatacactttctttttttttctaaggcatattaaaataaacatgttaagcaaaacatagatgaacttccaggttcagtaccaacggaggaagagcttagaagtcagcactctcattcttaaa

SEQ ID NO: 484189 - DNA, 650 bp, Homo sapiens
tctttaaaaaggtgattctgttaaaatgatctttagtgtagggccctaatccgacaggactggtgtccttgtaagataaaaagataccataggtgtgtgtgcacagaggccatgtgaggacaaagcagcaagaattgcggccatgcacaasctgaggaaagaggcttcggaagaaaccaaccctgctgatacctcgatcttagacttccagcctccagaagtgtgagaaaataaattgccattgtttaagccaccattctgtagtatttgctgtggcagccctagcagtgaaatacaggagaaaaaagaaaccctgaagcaagaggagcttttttcatgcataaactttactccacaaatatgctgacattttccaggagagcttccgttgcacatcatttttattatgtttaataaaattatttaatgcacagctaaaagtgccattttcataccttcatatgaataactttttataaatcaagggtagaggaagcccttgttgggctgctgtatgaattttaattcattctctggtcttctttcctgtagctgacaggcagacttatacatgatgcttggggcagccacacatgggatcagccccttatctgccaggcctgaggaaatgggcagtttgataagggtgg

SEQ ID NO: 484190 - DNA, 650 bp, Homo sapiens
tctttaaaaaggtgattctgttaaaatgatctttagtgtagggccctaatccgacaggactggtgtccttgtaagataaaaagataccataggtgtgtgtgcacagaggccatgtgaggacaaagcagcaagaattgcggccatgcacaagctgaggaaagaggcttcggaagaaaccaaccctgctgatacctcgatcttagacttccagcctccagaagtgtgagaaaataaattgccattgtttaagccaccattctgtagtatttgctgtggcagccctagcagtgaaatacaggagaaaaaagaaaccctgaagcaagaggagcttttttcatgcataaactttactccacaaatatgctgacattttccaggagagcttccgttgcacatcatttttattatgtttaataaaattatttaatgcacagctaaaagtgccattttcataccttcatatgaataactttttataaatcaagggtagaggaagcccttgttgggctgctgtatsaattttaattcattctctggtcttctttcctgtagctgacaggcagacttatacatgatgcttggggcagccacacatgggatcagccccttatctgccaggcctgaggaaatgggcagtttgataagggtgg

SEQ ID NO: 484191 - DNA, 650 bp, Homo sapiens
tcaacatgtggggattacaatttgagatgagatttgagtggggcaacagagccaaaccatatcaagcagattatgcttcctagtgtgggtgtgggtgggcctcatccaatcattggaggcattaacagaacaaagtctgacctccccaagaacaagcaggaattctgccagcacatggcctctggactgtgactcttccctaggtctccagcctgcccgcccactctgcagattctcaacctgccaatcttcactattgcttgagacaatgccttaatctctctcctctctctctttacacacacacacaggcwcccacacacattccatgggttctgtttccctggagaaccctgactaatacacacacacacatacacacacacacatacacacacacacacaagcacccacacgcactcctccaaggcatcaaattcttactatttaattcaacaagacaaacttggggtttcttagatgtatcatccactggtttgactgtgaactatcctaatagtcatggctcatcattcatgacaaagaatccctatttcagtttgcctgtgatgattaaaccacctcctccatcccccaccccaggaggaagcactccttcccatagtgcctgggaatgttggctgttgaca

SEQ ID NO: 484192 - DNA, 627 bp, Homo sapiens
cctataactgatgactttgagtaatatatacacagcttcagtaggtttcctcgtactttaaacatgatgcaacaatatattagaaaatcacttggagaagaatgtcgctcatcaccccaacatggaatgcaatgattccaatttccactgttgcatacgccttttcagtttccatttttacgaagatctaagtacaatgcacttcaattttgcatttttatttttataatcattgggaggggtacttccatcaatcagatttgttctaatgcaaaatgtatctaaatttacttaatataagagagaaaagctcaaccctagccccaaacaaaacctcaatctatgcattgcccagttttttaaaaggtcctcctttaaaaattaatcttctttcttatgcattttgggacctattttttccatttaattttaaccaaatttaatcataggtttgaaagaaaaatcactgaggagctttcatcttcctgtgtagataacttgaaaatttttwaaaaatatatttacacaggaagtccttgagatgtaacttaatagcaacatctaaatttaaaaggctggtattatgtcatattaagtctctcagtttttgacaccttaatggttctg

SEQ ID NO: 484193 - DNA, 575 bp, Homo sapiens
aatagatgaaacaaaagctctgaatttctgtaaggtcataggtatkgactgaacttgtgactgattgtttcataaaaccttaggtactacctcgggtgatgaaggagagatctttgctagtggctttggttataagggctaaaacgtgaatacctctttgaaactcaaagttaaaactctgtacccagatgcacagagtgaaaacgaagtgaattaaatgcatgagtgaaattctagaaaaatgtaggggagcaagagagaggggaaaattgatgtgccatattttctctccagcagataaaatctgatggtgaaatgggattgctctacacaggggtggtttacctttggggcaacgaaaaagttgcttcttggatttgctccgtggaaggacaaaagtgaggtattgcagactaaacaggagagaaggcatcagtacctggagaaagaaggatggaggcaaagttcctgaaataacaagttgaggaactaggcagatcagcatgtcttttctcccaaagatcctgcaccacactttccagcgctattacagggcttcccagtggcgtgatgat

SEQ ID NO: 484194 - DNA, 575 bp, Homo sapiens
aatagatgaaacaaaagctctgaatttctgtaaggtcataggtatggactgaacttgtgactgattgtttcataaaaccttasgtactacctcgggtgatgaaggagagatctttgctagtggctttggttataagggctaaaacgtgaatacctctttgaaactcaaagttaaaactctgtacccagatgcacagagtgaaaacgaagtgaattaaatgcatgagtgaaattctagaaaaatgtaggggagcaagagagaggggaaaattgatgtgccatattttctctccagcagataaaatctgatggtgaaatgggattgctctacacaggggtggtttacctttggggcaacgaaaaagttgcttcttggatttgctccgtggaaggacaaaagtgaggtattgcagactaaacaggagagaaggcatcagtacctggagaaagaaggatggaggcaaagttcctgaaataacaagttgaggaactaggcagatcagcatgtcttttctcccaaagatcctgcaccacactttccagcgctattacagggcttcccagtggcgtgatgat

SEQ ID NO: 484195 - DNA, 575 bp, Homo sapiens
aatagatgaaacaaaagctctgaatttctgtaaggtcataggtatggactgaacttgtgactgattgtttcataaaaccttaggtactacctcgggtgatgaaggagagatctttgctagtggctttggttataagggctaaaacgtgaatacctctttgaaactcaaagttaaaactctgtacccagatgcacagagtgaaaacgaartgaattaaatgcatgagtgaaattctagaaaaatgtaggggagcaagagagaggggaaaattgatgtgccatattttctctccagcagataaaatctgatggtgaaatgggattgctctacacaggggtggtttacctttggggcaacgaaaaagttgcttcttggatttgctccgtggaaggacaaaagtgaggtattgcagactaaacaggagagaaggcatcagtacctggagaaagaaggatggaggcaaagttcctgaaataacaagttgaggaactaggcagatcagcatgtcttttctcccaaagatcctgcaccacactttccagcgctattacagggcttcccagtggcgtgatgat

SEQ ID NO: 484196 - DNA, 599 bp, Homo sapiens
agttttgcaaaaatataagatgaccatgtcttgaacaactctcattaaaatgtgtatagttaaaaatttctaatcatatctcactggacctttttcttgtgggaaaagaaaaagctagaatgcactataacttcatcttccaagaggatacaagcacagaatatagagggcctcacacagtgtaacaaataagcaggtcttgcagatagctttttctctggtktcagacatacctggggacaagcctttcagctgctctgtccctagagtttacccatcaccagagtcttgttcacagtaggcctttaagaaatagttgttaaataaatgggtcttatttttagtctaagtaggatgtctgttgctttaatctattctcttctctcttcctcaaaatacgacgtttttgcatttcctcctccatctctggtagttccttctgcttccactgcagactcaccttccaccttcccatgcctggcttttgtgtcttcttcacactctagttttcttaaagacatacctcaccacattcaagtcccaaagtgacaggggtatgaagacacgggttgggtgcctctatctccaacctcccttcg

SEQ ID NO: 484197 - DNA, 592 bp, Homo sapiens
gactgattggctgtaccactgctgaatattgagtagagatgaaaagacgaaatgtctctggaattgaaactagagttttattttttaaagcaaattccttcttgctactggactactttaagaattttagaactcttagggaccatgcacctttataggggtgtagttaggatgtgtttgcttgttttatcactgttatttttcagttctatacatttaatctctacttttgtgtctggctaattgtgtttatttcataaatacctatgggaaagaaagataggaaggaggaaggaaagaataaaataaggagagagattctgttagaaaatacggaggaagggatctccatrtagaaagaattaaagttaaaaccaggcagtgaatcttgggtaagaatgtcaccacttttctagtgagataggatttaggattaacctttgagacacacactataaaggacacttggataaacaatcttgtatttaaaaaaaaaggaaaactaacataaagaaactaaattaatctaccttttcgaataagatgaaccaattgttgctgaatgcaagctaaaaaaatttttttttgaaaa

SEQ ID NO: 484198 - DNA, 667 bp, Homo sapiens
gctgatgagttcaaagatagactgattggctgtaccactgctgaatattgagtagagatgaaaagacgaaatgtctctggaattgaaactagagttttattttttaaagcaaattccttcttgctactggactactttaagaattttagaactcttagggaccatgcacctttataggggtgtagttaggatgtgtttgcttgttttatcactgttatttttcagttctatacatttaatctctacttttgtgtctggctaattgtgtttatttcataaatacctatgggaaagaaagataggaaggaggaaggaaagaataaaataaggagagagattctgttagaaaatacggaggaagggatctccatatagaaagaattaaagttaaaaccaggcagtgaatcttgggtaagaatgtcaccacttttctagtgagataggatttaggattaacctttgagacacacactataaaggacacttggataaacaatcttgtatttaaaaaaaaaggaaaactaacataaagaaactaaattaatctaccttttygaataagatgaaccaattgttgctgaatgcaagctaaaaaaatttttttttgaaaaaaagtatatctgttggaattttgtaggtcagtgtcagagaatgccacccaaactgg

SEQ ID NO: 484199 - DNA, 522 bp, Homo sapiens
tccctttcatactcagctttaaccctcagagtttcatctggtcctttatgcgcagatgttactcaaagttcacatggaatgccaaaatttccacaggccttcttgattttttcacagtgaccaagatcagaagtagagcccatcaacactacaaccctgcactgactttctgatttcaaaagcaactctactttctctgcaacccactcaaagtttttctttaccatttggagcccttcaggagttacttctttgagatcccgataacactgtttgtstttctgttggcttcgatctcctgatggccagagtctccaggaatcattgtcaattacatcagcaagaacaatttctttgtggttacatcaacaccaaattcaatcttcatatcaaccagtgtacaattctggggcaaccaggatttctccagcatttcaaatatagcctgtgtagcatgactcatgatatccaattcagtctggcctgtaacaagtccagcgaagcaaaattttgcagcaatca

SEQ ID NO: 484200 - DNA, 684 bp, Homo sapiens
tagcaggatttatttcttatttacactttcctttggttttatacattcgtgtctggatttttcagtgrtgaaatgttgcaatggagactatttataaaaatgctaaagccagcttgccagagaagcttgagaagtgctggaggcgtacagctaatgcttcctgtgttcctttgagctaaacatgatatccgttttgttcttgacatttataacccttggttaatgttccttttctctaactgcattgggtttaggactctgcatagggaaataagaaaaaaataaattaatgagcttcattaaatatacattgtggtgagttttctctttcacaggggtaatgttgctggtagtaataaaagttttaaagggattatgaactcttctgtaaaaaattatcctttgagccagttcgagttagtttcccttgattttttaaaaataaatatattgtgaaaattttggtaaaacccctatacatggaagggattcagaagtaatgtcaatttctacaggaggctgggagacgttaacataacaatattaatcagaccagttagcatatgtttgccaccactggaaaatattttaaaccgaagacttcagttaattcccaaggaggagttctaaaattttaaacaataaaagcagttttaaaatgaggatacggcctctcgtaaggat

SEQ ID NO: 484201 - DNA, 626 bp, Homo sapiens
aaaatgtgtgtaatcacatttgcttgcctgcttcaggtatttttaaataatctaatcgaataaagcttctcagagaatactaygtaaaataaagttcctctgtaatgcaatgacttctgatgtcatcactactatgggaattattacattccctctttcccttttctattctcttcctttcttttcgggttcagtaaaaaaattaccagaacattcacatgcttcctatcttccctttttgaaagttaaatgttataagcctctgaatttacttctgtgactgtgcattccagcaaagtaaaataaaattgtgtgtgattcgtgggggtttgcaacttactttcaccgtaccacttgctaactagaggatccgattatgggtcttgctgtcttaggacaccagataccactgaagccttgcccactgcaggttactgaaatctaggtttatgtttagagaggacaaaaatgtgttcattgctttatttgacctcaactggcctagtttgatgatttttttaaaaagataatctatatgcctttaagaggattccaaaaaatgtaaactgtcagtttacgtggattgtaacccgatggagatgtttctcatttacctgggccacagg

SEQ ID NO: 484202 - DNA, 626 bp, Homo sapiens
aaaatgtgtgtaatcacatttgcttgcctgcttcaggtatttttaaataatctaatcgaataaagcttctcagagaatactacgtaaaataaagttcctctgtaatgcaatgacttctgatgtcatcactactatgggaattattacattccctctttcccttttctattctcttcctttcttttcgggttcagtaaaaaaattaccagaacattcacatgcttcctatcttccctttttgaaagttaaatgttataagcctctgaatttacttctgtgactgtgcattccagcaaagtaaaataaaattgtgtgtgattcgtgggggtttgcaacttaytttcaccgtaccacttgctaactagaggatccgattatgggtcttgctgtcttaggacaccagataccactgaagccttgcccactgcaggttactgaaatctaggtttatgtttagagaggacaaaaatgtgttcattgctttatttgacctcaactggcctagtttgatgatttttttaaaaagataatctatatgcctttaagaggattccaaaaaatgtaaactgtcagtttacgtggattgtaacccgatggagatgtttctcatttacctgggccacagg

SEQ ID NO: 484203 - DNA, 595 bp, Homo sapiens
gagacatgagtaccccagtgttcattgttgccttattcacaattgtcaagacatgaaagcaacctaaatatccattgacagatgaacatataaagaaaatgtgacatatacacacatacgtatatgtatgtgtgtatatatgtgtgtgtgtgtatatatacatataatacatatataattacagctttttccactttttaaaagaygcaatcctgcatatgcaacagcatggatgagcctggagggcattgcgctaactgaaataagctagtcacagaagcagggatatttttagtttctttgattttgctttatgttgtttttatttatttatacaaattcatggggtacatgaaaattttgttacgtgtctataatgcgtagtgaccaagttagcgtagttgggatgtccaccttaaacaactgatggaagagcaaaaaggagataacttgggagaaattgctgcaggcacttgcacctcactctcatgtgtagctttccttcccactcattctaagctcctttccctgcgctctgcctttcgtgaccctcatgccccataacccaatggagagacagttctgttttaaacat

SEQ ID NO: 484204 - DNA, 595 bp, Homo sapiens
gagacatgagtaccccagtgttcattgttgccttattcacaattgtcaagacatgaaagcaacctaaatatccattgacagatgaacatataaagaaaatgtgacatatacacacatacgtatatgtatgtgtgtatatatgtgtgtgtgtgtatatatacatataatacatatataattacagctttttccactttttaaaagacgcaatcctgcatatgcaacagcatggatgagcctggagggcattgcgctaactgaaataagctagtcacagaagcagggatatttttagtttctttgattttgctttatgttgtttttatttatttatacaaattcatggggtacatgaaaattttgttacgtgtctataatgcgtagtgaccaagttagcgtagttgggatgtccaccttaaacaactgatggaagagcaaaaaggagataacttgggagaaattgctgcaggcacttgcacctcactctcatgtgtagctttccttcccactcmttctaagctcctttccctgcgctctgcctttcgtgaccctcatgccccataacccaatggagagacagttctgttttaaacat

SEQ ID NO: 484205 - DNA, 533 bp, Homo sapiens
ttattttctgtttaatacttcayttaagaagaacttgttcctcacacatggttgggcatgaaactaagacatcagatttcagaattctcacttctcatgaactcaaagataagtacaattttggtaataactatacaaagtttaatagcctcgaattttaaaaaccttccacagaaaagcataaacaacagatttagaccttttgaattaaatatcgttaaaaatcatcttagtaaagttgatgtttgcatgctagaatgtatatctttcaattcttagtactagctattctgaggaacaactaacctcctgcgcgtctcctcaatacaactctacaacacagacccggagaccaaaagtcttcagtgtttgcaagtgtaaaataggaatgtggaacttacaggtgctttttgtcctgcatgcacaaaagcctggtttggggttcacagctatggctttcctcggtggaccgcatccataggcttgggaagagcctacctgtccactcacttagactccacggaggcacttgc

SEQ ID NO: 484206 - DNA, 472 bp, Homo sapiens
taaaattcacctaccatacactttatccatttaaaatatataattattacattcaaacatggtgaattgtgcagccatcaccacactcaaatttagaatattttcatgaaaatatgaatgaaaatccatacccactagtagctactttacattaaagcttagataaccactaatctactttcagtctctgtagatctacatattttacacatctcatatacatggaatcaaacaatatgcaatcttttgtgactggcttcttttacttgmgtttaagattaatacactgaggtccagacataggtttctggcctccattgtgaagcacccaggagtgcccctaaacatccctaaacaatgacagccatgagaagcccaaagcaagccagtggtcctatctttagtttctggagagcacttcctgtgtcctctggcagaaatgtttcagctccatccccagtaaccagaacaa

SEQ ID NO: 484207 - DNA, 472 bp, Homo sapiens
taaaattcacctaccatacactttatccatttaaaatatataattattacattcaaacatggtgaattgtgcagccatcaccacactcaaatttagaatattttcatgaaaatatgaatgaaaatccatacccactagtagctactttacattaaagcttagataaccactaatctactttcagtctctgtagatctacatattttacacatctcatatacatggaatcaaacaatatgcaatcttttgtgactggcttcttttacttgagtwtaagattaatacactgaggtccagacataggtttctggcctccattgtgaagcacccaggagtgcccctaaacatccctaaacaatgacagccatgagaagcccaaagcaagccagtggtcctatctttagtttctggagagcacttcctgtgtcctctggcagaaatgtttcagctccatccccagtaaccagaacaa

SEQ ID NO: 484208 - DNA, 644 bp, Homo sapiens
tttttgttctggaaaattggacagtgaatactggcaagcatcatactctagaaaatgaaagaaaatgtccctgaaaaatacgacatggaacttctgtggagtggaggattgagtcatgtcttttctggaatagaaaactttttattttgttttgtttttcttctttttcccagcagtgatataaacttacagaattgttaggtagtaatggtgaggatcttttgtactactaagtcctagagtgttctgagatcatgatatgcaaacacatgctttagttcacatccaatataatcagaaaaccagaaataacaccctattagaattatcttatttgccttcacaagaccacagcatctatgagagtcttcatgattttaagccatgcaacaagtagatgggcatgaatatcattcctctttctttcctgggcattatctcatggtagctagatttaccaaatcctcttaatttttaacatagtttatcggtacattagattttcatttatttrtcccttcacttaataagtatttattgagaaattaatattagagtttcttagtatacaatggtgaacaaaacatagtccctgtctttaaaaataggtaggtcatgatcatgaaaccttcccctattgcagg

SEQ ID NO: 484209 - DNA, 626 bp, Homo sapiens
ttttttttcatggaagtagaatgttccatgcctaagtagatttagtggtttggttgctgcctgtagaatttcagaagtctgaacgactcttttcatttttcactctccattatccctttagtccaagttggcagtgtttttgctaaaacaattttctcaaaaactgagtaggtgttttctgtctttcccagggtttctttctattagataaaagccataccctcagatcccttctatataatccctcttctacctgggactcccatagaaagaagtgagtgacaagagattaagcttcctagaggtcctattattagactgagaggatctgtgagacaaaactttgatrgctttaaaaggccatttttatgaccaaatactctaatcatttgatcttttgaagttttagcaaagattgtgtaattacaccattttctctatgccaagctttatctaaagaccatgttttcctgacagttcatagaaacaatttcctaattttaacatcttttgtcatttggaaaagctagaattttctaaattatcaagtccttttgatttaacagttccttcctcaaattatcttcctatattctgacacattgctacagaaatcaagaaaaaag

SEQ ID NO: 484210 - DNA, 626 bp, Homo sapiens
ggtttttggttatcgtctgtttttctaaaagggactagtccaaggcctttatgagttgtccttacttcccagtttcagtaaaagctgcctctgttttgagaaccctcagtgtgtagcctggaatgcagagcctgcacttttgaaacataaacactttgtctcgatataattttagtacttctggaactccctgggaaatgaaaaacaccaagaagatcctctgacaaaaattcagctcttattgagaacacrtatcttttcaaggggtctctccttgctgacctaaactatgaataataacctttttggggagccaaacttttataaataacattcagagaaaattgttttctttactttgctcttttatataaagtaacctattacttacaaaggataatagtaaagtataaaaacgtgattccacttgaaagttcaaggaataaatgaattaatctggaagttaacatctccatagaaataaccagcatgaagacattaaaattcctataggtttaccattccctatatttaaaaatggttggaggctggtcccagtgccttggtatttacaactcattgatcactaccagttacagactttttttcttccttcttcaccccca

SEQ ID NO: 484211 - DNA, 645 bp, Homo sapiens
ctgcagtcattgaaattgagaaatgtgaaaaatttgactattgctgctacaaaaatgtatctctttacaaaatttagtatgatctttttcctcccaagagaaatctctttgaacattacctatctacatagttagaacagacaaaaatattaaagatttgtattgaaaatgtgttaatttgtattctactttctatgtcctacacatacaaatttattcaaaggaattctaatatcagtatgactatttcatcttttgtgtgcactttttaaaaacttatacattcatttcagtccataagttaccaaaagggaaacaatatttgttaatctaacatttgaggcttctacctaaaatttatacaacgcatttgggtaactaataaacgcttttacacataggtgcattaacatacactgattaaaataaaggcatagctagaaatgtcttygccccacttaagacatacagatcatcacaaggctgtgatggcaggcctaataggaatatgtgaagcctaaagctgcaaacttggaatctgcagtttaacaaaagataggctttgcttttacatctagcactccactatttatcaaggaagtcagggatccaacatacttagctctaaaatgggataatattgac

SEQ ID NO: 484212 - DNA, 645 bp, Homo sapiens
ctgcagtcattgaaattgagaaatgtgaaaaatttgactattgctgctacaaaaatgtatctctttacaaaatttagtatgatctttttcctcccaagagaaatctctttgaacattacctatctacatagttagaacagacaaaaatattaaagatttgtattgaaaatgtgttaatttgtattctactttctatgtcctacacatacaaatttattcaaaggaattctaatatcagtatgactatttcatcttttgtgtgcactttttaaaaacttatacattcatttcagtccataagttaccaaaagggaaacaatatttgttaatctaacatttgaggcttctacctaaaatttatacaacgcatttgggtaactaataaacgcttttacacataggtgcattaacatacactgattaaaataaaggcatagctagaaatgtcttcgccccacttaagacatacagatcatcacaaggctgtgatggcaggcctaataggaatatgtgaagcctaaagctgcaaacttggaatctgcagtttaacaaaagataggctttgcttttacatctagcactccactatttatcaaggaagtcagggatccaacrtacttagctctaaaatgggataatattgac

SEQ ID NO: 484213 - DNA, 594 bp, Homo sapiens
ctggctgtaaactacagcctgacacccctctctcttacttyctctcttgccatgggatctctgtctccacacactggatcccctttgtcttcagccatgagtggaagctccttgagaccctcatcagaagcagatgttggtgccatgcttcttgtacattctgcagaactgtgagccaaataagctttttttctttataaattacccagtctcaggtattcctgtatagcaacacaaaatagactaagatagaccttgtgccttcatttcaatttatttatctgtgaaatgggatagccttagtgactaacagagtttctacatttactttagttaattaagattaattgacctcatacaggtaaagtgactagtgtaatggctcaccccaagtaagcacttagggaaaatttaactattaatatctccaagcttcagttttcttaaccataagttgggggtaaaaaacgttgcttactacatatggtcatcaggaggatggaatgagataatgtgtgcaaacagcttaacttacttccaggtacactcagtattacagtcagtagtagacataataatagcagcagttgtatc

SEQ ID NO: 484214 - DNA, 505 bp, Homo sapiens
cattcttgtggtggaatcaacttgccatccttgttctaataagcctttcacagcctcttctataggaagtccaacaaaggctgcaaaatcatcagtgatgattgaagtatatgcttgagagaccagggcaaaggtgcgtctccttgttgcatctctaagtgcttccataattggctggactgtctcagaccactgatgagcgttgatggttgtatagatcccagggaaatctctctgccagactcttcgtcctactgaccaaattcccccaagttcagaatttgcagattttgtagcaggtggtattcttttccaaagatatcttgcattattcatgtcattayggagcaaacataaagctagacgctgaccatacactgggggtgtagcaattcctccaggggcctcgagctcctggttctcgcactgatccagcaactttttgaaactaaaggcgctttctgccatcaccgccactggcatcttcacggccggtctccgggcc

SEQ ID NO: 484215 - DNA, 698 bp, Homo sapiens
tagtggctactgacccaggatttggagtctgctgtacgtgggtccttgtcatgaatgccacctaatgaggagtatgcccagagatgagtaatacaacttattcaagtctcagtttccacatcttaaaatgggagaaatgttacttaactcataggattggtttgttaataaggcatgggcctgaygtaactggtttgttgattaactgggttgttgataaggcataaccccgatataagtaatcaatataatcaatgcatctcaacttttatttatggcaaaattttaaaattatgatttgtatttttctcttggtctttttccctgtcttcattgcagaatggtagccaagcctttctatgctctcttcctccattatgtttggtggggggcagaaaatagaagttaaacaatgtcccaagggcactggggagaatagaagtgtgtggggtgcgtgtgtacttaagaaaatgacaaaagttcaagctgagggagagaactacccccaaggcagggcccccagaacagggaaagtcacatgtattccctggcaaagcctagagtattagcaagaacactgagcagatggctatatggcttctctaaaaaaggcggacctggtctctggactcccatgtggggatgaaaggagagacacataagcctcaaggaaacaggggtttggaacatgaggattg

SEQ ID NO: 484216 - DNA, 449 bp, Homo sapiens
caatgcatctcaacttttatttatggcaaaattttaaaattatgatttgtatttttctcttggtctttttccctgtcttcattgcagaatggtagccaagcctttctatgctctcttcctccattatgtttggtggggggcagaaaatagaagttaaacaatgtcccaagggcactggggagaatagaagtgtgtggggtgcgtgtgtacttaagaaaatgacaaaagttcaagytgagggagagaactacccccaaggcagggcccccagaacagggaaagtcacatgtattccctggcaaagcctagagtattagcaagaacactgagcagatggctatatggcttctctaaaaaaggcggacctggtctctggactcccatgtggggatgaaaggagagacacataagcctcaaggaaacaggggtttggaacatgaggattgcca

SEQ ID NO: 484217 - DNA, 449 bp, Homo sapiens
caatgcatctcaacttttatttatggcaaaattttaaaattatgatttgtatttttctcttggtctttttccctgtcttcattgcagaatggtagccaagcctttctatgctctcttcctccattatgtttggtggggggcagaaaatagaagttaaacaatgtcccaagggcactggggagaatagaagtgtgtggggtgcgtgtgtacttaagaaaatgacaaaagttcaagctgagggagagaactacccccaaggcagggyccccagaacagggaaagtcacatgtattccctggcaaagcctagagtattagcaagaacactgagcagatggctatatggcttctctaaaaaaggcggacctggtctctggactcccatgtggggatgaaaggagagacacataagcctcaaggaaacaggggtttggaacatgaggattgcca

SEQ ID NO: 484218 - DNA, 698 bp, Homo sapiens
tagtggctactgacccaggatttggagtctgctgtacgtgggtccttgtcatgaatgccacctaatgaggagtatgcccagagatgagtaatacaacttattcaagtctcagtttccacatcttaaaatgggagaaatgttacttaactcataggattggtttgttaataaggcatgggcctgacgtaactggtttgttgattaactgggttgttgataaggcataaccccgatataagtaatcaatataatcaatgcatctcaacttttatttatggcaaaattttaaaattatgatttgtatttttctcttggtctttttccctgtcttcattgcagaatggtagccaagcctttctatgctctcttcctccattatgtttggtggggggcagaaaatagaagttaaacaatgtcccaagggcactggggagaatagaagtgtgtggggtgcgtgtgtacttaagaaaatgacaaaagttcaagctgagggagagaactacccccaaggcagggcccccagaacagggaaagtcacatgtattccctggcaaagcctagagtattagcaagaacactgagcagatggctatatggcttctctaaaaaaggcggacctggtctctggactcccatgtggggrtgaaaggagagacacataagcctcaaggaaacaggggtttggaacatgaggattg

SEQ ID NO: 484219 - DNA, 524 bp, Homo sapiens
tagctgagtcttgtggcatgtgcctgtagtcccagctacttgagaggctgaggtgagaagatcacttgagcccagagggttgagactgtagtgagctgtggtcctgccactgtactccagcctgggtaacagagtgagaccctctctcaaaaaaagtcrgtggggaggggaagacaacaatggaacctactccctaggggttgttgcccagattaaatgttttgatatgtatgggaaaaagcactcaataaaactcaataaatgtgcctacttagaacaacatgtagcagatagtgcttttgaggcatttgttacgtgcacctgttgatgtattgttggctagaagttaacacaggggtttcagaatgggcccaaatgtgctttggcaaggagccctttcctgatgaggtaacagagggagccaatgctatacatcctctaccagggacaggggtgcgctcaggaaattatggcccatacatactgtgtcagtacatcacctgccaagggagagtcacatcaaa

SEQ ID NO: 484220 - DNA, 524 bp, Homo sapiens
tagctgagtcttgtggcatgtgcctgtagtcccagctacttgagaggctgaggtgagaagatcacttgagcccagagggttgagactgtagtgagctgtggtcctgccactgtactccagcctgggtaacagagtgagaccctctctcaaaaaaagtcagtggggaggggaagacaacaatggaacctactccctaggggttgttgcccagattaaatgttttgatatgtatgggaaaaagcactcaataaaactcaataaatgtgcctacttagaacaacatgtagcagatagtgcttttgaggcatttgttaygtgcacctgttgatgtattgttggctagaagttaacacaggggtttcagaatgggcccaaatgtgctttggcaaggagccctttcctgatgaggtaacagagggagccaatgctatacatcctctaccagggacaggggtgcgctcaggaaattatggcccatacatactgtgtcagtacatcacctgccaagggagagtcacatcaaa

SEQ ID NO: 484221 - DNA, 637 bp, Homo sapiens
gtagaaatgttttagggcagtaattctcaaacatttttgactgtagcccatggttcatggatgtagcagttctcattttgcagtggaatcttcattctcatcttgtgcaattcacaggaagagctctgaaacactgcccgtgcagcagggcggccagactccctcacagaattctgaatctgagtctttgacacactgtagaaagtgccagatgataagcttctctagggctgggttcttccttgggcattgccctatctccagcacctagatctgtgcctggtacatagtagtaggtgctcaatagttgttggttgattaactctaccttaatataaaatttcatttctctaataaagatttaattctataaagattgagtatatatagactcaactctataaagattcaatttcatttctctatacagattcaattactaataaccaggtcttaatcaactatacgtcaaaagaaaagttgtggaattgcacatcctttaccctttctgggtyagtctgtggtctgttgcaagacttgtggccaatcagtgggcagaaggccacattttagaggatcactgctatagggtaacgtgtatatgtgtatgtattgatatatgatgataattattgca

SEQ ID NO: 484222 - DNA, 607 bp, Homo sapiens
tgactcagcatctctgtgaacctgtaggacacaagtcaattattacaactgttttgatttcaaataagctyattacgtaatgagaattttttaatgagcagtttttctaggagaaattttattcccttacatctcagaggctggcacctgaatgaaataatacatttttcagaccttccagttgaaaccctgccttcttcatgaataaaaaattgttttaaatgtccaacattagaaatgtggtttaacaaattaagatgtattatgaagttattaacctatcagtaaagattacatataaacataatgcatgtgtatccatgtatgtataacacatgtatgtgatatatccattatgcacatgatacatccattacacatatattatatacatgtgtacaaactataatgtacaaatacttagtacatgctacctattatacatattatatacatgtgtacaaacgttatagttaagtagaaatggcgtatatacccaccaattgcaagcatgtcaaagtatgtgcttacatttggaaattaacataaaaatttgttttaatttgtacaggggtagtagaattataaataaaccttttaatttaat

SEQ ID NO: 484223 - DNA, 557 bp, Homo sapiens
tttacagagctacccaacaggcagttttgttgctgctgttgttttctgatgcttcacaatgtgtctgcatctaaagatctaatttactaygtgataataagtttggctttctcatcactgccaatcattttcttcaagcctacctcatgggtctgaagtagctcaagttgaactgagaaccctttcaatgcatgcaaactgtctgttacgtgctcatgtcactctcctcatgattacttgctagaagggttaaaattcaaaagctataatctcacatgcttatgattttgcaactggattttaccaagacacaccatctatatattcacagcagcaaaggaataaaatctagtcccctagaaaaataaacactcacctccgcttatcattaaagaagtttggcttctcagcctgaacaatgaccacatcgaacaggtccctccagtctttcccaacgatataactcatccctttgtccctagggcaacaagtcagccaggttagtctaacattaaagagattaactgtgtctgtaactttttctttccaatttccag

SEQ ID NO: 484224 - DNA, 557 bp, Homo sapiens
tttacagagctacccaacaggcagttttgttgctgctgttgttttctgatgcttcacaatgtgtctgcatctaaagatctaatttactacgtgataataagtttggctttctcatcactgccaatcattttcttcaagcctacctcatgggtctgaagtagctcaagttgaactgagaaccctttcaatgcatgcaaactgtctgttacgtgctcatgtcactctcctcrtgattacttgctagaagggttaaaattcaaaagctataatctcacatgcttatgattttgcaactggattttaccaagacacaccatctatatattcacagcagcaaaggaataaaatctagtcccctagaaaaataaacactcacctccgcttatcattaaagaagtttggcttctcagcctgaacaatgaccacatcgaacaggtccctccagtctttcccaacgatataactcatccctttgtccctagggcaacaagtcagccaggttagtctaacattaaagagattaactgtgtctgtaactttttctttccaatttccag

SEQ ID NO: 484225 - DNA, 557 bp, Homo sapiens
tttacagagctacccaacaggcagttttgttgctgctgttgttttctgatgcttcacaatgtgtctgcatctaaagatctaatttactacgtgataataagtttggctttctcatcactgccaatcattttcttcaagcctacctcatgggtctgaagtagctcaagttgaactgagaaccctttcaatgcatgcaaactgtctgttacgtgctcatgtcactctcctcatgattacttgctagaagggttaaaattcaaaagctataatctcacatgcttatgattttgcaactggattttaccaagacacaccatctatatattcacagcagcaaaggaataaaatctagtcccctagaaaaataaacactcacctcckcttatcattaaagaagtttggcttctcagcctgaacaatgaccacatcgaacaggtccctccagtctttcccaacgatataactcatccctttgtccctagggcaacaagtcagccaggttagtctaacattaaagagattaactgtgtctgtaactttttctttccaatttccag

SEQ ID NO: 484226 - DNA, 557 bp, Homo sapiens
tttacagagctacccaacaggcagttttgttgctgctgttgttttctgatgcttcacaatgtgtctgcatctaaagatctaatttactacgtgataataagtttggctttctcatcactgccaatcattttcttcaagcctacctcatgggtctgaagtagctcaagttgaactgagaaccctttcaatgcatgcaaactgtctgttacgtgctcatgtcactctcctcatgattacttgctagaagggttaaaattcaaaagctataatctcacatgcttatgattttgcaactggattttaccaagacacaccatctatatattcacagcagcaaaggaataaaatctagtcccctagaaaaataaacactcacctccgcttatcattaaagaagtttggcttctcagcctgaacaatgaccacatcgaacaggtccctccagtctttcccaacgatataactcatccctttgtccctagggcaacaagtcagccaggttagtctaacattaaagagattaactrtgtctgtaactttttctttccaatttccag

SEQ ID NO: 484227 - DNA, 606 bp, Homo sapiens
aagaggggatggtagaaatagagagagagtgtcagatttgagacttagtaggtaaatccaacaggcttggtgcttgattggatgtgggaggtgagagaaagccaaaagcatttcccagtttacractatatcataggtcagtgcacctgggttcatgatgctgttggcattgcaagagagggagcatagtttggtagggtggggtgggagccacagtgagctaatttggggcctgttgagtttgaattttctatctaagtagagacattcagtaggcagtaggacatatgagtctggtgcttaagagcttgaagactgagccagagaaaacatttgggagtccttagtgtacacttgctggctcaactcagtagaatggttgaaagaagcaagaagaatgtaagacaagacaatggccagagatagaacttggaagaatgccagtatttaaggggtgagaagaggaaagggctgtagtaaaagatgaagaatggctccagaggcaggccaagaagcagtcaaatcaatgaagccaagagtggagagtgttgagaactgactgccagattgagtacggaccgctgtgtttagcaacacagagatcac

SEQ ID NO: 484228 - DNA, 606 bp, Homo sapiens
aagaggggatggtagaaatagagagagagtgtcagatttgagacttagtaggtaaatccaacaggcttggtgcttgattggatgtgggaggtgagagaaagccaaaagcatttcccagtttacaactatatcataggtcagtgcacctgggttcatgatgctgttggcattgcaagagagggagcatagtttggtagggtggggtgggagccacagtgagctaatttggggcctgttgagtttgaatkttctatctaagtagagacattcagtaggcagtaggacatatgagtctggtgcttaagagcttgaagactgagccagagaaaacatttgggagtccttagtgtacacttgctggctcaactcagtagaatggttgaaagaagcaagaagaatgtaagacaagacaatggccagagatagaacttggaagaatgccagtatttaaggggtgagaagaggaaagggctgtagtaaaagatgaagaatggctccagaggcaggccaagaagcagtcaaatcaatgaagccaagagtggagagtgttgagaactgactgccagattgagtacggaccgctgtgtttagcaacacagagatcac

SEQ ID NO: 484229 - DNA, 606 bp, Homo sapiens
aagaggggatggtagaaatagagagagagtgtcagatttgagacttagtaggtaaatccaacaggcttggtgcttgattggatgtgggaggtgagagaaagccaaaagcatttcccagtttacaactatatcataggtcagtgcacctgggttcatgatgctgttggcattgcaagagagggagcatagtttggtagggtggggtgggagccacagtgagctaatttggggcctgttgagtttgaattttctatctaagtagagacattcagtaggcagtaggacatatgagtctggtgcttaagagcttgaagactgagccagagaaaacatttgggagtccttagtgtacacttgctggctcaactcagtagaatggttgaaagaagcaagaagaatgtaagacaagacaatggccagagatagaacttggaagaatgccagtatttaaggggtgagaagaggaaagggctgtagtaaaagatgaagaatggctccagaggcaggccaagaagcagtcaaatcaatgaagccaagagtggasagtgttgagaactgactgccagattgagtacggaccgctgtgtttagcaacacagagatcac

SEQ ID NO: 484230 - DNA, 531 bp, Homo sapiens
ttatatgagaaaaaatgttctttaggggctatcaattaaaactttataccacaaaacttattagcaggaatgaacttggcagattagctctctggctctaaggacaggggttcccgatggatatggttaaattggaggagaaattccatggccttctgagggcaccactgagctagggagaagcctggagctttggtattggctggggttacagtgcatgcaggcagcaggaggccatgtagtgcttaggggaggagggaggaggcagaaggaacagggaggaggaactcaagttagccatactgctgcaacccatgaaacttcaggttgctaaagcccacaggtagggcctcgccatgccctgtgaccccagggaggattaaatgacagtcattcacatggataattcaaccagcacatttcagatctaccagaacacagggcttcgagtataaaggagacatcagaaaactgaccacctagtaaggatcgagctatgrcaatgattataaatgatgagtgtgataatgg

SEQ ID NO: 484231 - DNA, 633 bp, Homo sapiens
agtagctaattttaattgtggttatgatccaataggattttgggcatatctttattattagagatggcaattggatcattaattgtatcagtgataaaatgctgtattttattagtactgtattgtattgtactatattgtatcttttcttatcctaacaatgaggatgagttcttcaagagcagagcataattttgtttgtttgtttgtttgtttgtttgttatatccctgaccctacacacagggatcaatacatgcccattaaatgagtgaatagattagtggataccatatattacaccttgaacatgaaacaagatgattaggatggctatgggagtcaagtatgtccaggtacagtgatatgcctcctattttgcaaagtgacaaagtgcatactctgctgataaagatacattgctttttatacattatattgagcrcatttccttcatttcatccactaagagagtgagctataatatcactcaagggtcaaacgaaaacagagtttaaaaatactgactgtaaaatactttatgaaatttgtattatttttaaaacttcaaggacactcaaaggaaaaaaaatgagttaaaatgctaaaagagaaattccgtgtactgtagcag

SEQ ID NO: 484232 - DNA, 237 bp, Homo sapiens
cagggccatcaataaatcttcttcttttcccccaagatattcctagttgcttctttactattcattcttgtaattccattcatctgtgtgyatcatttaggatgctgggcagttgcatcgcatttcacctaaggtcacatcctgatgggatttggtgggatcctagagctggctaggaccacttgtgagagctgattgttaaattctccgaaatgacgtgactcagttgttagactg

SEQ ID NO: 484233 - DNA, 607 bp, Homo sapiens
gtcaccatctgggcagcaccctcagcccaaaagagccacctggcccaagattattccccttcccatccagagctgcatcttgcattcaaggactcatcaatgtgaggggtgtaaaaagacctgatcccctctgtctaaactgggacaaccttaagagccattccaacccatcagatcaagggattgtgagatattgtgacagctcaggctctccttctgctggttcctgattctttcactctctgctactactgttgatccaaattacactccataataaacttcaactgcaaatctctgcctcgtagcctgtttcccaggaaacttgaccttaaaacagtatttataactaaatctgcctaaaacctaaaaagttgaaaataatcatatataggaaaaatgtttctracatacaccttagtaacttgggaataaaagcaatatgctttcatgttttctaagaacttatgggcaagacacagaaagagccaagcaattcacagatatgaacgtacttaatgctcaaaactgcctatgaggctgatactattcactatcaggcctattcgcaggttgcaaactgagattagagtagtaagttaaccta

SEQ ID NO: 484234 - DNA, 607 bp, Homo sapiens
gtcaccatctgggcagcaccctcagcccaaaagagccacctggcccaagattattccccttcccatccagagctgcatcttgcattcaaggactcatcaatgtgaggggtgtaaaaagacctgatcccctctgtctaaactgggacaaccttaagagccattccaacccatcagatcaagggattgtgagatattgtgacagctcaggctctccttctgctggttcctgattctttcactctctgctactactgttgatccaaattacactccataataaacttcaactgcaaatctctgcctcgtagcctgtttcccaggaaacttgaccttaaaacagtatttataactaaatctgcctaaaacctaaaaagttgaaaataatcatatataggaaaaatgtttctgacatacacmttagtaacttgggaataaaagcaatatgctttcatgttttctaagaacttatgggcaagacacagaaagagccaagcaattcacagatatgaacgtacttaatgctcaaaactgcctatgaggctgatactattcactatcaggcctattcgcaggttgcaaactgagattagagtagtaagttaaccta

SEQ ID NO: 484235 - DNA, 561 bp, Homo sapiens
tgcccttataagttacatttttcaaattatacatttttttcaatgttctcagaggtacttctttgtattatatttttggaatacaaaatattttaaatattttaaatwgtatttcatgagtgaataacaaaacggacacatcgtgtaagttgctggctgacaaaaagatctgtaacccttggtgccaccaggcaatccatcaccaattgaattactatgaaccaagaggtcttaattttaaaataccttataaaattaccagcattggtggttttcaactccgcccctaaaattttagaaacaatatttaggtggaaaaagcaaactccaaaagttcaactgaacattcaagtctttttaaagagattctgtctaagcttaaaactagtttcaggcactttcagttttttccattagttttaaaccacatcacatagtaacatacatgtgctgagtatacacacacacgcacaggcacacacacacgcagtcacatactcccacacataaaatactaacaaaagaaaagcagtgtgtcacttagttacatgtagtctatcg

SEQ ID NO: 484236 - DNA, 408 bp, Homo sapiens
ttataaggctgcaaagatacttcttgtccatgcttttccttggaaaagtaaagctcttgtgtagttgctcttaatttttttttagaattgactgagaggccttggagaatctaatgcagatgtagtgggtggctgttccrtgcattatagaatgttcagcagcattcctggcctctactccctactagaagccagtagcattctcttagccgagacaaccaaaagtgtatctaggcattgtcaaatagctctggagggcaaaatcacatctgattaagaaacactgacctaagagaagccagaaaattgcacatatgaagaaaattttgcgtatgatttaagggtgttcctagacctccctaaaaccatccacagggaccccaggttaagaacctttgttattctagg

SEQ ID NO: 484237 - DNA, 576 bp, Homo sapiens
gcctctgaacctccctcacatggtccagaggggctatgattactaatatgcattggtttctcagggcatcttagcagcaggaaacaaagcttgcatatttttgggagcaggaagtaaacagcgtaccttcccctgcagggtaattagaaaagcaaagagtttgtgctgggaaataaggtagggagccagttgttcagaaaatactcaaaacagccacttgacaggggtcccctggaggacccttgaggtgtgtggaactggggcagttcaggtggaaaaattccccttcctccttggaaaaggggtaaccttaagacaaaatgttctaagcagctcttggttccttctgccagagctgctcagagatgagctccctgcccaattargcagcctctatggagattgctttcatcaagccttgttaagagggaaaataacagaatgtgctcactactttcaaatttactttgaagcttgcatttatctgccagagggaaatgttcatctttcctgtgagctggtgggtgagccctggaattaataggtgatgtttccataaatacggctcagttcagc

SEQ ID NO: 484238 - DNA, 559 bp, Homo sapiens
aactctcagatctcatccagagtttgaagactcagggctttgcatgctgcttttcaaccaccattcartcattggaaacaggtgacagagtcagccaactgctgcactaaacacccttgagcatcgcttttttaatgtagacttgtccctcaaattctttattggctctccaatagcaatacatgattggtattatatactaaccattaccttatatgctattaaattatttcttattattcttctatatttcttcttttttaaatttccatttttattttagattcagggggtacatgtgcaggtttgtgacaagggtatattctgtggtgctgaggtttggacttctactgatcctgttacccaggcggtgagcatagtacctaataggaagtttttcagccttcaaccccctcctcctctccctccttttggagtcccaggtgtctattcttcccatctttatgtccatgtgaacccaagatttagcctccacttataagtgagaacatgtgatatttggttttctgtttctgtgttagctcatttgggataacaa

SEQ ID NO: 484239 - DNA, 450 bp, Homo sapiens
ccttggtatgagtggtttcaccttgagcccaggtatcatcccatcataatcgttaagagagtcagaaccatttcttatctatccrttgttttttgttttgtttataagattaaaaacgtgtgttctttatttaattaaactacaagataagaagtgtcgaagttgcgcaagaaagaatatctcattccaaaagaaaattgccagccatgcatatctccaagaggagagaaagagaagaaattaaccctgggccaatttgaacattttaagagtaagtatccagtggtaatatccttctagaaagctattcaagcctagtgtcatttagcattaaataatataatcaacttccatttttctggttaagagtcttcgaactatggcctacaggccaaatctggcttgcagttgagtagctgtcacacagccatatggaccacgaagacgaag

SEQ ID NO: 484240 - DNA, 598 bp, Homo sapiens
ttctaaaaaattaagtttaatcttgccactcctctgttcaaactacccagatggcttcttacaatagctggaatatatatatgtatatgtaatcctgtgctgcaaggcctttcctgatctagtccctgcttatgtctcttgccttrtttctcaccactctttccgttactgccttctggactgcttagttagcctgcatcactgtgtgagccaattctcctaataaatcctgaccccctccctctattctattggttctgtttttctggagaaccatgactaatatgctaagtaagacaaagtagttcaaacaatagggaataattccctccttcttatgtagcaacctgagtgtgtgtgagtgtgagtttgtgtgtgtgtgagtgtgtgtgttataaaggaagaaaggggaagtggtggcacacagaaaggatgggtgaataaagagtagaactctgcttttaatgacaaaagagtttgaggaaatgtctacaatctgaaggacatgctataattatgcatgctgttttattggatacttcactgaaactgagctcaactcatggcttcctttttgtagatgctactgggcaggcca

SEQ ID NO: 484241 - DNA, 437 bp, Homo sapiens
tggggtcaagacaggtgtcaagagaagtcactcatattgcatcaattatragttacatctatcttggcacaatccatcagatgacattgtcttgggacaaaggtttgtccatggtgttgatgggcagttagtgccataacctctttcctttcctcagcgtctttaataaataacccttaactttatggtctaagtgtttcctgccttttgggtgtattaggaagggtagaggttaactgtctcatcctatctttatgtgttgagttaatccagggcatactgagttgttcctaaaataaatagattgtatttaatgattagaggtcttaggattccatttcaataaggcagatttcaaaggagtcccttacttctgttctccttacttcctcctcttagcacaaggtcagtctctttttgctattcctgtaaagttg

SEQ ID NO: 484242 - DNA, 502 bp, Homo sapiens
tgcttcaaaggagtatgggagtttgtggatggagaagagagtggtgagctttgcaggcagtgaagacaggatgtgctggtacaggactctttaattgtcatgacttcttgattttctggggtatcttaaaagagactttggctcaaagatctgggaaattttattaaacttgcgacatctaccagaccaagaagttagacagagctgctaaacctaactttcacaaatattccctgaacccccatatgattattttctcaatctagcctcctcccattactatcacaactctcctaatgaaacragcaggaggagaagtttctgacatttccttctccagaggccttgtcttctttgctagtttatgatttataattgtacatcaaagtgctctgaatatcccaagttacctaaaattaacatatcagttcactgggtttgatactattggagagatggggaaatattctcaagcaattggttgaaatcaaggacataaaaa

SEQ ID NO: 484243 - DNA, 594 bp, Homo sapiens
gttagataattttacctaggattttcatagcttaatgatgactcatataattgtatacttttcagattgtacattaaaaaaatacagtgacagtcagtgatcttgccaaaaggaaactaatggcaaaacttttggaatttagagcaggctggtgcaggggggatgtcttttattagggccccatcatcagggacagtgcctggtgattgtggtagatgaaacagacagagtggcatttcagtacccacaaagttcctttttgggtagggcagagggcttgacaaggggtattagaagttcattgagcaatgaggggccaggatagaaaattggggttgttgagrttatttggctctgcttttattcttagaccagaaagttctgttgacatctggacttgatctcatttagctggggggtgggaaggggggttcttctggaggcaatgactggacctcatttcccagttcactgatggtgactaattccggccatgccagagagaaagaggaacagtattaggcaagtggaacttttagagacaattaagtcagacagtttaagctgcaacttaaatgagttggagagtactta

SEQ ID NO: 484244 - DNA, 260 bp, Homo sapiens
cccatgttgctttttttttttttttctgcagagcttatacatttctcttggatatcttccatgactcttttttttttttttttttttttttkggccagaaattatgtcagttatattacggggggtgatttatgtaaaagatgttaatgacttaaatggaagaaattttaatagagatactaacgcagttgtaattactttagttattgcaaagcaaaatgtagcaagacaacgacttgaagtattaaccagtgcatttt

SEQ ID NO: 484245 - DNA, 260 bp, Homo sapiens
cccatgttgctttttttttttttttctgcagagcttatacatttctcttggatatcttccatgactcttttttttttttttttttttttttgggccagaaattatgtcagttatattayggggggtgatttatgtaaaagatgttaatgacttaaatggaagaaattttaatagagatactaacgcagttgtaattactttagttattgcaaagcaaaatgtagcaagacaacgacttgaagtattaaccagtgcatttt

SEQ ID NO: 484246 - DNA, 663 bp, Homo sapiens
ctttctgcagttgcaagtccacagcaaaaggggcagccctgtcatgggactgggagccatgtggctccctcagttctctgcaattcatcacagcctctcacacctttgtctctagagccagagccttcagaccaagacaatcgaacatccctggatatctgagatagccagcctttcttctggagagcttcccaggtgagcctgcagaacatatctgaaatatttcctggcctgtttatttaaaattttgaaatatgtaaaattcatcagaagttctttcttttctaagatgcctttctcctctccttcagcttacatagaaacacccatgagctgtgaaattttctrcttgtcatgtgttttgatattcgctgatagttttatttgtgtatttccaagttcttcctaaaacgcgaaagcatgaagaggggagacagcggtctcttagaccattgtcttagtttaaatgtcaaattcatggtgttacaagatttcatgctaccacggctaagagaattttataattgtcaacccgttcccctgcccactcattctctgcctgcaaaggcatatctttctttctgtaggagagttctcctttgtcaaatagacttctcccatgacgggtggaatttgcttacattaaaaagatcggctcaagtt

SEQ ID NO: 484247 - DNA, 606 bp, Homo sapiens
ttctgcagttgcaagtccacagcaaaaggggcagccctgtcatgggactgggagccatgtggctccctcagttctctgcaattcatcacagcctctcacacctttgtctctagagccagagccttcagaccaagacaatcgaacatccctggatatctgagatagccagcctttcttctggagagcttcccaggtgagcctgcagaacatatctgaaatatttcctggcctgtttatttaaaattttgaaatatgtaaaattcatcagaagttctttcttttctaagatgcctttctcctctccttcagcttacatagaaacacccatgagctgtgaaattttctacttgtcatgtgttttgatattcgctgatagttttatttgtgtatttccaagttcttcctaaaacgygaaagcatgaagaggggagacagcggtctcttagaccattgtcttagtttaaatgtcaaattcatggtgttacaagatttcatgctaccacggctaagagaattttataattgtcaacccgttcccctgcccactcattctctgcctgcaaaggcatatctttctttctgtaggagagttctcctttgtcaaat

SEQ ID NO: 484248 - DNA, 603 bp, Homo sapiens
acacagagtgggcaactgagtcaacctgctcctttatcatgtgaagttgaaggtggaagggtggccatatttgccaagtgactgaaaggatgagaacaccagtctgaagggagatgatgcaatgactgagtggagaagggcagaatgaaggcagcagtggaggcctggtgggtttacctcctcctcaggccttcctgggttcagcctcaccctccagccagtgtgatatacttgaaaatggcaagcagrgatttgggtgatggcaatcctcaacttcagaattactcttcacctacctgttctaaccataagacttgttgatgaccctgcttctggcgatattgtgtggggtaaatcctttaaagaagaattctgtttatattggttagaaatataatggcctatattaagtccaacagagcttaaaggtaaaaaaaataataatggcttataactgcttatgagaaagagagagaacagagttggctaaaaatttacagtgtgtgggttggggaccgagatagcgtcctgagagaaatgttgcctgtaaaatgaagtaaaaatccagtatggacaggagaaattttcatctgggaataatgt

SEQ ID NO: 484249 - DNA, 532 bp, Homo sapiens
gggagatgattggctgttgaaaaaatcacagcacagtgaattctgccrtctccacccagatctctgatgaaacctgcacctgacaccaattcctttgctgacaaaggtttttatatcttcagctatgcccccgacctctctcctaagaaatgccctaggctttcttgtgggggattgacctcaaagccctcttctacagcctctagtctgttccctttcttctgtttctttgaattgcaccaggctatagctagagtgctgtagcttctgaaagcatgtaatgaagtggctaccgcaaaagggctggcttgattgctactttgatgagagtgtcattcttataaaacatagaactgcaacaagcgtttgaaggcattacatgaccttccattcagcccataggacaacaatataattaacttgcttagtcaccagcttcccctgaaaaagatttagaactctggtctatgggcatatttatggtctgtattccttggaatagagagttgttattttccatgagaattaccaa

SEQ ID NO: 484250 - DNA, 532 bp, Homo sapiens
gggagatgattggctgttgaaaaaatcacagcacagtgaattctgccgtctccacccagatctctgatgaaacctgcacctgacaccaattcctttgctgacaaaggtttttatatcttcagctatgcccccgacctctctcctaagaaatgccctaggctttcttgtgggggattgacctcaaagccctcttctacagcctctagtctkttccctttcttctgtttctttgaattgcaccaggctatagctagagtgctgtagcttctgaaagcatgtaatgaagtggctaccgcaaaagggctggcttgattgctactttgatgagagtgtcattcttataaaacatagaactgcaacaagcgtttgaaggcattacatgaccttccattcagcccataggacaacaatataattaacttgcttagtcaccagcttcccctgaaaaagatttagaactctggtctatgggcatatttatggtctgtattccttggaatagagagttgttattttccatgagaattaccaa

SEQ ID NO: 484251 - DNA, 604 bp, Homo sapiens
gaagagtgaggaggggatagtttgagttctgagcctttcagacatcagagggaggagttttctaggtaggggattgccaggaaaggcaaggatgccagagggcctggagaagagtgaaaatgaggagaaaagtgagagatgaggccaagtgggaacagaggggccaggcatgtggtcctttagaggatgtaatatggactgtagcttttattgagtcagagaggggaacgttgtagggattccagcatagcagtgataaggtctgattttgtagtagaatcattctggcatatgtgttggaaatgagccatttggaatctcttgcagaaatccaggagaaaatgatggtagcttagatgaagttacaaggagggggcaagaagtggtttgattctggatatattcactgaacaattgaatgggatgtgagagaaagggagagtcatggatgacttctacatttttggtctgtgcaattggaagsctggagttactactgaagggtaattaggagttcagttttaaacataagtttgagatgtcggccagatctttaaatgacaaagtatgagtcatttaccaaggagaggtatttgatgggaga

SEQ ID NO: 484252 - DNA, 604 bp, Homo sapiens
gaagagtgaggaggggatagtttgagttctgagcctttcagacatcagagggaggagttttctaggtaggggattgccaggaaaggcaaggatgccagagggcctggagaagagtgaaaatgaggagaaaagtgagagatgaggccaagtgggaacagaggggccaggcatgtggtcctttagaggatgtaatatggactgtagcttttattgagtcagagaggggaacgttgtagggattccagcatagcagtgataaggtctgattttgtagtagaatcattctggcatatgtgttggaaatgagccatttggaatctcttgcagaaatccaggagaaaatgatggtagcttagatgaagttacaaggagggggcaagaagtggtttgattctggatatattcactgaacaattgaatgggatgtgagagaaagggagagtcatggatgacttctacatttttggtctgtgcaattggaagcctggagttactactgaagggtaattaggagttcagttttaaacataagtttgagatgtcggccagatctttaratgacaaagtatgagtcatttaccaaggagaggtatttgatgggaga

SEQ ID NO: 484253 - DNA, 633 bp, Homo sapiens
acactctaaattataattctaaaactcagtttgttgttaaaaaaaaaaatctgtgcatcatatcagagtttgtcttgttgcaatttaaaagggggagaagggactcacaaccagttttaatcaggctaggataacacctgagctcttcttataaacactttttaaaaaatgatttttaccacaatttttaactgtaaagaggtgaatttggaatagaattcctatattttcagcccattgactacaatgaaaagagtaactttcaaggcattgttgtatttggggtgcaattcaggtcatctgagctgccattttatttttccaaggttgattccaccagggattcatctcattgaaggtgggaggctgaataggttgggggagatggattagtggcaccgcctgtgtagcctgcctgtccgtgaaagttatttgaaggtttcccatgcaagcaatttagaaaaatgcagccatttttaccttatctagtttgacaatagtcaaatcatccaggaaaagttttttttacaaaaagggggraaaaaaaaaaggtctgccaagattttgaaagggcagttttaattttctcattttttatgatggacattttctgtcagtagtaaacaaaactta

SEQ ID NO: 484254 - DNA, 668 bp, Homo sapiens
ttcaaaatatgtcagctcaaaccacacaatagacatagatattaattagcaggctaattatccagacttctttagactaatcaagtaatgaaacagcttcagtctgttggatttttcttgaacaactaacagtcaaacatgaacttgttatgactagtaaactgcacaaacacaatttgagactgagaacaagattgtgcgttccctggattcaggccttttctcacaaaaccagatccacagccaactctgcctccaaagatactctgaagaaaggttttctgtctccttatagcagaaaatcgatactgcacactggaggggaagatggagagttaaaaygtcctcttcacacgagtgagtaaacaccacctccgtgcttgggatggcgcagcacagaactgcaggctgtaagacaggctccaaataaaacccttccccagcacagaacactcagccccagagctggcatagcggagcccttcacctcatataatttcacttctgcgcaactgcagatctgtgtgcgcctgcaaaattacataatttgccatttacccagctgttattccagcaaacctattgtttgcacaccgatttgcctgcctgcctcataaatccacaggaagggaggagacagagagggaaagttttcagcatcacactgt

SEQ ID NO: 484255 - DNA, 527 bp, Homo sapiens
gttcttaacagatgtattactgactccatcaaatacatcagttatgccaggaggatctgaaaactagaaatggaaattttcatatctcaatcagatgaaagtcattttatttattgtaggcaattgctaccctaagtttagcttatcagaatcagtatcttttttatattcttgcttaggtctacccmcctttggcaagtgcatttccaaaggatctggtacctttataactaaaatattaaagaacttaatagaagagacaaattaaagagcaatcattaactcttttttgagacagagtctcgctctgttgctcaggctggagtacagtggcatgatctcagctcactgtaacctctgactcctgggttctagtgattctcctgcctcaacctccctagtggctgggattacaggcacctgccaccatgcctggctaatttttgtatttttagtaaagacgggattttaccatgttggtcaggctggtctcaaactcctgacctcaggtgatccgcctgcttcag

SEQ ID NO: 484256 - DNA, 601 bp, Homo sapiens
ccccagatcattatattttagcaatttgattaattttattttgataattctaaaatactaagaatagtaattatcaacttccaaataatgtatcagtgtagaagcatataaatatacatttgtaaaaccacatagttatgtacatatatatgtgatgscatgagaagtactttcaacattcgcagtcatttctgttgagcattgtacacttgctaaaggttaaggaagaaaagtaaagtttagaattggtattcttgtattcaattagaaaagcaattgctactgaaggaatttgtacattgtcctcaaaatttgatctgagctgtatctttttaatgcattgaaaggcttttcatctttttttaaaggaaagtgcataatttattatatttatgaggttataataaaatggatacttaggaactttaaacatgagttaaaagtaatcatcagatataaaattctcaaatcttggaacccaaaatactaaattttagaattttcttaaaacctctttctcatgattaacttagtttgaaaattattatgttctttcataagaaaagaaggaaaatttaaaaatagacatgttgatggaggc

SEQ ID NO: 484257 - DNA, 601 bp, Homo sapiens
ccccagatcattatattttagcaatttgattaattttattttgataattctaaaatactaagaatagtaattatcaacttccaaataatgtatcagtgtagaagcatataaatatacatttgtaaaaccacatagttatgtacatatatatgtgatgccatgagaagtactttcaacattygcagtcatttctgttgagcattgtacacttgctaaaggttaaggaagaaaagtaaagtttagaattggtattcttgtattcaattagaaaagcaattgctactgaaggaatttgtacattgtcctcaaaatttgatctgagctgtatctttttaatgcattgaaaggcttttcatctttttttaaaggaaagtgcataatttattatatttatgaggttataataaaatggatacttaggaactttaaacatgagttaaaagtaatcatcagatataaaattctcaaatcttggaacccaaaatactaaattttagaattttcttaaaacctctttctcatgattaacttagtttgaaaattattatgttctttcataagaaaagaaggaaaatttaaaaatagacatgttgatggaggc

SEQ ID NO: 484258 - DNA, 533 bp, Homo sapiens
aattaaaccagctatgacaacaggtgctgtatggggggaatgctgccttttatcatgaggttgtgggtgcatgtgctaaatgtgctcatcattttctctttyctattattcactgaataccctggggagattattctatgccagcatttataagatataatgaaaccacattaaatatgtatctgattgctaccaactgtgtagaaagcgtatgctaactatggttaggtacagcgagttaaactctgagaccagagatgttcaacttcactgtggcttctttgtgcttgacccatgggtctttactgtttcattgacctttaattcaagcatcaggtatctttttatttgtttgttaaataaaaatgttcagagggttgtaacaagataaatacttctctcagacctaagtgtttccataaagggaactctttaacatatggcatatgaaacagcatgatggaaaatgattttaatcttatcagttttagttacatatttctttgaaatatttgtgttatttcacaacacat

SEQ ID NO: 484259 - DNA, 642 bp, Homo sapiens
gtttacacaacacctaatgggactgtcatttctcagggtccccagccaaaggcagggtggcgacatggtgtacccatcactaaggtgccatgtctggcatttaaatggggctcagtaattccagcggagccgagttattagagatctaattgccattgtctaataaattcttttgaggtctttgtgtattggttcacttaagtattcaatgtatgaaggctagaagcagttattaaaaatgtaattgttttgtaaatttttatttttcaattccaaaacactctcatgaattaataaacagcattcagataaaataagaatattcatcaataatgcaagattttctgtgtcattgtggggtggggatatcaccttactgcattgttgatcagaaactctggggaaataacatttcttctgtaatacacttccatgttggatattctagaccatgtttagctggataatttttattttgaacaaaatgtttttatttttaygttctttccaatagagattgtttgaactcatcaccatcctaagtttatttcaagttattactttctggattgactttccaaagctagctatgaatacacagtggactttaaaatagcaaggctatttttgtttaaagtgagc

SEQ ID NO: 484260 - DNA, 546 bp, Homo sapiens
attgcaatctagttgcctgcattcttaagacttttcctgtgacttacatgaaacctctgtaaaccctcctgccttcttctggtacataattcagagtgagagtgagcatctatagaaggagatctcagcagaagagtgacatgatctttgacctgcttgtgacatactgtataaagattttgggaaatgctgtctaggataatcgatcatcargcaatttggtataaccttgatgaccctgctcttccaaagcaagtgtaaacctggtacagctactgttttgaaaaatttgtatttactgtgtaaagacttataccctaaagagcaataaaaatgcaaaatataagtttgtcatataaatgaaggggcatatatatgaaaatgttgctttgggcaaaatttgcataataactgttgaagtgtacagacattgagaacaacttttctaagctaatcaaccagatattgcaacttgcaagtgagggcatatgctgtatatttctcttggttgtcaatatgctcatatatatctctgaatatacttgc

SEQ ID NO: 484261 - DNA, 515 bp, Homo sapiens
gccaatccaagtgaaaagtgcttggaagtgttctgtttaaggttgggtgaagcctctgttcatatccttgaatatttaatttggcttttctgttactaaggaaacatggcatgatgagtgaatatgcacattacttccatttgggtggtgactaagaaaaccatcctcccttagatacagggccttactgtagtcattmtccatgtactgaccacaaacaaacttgccatcttgcctccttttcaagaattaggttcaactgtagaatgaatgaatagaaagcattaaacatagcttgtgaaaggaattggggaaaccttctcaactaagagaacatcatttctggcaaactatttttgttagctcacaatatatgtcgtacactctacaatgtaaatggctttttactagaagctacaaaagaaatgggtccaaacactcctgagagacctatagacaattctcataagcaatggggagtattaagaacaacaggaactcttctgtaaaggacg

SEQ ID NO: 484262 - DNA, 515 bp, Homo sapiens
gccaatccaagtgaaaagtgcttggaagtgttctgtttaaggttgggtgaagcctctgttcatatccttgaatatttaatttggcttttctgttactaaggaaacatggcatgatgagtgaatatgcacattacttccatttgggtggtgactaagaaaaccatcctcccttagatacagggccttactgtagtcattctccatgtactgaccacaaacaaacttgccatcttgcctccttttcaagaattaggttcaactrtagaatgaatgaatagaaagcattaaacatagcttgtgaaaggaattggggaaaccttctcaactaagagaacatcatttctggcaaactatttttgttagctcacaatatatgtcgtacactctacaatgtaaatggctttttactagaagctacaaaagaaatgggtccaaacactcctgagagacctatagacaattctcataagcaatggggagtattaagaacaacaggaactcttctgtaaaggacg

SEQ ID NO: 484263 - DNA, 605 bp, Homo sapiens
aagggtgggaaatgaccatgtttcttgaaaaagttagtttaaggaccatggaggtaaagaggtacctttacatgcaaaaaatgcagcatttgcatgacagcaattgctaacgttccatacacattctcttgctttctgaaccaaagctttacaagcttatataagcagtttccatcccaaatggtaacaaagaatgggtgccctgtatattctggcatctgtaccctgaggacagttaagtggccaattagcattcctttctgtctaagggtacagacctcctattgtacctaaaaaraaaaaggttctggttcattggggcaattcacctaagacagcaaagaacccctatgggcaggaaaacaggaattccacacaagcaagaaaggaggacttcagagaagccaggcccacacttaacaatgtcagggtggcaacagccctcctcgattaagccggcctcatcaactaagtggcccttgtctgaaagctgcatccctaaaacagctacaatcaggaacaagcaaagggttccaggtgaggcgtcctcccgctgggtcctagatacttacaactctccccggtatcagcccacccagtcccag

SEQ ID NO: 484264 - DNA, 605 bp, Homo sapiens
aagggtgggaaatgaccatgtttcttgaaaaagttagtttaaggaccatggaggtaaagaggtacctttacatgcaaaaaatgcagcatttgcatgacagcaattgctaacgttccatacacattctcttgctttctgaaccaaagctttacaagcttatataagcagtttccatcccaaatggtaacaaagaatgggtgccctgtatattctggcatctgtaccctgaggacagttaagtggccaattagcattcctttctgtctaagggtacagacctcctattgtacctaaaaaaaaaaaggttctggttcattggggcaattcacctaagacagcaaagaacccctatgggcaggaaaacaggaattccacacaagcaagaaaggaggacttcagagaagccaggcccacacttaacaatgtcagggtggcaacagccctcctcgattaagccggcctcatcaactaagtggcccttgtctgaaagctgcatccctaaaacagctacaatcaggaacaagcaaaggsttccaggtgaggcgtcctcccgctgggtcctagatacttacaactctccccggtatcagcccacccagtcccag

SEQ ID NO: 484265 - DNA, 596 bp, Homo sapiens
ttcctgacatcctaagagtccacatccccacccagagaaagagaagcccggagaaactctgacagatctctggccagcaaccctgtggacgggtggggagacgagttcaagaaagagaaaagacatgtcccggcacggggctcctacctccccatccaccatgctttccggtgtaccagagctgcgcctttccacgtttgcctagggtgcaggcaagacatgtttgtgaagttgggaggtcacagggacgggagggagggattctgatgataaggacaatacagcccttcctagaagtccgaattctagtacctcctattttctctgtcgctaacagaagagccctggcaacacccagacagragaaatccaaagggaggacagtactttgcaagcttgtttcaaactcttcaagaaagcaccaagacattttgacctgccattctgaccctatgggccttctggccagattaccagagaaaattcggcttgagagaaatgatgcaccccaaacaaagctggtgatcaacaaaggtaaaattacccaccaaaaacatttgttgaaaataataagcaaactgaaaaagcacactcct

SEQ ID NO: 484266 - DNA, 467 bp, Homo sapiens
ctcgtcctggaatattcaagagtgtgcctgtgtgggtggtgactatcttctcctcaccaggaggtcgtagggagacacactgccccccactccacaattcagtgaggccccaccattcacaccatgttacaccaaagggatgcttgaaccagacctgccagactctactgtcggagctctcccagctaaccacagagctgaggaagagacatactcatccgacaaacatttaccaagggcctactgtgtgccaaccaccgtccagggccctggaacatggtgtggacaagacaggaaagggctctgtccttggggagctggcatttatggggtgaagatgggccttaaaygcagaatagaaaatcaaaaccatctcagtgggtggtacaggtttaatgtctgagggggaagttggagcagggtcagcccctgggccacctgaacatgaagatctgtaacaatcactg

SEQ ID NO: 484267 - DNA, 427 bp, Homo sapiens
tgatgcttacaagacatgaggaattgatgtctgcttttccccataatcagcatgctgaatccagagacagaagtccttagtccttatcccactttccagccctgtgactktgaacaagagcggctacttcttctcatgtcagtgtattcccaggaatgcagaagtcacagccactttctctaaggctgacacatgaatcaacagggcggcaaccacagaaaggagaattatcatgggtactcacagagttgatcctcgctcaggacatacgctctgtccacagtttggggcaaaagtccacatttgtgaagcatttcagaacactgtcccatctccatgggctgcctgaccctcctccacactggccccctcaggaacggagtccaccctcccatccatgtatgccctcccaccgtccccaaatccc

SEQ ID NO: 484268 - DNA, 346 bp, Homo sapiens
atctggggtgagaggttatgatgcttggctgtcaaggcagtttcagtttatgagaaagaataaaaccaactttgcattctgagaagagtgctggtttccggaaggatcatcttgatttgaggtggcagctgtcacttccctcagggcatagaaaatatgatttaaccactggacaactttgcttcacaaagaatgtcatgattggttaagtgcactactactgatattaaaagtgtacttaattaccctactrctgaaggagacacaaaaaatccataacagtatcaacatgcctagtttagaatgcatttgtcttttttggctgaggtggataggtgaggacata

SEQ ID NO: 484269 - DNA, 533 bp, Homo sapiens
aggagttatgagaaggaacgtccactattttcacctttccctatagatgactccatattaaacatagtccttcctgtcttctttctctgacttgaaaagtcacttttctttttcttttcttttttttttttttttgagcagtctcactctgttgcccaggctggagtgcagtggcgcgatctcagctcactgcagcctctgccttctgaattaaagtgattcttgtgcctcagcctcccaagtagctgggattacagtcatgcaccaccacgcctagctaacttttgtattttttgtagagatgaggtttcaccatgttggccagactggtctcaaactcctggcctckactgatctgcccaacttggcctccgaaagtgctgggattacaggcatgagccaccgcacctggccaaaagtcacttttcaatactacataatttaggaattagagaaagcaaggtcaggcaaggggctaatgtggctttcaaaatgctgaatttattcccatggattaaacacagactcttaca

SEQ ID NO: 484270 - DNA, 685 bp, Homo sapiens
gcccccctccccgcccccaggctgcaaatgtgtagtgctctcccagctctggcccccagcatcagtacatagtgggaactcagccaatgttgactgagcgcatggatacagaggagacgcctggccagcctggaatcccatcgctccatccctcgaaccctcagagtacttcatctgcacctccttcttgttttagaatcatttttggtcctgccttattgatcccaacaaggccgtagcccctcgatggctatgtctgtggtccctcttccaatcccccacctgaamggcaggcagacaagaagtatctgggaatgagggagtgaggaagaggcatacaagcaggcagggcttccccccgggagccacagccacagacttttacgtctccaacgtaaaagtcagcaaatgccttgtctgagccttgttcctccaagtgaggaaggtggggacaggtggtctaaacggcccagcaaggcagtgtcatgccacaatgggagtgcacgctctggagtgagagggcctgagttcaaagccaccttctccattcactagctgtgaatctgggacacatgagttcaccaatgtgttccccggtttcctaatctgtaaaatgaaaaatcacaacgcttctgccttataaagttataaagatcaggttaacatgcaggaagcactccgaata

SEQ ID NO: 484271 - DNA, 604 bp, Homo sapiens
cgccaatctctctagcactggttccaggtatctgaatgctttggttgacagtgcggtggcccttgaaacaaaggatacctcgctagctaggtaattcttatgacagttttaatttcygcaatcatatctgctataaggtcttaaagactttttgttctcagcataattctatatgaaaaattggcaataaatacaaagcactgaatttagttacttcatgtctttgccagtgagtataattaatttggataaatatggtattggttaatttttagtgttttcttcttccaggattagatttatgaagggtggttctcatgtatatttggaaaggggttagtatcacattgttccctgtgtataataagaaagatagtaggctaaatgatttggttgagcataataaattttggttatgtctacctttttgttaagtaggtcaggaattttcattctttttaacaggcattttacttatataataacatgattcttccaacaacctttagaggaatcaggaggtgtgggttaaataatttatccgagctactaaatggcagagctgagattcaaaaccagtcttataaagttcatatgactacca

SEQ ID NO: 484272 - DNA, 604 bp, Homo sapiens
cgccaatctctctagcactggttccaggtatctgaatgctttggttgacagtgcggtggcccttgaaacaaaggatacctcgctagctaggtaattcttatgacagttttaatttccgcaatcatatctgctataaggtcttaaagactttttgttctcagcataattctatatgaaaaattggcaataaatacaaagcactgaatttagttacttcatgtctttgccagtgagtataattaatttggataaatrtggtattggttaatttttagtgttttcttcttccaggattagatttatgaagggtggttctcatgtatatttggaaaggggttagtatcacattgttccctgtgtataataagaaagatagtaggctaaatgatttggttgagcataataaattttggttatgtctacctttttgttaagtaggtcaggaattttcattctttttaacaggcattttacttatataataacatgattcttccaacaacctttagaggaatcaggaggtgtgggttaaataatttatccgagctactaaatggcagagctgagattcaaaaccagtcttataaagttcatatgactacca

SEQ ID NO: 484273 - DNA, 601 bp, Homo sapiens
tgtgtttatgtttaacaggtaataccagtgtggtggtggtagtgataataagtgttttagtcattactgctgtataacaagctacttgaaaactggaataaaacaatcacatctgctggggtgagaaattttgacagagtacagtggacatggcttatctttgctccttactatctggggcctcaagttagcaatatttaaagaatcatccagtccatagctgaggagtagaatcacctggagatgtcttcacycatgtctgaatgctggtcaagatctcagcctctggctaaaacgcttatacatgacctctctgagtagctcctctgtgatggctagtttgagtttattttgacgttacggctggtttttaagggtaaatgtctcaacaaagtatatggcatttttatgacctaaccttggaagtcacaaaggatttcttccaccatggaatatcaatcaaggcagtcatagtagtccacccagagtcaaagaattacttccaccatacatatcaatcaaggcagtcatagtagtctacccagagtcaagggaaggggacatagactccccacaatgggtggagtgttaggattacatc

SEQ ID NO: 484274 - DNA, 601 bp, Homo sapiens
tgtgtttatgtttaacaggtaataccagtgtggtggtggtagtgataataagtgttttagtcattactgctgtataacaagctacttgaaaactggaataaaacaatcacatctgctggggtgagaaattttgacagagtacagtggacatggcttatctttgctccttactatctggggcctcaagttagcaatatttaaagaatcatccagtccatagctgaggagtagaatcacctggagatgtcttcactcatgtctgaatgctggtcaagatctcagcctctggctaaaacgcttatacatgacctctctgagtagctcctctgtgatggctagtttgagtttattttgacgttacggctggtttttaagggtaaatgtctcaacaaagtatatggcatttttatgacctaaccttggaagtcacaaaggatttcttccaccatggaatatcaatcaaggmagtcatagtagtccacccagagtcaaagaattacttccaccatacatatcaatcaaggcagtcatagtagtctacccagagtcaagggaaggggacatagactccccacaatgggtggagtgttaggattacatc

SEQ ID NO: 484275 - DNA, 635 bp, Homo sapiens
gaactttgaagcgtagcactcttgacattgattatcyccttttgaactcttatctactaaaacatcagttattttaataattttaattatgatatcaatcaactttccagttatgaaccattatgtctttcttatttgtgtaatgtgggattatggaaacaagacacacagcttgtcagaacgtgaaacgtaaaagaaagcacaaacctcatttaatcttttacacaactttcagtatttctgtccacattaccgattttatgacagtcttgtatctggtgggacaattagaatgatcatcatcattattactaagccattgtgattatgaatagtaacaccatcacctcctggtatttgcatgacaatgactttattccaaagttactgtgttttacctaggaaatgaagtaaaattctaattgatgattcacccatcttgttctaaaatttcccatattcattatcttcatccagtaattcttttcctgtggacacttcaaaatgtgctcaccatataatgcctacttttgaacctgtggtttctcctgtaggctccccgtcccccaagcttagaatctcttacctgctggaacattctcgggggataagccaggatttgctaggcttctcag

SEQ ID NO: 484276 - DNA, 635 bp, Homo sapiens
ttatgcggagtaaaagaatccagattcaaaagttacatattgcataattccattcatatgacatttctagaaaaggctataccggaaagacaaaaacaaattagagtttgccacagtgtgatgatggcaaagagggcctttatgacaacgaaatttttggggagatgaaatttttctgtatcttgtggtgttggttttaagactatatgtgcttgtcaaaagtcatagaactattcactaaaaaggtaaattttatttaatgtaagttatacrtcaataaaatttacattcaaaatagtaaaacaaatgaaattataattattgcaaataaacagtactcatcaaaggccagccattgccatcactactttacatgcattatcttgtttaatacttcacagcagccctttggggaggaattaacctcattttacagaaatagaaactgaggctcacagatgtgaaataatttgactagtctcatatgtctgtaaatgatagagccagcatttccttccaggtctctctgacacaaaaggctctcccctttatcatttagaattactatgtgaatggtgcttgacataaatctagctctaaaaaataatagtttttttttttttccccatcaccag

SEQ ID NO: 484277 - DNA, 635 bp, Homo sapiens
ttatgcggagtaaaagaatccagattcaaaagttacatattgcataattccattcatatgacatttctagaaaaggctataccggaaagacaaaaacaaattagagtttgccacagtgtgatgatggcaaagagggcctttatgacaacgaaatttttggggagatgaaatttttctgtatcttgtggtgttggttttaagactatatgtgcttgtcaaaagtcatagaactattcactaaaaaggtaaattttatttaatgtaagttatacgtcaataaaatttacattcaaaatagtaaaacaaatgaaattataattattgcaaataaacagtactcatcaaaggccagccattgccatcactactttacatgcattatcttgtttaatacttcacagcagccctttggggaggaattaacctcattttacagaaataraaactgaggctcacagatgtgaaataatttgactagtctcatatgtctgtaaatgatagagccagcatttccttccaggtctctctgacacaaaaggctctcccctttatcatttagaattactatgtgaatggtgcttgacataaatctagctctaaaaaataatagtttttttttttttccccatcaccag

SEQ ID NO: 484278 - DNA, 635 bp, Homo sapiens
ttatgcggagtaaaagaatccagattcaaaagttacatattgcataattccattcatatgacatttctagaaaaggctataccggaaagacaaaaacaaattagagtttgccacagtgtgatgatggcaaagagggcctttatgacaacgaaatttttggggagatgaaatttttctgtatcttgtggtgttggttttaagactatatgtgcttgtcaaaagtcatagaactattcactaaaaaggtaaattttatttaatgtaagttatacgtcaataaaatttacattcaaaatagtaaaacaaatgaaattataattattgcaaataaacagtactcatcaaaggccagccattgccatcactactttacatgcattatcttgtttaatacttcacagcagccctttggggaggaattaacctcattttacagaaatagaaactgaggctcacagatgtgaaataatttgaytagtctcatatgtctgtaaatgatagagccagcatttccttccaggtctctctgacacaaaaggctctcccctttatcatttagaattactatgtgaatggtgcttgacataaatctagctctaaaaaataatagtttttttttttttccccatcaccag

SEQ ID NO: 484279 - DNA, 235 bp, Homo sapiens
gtgttctgcttgtgctgcattcatatctgaaaaaaaacccaggagatactcagtgatgaaattattataacttaaaatactattcttacatgatatgacctttttctggctgagaggaactgcataagtcagaaatttttaattcaaaggcaaaagaataaaatcctacataaaggagaagcctggatgtaaattgaactcwtctgactgtatgtggactccaggaaaatcctgg

SEQ ID NO: 484280 - DNA, 616 bp, Homo sapiens
cgtgttctgctatgtagtttttcaaaataacacaattgaaacttctgagcaatatctgcaactgatatgagtcttccccctccaccatgacagaaagaaaatttattacaacaggaatatctttttgtttaggcatgccttatgtcattcggttacattacaggtaaaatttgtgaacccattttatagccaagtttgcctgcttaacgtggttgaaataatataattgtcaamataatataacttggtgcatgcaatgacaagctgctgggttttccccacgtcatgggttctggtaggttccaggcctcacaataagttaatggggtttgattcctggttctgtcactttgggaaactgtcagttggtgaactttgaacatatttcttacccttcctgaatcttagtctttttgttgacaaaacggtggtcagccctatacttcaagactgctttaaaggtaatgtttatgaaaaattctagccaaaagcctagtccatggagacatacaatacatgagagtccctgtctcctttgttccttttccctccagtcttgtgattccacctttgcccaaacatacatacgtcagtctgactacttggttcttgatat

SEQ ID NO: 484281 - DNA, 620 bp, Homo sapiens
gctgatgttggggaaatcccttgtgttacttctggaactcagaagtgaaaggaggaattcccagtttcattgctaaagttacaataattattggagatgctgtttggtttagcatatttataactactaggagaaactagtttggcagtagtcatttaagtttagtgacttgtaggtctgcaatgatcctgcctactgaacctgcataactcaggttagaatagtggagaaaagactggactggatactagggctcytagattctgttcctccactatctaaaatccactgtataaccttgcaggaattctcttggccttgatttcacatcagtcaaaagaggaggttgatgtagataatctcttaggtctctcacagctctaatagctacgattctagctttcaagtttatttttcattttcatgattgcatgaagagattccttgcatacctcctttgtccatcaaataaatacattaacaaagaaataagtttattcagtgaaaagaataaattactattaaaatgtttttgtttttcatattgttgttgaatcatatagatttcactgagagatggtcagctattggcaacaactttggtctaatattgttctagc

SEQ ID NO: 484282 - DNA, 620 bp, Homo sapiens
gctgatgttggggaaatcccttgtgttacttctggaactcagaagtgaaaggaggaattcccagtttcattgctaaagttacaataattattggagatgctgtttggtttagcatatttataactactaggagaaactagtttggcagtagtcatttaagtttagtgacttgtaggtctgcaatgatcctgcctactgaacctgcataactcaggttagaatagtggagaaaagactggactggatactagggctcttagattctgttcctccactatctaaaatycactgtataaccttgcaggaattctcttggccttgatttcacatcagtcaaaagaggaggttgatgtagataatctcttaggtctctcacagctctaatagctacgattctagctttcaagtttatttttcattttcatgattgcatgaagagattccttgcatacctcctttgtccatcaaataaatacattaacaaagaaataagtttattcagtgaaaagaataaattactattaaaatgtttttgtttttcatattgttgttgaatcatatagatttcactgagagatggtcagctattggcaacaactttggtctaatattgttctagc

SEQ ID NO: 484283 - DNA, 620 bp, Homo sapiens
gctgatgttggggaaatcccttgtgttacttctggaactcagaagtgaaaggaggaattcccagtttcattgctaaagttacaataattattggagatgctgtttggtttagcatatttataactactaggagaaactagtttggcagtagtcatttaagtttagtgacttgtaggtctgcaatgatcctgcctactgaacctgcataactcaggttagaatagtggagaaaagactggactggatactagggctcttagattctgttcctccactatctaaaatccactgtataaccttgcaggaattctcttggccttgatttcacatcagtcaaaagaggaggttgatgtagataatctcttaggtctctcacagctctaatagctacgattctagctttcaagtttatttttcattttcatgattgcatgaagagattccttgcatacctcctttgtccatcaaataaatacattaacaaagaaataagtttattcagtgaaaagartaaattactattaaaatgtttttgtttttcatattgttgttgaatcatatagatttcactgagagatggtcagctattggcaacaactttggtctaatattgttctagc

SEQ ID NO: 484284 - DNA, 591 bp, Homo sapiens
cagtgatagaaggtagcaatgttattcagaggaacamactacgtcattttctgacttagagaaaaaggcgactcacaggagactcagagaagagggagttcttcaaaagttagaaacatgagtgaaaaacagagttactaaaacaaacagataagcttatgatgggtgcagtaggagctccatgaagttgttaattacttcttaagaaagctactcgcatctcccgggtgtaaagtttcctctcttaaacgcatcataacattaatcaacaatgtgttttctatgactctccatgagagcaaaacaaatcagtgtggttaatctgcacttctgttgtggggtctcccaaccctccgtctggtgtgaaaacacatagagacacatgcactggttctctgctggctacattgtttctcctcttcacagttcaagatcctagctcttcgtggaagcattggagtgacaccatacttacaaatatttctaagcttcggttcttgaggccaatgaatagattaacaaaaaatatgcattacctcttcaactctgaagctatggtcctattgtaaaaaagaaatacgtgaaaacaca

SEQ ID NO: 484285 - DNA, 634 bp, Homo sapiens
tgtccacaaccaagagattgagagctccagtgatagaaggtagcaatgttattcagaggaacacactacgtcattttctgacttagagaaaaaggcgactcacaggagactcagagaagagggagttcttcaaaagttagaaacatgagtgaaaaacagagttactaaaacaaacagataagcttatgatgggtgcagtaggagctccatgaagttgttaattacttcttaagaaagctactcgcatctcccgggtgtaaagtttcctctcttaaacgcatcataacattaatcaacaatgtgttttctatgactctccatgagagcaaaacaaatcagtgtggttaatcygcacttctgttgtggggtctcccaaccctccgtctggtgtgaaaacacatagagacacatgcactggttctctgctggctacattgtttctcctcttcacagttcaagatcctagctcttcgtggaagcattggagtgacaccatacttacaaatatttctaagcttcggttcttgaggccaatgaatagattaacaaaaaatatgcattacctcttcaactctgaagctatggtcctattgtaaaaaagaaatacgtgaaaacacatacagctttctgagta

SEQ ID NO: 484286 - DNA, 676 bp, Homo sapiens
tgtccacaaccaagagattgagagctccagtgatagaaggtagcaatgttattcagaggaacacactacgtcattttctgacttagagaaaaaggcgactcacaggagactcagagaagagggagttcttcaaaagttagaaacatgagtgaaaaacagagttactaaaacaaacagataagcttatgatgggtgcagtaggagctccatgaagttgttaattacttcttaagaaagctactcgcatctcccgggtgtaaagtttcctctcttaaacgcatcataacattaatcaacaatgtgttttctatgactctccatgagagcaaaacaaatcagtgtggttaatctgcacttctgttgyggggtctcccaaccctccgtctggtgtgaaaacacatagagacacatgcactggttctctgctggctacattgtttctcctcttcacagttcaagatcctagctcttcgtggaagcattggagtgacaccatacttacaaatatttctaagcttcggttcttgaggccaatgaatagattaacaaaaaatatgcattacctcttcaactctgaagctatggtcctattgtaaaaaagaaatacgtgaaaacacatacagctttctgagtagcctgttttagtttttcagtttgaaattttttggaagacagt

SEQ ID NO: 484287 - DNA, 538 bp, Homo sapiens
gcgggtgatgaaatgttctggcattagatagtagtgaagactgcacaattttgcaaatttacttagtgtcactgaattgtacaccctaaaagtgtacattttacagtatgtgaattatatcttaattggaaaagaatacgctaacattcagcttctgttggaatttgtccatttctaggcgccaagcactcaagagagaaagcaaaataaaaattgaggaaagaaagcatggtccattcacttgggaaaagtgctgccttttcccacacacacacacacacaraatccagtttaagccgatcctacaacctcaccctacgttaatggaaccaaaaacaactttaatgacatctattgtttgatgtttataaaccaatctctcttaaacataataaagtgtataaaagagcattctcttttctcctttctaggacagatgattttacagaataataataacatgtttcacttcaaacattctgatcagtctgtgcaggaatttccacccgggaaaagcaggcttcatttttaaccatca

SEQ ID NO: 484288 - DNA, 578 bp, Homo sapiens
gtgggtaaagcttccctctggtggacactaagatgatacatacctgggcccctgcaccgagctggccccagggaccaagtgtgggctgtaggaactcagggagggaatgggggaggcttgggggggtgtgcccacaatcatggagcttcctcacttcctctggtcctgttcaagcataatccagatgtsccgccccatctcgagatggacagtgggggcctgtcctggtgggctcatgatgggcagggtgaggacagggtcccttagtgccccgggctcacctacatgccagggctgactttggaagacagataattctctgctgcaggtgcacagccttcttccagtgcctgggtacctgcctttcctcacccaggcttgccacaaactccataccagagtcccccatgctgcaggtgcatggccttgttccaatgcctgggtacctgcatttcctcacccaggcttgccacaaactccataccagagtcctccccgatactgcagcaccataagtgggaatgtcgacccgcagcctgacctgctgccaagcccttcctgccaggcccacacagtct

SEQ ID NO: 484289 - DNA, 578 bp, Homo sapiens
gtgggtaaagcttccctctggtggacactaagatgatacatacctgggcccctgcaccgagctggccccagggaccaagtgtgggctgtaggaactcagggagggaatgggggaggcttgggggggtgtgcccacaatcatggagcttcctcacttcctctggtcctgttcaagcataatccagatgtgccrccccatctcgagatggacagtgggggcctgtcctggtgggctcatgatgggcagggtgaggacagggtcccttagtgccccgggctcacctacatgccagggctgactttggaagacagataattctctgctgcaggtgcacagccttcttccagtgcctgggtacctgcctttcctcacccaggcttgccacaaactccataccagagtcccccatgctgcaggtgcatggccttgttccaatgcctgggtacctgcatttcctcacccaggcttgccacaaactccataccagagtcctccccgatactgcagcaccataagtgggaatgtcgacccgcagcctgacctgctgccaagcccttcctgccaggcccacacagtct

SEQ ID NO: 484290 - DNA, 596 bp, Homo sapiens
gtgattcctgcacagtgggtaaagcttccctctggtggacactaagatgatacatacctgggcccctgcaccgagctggccccagggaccaagtgtgggctgtaggaactcagggagggaatgggggaggcttgggggggtgtgcccacaatcatggagcttcctcacttcctctggtcctgttcaagcataatccagatgtgccgccccatctcgagatggacagtgggggcctgtcctggtgggctcatgatgggcagggtgaggacagggtcccttagtgccccgggctcacctacatgccagggctgactttggaagacagataattctctgctgcaggtgcacagccttcttccagtgcctgggtacctgcctttcctcacccaggcttgccacaaactccataccagagtcccccatgctgcaggtgcatggccttgttccaatgcctgggtacctgcatttcctcacccaggcttgccacaaactccataccagagtcctccccgatactgcagcaccataagtgggaatgtcgaccygcagcctgacctgctgccaagcccttcctgccaggcccacacagtctgcag

SEQ ID NO: 484291 - DNA, 550 bp, Homo sapiens
gaaaggttagcgcacatctggtgcgtctacctcaatataaatgccaatgttccatcaaagcttttcacagatcaatgaaataatgatcacaggtgccaagacacagggattcactaagatggacagccacayagaattatgacaaggttggtggttgtttttgttttgcttttcgtgttttgtctctattattcatggagatttgtccctagaaacaccagagagagcctacagtgccaacagcacagctctctggcagggccccaagagccgcgggagggcagggcaggttcctggcatgcctgagatgacttagcacactgtgaaccagggcttgtgaacagggaagtgttactcaagattgagcttgactttacaaaagcaagcttgttcccctggaaggctttccaattttgataaactgtactgtgcattcatgcctgttcatttgagtgactgcagatcttaaaagaatcgttttcggaagacaaaaatgcatgtaaaataaggctgggcgatgtgagaggtgacactgtaacattgggagctg

SEQ ID NO: 484292 - DNA, 550 bp, Homo sapiens
gaaaggttagcgcacatctggtgcgtctacctcaatataaatgccaatgttccatcaaagcttttcacagatcaatgaaataatgatcacaggtgccaagacacagggattcactaagatggacagccacacagaattatgacaaggttggtggttgtttttgttttgcttttcgtgttttgtctctattattcatggagatttgtccctagaaacaccagagagagcctacagtgccaacagcacagctctctggcagggccccaagagccgcgggagggcagggcaggttcctggcatgcctgagatgacttagcacactgtgraccagggcttgtgaacagggaagtgttactcaagattgagcttgactttacaaaagcaagcttgttcccctggaaggctttccaattttgataaactgtactgtgcattcatgcctgttcatttgagtgactgcagatcttaaaagaatcgttttcggaagacaaaaatgcatgtaaaataaggctgggcgatgtgagaggtgacactgtaacattgggagctg

SEQ ID NO: 484293 - DNA, 550 bp, Homo sapiens
gaaaggttagcgcacatctggtgcgtctacctcaatataaatgccaatgttccatcaaagcttttcacagatcaatgaaataatgatcacaggtgccaagacacagggattcactaagatggacagccacacagaattatgacaaggttggtggttgtttttgttttgcttttcgtgttttgtctctattattcatggagatttgtccctagaaacaccagagagagcctacagtgccaacagcacagctctctggcagggccccaagagccgcgggagggcagggcaggttcctggcatgcctgagatgacttagcacactgtgaaccagggcttgtgaacagggaagtgttactcaagattgagcttgactttacaaaagcaagcttgttcccctggaaggctttccaattttgataaactgtactgtgcattcatgcctgttcatttgagtgactgcagatcttaaaagaatcrttttcggaagacaaaaatgcatgtaaaataaggctgggcgatgtgagaggtgacactgtaacattgggagctg

SEQ ID NO: 484294 - DNA, 512 bp, Homo sapiens
caccaccccagggaggaaggatgagggacacaggcacgtgggagggggaggagttgacatctctttacatccccaggctgagttttaacaagggcaagataacgcagcattagccccatgtgcaagctccaggaatcaagacactcaaggaccggccctggaggcacaggcacatctgtttaagaagctttccckttactcagcattgagcaattggccaggcaagaggctagagcaggaacaggagtttcttcccctctctagctctttctcccgcctgttaaccagcatggtgggcagcatgaaatgacataaaatcaacatttattgagaacttaccaggggcatcatgctagttgcttttatatgtactatttaatagccccaatgactctgagaagtaagttgtattatccccattttacaggtaagaaagccaagctccagagacgttaaggaacatgcccaaggtcaggtttttgtaagcactctgactcttgtaagcatcagag

SEQ ID NO: 484295 - DNA, 512 bp, Homo sapiens
caccaccccagggaggaaggatgagggacacaggcacgtgggagggggaggagttgacatctctttacatccccaggctgagttttaacaagggcaagataacgcagcattagccccatgtgcaagctccaggaatcaagacactcaaggaccggccctggaggcacaggcacatctgtttaagaagctttccctwtactcagcattgagcaattggccaggcaagaggctagagcaggaacaggagtttcttcccctctctagctctttctcccgcctgttaaccagcatggtgggcagcatgaaatgacataaaatcaacatttattgagaacttaccaggggcatcatgctagttgcttttatatgtactatttaatagccccaatgactctgagaagtaagttgtattatccccattttacaggtaagaaagccaagctccagagacgttaaggaacatgcccaaggtcaggtttttgtaagcactctgactcttgtaagcatcagag

SEQ ID NO: 484296 - DNA, 525 bp, Homo sapiens
ctctcatacagccatgcactgcatcgtgacgtttgatcagtgacagacagcatatatgacggtggttccataaggttaygatactgtatttttactgtacctttttatgtttagatatgtttacatgcacaaattcttaccattgtattacctttgcttacagtattcagtacagtaacatgctgtacatgtctgtagcctaggagcaatagggcataccatgtagcctaggtgtgtagtagactacatccatctaagtttgtgtaagtagctctatgatgtttgcacagcaatgaaattgcctaacattgcatctctcagaacatattcttgtccctaaggatgcatgactgtttttggatgacaacttgggaatatttgtcaaaattaaaactgagcatatcctttgacacagctattctgtgtttggcaatgtgccctagaagtgcacaaatacacaatgtattgacttgggaacatatcttcaatttggtcagagactggttcaagctgcaaagcatgtta

SEQ ID NO: 484297 - DNA, 543 bp, Homo sapiens
gctgctctcatacagccatgcactgcatcgtgacgtttgatcagtgacagacagcatatatgacggtggttccataaggttatgatactgtatttttactgtacctttttatgtttagatatgtttacatgcacaaattcttaccattgtattacctttgcttacagtattcagtacagtaacatgctgtacatgtytgtagcctaggagcaatagggcataccatgtagcctaggtgtgtagtagactacatccatctaagtttgtgtaagtagctctatgatgtttgcacagcaatgaaattgcctaacattgcatctctcagaacatattcttgtccctaaggatgcatgactgtttttggatgacaacttgggaatatttgtcaaaattaaaactgagcatatcctttgacacagctattctgtgtttggcaatgtgccctagaagtgcacaaatacacaatgtattgacttgggaacatatcttcaatttggtcagagactggttcaagctgcaaagcatgttatagatgaaacccat

SEQ ID NO: 484298 - DNA, 543 bp, Homo sapiens
gctgctctcatacagccatgcactgcatcgtgacgtttgatcagtgacagacagcatatatgacggtggttccataaggttatgatactgtatttttactgtacctttttatgtttagatatgtttacatgcacaaattcttaccattgtattacctttgcttacagtattcagtacagtaacatgctgtacatgtctgtagcctaggagcaatagggcataccatgtagcctaggtgtgtagtagactacatccatctaagtttgtgtaagtagctctatgatgtttgcacagcaatgaaattgcctaacattgcatctctcagaacatattcttgtccctaaggatgcrtgactgtttttggatgacaacttgggaatatttgtcaaaattaaaactgagcatatcctttgacacagctattctgtgtttggcaatgtgccctagaagtgcacaaatacacaatgtattgacttgggaacatatcttcaatttggtcagagactggttcaagctgcaaagcatgttatagatgaaacccat

SEQ ID NO: 484299 - DNA, 691 bp, Homo sapiens
agtctatggctcaccatagacattcgataagcactwcaacccactggggactgttttgtgcagagaaggaagctcagacatgaaggtaacatgcccaggttctcactgttaacccaggttgtcctggcttcaaagcccatgccttccccgtgaccccatgcactgggcaaatagcaggtgttccataaacacctgtcaacctggctgtttggaaatggctttgagaacagatcagtcttttttgacagcctgggtttcattgtttgggttgacactgggaacacagaaagtatgcatcagtttcatagaatgaggaaggcagccaggactgtggacgacttcccgagggttgcagcggtcgtccacggcttctccaaaattcctagcttagttgaccctatttcctggcttacttctctttttcttttcccaagggagcccaatagcagggccattgaagaatggaaccagaggcaaatgacactgccctcaggccacttcctttcctaagtagttccccagcagcccctccccactggtcttgctctgggccctacatttttccctgtggcatttggttaagattattgtcatgtgttaatatgaaaatgtgatgtgagtttggcggcacattaagtgattctccaccatttacacagtggcatgaattagtctgacctttattttccag

SEQ ID NO: 484300 - DNA, 535 bp, Homo sapiens
ccccatgcactgggcaaatagcaggtgttccataaacacctgtcaacctggctgtttggaaatggctttgagaacagatcagtcttttttgacagcctgggtttcattgtttgggttgacactgggaacacagaaagtatgcatcagtttcatagaatgaggaaggcagccaggactgtggacgacttccsgagggttgcagcggtcgtccacggcttctccaaaattcctagcttagttgaccctatttcctggcttacttctctttttcttttcccaagggagcccaatagcagggccattgaagaatggaaccagaggcaaatgacactgccctcaggccacttcctttcctaagtagttccccagcagcccctccccactggtcttgctctgggccctacatttttccctgtggcatttggttaagattattgtcatgtgttaatatgaaaatgtgatgtgagtttggcggcacattaagtgattctccaccatttacacagtggcatgaattagtctgacctttattttc

SEQ ID NO: 484301 - DNA, 691 bp, Homo sapiens
agtctatggctcaccatagacattcgataagcacttcaacccactggggactgttttgtgcagagaaggaagctcagacatgaaggtaacatgcccaggttctcactgttaacccaggttgtcctggcttcaaagcccatgccttccccgtgaccccatgcactgggcaaatagcaggtgttccataaacacctgtcaacctggctgtttggaaatggctttgagaacagatcagtcttttttgacagcctgggtttcattgtttgggttgacactgggaacacagaaagtatgcatcagtttcatagaatgaggaaggcagccaggactgtggacgacttcccgagggttgcagcggtcgtccacggcttctccaaaattcctagcttagttgaccctatttcctggcttacttctctttttcttttcccaagggagcccaatagcagggccattgaagaatggaaccagaggcaaatgacactgccctcaggccacttcctttcctaagtagttccccagcagcccctccccactggtcttgctctgggccctacatttttccctgtgrcatttggttaagattattgtcatgtgttaatatgaaaatgtgatgtgagtttggcggcacattaagtgattctccaccatttacacagtggcatgaattagtctgacctttattttccag

SEQ ID NO: 484302 - DNA, 691 bp, Homo sapiens
agtctatggctcaccatagacattcgataagcacttcaacccactggggactgttttgtgcagagaaggaagctcagacatgaaggtaacatgcccaggttctcactgttaacccaggttgtcctggcttcaaagcccatgccttccccgtgaccccatgcactgggcaaatagcaggtgttccataaacacctgtcaacctggctgtttggaaatggctttgagaacagatcagtcttttttgacagcctgggtttcattgtttgggttgacactgggaacacagaaagtatgcatcagtttcatagaatgaggaaggcagccaggactgtggacgacttcccgagggttgcagcggtcgtccacggcttctccaaaattcctagcttagttgaccctatttcctggcttacttctctttttcttttcccaagggagcccaatagcagggccattgaagaatggaaccagaggcaaatgacactgccctcaggccacttcctttcctaagtagttccccagcagcccctccccactggtcttgctctgggccctacatttttccctgtggcatttggttaagattattgtcatgtgttaatatgaaaatgtgatgtgagtttggcgrcacattaagtgattctccaccatttacacagtggcatgaattagtctgacctttattttccag

SEQ ID NO: 484303 - DNA, 589 bp, Homo sapiens
ctgatgtcattcaagaaagcagggggggtcacccactgcatcagaggaacagacatttgactgagacagatccaccctcgagccctctggggagcctgacatttccaggacatggaaaacaaacttcctctcaggagggaatatgctttcagtgtgggaaaaaaataaaaaatttttaaaaagagagagggagagaactggagagggtcaatacatgctcacctctggctgaaagcccacaatcagggaaattactgtcctttccgaaaaggtgaaagcatcamaatgtcctctggttcacaggcagatccgaggaactgcacgtacacagagaaaacctcagtcttgacccaacagagcctactgggtctagcaaccatgtaactccctttcaattcagctcatacatttaagtatttattgagaggccaccttgtatttggtgtcaaagctattctttgtggtgggaagttggaattcagatccaacagggccaacacataagcttctgttgttgctgctgttgtaacttaccttgagttcttatgttctgacactccctttgcatggattatcctatttaaatctc

SEQ ID NO: 484304 - DNA, 589 bp, Homo sapiens
ctgatgtcattcaagaaagcagggggggtcacccactgcatcagaggaacagacatttgactgagacagatccaccctcgagccctctggggagcctgacatttccaggacatggaaaacaaacttcctctcaggagggaatatgctttcagtgtgggaaaaaaataaaaaatttttaaaaagagagagggagagaactggagagggtcaatacatgctcacctctggctgaaagcccacaatcagggaaattactgtcctttccgaaaaggtgaaagcatcaaaatgtcctctggttcacaggcagatccraggaactgcacgtacacagagaaaacctcagtcttgacccaacagagcctactgggtctagcaaccatgtaactccctttcaattcagctcatacatttaagtatttattgagaggccaccttgtatttggtgtcaaagctattctttgtggtgggaagttggaattcagatccaacagggccaacacataagcttctgttgttgctgctgttgtaacttaccttgagttcttatgttctgacactccctttgcatggattatcctatttaaatctc

SEQ ID NO: 484305 - DNA, 633 bp, Homo sapiens
ccaaaccaaggtacttaaccatgtgctaaatggcagatgacagtagggagaaccacaccctcaccatcttttagctgatagaaaaccaaattacaatagacatccacgccattcttgaagaggaagagagtcgtcatgaggctgtagggagtggacgagagaaggccatgacctgcagttgccagaaaagggaacataggctgactggggctctcctccaggcactgatggcatatgtctttagacatgctgaaagcatgtggctcacatccctagctatctccsttttcccccatctacccacaaaagcctctatacaactgtgacgctgctcctgtagtgcagtctgcaggccctgagtgcacggaaccccagggcattccaccctcttatgggcactgtgctcaacaccaaggaggatgcacgggaaagatgtgtccctggccacctgcttgggaggaagtagctcacatcccagaagaccaagacttaccagcctgaactcactgagtcacaacaagagtcagtgtgtgagtcagtataggatgggtttcaagggagagacaaaaaaaggataacaaatttgggctggatgaataggtagggacagtgtcgtacaggaagaaagatttg

SEQ ID NO: 484306 - DNA, 633 bp, Homo sapiens
ccaaaccaaggtacttaaccatgtgctaaatggcagatgacagtagggagaaccacaccctcaccatcttttagctgatagaaaaccaaattacaatagacatccacgccattcttgaagaggaagagagtcgtcatgaggctgtagggagtggacgagagaaggccatgacctgcagttgccagaaaagggaacataggctgactggggctctcctccaggcactgatggcatatgtctttagacatgctgaaagcatgtggctcacatccctagctatctccgttttcccccatctacccacaaaagcctctatacaactgtgacgctgctcctgtagtgcagtctgcaggccctgagtgcacggaaccccagggcattccaccctcttatgggcactgtgcycaacaccaaggaggatgcacgggaaagatgtgtccctggccacctgcttgggaggaagtagctcacatcccagaagaccaagacttaccagcctgaactcactgagtcacaacaagagtcagtgtgtgagtcagtataggatgggtttcaagggagagacaaaaaaaggataacaaatttgggctggatgaataggtagggacagtgtcgtacaggaagaaagatttg

SEQ ID NO: 484307 - DNA, 540 bp, Homo sapiens
gccctgcattcctgcccccacctccccagaccaacgccagcctcacagtagtagagtagttgatgtgtttcaataaataaatatttctctaggcatttagtaaagccagggcatgtgatccatttatttggaaacagaattttatgtagtgttttattatttttcccttgtaagacttttttttcccaaagaagagtactcattaatttcaaccatggcccttaggtatgttgaaatcttctacttatattggctaccagagaacctaagytcaaataccaatcttttacgaagaacaaatatttgtcagtactaaaattgaatgtgttcctctgtgagacacactccaacaccatcctagagactccaggaacttgggtgaagctgtcacataaagaagttggaacttggggctctctgatacaacccacaactgtggtgctcagagggtccatgttttccatggctgtaaactgggatttatcttccatgggtatgcatccagctgctggggtactgcattataatacatgacaagta

SEQ ID NO: 484308 - DNA, 576 bp, Homo sapiens
actagacacaaagctgcttcctgccccasagcaaagcagggtagagatcacctcggggatgagtctgtctcaaaaagagaaaagaagatattaaaggttaaaagggagaattccttagcagggtcctcttgtccgcttttcttccaaacgtcccaagtgaactggtacagggcccagacagtgagtaacagtggaatctattttgcaagccacatctttcaaattccttacattctctgcttctttttttttagacagagtctcgctgccacccaggctggagtgcagtggtgcgatttttggctcactgcaacctccacctcccaggttcaagtgattttcctgcctcagcctcccaagtagctaggattacaggtgctcactacaacgccggctaatttttgtatttttaatggagatagggtttcaccacattggccaggctagtctcagactcctgacctcaagtgattcacccacctcagcctctcaaagtgttggaattacaggtgttagccaccatgcctggcttaattctcttttgctctctatgtagtgaaatgcattgtttcttta

SEQ ID NO: 484309 - DNA, 367 bp, Homo sapiens
gacaatatctgcaattttatatccaatgaagtacttgtatccagaatatatgaagaacttctacaaacaaattttaaaaaaatggaaagccaataaaaaattgggcaaaagtttgaacaggtgctttacaaaggagaatattctgatgggtatgaaaggtactcagctttaggaaaatgtaattagagccacgataatattccatcaacccgaacagctaaagtgaagaacaaacaaacaataccaaggactctyatacactactggagggagtgtaaattggtaaaacccgtttttggaaaatcatttggcaacatcccctaattctgaacatatgagtactctataacccagtagttccactact

SEQ ID NO: 484310 - DNA, 594 bp, Homo sapiens
agaaaagggcaggtgttggcattgctgacaagagactcagcaggttttagagaggaaggagagggaaagatctggaagcagcaatraggagcaaaggacacagctaccacatccagacgggtggccagcagggaggacaccacctccagcagggacggtcctcagggcagaggcagcttgcagaggagcaagagggaaagggaacctgtgggaaaagaacagaggcagagatggctttgcagggactgtgttcagtgtgttcaaataactaattatgatagtgtgagtgtgaagagcatttgctattcctgtaaacctagaataaatttatatataggcactgatcatgtcatttgttgctatgactaacaagtaacatgacccagaaacctctggctatttgcaattgatcctcccaaaatttaactagacccttagtcctcacagcatgttgaattggtgggatttggccagatgcatgcactctcctgattgctaccatctggccaagattagctgggcatgtttttgcatgcctgtagtcctagctactcaggagactgaggcaggagtatcacttgagcccaagagttt

SEQ ID NO: 484311 - DNA, 594 bp, Homo sapiens
cagggtgggaggtggaggcaggaaaggcctcatgagaaaatggcatttgagcaagaatctgaaggaagagagggagtgaatcatggatacctgagagaagggcattcttggcagwgggaactgcaaatgcaaaggcctcaggctgcagggtgcctggcatgttcaaggaatcacaagcaggcagtgggcgggaggaggacgagccgagggagagtagcaggacatgaggacagagagacaggctacacgaggcctggtaagacatttattcaaacactcaagtacctactggataccactctggtagaatttatttgcttaaaattaataaacagattataaatgattcttggccattagtttaagcaaaatttcttcttgactgtttttcaagcactagtatatattgttatatgaatcttaatcatgttatacttacttttcagatatctttcagttctaaaatttcaatttgaaaaataatttctagttctctgctgagattgcctatcttttcatttattacacatatattttaggtcattgaggatggttatgctcatctgcacctggtctctattgattatcttctct

SEQ ID NO: 484312 - DNA, 669 bp, Homo sapiens
tttaattctgagttgttaagttgactgtctccagttctcaaaatgtaaaagtatataaccaagtaggatttcatatttctattttatttcttattgcattggctagaacttcctgaaaacagtttcagtaaaacaataaacagtgactccgactatccaaggactggtaacagtgtggcgttttttagctaattattctgtatctggttcaccttcattctttagttttctgactttttaaatggctgttacatttgcatttttatcaaacgatgcatcttcctgtggtcgattgatgggatattgtttttcttataaacacacagagatgatactattgtcactgcctttcataatatgatgctgttgatgaaatgtatattctactggattcttacagatgytactgttactgttctgttacattttccccaatactttgtaggatttgtatagctatctttatgactgagatttgtctgtataattttagtttccattttttctatttttaaaaaacattggtaatcaacttctatttacagtttcaccgtattccatgtttggaaacaagctttctatcttgagaatgttctcctcggagtctgggagattttaccactgaaacctgtggcgtctcaggtgcagatggagcttcttgtgcagctg

SEQ ID NO: 484313 - DNA, 669 bp, Homo sapiens
tttaattctgagttgttaagttgactgtctccagttctcaaaatgtaaaagtatataaccaagtaggatttcatatttctattttatttcttattgcattggctagaacttcctgaaaacagtttcagtaaaacaataaacagtgactccgactatccaaggactggtaacagtgtggcgttttttagctaattattctgtatctggttcaccttcattctttagttttctgactttttaaatggctgttacatttgcatttttatcaaacgatgcatcttcctgtggtcgattgatgggatattgtttttcttataaacacacagagatgatactattgtcactgcctttcataatatgatgctgttgatgaaatgtatattctactggattcttacagatgctactgttactgttctgttacattttcyccaatactttgtaggatttgtatagctatctttatgactgagatttgtctgtataattttagtttccattttttctatttttaaaaaacattggtaatcaacttctatttacagtttcaccgtattccatgtttggaaacaagctttctatcttgagaatgttctcctcggagtctgggagattttaccactgaaacctgtggcgtctcaggtgcagatggagcttcttgtgcagctg

SEQ ID NO: 484314 - DNA, 416 bp, Homo sapiens
cagtcccggcagttccagtggctgtggaagtcagtyagtttaactcagcagaggcccactacttatccagggatacaaacatgcttttaatgttacatacgcacacacacacgcacacacacacgcacaacagttacaatgactaactgggcagtcatttatgaattcacaagcccttgaagaatgtagaaatgcacaggcctcctgacatcctctgcagggtcctagagagcctgcccagggaggggtgggagcctggggtgaggctccctgggaagcttgtcctaacctggctgcagagtcccctccatctccactgcacgccctgccccctgtccagggcacagtccccatgggacccccagggagtctggatgggccacacatgctcctggctgctcatctcttcccttcca

SEQ ID NO: 484315 - DNA, 502 bp, Homo sapiens
cccaccatattctctgtcactgtgtctccacctggaagtgtctatttcttggaagctgctctcctctttgcccagcaaagcccttctcttctcagtagagcactccaacacccccttgccttgcgaagcccacacytggagtgtgcactaagcgatgacttcattgtccttccatgtttcaaaaaacgtggcccatatttctattctagcgtatcacatttaaatgacccgtttcttatccgcaagctctctgaaaacagaagtcatgtcttttaatctttaaatctactttaaatcaactgtgtgattgatacaaaatagacgtttaataaatattggatggctgactaaatgtatacataaatgagggaacaactatcgctggaggagataaatgggcttgtcaatctgcccttcccaggcacagagcaatcaaacaaaagagaaacaaatcagcaaataaatttgaaactgcatgcgatatttggcaagagtcaaggca

SEQ ID NO: 484316 - DNA, 495 bp, Homo sapiens
tgtggccctcccaacctcctacttggtcctgaagctgcatctgcaccaacagtgactcttagcaatacccaatgtacattgtgaggctttgaactcaagttaaaaatgcagtcttccttccgtgcctgtcaacattgatgctagagtattttatgaaatggccctgcttcagtgagtatactttcacaagaatttattaaacacctattacataatgaggtaatagttttactgtatataatcctggattccaataaataattctgcagaatatattgagcataattagtaatacagctgacatttattgagtgactactatatttgcctactcttttcarcactttatgtaaattaactcacttaatcctcataacgactctatgtgcttggtgccattcttatccgcattttgcagcttcagtaagggagccatggggaggataagtaatttgccctgcaaaaatgcagctaataatggagaacctggaaatc

SEQ ID NO: 484317 - DNA, 495 bp, Homo sapiens
tgtggccctcccaacctcctacttggtcctgaagctgcatctgcaccaacagtgactcttagcaatacccaatgtacattgtgaggctttgaactcaagttaaaaatgcagtcttccttccgtgcctgtcaacattgatgctagagtattttatgaaatggccctgcttcagtgagtatactttcacaagaatttattaaacacctattacataatgaggtaatagttttactgtatataatcctggattccaataaataattctgcagaatatattgagcataattagtaatacagctgacatttattgagtgactactatatttgcctactcttttcagcactttatgtaaattaactcacttaatcctyataacgactctatgtgcttggtgccattcttatccgcattttgcagcttcagtaagggagccatggggaggataagtaatttgccctgcaaaaatgcagctaataatggagaacctggaaatc

SEQ ID NO: 484318 - DNA, 495 bp, Homo sapiens
tgtggccctcccaacctcctacttggtcctgaagctgcatctgcaccaacagtgactcttagcaatacccaatgtacattgtgaggctttgaactcaagttaaaaatgcagtcttccttccgtgcctgtcaacattgatgctagagtattttatgaaatggccctgcttcagtgagtatactttcacaagaatttattaaacacctattacataatgaggtaatagttttactgtatataatcctggattccaataaataattctgcagaatatattgagcataattagtaatacagctgacatttattgagtgactactatatttgcctactcttttcagcactttatgtaaattaactcacttaatcctcataacgactctatgtgcttggtgccattcttatcygcattttgcagcttcagtaagggagccatggggaggataagtaatttgccctgcaaaaatgcagctaataatggagaacctggaaatc

SEQ ID NO: 484319 - DNA, 495 bp, Homo sapiens
tgtggccctcccaacctcctacttggtcctgaagctgcatctgcaccaacagtgactcttagcaatacccaatgtacattgtgaggctttgaactcaagttaaaaatgcagtcttccttccgtgcctgtcaacattgatgctagagtattttatgaaatggccctgcttcagtgagtatactttcacaagaatttattaaacacctattacataatgaggtaatagttttactgtatataatcctggattccaataaataattctgcagaatatattgagcataattagtaatacagctgacatttattgagtgactactatatttgcctactcttttcagcactttatgtaaattaactcacttaatcctcataacgactctatgtgcttggtgccattcttatccgcattttgcarcttcagtaagggagccatggggaggataagtaatttgccctgcaaaaatgcagctaataatggagaacctggaaatc

SEQ ID NO: 484320 - DNA, 614 bp, Homo sapiens
gtcccttcccctcagatgaaaagccacaaaaaacaggaaacttttcatactgttcccatcttcaaagtattggttcccttctggtttctgcctgcttttgatcactctccagtaccttgaagcacttattttcaatcttgtgtacagagttttaaatggtgggattttttgtttgtttgtttgttttggtgagtgtgttggttcaatacaagatacttcaccattagcataaatattacctccctwtacttattttgacattttaactgatggattgtacctaggaaaacagtgtttattttgagtggtttcatttattgcatgtgatctgcattgtattgtagaatttttctttctggtaagtatctgtcatcacttaatcataaatcacatgcaagttcaaagtacaagtttcttaattgaagagtaattattataataatcacttgtaataattagttataatgatgtgcatgtcttttcatttgtggaaggaattataattcccaatatgacaaaactttgaaattcccttagtaattactaaatgattatgactctatcaagttgcaagtgactgttttggaatagtatgacctcatatctgatatgag

SEQ ID NO: 484321 - DNA, 624 bp, Homo sapiens
cttcccctcagatgaaaagccacaaaaaacaggaaacttttcatactgttcccatcttcaaagtattggttcccttctggtttctgcctgcttttgatcactctccagtaccttgaagcacttattttcaatcttgtgtacagagttttaaatggtgggattttttgtttgtttgtttgttttggtgagtgtgttggttcaatacaagatacttcaccattagcataaatattacctccctatacttattttgacattttaactgatggattgtacctaggaaaacagtgtttattttgagtggtttcatttattgcatgtgatctgcattgtattgtagaatttttctttctggtaagtatctgtcatcacttaatcataaatcacatgcaagttcaaagtacaagtttcttaattgaagagtaattattataataatcacttgtaataattagttataatkatgtgcatgtcttttcatttgtggaaggaattataattcccaatatgacaaaactttgaaattcccttagtaattactaaatgattatgactctatcaagttgcaagtgactgttttggaatagtatgacctcatatctgatatgaggcatttaaactaaa

SEQ ID NO: 484322 - DNA, 614 bp, Homo sapiens
gtcccttcccctcagatgaaaagccacaaaaaacaggaaacttttcatactgttcccatcttcaaagtattggttcccttctggtttctgcctgcttttgatcactctccagtaccttgaagcacttattttcaatcttgtgtacagagttttaaatggtgggattttttgtttgtttgtttgttttggtgagtgtgttggttcaatacaagatacttcaccattagcataaatattacctccctatacttattttgacattttaactgatggattgtacctaggaaaacagtgtttattttgagtggtttcatttattgcatgtgatctgcattgtattgtagaatttttctttctggtaagtatctgtcatcacttaatcataaatcacatgcaagttcaaagtacaagtttcttaattgaagagtaattattataataatcacttgtaataattagttataatgatgtgcatgtcttttcatttgtggaaggaattataattcccaatatgacaaaactttgaaattcccttartaattactaaatgattatgactctatcaagttgcaagtgactgttttggaatagtatgacctcatatctgatatgag

SEQ ID NO: 484323 - DNA, 515 bp, Homo sapiens
tcacatttgtggtttaaaaaaattccattttcacttaagaatatcctcaatgaagcagtaaaaaaaattttaaaagaaatcccaacacctgwgtatatgtctttttaatattccatgtgatggaacaggcaatatgcataaagcacttctgctgcacgtcaaagaacaatgtcatgaggaaaagcacttaaatgattgtttgaattgcaagctgcgctggccactatttttcttttaacaaaacgtcatttttggtagaaagattttgctgacaaactattgttttagtccattttgttctactataacagaataccacagactgggtaatttataaagaacagaaattaattctatcacagttcttcaggctgggaagtccaagatcaaggtgctggtagattagggcctggtctttctgcttctaccttggtgcattgaacactgtgccctccggtgagaaagaatgttgtgtccttacatgaggaagagcaggagagagagagaacccgcag

SEQ ID NO: 484324 - DNA, 515 bp, Homo sapiens
tcacatttgtggtttaaaaaaattccattttcacttaagaatatcctcaatgaagcagtaaaaaaaattttaaaagaaatcccaacacctgagtatatgtctttttaatattccatgtgatggaacaggcaatatgcataaagcacttctgctgcacgtcaaagaacaatgtcatgaggaaaagcacttaaatgattgtttgaattgcaagctgcgctggccactatttttcttttaacaaaacgtcatttttggtagaaagattttgctgacaaactattgtyttagtccattttgttctactataacagaataccacagactgggtaatttataaagaacagaaattaattctatcacagttcttcaggctgggaagtccaagatcaaggtgctggtagattagggcctggtctttctgcttctaccttggtgcattgaacactgtgccctccggtgagaaagaatgttgtgtccttacatgaggaagagcaggagagagagagaacccgcag

SEQ ID NO: 484325 - DNA, 636 bp, Homo sapiens
agcaagtccacgattcttgaagacagttttatcacaggtgtacatcagcacaagagtcactaagcagtgtaaaattatatttactgcatgaaagtagaatgggttcataccagtcaaaaatatgtttagcctgtaaaacaaaagaaaaaagaaaaaaactgcattagctacaaactcaacataaacacaaggaacgcagacggaatccatcatttaaaaagataagctattagattaatgatttttaaatgattcccaacattgggttattttttagccttgggtatgtatcacatttttcctatttcagaattgtcccatgtgcagaaatccatgcatatacaatacaatattatttcagggaactttggtctcactgagaaggcaagcaaacaggtgctgagcctgtttttccatcactccatggctaatgcaaatatgcccccttaatattcttattttcactgctggctcttcccaagcaactgagtgttgaaagggaagtccaaagggccatgggtcagagccacatacaccggagatgaacagaaaccatgaaactacrattatagtcacagttgggacaaatgaagcatgaatgtgttctctcacccatggtgccaccaggaaccaggt

SEQ ID NO: 484326 - DNA, 382 bp, Homo sapiens
aaatttattgagtcaataaattgaatgtggagcctttctgttaagacagggcttatccttgtagataaaagtatgttactgaggcacactctgaggagtaattttaatggagaaatcaccttacaacaagttctcttggctcttcagtaatgaaggagaagatgcagtctgtctgaaaacaaaaattccattctctttaacaatattatagggatgtgccatgtgacatagtcatctccatataaaggacagcatacacaatagactgtaagcacataaatgtrgagaaatgcacatgtgaactgctcttcctatctaatagctataaatatagataatagatgtagaaagagggcattgtgtttggaaaaattatctgcaa

SEQ ID NO: 484327 - DNA, 484 bp, Homo sapiens
tgtttttcatacagagcacaactacctaatatttctagatgcatctacttgttgttaatgtatttcagtgcattgaggtttcagcagaagttacaggctttaggtttagaaaaatctagggactctgatttacttaatgtatctgaaataatttatgaaactttgttgtaaaacaacaaattggccactgcataaatattactattatttaagacacattaatgaactatatactataatttttaaaggacatatcttattggtccaaaaatatttattaagcattgactctattaaagagaatgtcacagattatagggaagataaattttataaataagtataatatgcatgagtattttaagtaccatatcagtatcattatttgtaaaagagaaatargtgcagttttgaatgttgaactcaccagacagttcctggataagctccatttatcatgatttattatcattattatactact

SEQ ID NO: 484328 - DNA, 481 bp, Homo sapiens
agcagaaggcaacttaaatctgaaagtaagtccaaaactgtgcttattggtgtggaactgctcctgtcacacccccgatctcttcctctctcttaccctgacctctgttcctttaaggaaagaaacgtccactctgctccagtcaaccccactgctggtgtcctctgcactgccttgcactccctgaagagagcctgggcaacagagcgagactccatctcaaaaaaaaaaaaaaaaaaaattggggactatgtatatagatttactacactgaagccctccagcagtctaagaactgatgcctctaacgaaggaaaggactgcatgtttctgatgaagctaccatgacctaccagatttccaacgcctgccaaaattaatctatttgtctgtggtagaagaggccataccattgtggcccttgaaacttactgtatgatgttttatttagygaacagttcacatacccaaatggttgtaa

SEQ ID NO: 484329 - DNA, 617 bp, Homo sapiens
ctaatactctctcttgatgagcttcatattcatcacgacttggataaattttgctgatgagtgcatcaaactttgggtctggccttggtgatcttttggaaactagttttttccaacaggtaagacattctttgttgccacttctaagggctatgatgttgcagtctgcacagaaacgatgtaaagactcctttgtagtcatggtgttcttcaacatatccaaacaaattgggcacattaaatcactgtgcagacttcgaggtgaaaccacaatttctaagccatctgttattgccttctgtaagagagtcactgaggtgttcattgtaactcatataaactgagttcccatgttttgcttaatggttgagttccttttgtctgcacagcctgagacattgaggctcccaccccagccaggggctcactggccatgcaggagcgagactcggrtaatcggctgctgcggcagctggcaccgccttacaatatagcgagccgcaaagagcattttaacacaagcctccagggttcccggacaccccactctgtccccacggataccaaaatctgcgcgtatccgcgcatgttcaagtccctaatatattctggtgcat

SEQ ID NO: 484330 - DNA, 617 bp, Homo sapiens
ctaatactctctcttgatgagcttcatattcatcacgacttggataaattttgctgatgagtgcatcaaactttgggtctggccttggtgatcttttggaaactagttttttccaacaggtaagacattctttgttgccacttctaagggctatgatgttgcagtctgcacagaaacgatgtaaagactcctttgtagtcatggtgttcttcaacatatccaaacaaattgggcacattaaatcactgtgcagacttcgaggtgaaaccacaatttctaagccatctgttattgccttctgtaagagagtcactgaggtgttcattgtaactcatataaactgagttcccatgttttgcttaatggttgagttccttttgtctgcacagcctgagacattgaggctcccaccccagccaggggctcactggccatgcaggagcgagactcggataatcggctgcygcggcagctggcaccgccttacaatatagcgagccgcaaagagcattttaacacaagcctccagggttcccggacaccccactctgtccccacggataccaaaatctgcgcgtatccgcgcatgttcaagtccctaatatattctggtgcat

SEQ ID NO: 484331 - DNA, 399 bp, Homo sapiens
tgggaattgaatgagtcgggaatggccaaaggaaagccttgtcacagactgcggggcctacaggcaggacckggcaatgggcatcatctggctaaagacaagtcgtggcctcggcctggggaacagctgccacggcctagttgcccctggggtcagttcaggagagtgcgcaacccaactagggtgacaaagccaacacctgcagctgcattacacaatgctccctccctccactcactgccctccattaaccatttagtagaaatcactctggaacattcagctggcacaagtccatcattctgacaactcatctcctcagttctagttgaataatgtgaacattggagggtttagtttctcctctctcttccacaagcaatgtgcaattttgtgtaa

SEQ ID NO: 484332 - DNA, 455 bp, Homo sapiens
cccattaatggagttgttaaacatcatataatattgaaagatatttctattagatgagctttcaattattaatggtaatggaaraacattaatgcagctcttacaacatgacagactgtcagaaagatctcaggaatagtgaagggccagagatcctagagtccctgatctgtataaatttgctgcagtatctttataaagtggataataattgtgttagagatcatttgatcagggagaacccagctcaactgtgcaattcagaagagctgggagttaggaggaggttatcctcaatatattaaggcattccagttcacttctggatgtcccacttggtaaaagaaagtacatttttcattgcatagtagcagcatccacagcagcagaagtagcagtagaaatagcagtagcagtgatagtagcagtggaagtggtagtagtagcagcagcag

SEQ ID NO: 484333 - DNA, 510 bp, Homo sapiens
ttttcaattctgcactcattttagattataatgaaatcttactgaacaaatgctttttaacagagtatgtttccaatatgaatgaagatttcatgcagcaaaacttgagctgtaataatgaacaggtctgaaaaaacgaaagaataagctaagcctataaatctcttccatatacatttatgacagaattagacatatgaatactctattcttagagaatattcagtaaagcataaactcttacttataatgaggtctccatggaaatgctctttcaaatagagttattgacaattgcaaaatatacaacttgcaaatttttcgttttagggtttgtttaaattaagctttaagaattcatgcatatcaaatcctatttttttctgtagaaaaattcaaataaaatcatctgaaataagtcccctttttcttaaaacatttgaaaataatgtatgaaatgtaattaaacataaacttsaatgttcatatctcaagttctaaatacaatcc

SEQ ID NO: 484334 - DNA, 522 bp, Homo sapiens
ctactgtgccagtatatccaatcaaaaaccaaaactcaactttaaataaacatctttctctttatactaaaacctaattcaaaatgattatttcagaccctcataatagcaaccattactcagagaaatcatacttactaaactgggttctgggcatcattataataatgctagaaggtattttaggtagtacatttccacgaatttgaaagtaagacaattttgcaacagactagaaaagcaatatataaaaacagtggttataagcaaagccacatgaaaagattttttttwaaaccagcatataccttgataaaggtaatatcatgtttatgaaagactgcattaatctgacaaataattgatcactgaaaaaaaaacagaaattaaaattcctgaaacaagcattgcctatacccatctttgtgcaatccttagaagggagacatcagaaagctaacttatgattgtagtctgttggggggcggtagctaatgacattttgtatgagtagacacatcg

SEQ ID NO: 484335 - DNA, 522 bp, Homo sapiens
ctactgtgccagtatatccaatcaaaaaccaaaactcaactttaaataaacatctttctctttatactaaaacctaattcaaaatgattatttcagaccctcataatagcaaccattactcagagaaatcatacttactaaactgggttctgggcatcattataataatgctagaaggtattttaggtagtacatttccacgaatttgaaagtaagacaattttgcaacagactagaaaagcaatatataaaaacagtggttataagcaaagccacatgaaaagatttttttttaaaccagcatataccttrataaaggtaatatcatgtttatgaaagactgcattaatctgacaaataattgatcactgaaaaaaaaacagaaattaaaattcctgaaacaagcattgcctatacccatctttgtgcaatccttagaagggagacatcagaaagctaacttatgattgtagtctgttggggggcggtagctaatgacattttgtatgagtagacacatcg

SEQ ID NO: 484336 - DNA, 485 bp, Homo sapiens
gttcaaaataagtgtccatcctgaaaatttacctgatatgaaccttactttgggcattcattttatttgtgtttcaatagtggcrcagctcagccaatcagagagatggtttgtttttatacctcccttcattttttaatttcaaatccttatttttgatgttgcccaatgctatgcaaagaaacaagattttctctattcaattcaaaggcctgaaagagagagtcttcccagttcacctcctatcagatgtgtcttgaggatagcaggcaagtctaacaggtaaatattaatacatggcagagtaccattagactcagacatttgggagaactaggagtcaacaaccaaatctgttctgtatttataaacatttacactccactccaataagtcctcaaatcttttttgttttcagcaatggagtgatagccctcattctctagattgaggaaaggtcacacaagagataaaactttctgctc

SEQ ID NO: 484337 - DNA, 598 bp, Homo sapiens
ggctgtgtttgttgcatcacatcttgaaaaggaagaacaaagttggaatactcacactttcctcaatttmagaacttaataaatgctccagtaatcataaggatagatatatagatatgatgctgacataaggatagtcatatagattaatggaatagaactgagagtccagaagtatgcctttacatttatggtcaattgaatttctttctttttttttttttttttttttttttaaccaatgaacacttttatttactggcaaaatataaaaatccaggtctcttaaatccacacaatctctccaaatatttggcaagatagaccccaagtccgtacgggtgggtaacaagaacaaaggggtctctgctcagagagacttattgttgttcagagttctgccctgcttccctctaaatgctcatcaacctgggctcttctaaagtgggcagacaggccctattctaagcgtaggactagccccatttgtgtgtgacactaagttcctccaatggtccaaactgagcatggatgactatccaacatcacacacaaatgcacatcccctctctttacaagacatgcagaatctcaagat

SEQ ID NO: 484338 - DNA, 598 bp, Homo sapiens
ggctgtgtttgttgcatcacatcttgaaaaggaagaacaaagttggaatactcacactttcctcaatttcagaacttaataaatgctccagtaatcataaggatagatatatagatatgatgctgacataaggatagtcatatagattaatggaatagaactgagagtccagaagtatgcctttacatttatggtcaattgaatttctttctttttttttttttttttttttttttwaccaatgaacacttttatttactggcaaaatataaaaatccaggtctcttaaatccacacaatctctccaaatatttggcaagatagaccccaagtccgtacgggtgggtaacaagaacaaaggggtctctgctcagagagacttattgttgttcagagttctgccctgcttccctctaaatgctcatcaacctgggctcttctaaagtgggcagacaggccctattctaagcgtaggactagccccatttgtgtgtgacactaagttcctccaatggtccaaactgagcatggatgactatccaacatcacacacaaatgcacatcccctctctttacaagacatgcagaatctcaagat

SEQ ID NO: 484339 - DNA, 585 bp, Homo sapiens
ctctgctctgtgctctcgggaaaccttgacatttctatcacagctcttattacaattgtaattaacatttacctgcatgtttatccatgaatgtctgctccctcaagagtgtaaacttctggctctgcctacctcttctgccttggtatcttctgcaccttgcaccttacttacttattgcattcaatcaatattattgaacaaattaaggagtgaatgatctgtttcacttatggttggttagctcagttggttagcttgcagggcagaggctaaggtcatgggctggcccaattttacgcttttctccttttacagctcccgtcactagctttttctcctcaagcctgcactgcacaccaactgggayggagggtgcagatgaataaaggcaaatccatcaccaaaagtaagaaaacccttccacacttcctccctcataatttgttgtagatttgttgccatctgcaaagccagaaagacaactccagcacttcctgatcatcttgagacccacttaaactccctgagactgtaaaaatctctcctatttattcatttactaaaagtcccctggtcccccag

SEQ ID NO: 484340 - DNA, 535 bp, Homo sapiens
cgagggctgcagggcaatgagtgtcctcaccaacacaaggcttggcaaagcataactcccacatggaattctgccttcccgcaaacttcctgaacctcctatcaaggccttagctattcctcctacataaattcagagtatagctgtataaaggatggcttctccttcaccccagagccctccccacctaccgtactcatctggcgctggtatatgctgctctgtactgctaggcagtctatcccatctcaactaccccttaagaacaaggcctatattttttattgctgtacgtcataactagcacatgctcaataaatattkatggagattagtttaaatttgattcagtatgtgacagatctttataaattgaataatgttatgcaacagggattataattgttcaaactgacatacagttgcctattataaattctctgaaacaaaaacagtcaatgctaacaatcttggaagaccttaaaagtacctaattaaatgcattcttccgactcccaacctgataccttcattt

SEQ ID NO: 484341 - DNA, 592 bp, Homo sapiens
catacaaatgttatgttaaagaattacttcatccccatgtgaccatctcacctcataatcaaacgaycctaaatccctcactaacctacccccgccctcactaaacttaataataaatgctggtatatccagtgcattggtggcaccgcgggaccaaaaggcggtgaccccctggacccagctttcactatcttgtgtgtgtctattatttctcaacctgccaatccacctaggaacaaagagagagccccgtcgcattgcgggctgctggccagatcccgcactaatgagggaagggcaaagaacaggccctggaactttcctgattcaggaagggaagcattcaagctaggctctatgcctgtccctctgcaatttttagaaatttaatttctggactacaactcagagtgactccccaactctatctaattcagctcctgggctgtatgtaccaggaccaggccaagttcatttctctcccgccggctttctgcaggaactggcgtccatcaaaccccattgagtatttgttgaaatgctctcactttggtgtgttcccttcaaaaagcttactcaatatgggctgcag

SEQ ID NO: 484342 - DNA, 606 bp, Homo sapiens
gcatccaccatgttgtctagttcaataatgatgatagcccaatgaggtgaagtcattattttcatttgatataggaaaaagcacaggatcagaggacatcccattggcttagatgtcacttccaatgtttaccccactrcacatgtgtgcctttggcctccaagagactttgatgagatcaactcaatcacattatttgggccttctatggaagttctgctgtctacattcctaacagtatataaggcgttgaattcctcagaatattcctcagaattcctcatccagtaaaaatatccttcaggaatgaaagggaaatagacattctctgatacagaagagctaagagaatttgttaccagagatctgttcaaaagaaatgctaaagaaagctcttcatactaaatgcaaatggcactggagggaaacataatttcaggatttaaggaaaaaaacacaaatcaaaatatctgtgtaaatataatagactataacttcttagactctttaaaatgtatataatcattgacagaaggaattataacattttatgtgacaactataacattaagtggggaggataaagggacctatatggttgtgaga

SEQ ID NO: 484343 - DNA, 619 bp, Homo sapiens
tttagaaattgcattgtgataaaaaagctaatgatttgggcagagactttaaaattataagtaatgtttatgcatgaatagtgatgtatgatttaaaaaattataactctaacaagaaacatttaactttgaatatgcctctattttcttttcttattcatattcttttatcaaacacatgcattgaacacctcctacatcgagaacaaataaaaatgaactagacttatttctagactccagaacattcactggctagttcttcctttcctagagaatgtaggagcctcattctaccaggagaaggagagggatgcttgcattgaaatagacatttgctgagtcttataaaccgaatgaggaagcatcccyggcaattgtgtacaaagatgtgtgagcattgctagtctgggaacataatgagtgtgtcatttctgcatagtgggtgggtgcagagtggctgaagctggagcagaggcggaaaggtggtggctctctaaggccatgaatctcctacggaggatgtggccagaccatcagctccctccctccagctctcctgcaacgaccctggacgtttttgcaccctgtggctgacagggtgagcagtgctcacaca

SEQ ID NO: 484344 - DNA, 619 bp, Homo sapiens
tttagaaattgcattgtgataaaaaagctaatgatttgggcagagactttaaaattataagtaatgtttatgcatgaatagtgatgtatgatttaaaaaattataactctaacaagaaacatttaactttgaatatgcctctattttcttttcttattcatattcttttatcaaacacatgcattgaacacctcctacatcgagaacaaataaaaatgaactagacttatttctagactccagaacattcactggctagttcttcctttcctagagaatgtaggagcctcattctaccaggagaaggagagggatgcttgcattgaaatagacatttgctgagtcttataaaccgaatgaggaagcatccccggcaattgtgtacaaagatgtgtgagcattgctagtctgggaacataatgagtgtgtcatttctgcatagtgggtgggtgcagagtggctgaagytggagcagaggcggaaaggtggtggctctctaaggccatgaatctcctacggaggatgtggccagaccatcagctccctccctccagctctcctgcaacgaccctggacgtttttgcaccctgtggctgacagggtgagcagtgctcacaca

SEQ ID NO: 484345 - DNA, 619 bp, Homo sapiens
tttagaaattgcattgtgataaaaaagctaatgatttgggcagagactttaaaattataagtaatgtttatgcatgaatagtgatgtatgatttaaaaaattataactctaacaagaaacatttaactttgaatatgcctctattttcttttcttattcatattcttttatcaaacacatgcattgaacacctcctacatcgagaacaaataaaaatgaactagacttatttctagactccagaacattcactggctagttcttcctttcctagagaatgtaggagcctcattctaccaggagaaggagagggatgcttgcattgaaatagacatttgctgagtcttataaaccgaatgaggaagcatccccggcaattgtgtacaaagatgtgtgagcattgctagtctgggaacataatgagtgtgtcatttctgcatagtgggtgggtgcagagtggctgaagctggagcagaggcggaaaggtggtggctctctaaggccatgaatctcctacggaggatgtggccagaccatcagctccctccctccagctctcctgcaacgaccctggacgttttwgcaccctgtggctgacagggtgagcagtgctcacaca

SEQ ID NO: 484346 - DNA, 627 bp, Homo sapiens
gcccacacttgctctgaattctcctggagttaacacccactgccaccttcatcttccttggagaacaatcatgccaggaaggtcacaggagccggagctgaaatcccagctctgacatgacacttctctaacctgtttctcatctacaaagtggagacaatctcccagagctgtggttccaatgaaagatactgtgggagagcaaacccccaatgtggaatgaatgggagacttccctagaaaagaggtctaggcatcagctcacctctacttattctctttgtaaccagaacaagggtttaaaccttcaggcctcagttttcccatctgtgaagtgatcacctcagcacctgcctcactcaagggtggtgaggattaaacctaattctacacataaaggtctctgggataaactccccagaccatgtatgttattattatttccaattcttcttcatctgaactcctmaccccagcatcaaacgtctaccatactttaaattctttcttccctggccctgtctctcaacacagcaagcatttcaacacccatgcaatcatttgacaaatattcacactttgcctctcctctgcctgcatgacttggtgctctgtggcacggaacgc

SEQ ID NO: 484347 - DNA, 686 bp, Homo sapiens
aggctagccaggctaagaagggggggcactttttttgtaagaaaggaacagagaattctctctggctgggaaagaagagtgtataaataagagccaggaaactgttgcttatcagatccgcgaagcccagaggattcaattcaggccagtgctactattgcaggtcagattacaaggaagagtgtcaagagggaaaagatgttgaagtctttgccctagctatttgtgtaatgtccacacgaagatgtgattaagcactatacgtgtggcactagctgttactgtacaatcaaaacttcaatcagagtcatcatgaagcatctgtcttgatggtatgacttttaagtctaggtgtaatgaggctggaatgatctatggcaggggttcccaacccccaggccacagcattggtccatggcctgttaggaaccggtccacagaacaggaggtgagcagaggtgagtgagcattactgccagagctccgcctcctrtcagatcagcaccggcatcagattctcataggagcgcaaaccatattgtgaactgcacatgcaagggatctaggctgagccctccttatgagaatctaactaatgcctgatgatctgaggtggaacagtttcatcccaaaaccaacccccatccctggtgtcaggaaggttgggaaccgctgctctatagtgt

SEQ ID NO: 484348 - DNA, 593 bp, Homo sapiens
gtaggatgactatagttaataatagtattttatagtgttacaaagagctaaaaggaggatattgaaagtttccaaaacaaagaaataataaatgtttcagatgatgagtatactaagtactctgacctgatcactatacattgtatgtatcaaaacatcactctgtaacccatgaacatgtacaactattatttgtcaattaaacaataaaattttaaaaacgcaagtggacactcactggggattctggaatgttctaagctttacagtgagcatacctaaggcaccgctcagaagattgtttatgtaacaattccagaactataagtacattaaatatgtgatgataaattgagtgatgagaggctacacatttttaactgtaggcatggagatttgctcttgaataattcagcttgagatctcctctctcctctcaacagtagcaatttgctrttgacaaactccctggacatgcattatacccttgactcctacaacattcctaaaaatgaagatggcaagtactatgaaatccatgttacaaatgagtaagtggagatttggtgaaattaagggacttgctcccagtc

SEQ ID NO: 484349 - DNA, 548 bp, Homo sapiens
tttataaattacccagtctcagctatttgtttatagcagtacaagaaaggactaatacaaactcgacaacttttcagtctggcatatgtaaactgcagaatttcctaatatactctgcatgaatgcagtaagtagaggagggcaggggctgctgttgagcccactggtaggagcttctgttcctctctcaggttaccccacatgccaggtcacacttgatgtgacatgcaggctgagtgaggtcactagcatccacccacacattaaatattagtaaagcataatttattttwttattattattattataaaatataagtagaatgtccaaaattgtcttcctctatcctggtaatcacttgaaacatcctcatgtatcaccactatctagatgggaccttcagtggataactggtgacagtgctcacagtgtcaggacagacagatgcaggacatccaaccctcaccctctgggtccataccggggtccatgaggccaggctgagatacatagtacaaagcattctacactcactctgcgtgagttc

SEQ ID NO: 484350 - DNA, 527 bp, Homo sapiens
ttcccagtttctagaggccacctgcattccttggcttggaccctttgtctatcttcagagtcagcagcaaaggggtgagtccctctcacacttgggatgtgtcctgccgctgcttctattgctgcatctccctgaccgacacctctttgtatctcttccattctttctttttctattgaagtgaaattcacataacataaaattaaccactgtaaagtgaacaattcagggacatttactacatccacgatgttgtgyaaatcacattttcatcacttctaagtaaaacccctgacccattaagcaataaaaccaccattccctcctctcccaagcccgtagcagccaccaatctactttctgattctatggatttacctgttctacagatttcatatcaatgggattacacaatgtgtggtcttctatgtctggtttctttcacttagcgtattgtttgagaggttcatccgggccatggtgcgtatcagtacttcagacctttttgtggctgaatcattttccat

SEQ ID NO: 484351 - DNA, 592 bp, Homo sapiens
tgcttcataaagtgaataagtgctcactgtgcaaagctgtgtagccagaggtcttaggttgggagcatagagttgatatgacacaaatgtggatcatgtttggagtgcattgaatactcctatgtaattgcatcgcaagatgtaggggtgactggcagtaagtgagcctgaaaatgcgggtgacaatcaggctgtggaaggctttgaatgccataccaaccctggtcagacattacttaatttcctaattccagccactggctgggaggatactactgtcttcttataaacaatatctcctctagggcacccctttaccttatatctagttgattcttatttgttatasggcatagttcccaacgatagatgtacataataaactcctaggaacttgaggaaaaacaatagtaataatgatagcttggttccatcccagaccaattatattcaaatattttttctagatcccaggcatcagtgttctttttaaaagctctctaggtaattacaaggtgcagccagggatgagaagtaatgctttatattcactttcacatgtccatggtggaaatggccaccaactagtctc

SEQ ID NO: 484352 - DNA, 668 bp, Homo sapiens
aactaatgttatttgttatatgtgcgcaaggcagcagttttgactaaccaattttattaatgaggaaaacagaggcttttaaaagttaaatacagtcatcagtcacttaataaagtgatatattctgaggactctgtcattgggtgatttttgtcgtcgttcattcatagagtgtgcttacacaaacctagatggtatagcttactatacacctaggctataagctatcgcctttcgctgtgagactacaaacctgtatagcatgttactgtactgaatactgtaggcartgtaacacagtggtatttttgtatctaaacatagaaaagatacagtaaaaatgtggtacaaaagattaaaaatggcacacctgcatagtgcacttaccatgaatggagcttacaggactggaagtcactctgggtgagtcagtgagtgtgtggcgagtgaatatgaaggcctgagacattagtgtacactcctgtagactttataaataatgtacacttaggctatactgaatttattttaaaatgcattttattcagtaataaattaaccttagtttactttaacttttttttatgaacttaaaaaggcctgtaaaacaaagaatggtttgggacaagtctgtctaaaagactttttcacttttttttttgtaataa

SEQ ID NO: 484353 - DNA, 535 bp, Homo sapiens
ctaggtgtgggagcataaccttgagaaagtctttttgtttcattccacaggggacacttcaaaccaaagcagtgggccacattcccccgtcgcagcaggtacgaggggaagtgccgaggttcaagactgcagcgagcctggtgaccataaaggtagagtctttcgagatttagaatgagtgttctaaattcaggggcattcyggagaaggttccaaagctggaagtgatcacctcttatataagaaccttctgtccaccactccttcttttttctataggtgacagccaattaaatttaaggccaaccttgcagaggactctgaagggtgatttcatagaagggaatagaatagatggggataagctccgttcctcacagttgcccctccacctccttccatgttccctggaacactggtctagttgcagctctccttaccaatggcttcgccttaacctgtcctcttgaggcagactctgacatgtttgtatcagatttaccttaagactgaggaaagtttagtgtcttgggaa

SEQ ID NO: 484354 - DNA, 603 bp, Homo sapiens
tgtgtggagtaacaattgtgaactttactggcttgcacatgtgagtcatcagtaaactaaattaaatgttgcttaactgaacttgagagctggaggttgtaagggaagwctgctaagattttattaaagtttgaatttagtagagtggttccatctttgcatttcgcaagggacttcaagttatacaaaaatcaaatcaactgttgtccagatgattaggttttttggcttctccataacaatagtgattgccaggtaatcaatgggaatcactgttcagttgacctagtttggtgtgtaaacagccaaaaaaaatccagacatcctctaaaatcaactgggcccaattagtttggccaggcagcaatcccatcagctactcagtagtcttccttgcataagatcaaaatccctgaaatgattacagtgtaattggagcatcttgataggttctctgagcgttactacttagtgctatgaccttgagcaagagtcttgaatactcggcctcagttttatgtctttgtggactggtgacatggctcacagggttgttgtattaagtaattcattttaaaacatttagcatggtatgtacaacat

SEQ ID NO: 484355 - DNA, 547 bp, Homo sapiens
tagagtaagaattcactcattgccgtgaggacagcaccaagccattcatgaggaatttgccccatgacccaaacacctcccactgggcccatttccaacattagaggtcacatttcaacatgagatttggaggaaacacacatccaaaccatatcatcctcctggtaacccttggtgtctgtatgtgtttcccactggatttagtagctctatttactctgtgaagtgatcctcaagatcttagggcccccctatcagcagacagcgctctggctacggtgtgtcagaccgagacccatacaaccagtttggtgttctcaaaatacccgttcacgartgctaaacctgaaaaataagttaccttggaaactaggtaacaccaattttgatctgtaggagcagtgactatgaaataatggaactgagttcctttggcttataatagctcctgaaggtgagcccagaagagctccagcagtggatgcccctgaggaacaactgaggccctccctcacaagcacccccctgattttccgtgtccttgctc

SEQ ID NO: 484356 - DNA, 274 bp, Homo sapiens
taggtgatctcagccaaattgtcaacaaagctyataggagatatattttttaaccatatggttttctctgggttttcacatgctaatttcaccctgatctagggagcagaggcatttttcataattgatttttgaaaggcatcaaatgtaaacttaaataagtttagaggccttggacaccagtttctaccattataattgagccattgttttccactcagaactgggtaatgactatggtttgctgtcatagctatcaatttatgaagacaca

SEQ ID NO: 484357 - DNA, 607 bp, Homo sapiens
ggagaaagaggaagaagaaaagaagaagtargaggaagagcgggaggaggaaaggtggaggtggcgaggaaaaggaagtgcaggaggaacagagggaaaaaatgaaacattttgaaaaaggggaagcaggagagaaaaggaggaaaagtctagggaaagcagtcactggacagagattattttaaattattctattcaaaggctgaaaagccatcagagacgtcttatctctggtaagccctcaagatgtcctcagaattaatgccaaattggcaaagaacttttcaattttacttctatttgcaatgaagctgttccattgtcgagtgcattccgattatgattgcaaatgcagagaaaatgagtggaccagtgcacagtgcaatttcattgtccctgtgatatattaaggatggtagcttgcaatacaatagaaaaaagaaaactacacacagtaacccagcacatgcagagtgttcattaaagcagcaaaggaacagatttgttaaattataattgtttttatatttacaatttcaccaataaattaaagtttagtacactaattagattgtatattacggtacctgcacgtgctattttcatt

SEQ ID NO: 484358 - DNA, 607 bp, Homo sapiens
ggagaaagaggaagaagaaaagaagaagtaagaggaagagcgggaggaggaaaggtggaggtggcgaggaaaaggaagtgcaggaggaacagagggaaaaaatgaaacattttgaaaaaggggaagcaggagagaaaaggaggaaaagtctagggaaagcagtcactggacagagattattttaaattattctattcaaaggctgaaaagccatcagagacgtcttatctctggtaagccctcaagatgtcctcagaattaatgccaaattggcaaagaacttttcaattttacttctatttgcaatgaagctgttccattgtcgagtgcattccgattatgattgcaaatgcagagaaaatgagtggaccagtgcacagtgcaatttcattgtccctgtgatatattaaggatggtagcttgcaatacaatagaaaaaaraaaactacacacagtaacccagcacatgcagagtgttcattaaagcagcaaaggaacagatttgttaaattataattgtttttatatttacaatttcaccaataaattaaagtttagtacactaattagattgtatattacggtacctgcacgtgctattttcatt

SEQ ID NO: 484359 - DNA, 583 bp, Homo sapiens
ttcagaaacagaagtgtttctttctacttggaattgtttttacaataaatttgatttgtctgccacccacctggcttgctttaaagttcaatctcggttagggattcgtctacctgctcccttgggctcccgtgaaaatcctaggcttatgcaacctaatacctccagcagtgtgtttccggaaaccttctgaaacccaaagaaayggttccccgggacaaggaagccctcaggacataagcagggcaatgcttaccggagactggaggagagggctgcacttttcttcccattctcacggagtacagaggacaggggagtttgcagactgtggcagagacacctcactgctcattagacctggacacgagactgagtttccggccgtcctggctggtgttggccactggatgacagtggaagtgaggccgggcctcctggcctagcacagtcagcctgatatgtgctttcatgcttcttccacttccactgccgaatgcaaaggcgctgagaccctcaaggatgaaggacccgcaagatgggagaagccttggtcatcctgagcaaagacttccacccagca

SEQ ID NO: 484360 - DNA, 583 bp, Homo sapiens
ttcagaaacagaagtgtttctttctacttggaattgtttttacaataaatttgatttgtctgccacccacctggcttgctttaaagttcaatctcggttagggattcgtctacctgctcccttgggctcccgtgaaaatcctaggcttatgcaacctaatacctccagcagtgtgtttccggaaaccttctgaaacccaaagaaatggttccccgggacaaggaagccctcaggacataagcagggcaatgcttaccggagactggaggagagggctgcacttttcttcccattctcacggagtacagaggacaggggagtttgcagactgtggcagagacacctcactgctcattagacctggacacgagactgagtttccggccgtcctggctggtgttggccactggatgacagtggaagtgaggccgggcctcctggcctagcacagtcagcctgrtatgtgctttcatgcttcttccacttccactgccgaatgcaaaggcgctgagaccctcaaggatgaaggacccgcaagatgggagaagccttggtcatcctgagcaaagacttccacccagca

SEQ ID NO: 484361 - DNA, 665 bp, Homo sapiens
aaataaacaaaaaaaattagatagtatattacccatgagatgagaactagatgcaggtgagcactaaaaatctctgcyattgtagatctatagaaaatgtaaagaatcggccaggcatgatggctcatgcctataatcctagcactttgagaggccaaggtgggtggatcacctgaggtcaggagttccagaccagcctggtcaacatggtgaaacgctgtttctactaaaaatacaaaaattagccaggtatggtggcttgcacctgtaatcccaactactcaggaggctgaggcaagagaatctgcttgaacctgggagtcggttgttgcagtgagccgagattgtgtcattgcactccagcctgggcaacaagagagaaagtccatctcaaaaaaaaaaaaaaaaaaagaaaaaagaaaaagaaaaagaggacagtaggaaaaataataataataaccaaagttaatattatcaaaaaaacaaaaatagaaaaagtaagtttaaatgtttataaattatttattccttattaagaataataaaacagataaattccttttgtctgagttggaaaaaaagagcaaaaggagaaagagattaggaatagcaaaggaaacatgtaagtcctagaatagattaatagaattgtaagaaaacacagc

SEQ ID NO: 484362 - DNA, 665 bp, Homo sapiens
aaataaacaaaaaaaattagatagtatattacccatgagatgagaactagatgcaggtgagcactaaaaatctctgctattgtagatctatagaaaatgtaaagaatcggccaggcatgatggctcatgcctataatcctagcactttgagaggccaaggtgggtggatcacctgaggtcaggagttccagaccagcctggtcaacatggtgaaacgctgtttctactaaaaatacaaaaattagccaggtatggtggcttgcacctgtaatcccaactactcaggaggctgaggcaagagaatctgcttgaacctgggagtcggttgttgcagtgagccgagattgtgtcattgcactccagcctgggcaacaagagagaaagtccatctcaaaaaaaaaaaaaaaaaaagaaaaaagaaaaagaaaaagargacagtaggaaaaataataataataaccaaagttaatattatcaaaaaaacaaaaatagaaaaagtaagtttaaatgtttataaattatttattccttattaagaataataaaacagataaattccttttgtctgagttggaaaaaaagagcaaaaggagaaagagattaggaatagcaaaggaaacatgtaagtcctagaatagattaatagaattgtaagaaaacacagc

SEQ ID NO: 484363 - DNA, 655 bp, Homo sapiens
gtaaaatgatagaaaacaagttgcccgtcttcaaaataagttgcccctgggatgatgatttacttcgtgtgtggtttaaaatggcaggggagggtattgattgttaattacagtcactggggcygtcctgtgttggtgcaaaccttttcaaatccaaactccatcattcaataaggatgaagattttaatttaaaaaattgcaaatattattttaaaacacttttattcttcagtgccaagaaataaaaaataagaaaatacttaaagaatgtttaacgatgcattcaactttcaacagccactgttctgcaaacatttcctgctcctttttatttgttcacgtttttgcttccttgaaaaattctcttaccattcctgtttgcttgtccaaagtcatacgaagccataggagcacttctcaagcccttctcctggctgtggttgctccagggtctatgaccctcccccacaggtgggccatctgtcctgtggaccccatcacacgtccctgtggcactgagcacattcttcccatagcgcaggtttgtcagctttgctgaagaataagctgggcaaggttgactatttcaggcacatgtttaaaatgtagtaatttctgaatttgccttgctgcttcccggacagtgtgagctg

SEQ ID NO: 484364 - DNA, 556 bp, Homo sapiens
ggcatgagccaccccacccagggtgatggagacttctctgtacctacgtgtgttctccatagaaacagttcttttttaaggggagtaaatactgagtacacaggaatcatttggaggtttgaagccagaattgtccacttggagttaatcatattttccctctcagcccccataaatagttgaggttacataagtgaagtgcagaatgattagggtttactgagtaaaaggcatattacaaagctttggcatgaaacacactctgtgctagcactctatactttttyccacacaaatctggggaaagggatgtctggttccttgttttgtttgtgcatgagctcttttctaggaattctgtggaattcctattctattagaagcccaagttcaaagctatgacacacaacaagttgaattctttacatatttaagatcaagtataacaccatatctacacaattatattgttgagttgggatatttcaattctcagaatgatctgataaaatcagccttgtggtttagatgcttgaggacccattctttaagaaga

SEQ ID NO: 484365 - DNA, 556 bp, Homo sapiens
ggcatgagccaccccacccagggtgatggagacttctctgtacctacgtgtgttctccatagaaacagttcttttttaaggggagtaaatactgagtacacaggaatcatttggaggtttgaagccagaattgtccacttggagttaatcatattttccctctcagcccccataaatagttgaggttacataagtgaagtgcagaatgattagggtttactgagtaaaaggcatattacaaagctttggcatgaaacacactctgtgctagcactctatacttttttccacacaaatctggggaaarggatgtctggttccttgttttgtttgtgcatgagctcttttctaggaattctgtggaattcctattctattagaagcccaagttcaaagctatgacacacaacaagttgaattctttacatatttaagatcaagtataacaccatatctacacaattatattgttgagttgggatatttcaattctcagaatgatctgataaaatcagccttgtggtttagatgcttgaggacccattctttaagaaga

SEQ ID NO: 484366 - DNA, 522 bp, Homo sapiens
gtcaccaaagagatggttgatagagattycaaaggtaaatatgcaagaagctagtgattttggaagctggtgagtttagcaagatacaataattatattgaggtcgaagaaaagctgccagaaacaccatgatcttccagcagcaagcaagtgttctgaaacacaaattgtgcttaaagtgaaatgttttcttgtaaaacctgtcaagaattatcaaagtggggcaaggttcaaatttaacacttagtgacattatagtttttacttagtttggaaaacaagaattagttaaaacttctttaagattttgacacaagggccaggctcaatgactcacgcctataatcccagcagtttgggaggctgagggtggtggatcgcttgaggtcaggagtttaagaccagcctggccaacatggtgaaaccccatctttactaaaaatatgaaaattagctgggcatgatggtaggcacctgtaatttcagctacttggaaggctgaggaaggagaatcgcttgaac

SEQ ID NO: 484367 - DNA, 581 bp, Homo sapiens
agtgtcaccaaagagatggttgatagagatttcaaaggtaaatatgcaagaagctagtgattttggaagctggtgagtttagcaagatacaataattatattgaggtcgaagaaaagctgccagaaacaccatgatcttccagcagcaagcaagtgttctgaaacacaaattgtgcttaaagtgaaatgttttcttgtaaaacctgtcaagaattatcaaagtggggcaaggttcaaatttaacacttagtgacattatagtttttacttagtttggaaaacaagaattagttaaaacttctttaagattttgacacaagggccaggctcaatgactcacgcctataatcccagcagtttgggaggctgagggtggtggatcgcttgaggtcaggagtttaagaycagcctggccaacatggtgaaaccccatctttactaaaaatatgaaaattagctgggcatgatggtaggcacctgtaatttcagctacttggaaggctgaggaaggagaatcgcttgaactctggaggtagagattgcagtgagctgagatggcaccactgcactccagcctgggc

SEQ ID NO: 484368 - DNA, 510 bp, Homo sapiens
gctccatttgaagtggtatgaaaaccaacatgttccatgaacttacccttgcgtcagaatctcctggagtaaaagctattcccaagttagaagcaaggcactattggaagctctgttaaccacttcagggccctgtgatgaacaaaagagtgagctggatgcatggcttctggtgcctgccaccggtgcaccccgttaagactgttctattgttttcccttttactctgggccatgcacagagtcagtaataaaatggagcattctcagtaaaacacgtcctacttcagggatgagccaagtgcaggctttcccttayttctactggccttgtagctcaggtctaggagcaacaagaaacctgctttacatagcaataattagcaagaattgctgccacatcttcactttcttgtctcatttgagtcttggatatgaaacccttccgggaaaagtttcagaagatgagaggaaattgctcctcttcttgccgcatcccgctccccagcct

SEQ ID NO: 484369 - DNA, 573 bp, Homo sapiens
tccatgtgttctcgtcattcagctcctatttataagtgagaatgaacatgtggtgtttggttttcttttcctgcattatttgctgagcataatggcttccaaaaggttacttttgaaatacctgcttaaacatcttcagaggtaaaagcaggaaagcaagcaatggagtatgagttttgagtgtgaatggaaaaccaaacatgagtgacctgttttcactgttgagaaactgagagcctttcctaagatcatccaggtgcagaatcacatagcttcctgtcctcttctaatctagatcgtattctttttgaataggggtaaatgagaggaatggaagcatkgtatgcagagaactgatatgtgtgtctgaaaatgtggaaagaacaagtatcaggtaagagactccatttgtgcctcagctcagccatttagttgctctgagatctttggcgaatccacactcttgtacctccttcctggtttcttctcttttctctctccctttctaatgatacgagagacttatgccagacacctccaacattcctggtggtccctcttcagtggtggcca

SEQ ID NO: 484370 - DNA, 373 bp, Homo sapiens
atgtggcccgtttttatcacctatggtgagcctttacaatttcccagttagatgggatagagtccaatttggtttggtgaggatatgttccagtagataaggacgaccccacatactccttccaggcaagttataaggtaagtacggccagccatgagttccacaagcccataatcatccccaaggagaaggttaggtacccatttttggcaaattatgttgttatcccatccacatctgctctgttaaaagaagggtmtgattgcattgttgaggtggcaaccatcccacatcacgagttccagtctggtggtgactattattgcgcctttcgaaacatagaggcactttgcctgacacctgtacttgaaca

SEQ ID NO: 484371 - DNA, 514 bp, Homo sapiens
tagtgggcatgctccagtcggatttatatcacacatcaacaatcaatagtatatatgttcacagctgccacagcaagatacaagaaccaaccagcgggagtcctgttaaaaggatgttacattgacagacaagacttttttttcctggagaaatgtagttaactaagtgggaaaggagatttctttgaaattatgccagggtwccaaagcacttttggaagcggtggctttctgtacctaaattagcctcaagaaaagtcatcaaaggaggaaagggaaggataagcaagaagcttccttggtcataaacattcattttctgaagtcctcccaaacaaagtttcagctgatgcttataattgtatgattgtgtgtatgtgtgtgtgtgtatatgtatatgtaaaatatatacacatatatgtgtaatatgtaatacacacatatacatgtacacgtaaaattgcatccatggttaccaatcaccactgccgtaatcctggtgcacattttccct

SEQ ID NO: 484372 - DNA, 514 bp, Homo sapiens
tagtgggcatgctccagtcggatttatatcacacatcaacaatcaatagtatatatgttcacagctgccacagcaagatacaagaaccaaccagcgggagtcctgttaaaaggatgttacattgacagacaagacttttttttcctggagaaatgtagttaactaagtgggaaaggagatttctttgaaattatgccagggttccaaagcacttttggaagcggtggctttctgtacctaaattagcctcaagaaaagtcatcaaaggaggaaagggaaggataagcaagaagcttccttggtcataaacattcattttctgaagtcctcccaaacaaagtttcagctgatgcttataattgtatgattgtgtgtatgtgtgtgtgtgtatatrtatatgtaaaatatatacacatatatgtgtaatatgtaatacacacatatacatgtacacgtaaaattgcatccatggttaccaatcaccactgccgtaatcctggtgcacattttccct

SEQ ID NO: 484373 - DNA, 675 bp, Homo sapiens
ccattgcctacactgagctctaatggccctgttttctggctccagtccaggcccttccacagccctacattactgaaattaggttgagtggatttccgagtaaaacattacctcttgggacctgcccagctctccccagccttgtcaacattgattaaatagaagctgctatcatcctggggccatgcccacaattactctaccaatcaccaatgagctgggtgtttgcttcctctctttttattttcatctttcttgaatattaagcatcatcacctcaaaagctcaaaggaaagtaataataataataataaaaatctttggcagctaactcacatatggcccttttgttgctcacacagtctttttctttagctatataccagatgtccatctggagcctggatcatggctttcagtggtcactgtgatccacattttgctygtttcattaccatgtttcacattttaagttcctttcaaaacactgagccagtatatttcattttgatgtgaggagaattatgcaagtaacatctctgcccccatttcttccttactttccaagcacttaaaagagagaataacctttttgctaataacactatacactaaaggatttcaaagagtaaccaagaagaaaaatcagaggcagcatgatggggtctcagtgat

SEQ ID NO: 484374 - DNA, 640 bp, Homo sapiens
ctgggtagtaaatcttgcatccaataggcaagttacagagaggatggcaattctscaggcttaagacactccatccaacttcaagaaaaattcccttgtttaatcataatgctggaatcctatacttgaaaaggaccctaagacttctttttaataattgattccttaagtttcaggaaaacggtaagatgcaatgagatttttcagctttttttgtgagaaagttctcatttccaggaagtactgaagttatttggggacaggcatatgatgaaggaaaaatcctttgagaagactgcgctgatggggttcttctttctacttatgcaaaacactctcgtttctgggcgttctcaaatagggaatcccagcagactttgaagaataaggaatcagaatggggtaggaagtggctgttctcttgaaagttttctaggcaaagagacgtcatacttcttttggaatcttgttcaaacatgattgaagttagcaccgacctccaccctccacgaaggattttctacaattcctcctgctgcattttggaggaagttaataattttcaaaaaattatacctcgtgtatttgatgttaattatttaggtccatacttaagaggtgaggaaaaattaaacaggct

SEQ ID NO: 484375 - DNA, 640 bp, Homo sapiens
ctgggtagtaaatcttgcatccaataggcaagttacagagaggatggcaattctccaggcttaagacactccatccaacttcaagaaaaattcccttgtttaatcataatgctggaatcctatacttgaaaaggaccctaagacttctttttaataattgattccttaagtttcaggaaaacggtaagatgcaatgagatttttcagctttttttgtgagaaagttctcatttccaggaagtactgaagttatttggggacaggcataygatgaaggaaaaatcctttgagaagactgcgctgatggggttcttctttctacttatgcaaaacactctcgtttctgggcgttctcaaatagggaatcccagcagactttgaagaataaggaatcagaatggggtaggaagtggctgttctcttgaaagttttctaggcaaagagacgtcatacttcttttggaatcttgttcaaacatgattgaagttagcaccgacctccaccctccacgaaggattttctacaattcctcctgctgcattttggaggaagttaataattttcaaaaaattatacctcgtgtatttgatgttaattatttaggtccatacttaagaggtgaggaaaaattaaacaggct

SEQ ID NO: 484376 - DNA, 549 bp, Homo sapiens
taagaggtgaggaaaaattaaacaggctaatcatgtttgttggtaattttttattgaatctactttcttagcttttccttctcagtttttcatattcattgaatgattgcttaggcattgtaccggccttttcaaaagtttgggttttttatgttttggtatttctattatacccattattttcaacaatgtcaccctagatctcatctaatgagatcaatcataaaagtgttactgtagtaattcctgcctgccagactttgagaaagttaaccaactatctttcagttatactgatttccatttaaaaattcaataaatgattttaaatgttttaatatatgatgagttaatattccttattataaagttggtatttccaatatttacctttaaaagcaaaagcagatctaggtttgccaaatcccatgatctgatatttgattaaatgatttaattatctgacaccagggttaaaatamagaaactaaagccagacataattttagctctgtaagaatgacaccaatagtgactacagctgcctaa

SEQ ID NO: 484377 - DNA, 651 bp, Homo sapiens
gccatgtttagaagttactcacaccagtcctatctgcgactacacaataggactgtaatatgaatcaattttctgttgaccttataagtaatacacaaaatctactatatcatcaatatgggtgcagttatccatactcattgtgaagatcagcttacagtaaatgagatcgattggcattgactcttttrttgctgtccacatgtagacaataagtagctgagaaatttctgaaatttgcatttttcaaactgtacttcaaggctcagaaatgatctacctagagggtagggatagatgcaaaaaaaaaaaaaagaggggggatttcaggacatcttcagtcatctccactttcccctatcattctcaaccaaagcttctctgctttggggtttagtgtatatattttaaactcatttgagcaaatagtgcctaggctaacaattttgaaaatgtctgccttcagcaattacttactcatctgattctacctctgtgaagacattgtttcacaatgttcctcctagcacgaaaagcatctttctcactaaaaattagtatgagggaaggaaatagtcaactcttcctctgcattaaatgttaaatggttgcaaatcaatctgaaccctgaaatcatctccgaaaaaccag

SEQ ID NO: 484378 - DNA, 682 bp, Homo sapiens
agctgagaagaactattgcctccatcaacatgtctatttttaaattttccttcttttcttatgaaagaacataataattttcaaactaagttaatcatgagaaagaggttttaagaaaattctaaaatttagtattttgggttccaagatttgagaattttatatctgatgattacttttaactcatgtttaaagttcctaagtatccattttattataacctcataaatataataaattatgcactttcctttaaaaaaagatgaaaagcctttcaatgcattaaaaagatacagctcagatcaaattttgaggacaatgtacaaattccttcagtagcaattgcttttctaattgaatacaagaataccaattctaaactttacttttcttccttaacctttagcaagtgtacaatgctcaacagaaatgactgcraatgttgaaagtacttctcatgccatcacatatatatgtacataactatgtggttttacaaatgtatatttatatgcttctacactgatacattatttggaagttgataattactattcttagtattttagaattatcaaaataaaattaatcaaattgctaaaatataatgatctggggtatgctggagctgactaacattggctgctgacagcaagatattagcacttcttcccaactgctt

SEQ ID NO: 484379 - DNA, 682 bp, Homo sapiens
agctgagaagaactattgcctccatcaacatgtctatttttaaattttccttcttttcttatgaaagaacataataattttcaaactaagttaatcatgagaaagaggttttaagaaaattctaaaatttagtattttgggttccaagatttgagaattttatatctgatgattacttttaactcatgtttaaagttcctaagtatccattttattataacctcataaatataataaattatgcactttcctttaaaaaaagatgaaaagcctttcaatgcattaaaaagatacagctcagatcaaattttgaggacaatgtacaaattccttcagtagcaattgcttttctaattgaatacaagaataccaattctaaactttacttttcttccttaacctttagcaagtgtacaatgctcaacagaaatgactgcaaatgttgaaagtacttctcatgscatcacatatatatgtacataactatgtggttttacaaatgtatatttatatgcttctacactgatacattatttggaagttgataattactattcttagtattttagaattatcaaaataaaattaatcaaattgctaaaatataatgatctggggtatgctggagctgactaacattggctgctgacagcaagatattagcacttcttcccaactgctt

SEQ ID NO: 484380 - DNA, 590 bp, Homo sapiens
tgccttttgattactcccaccatgtccagttgttgctgtcactacacagtttgggaggtagtggcctataatttcaggagaacctctctttctgaggatatttattatttttctttcttgtgtttcaaaacagggttgtgataggctccacaggtctgagaagtgcagctctaacaggtctataatggccatcctcagcctgggaacttctttatttttgtctttttaaagcaatatgattgcacttggtggttacagtcatccccacttctgaagagccaagtatcatatctaatgtgtaagaaaatagcccgaactttgcaagggcaaagcagagtagtggatttgcttgactaaagttaagaaggtgagtggggaagtcaggagagatgaggatgggaaaacagatggggcatgccaaattgtggtacaaaagaaattatacatgttttactttctgcaacyaaagggatctgcttcatggattacccaggtttccctggctcctacctggccatcgtacaatcaattagtacagaaacttgccatggacacaattatagacaattcttccatctcattgtgagccc

SEQ ID NO: 484381 - DNA, 625 bp, Homo sapiens
tggtaccaggacccactggggcaaccctggcccagctcaggccacctcaagcacrtagctaatcaccagagccagagccacctctgccttgcagaaggtgtaggtcaaaggaaaccgtcgtgatttaagcttttactctcagctttctttctagtgtctggcacccacacctaggaggcaatagaagcagaagtgtgtgccaccagcccagacatgagccgcctctaggaggaagcagcaagcccttgctgggcagggctgtgggctgagtccacgtcactcagcctccttggtggctgcttatctcaaactggccgtgaaggagaaattgttggttaggggcccctgggaggctttcttttttgcaagcatgtgtttgttctcaagtttgtggtggttgctctaaatccagagtctagacagaaaaatgatatcaacaggtcctcagcgccctctcccagtttaaaaaagacctttgaagcacggcatcttggtaaaagagaatcagaaggtccgtgttttagtcctagctctgctcttactggctgtatgaccttgggttaagctcattccctctctggacttagagaggggaagcgacttactaagttcacccagcaagcta

SEQ ID NO: 484382 - DNA, 625 bp, Homo sapiens
tggtaccaggacccactggggcaaccctggcccagctcaggccacctcaagcacgtagctaatcaccagagccagagccacctctgccttgcagaaggtgtaggtcaaaggaaaccgtcgtgatttaagcttttactctcagctttctttctagtgtctggcacccacacctaggaggcaatagaagcagaagtgtgtgccaccagcccagacatgagccgcctctaggaggaagcagcaagcccttgctgggcagggctgtgggctgagtccacgtcactcagcctccttggtggctgcttatctcaaactggcmgtgaaggagaaattgttggttaggggcccctgggaggctttcttttttgcaagcatgtgtttgttctcaagtttgtggtggttgctctaaatccagagtctagacagaaaaatgatatcaacaggtcctcagcgccctctcccagtttaaaaaagacctttgaagcacggcatcttggtaaaagagaatcagaaggtccgtgttttagtcctagctctgctcttactggctgtatgaccttgggttaagctcattccctctctggacttagagaggggaagcgacttactaagttcacccagcaagcta

SEQ ID NO: 484383 - DNA, 531 bp, Homo sapiens
tgtcccatgggccgcattttgaatggcaagagtttaggtagaacagagtgccttcagccttggactcagttgtcttggtttccgtttctattccttcctctgatgcccttccagcccccatcttttctattcccttctccatgaggaacaagacaagagaaactagtcttgcactaaagcagtgacgtctagatcatatctcagaaaggtattcttccagtctgtgacatgttcatggagttgccaatcaccaaaaaagtgtgagtaagtaggggctgcttctggggagggcagacagccaagggtgtcttcacagaggagtaaatgaaaactcagctgaaggcaggggaatggatgacatgtttcttgagggagccctcccaacccaagattctgttatcctaagtcagatccttggctttgataagggaaaggaatttgtccttcctctgtctggtcaggagagkgaccagagcccgggctaggaactggtatctctctgtagaggactttggttacaagcaaagcagt

SEQ ID NO: 484384 - DNA, 414 bp, Homo sapiens
ctggtcagcggccaggcattggatgtgaccccaagcagcctgggcccagatgttgtcctcaactactgcgctacatcaacgctaagtcaggcccacgtaggatggcgtgccctgcccatgggcacagatcaaaaaacttcagaaggatcastgagctggaggccagcaccctctgctccggatgagcctgggggcctcactcagcgtggatgcctcaggcatgcaggaggcaccccaaatggctgccacagcattccccgcccactgcctccacagctcccttgggcctgcaaggcaggtgtttgacagagctgggctagaatgagttcatccagatgacgcccccatggctcccacaaaatggtcccggggcagccagacatggcccggtagagtagcccagccggcacagga

SEQ ID NO: 484385 - DNA, 536 bp, Homo sapiens
tgggcgagtccgtcaacccctctgtgcctyggtttcctcacatgcaaaatgggggtaggagtggcatctcccacgtcagggcctgagctgttgacacaaggtggtcaccccccaaccggaccattaccggagcatggggcagcactttccctccggctcccatcctaaatcagatcccctggtcttctgctggccaccaggtggtcccaaataaggaggaagcaggggggtctgaggttctcattgagggggtggtatggttcttcaccctggccacctgagctcctacatcttcctggagggtccacaggcctcgcagtcaatcatgaattcactaggcttaggatgaccaccctgtccccattttgaggtgaggcctaagccttcaagagcacttctccagtatctgggccactccagacctctgaggctcccattcaccctcatctgccttacgggtatttgtgaagactctgccctaagatacttctcaacttgggctgcctatgttcttttgggggacttgtaaaggtgga

SEQ ID NO: 484386 - DNA, 582 bp, Homo sapiens
gtggttttcccatgtcagagtgttctgggctgaatcatgctcccccaaatccatatgttgaagtcctaaccctcagtaccttaaaattgtggtggtatttggagatagagtcattgtagagatagggacactgcagatactaaattaagatgaggccattagggtgggcctaatccatgctatgattgacacccrtatacaaagaggaaatttgggcagagagacagatatgcatagtgggaagataatgtgaacagacactgggagaagatggccatctacaagcctccagaactgtgagagaatgaatttctgtcatttaagccactcagtctgtggtctttggatggcgtggctgagctgaggctctgcagggagccaggaggttgcaggggagagcagggaggggggtggcgggtgtctctgccccctggcccatacccactgtgtgctgggcaagtcccttctctcctgggtctcagtctccccatgtgcaccctgggattactgaatcagatggtccttgaaggcccttccagacctgttgtctcatgggtccatgagtctctcaggctcctattc

SEQ ID NO: 484387 - DNA, 491 bp, Homo sapiens
gacaaataacaacaacaacaaatactttgtgcagttgacggcctgcattctgcaatctccctgtttaatgggaggacagaagagccatctggaacacaatcctgaaagtgaaaagttatgagactttctgaagttttatatccggttcacaggtgatgaggatatctgagttactttaactctaaaacctttagtttcacattttggtttacttttagattcataaaaagaacacacttcgatctttgatcatacttattagcaagttgtgtgtgtgtattgtttgttgataaattttaagagttatctacacagaactctttgtgaaataatgcaaattcatcagttttgtcctgtgaatttttctatcatgttgtcaggttcacaattacaccaaaggtcatgttgargtcctgagggagcacgtagatgagcagaaagaacactcggggtggggcgtaggcaggtgaaaaatgattttattcagcagc

SEQ ID NO: 484388 - DNA, 499 bp, Homo sapiens
gctggagttgcagtagatttaagtacatggagaagaatgagactgattcctaggagaaacaccaataggtagaagacagagagtgattctccacacacctaaattaagttagttacactttgtattttgcaataatgtaattatagggagaattcagaaacatattaatacaacatctttatgtgacattaacacaaattcacccaacctgtaaaacatgtatcagtctacttgtaaatcagataacacatccctggatagcatagctttcagagtcattcaaaaagtgcctattgattttttccccttatttatgtaaaagttgctgtgaatatgtttcaatttaaaggccactctctttgttttttgacatattgaaaacattttcctacttatmgtatttgaacattttgacaataaattcttacttgacatagtataatttccataatgcattttaagctagccacagagatactaagatacagttacataataa

SEQ ID NO: 484389 - DNA, 591 bp, Homo sapiens
ctgtttcttaatgcttatttatatttgataaaggaaggatgttgagaggaaaatattaaacatgggtgtagttgataattataaagaaaatctcttgagggattttaatcatgaactcaagtgtaggttttttgtttattttagaaaggaatgaaatgactaaaatgagagagaagaaggttgagtgagaacagatgcaagtgaatgtgacaatgatagcttgatgccaatttccaggttttatgtaaatgtatgaggggtttcagatactcattccctgtactttcagttgaaagtcagctttctgtcacagttatataggtctataatttttgttttctatttgartataactatcaaagcaagacttcaaaaaatattctgtatctaatatccagtagaaggtataatacaaacaaatgctcagtaagtcttcaccaaaagaatcactgcaggcgattgctggtcatggtatatcatgtccatggagactgagctaagagtcaagagaacaaacagtgacaaaacacactagcatgtatatttggcatctgttcactgtctagaagtagataaagtggttgtaatgga

SEQ ID NO: 484390 - DNA, 519 bp, Homo sapiens
gacactaaagtatttcatttttttgtgtttagactttatataaatagctacttacaagccttgtggatttgcaatagtatttacaaagccgccattctgaaatagctaatctaacccatttgaattggaaatgtttcctaaaacaccaaaagcatacattgggtcatttgtgaaatctgctgatatatgtttttcattttaacatgcatatctaaatttctcaatgaatatacaattaatgttgctaacttttatgttgtgaagtgtagtatagtttctcaaataaaatattatgagtacaactaacaagatgtcatcaaagtttttatccaagattttatttaattttaygaaaatgaagattttatttaattttacaaaaaacaaatcctaacgggcttcttgagaacctggaaggttagaaaaagcctattttttgccattggatatagtaattggacaatgtatttaaaaagtagaaatatattacttttttactatggaaaaataaataaattt

SEQ ID NO: 484391 - DNA, 607 bp, Homo sapiens
ctgcaactgccaccggcgagtattcttgaggcaaatgggaaaagggttaaaacttgtatttttttaagcattttttttttaaggattggagcaaaatacactatgatagacagaattatgccacttcctccccagagttttttatgccttattcacctaaacctgtgaatacattgcattacaggaaaaaaaaagtttcccagataacaggaaccttataatagggagattagcctggatactccaggtgagcccaatctaagtacatcaacccttaaaacagagaactttctcttacctgtagcagaagagattcagcagtgaggaaagtcagatagaatcaagtcwtgatgatttaaagcaatactgctgatttgaagacaaagggggcaatgtggagatacttacgtgatagccagaaaacaaacaaaaactgggttttcaaccctataactcagggttccccaacccccagttcatggaccagtaccagtccatgaccagttaggaaccaagtggctgagaaggaagtgagcggagggcaagcaaatgtcacggctcgagctccacctcctgtcagatcagcagaagcattagattctcatag

SEQ ID NO: 484392 - DNA, 603 bp, Homo sapiens
tgtgaatatacaaaaactaccgaatagtatatttaaatagattaacttttgatatgttaattatacatcaataaagctgtttaaataaaaaacttaaagtaacatacttttcttcataaagactacttaaatcactagagttcactagccccactctctgttgttacagcatgttgtctatgttgctattctagtaatttttctactgaatctaaattatctatttatgtaactttctccttctctagactgtaagattataaaaaycgggcctttcatgttttcttctctgtacttttatctcaagcattgtacctgtaatacataagaataaaggactatattcctcgatatttcttgaaaagctaatgtttttactcacaattttctccatgaatttctattctggcaaaaatgctttggcagccttaataaaccaaccacaaagccacatgatactcagaattctagattattgcatttaatctttatgtgtgtgtgagactgtcctggaacatgtcatttgtttccaaaaagatggcaggcagttttatttaaaaaaaaacctgaagaaatgtaaaaataatcagcttaagtgaacaa

SEQ ID NO: 484393 - DNA, 534 bp, Homo sapiens
gccctaagatgaggttgccctagaaacactttgtgtctagtagccattcatcctctcggctggaattgagatggtagaggagtgaaacatgttttgagatggtagaaaggttgcacttagtgaccagggcctctttagagaaagggaactcaaatgttagtcttgttacttagtccttaggagatgtgtgktataaggtgcctaccattctgttggcagagtgattagatatttttctctggtgactttcctaataattgttctttgcttcctctctcaagctaatactgtgtcttgtgacattcaggcatcacttgtcttcctaccatctctgctatcttctggaattccatccctaaaagctcaaggaaactaacctatcatgtattacatcttttcagagctattactaataattgaaggacctgtgctcttgaacatctaaacaacagaaaaatttctaaaccgcatgttacctagtgctgaatgcattttcatattcaaggtatataaatgttctataattttctgtag

SEQ ID NO: 484394 - DNA, 631 bp, Homo sapiens
atttcaagcaggaaagtgacagagccagatgctatcaggaatccctcaatgagttccaggcattagaaaacagtaagcctcactccccagaaggatggrgactcctgcttccaacccatgccaggcagctaaccatatgatctttctgagatcttgctaattacaacagtgaaaacaatgaaagaaaaaggcccagatagtttacagttcccagagccctcaaaattaggagaaaaccactgaagcacagtcatacagtttcagggaaaggtagtctgttatgatatcctttaaaccttcctaacaggagtttagaaattttaaatgcaattatatacatgataataatgcataacttgaacatatatacaatattctcaaatatataacattctctctttaaaacactctgaattcaataacctatttaggaaatctaggatcctagagttttcctcaaattcttcttccactagaatggccaagatatccagaaaagcgttttgagaaatgctagttcttgaactgtcaacaggtgttactcaaaaggtatgcctaaacttatctgggtgaaatcaaattaaataccatatgatcctttatctccagacactcagagcttttaatatgc

SEQ ID NO: 484395 - DNA, 580 bp, Homo sapiens
acatactctaccatttgctgcctctatccaggctttgtaacctctttgctgttgacattttgggccagagaattctttcgtgttaagggctgtcctgtgcgttgtagggtgtctagcagcatccttgctgtctacccgatatctgccaacatcactgttctctctctgtacccctagttgtaggaaccaacaatgtctccagacactgctctcaatatcctctgggagtgggaatcatccctgttgaaactgtgttggctgtggcctcttctttatacccagtacatgtcgttagcacttctgtgttttaggaaggattgatcaaaaggccsaagctcaaaaagccaattagcattttttgatgggtgaactctattctttctcaggatgcctgaaattcacttacacatttaggattctagattgtagtatgttacaaaaaatttcaaggatagattatgttcataggtaagttgaaggaaaaaatggaagattcttataatggaacgtaaaaaaattcttttccaattggacgtgtgtattctgagaaaaacattagggtcaggtcattgtaaataga

SEQ ID NO: 484396 - DNA, 665 bp, Homo sapiens
cagtagtcatgagtcccttgagtgctctgccagaacaagggatgttgggcttggagtcccagcttttcccttcacagtcatttggcactcttacctgcatctgagcagcctctgttactgtcatacctaggcagrtgtgagatttatgaaaaatgatttgcctgggcaaagagtatattgcttctgcaatttggtaaggtattctgtagctacgtattttttgtgctcacatcgtgagggcatttatttctttgaatggacaagtggctgcacaaagacaaattgcacaatttggaagaaattcaggcatgttaggctctgagtctggaaaataccattaaaaggttatttataactggcttgtggctcattgacagacaggtggagatacatacagaatcgtggccacagccccagttcacactctttttggcctcagcactacacatcttaaggggtggagtgggcgcttggagggttacctgtcattttatcaagcccaaaagccttcctgttaagttccagagatctgactaaaggcagggtttttctgtagagattgaatagtggttgactgaccagggactgcagcaataacgatgacacccctgctggaaatacagactctcttttaccaaatcgcagttcctatatttagctttaat

SEQ ID NO: 484397 - DNA, 665 bp, Homo sapiens
cagtagtcatgagtcccttgagtgctctgccagaacaagggatgttgggcttggagtcccagcttttcccttcacagtcatttggcactcttacctgcatctgagcagcctctgttactgtcatacctaggcaggtgtgagatttatgaaaaatgatttgcctgggcaaagagtatattgcttctgcaatttggtaaggtattctgtagctacgtattttttgtgctcacatcgtgagggcatttatttctttgaatggacaagtggctgcacaaagacaaattgcacaatttggaagaaattcaggcatgttaggctctgagtctggaaaataccattaaaaggttatttataactggcttgtggctcattgacagacaggtggagatacatacagaatcgtggccacarccccagttcacactctttttggcctcagcactacacatcttaaggggtggagtgggcgcttggagggttacctgtcattttatcaagcccaaaagccttcctgttaagttccagagatctgactaaaggcagggtttttctgtagagattgaatagtggttgactgaccagggactgcagcaataacgatgacacccctgctggaaatacagactctcttttaccaaatcgcagttcctatatttagctttaat

SEQ ID NO: 484398 - DNA, 608 bp, Homo sapiens
ctctcctaactttcctgagccttcttgcccttccactccagtgcacatcagaagtgtctaacaaactttccctcaccattttcattttatgaggagttgtcaaatgtgttttcttttgtttagctctcagtgaaacctctattttagtagtcttccaattacatttttaatatggtaaaatatgcttatagataagtaataaattcagcataacacttctttctcttaagagaattgtagtatttgtagcaaatgctagatgacagactggaacacttgctttcaaattcctaccagaatatttaagttacaaaaaaagtacatgaaataattgtatttatgcttaccatcctgcaataactttttttaacaagttcatggattgaaagtagcttctaagacagagattaaagatagtttcaacccaagtctagatccaaagagatgttagagtaaaacatacacacataaatgtgataaaacacacasacacacaatacatacatacacaaatacacatgtatataaatgacagaggcaagacaggcttgaaaaacagaaatgttcacttagaaacctaccataaatttaaagttatgatcagtggc

SEQ ID NO: 484399 - DNA, 484 bp, Homo sapiens
caggctttgtctacagacctcatttcaggacccaggctgaaaaagcagctccagtttgagacatgcctttctcttttggcaacagaaaagagcaagagagttggtagaaacagacaatgactcttcaagcatctgctgagacttgctgaacatcatgtttgctcatatgcactggccaaagtaagtcaaacgcttcctattcctgctccaccatgaaggatttgctacaagtcttgggcaaaggacagagatacacaacttcttacaggagggagtttaaatattggagacgccagggtacacaactcattactttgggagggaatagactaacataaagggagaacattccacatttttagcacttttgtatttaaaygtagcttttaaaaaaaaacaaatgtttattaagcaccccttttgttccagacacttttctgggtgcttgttatgtactaatgaacaaaacagaaaaaaaaaattc

SEQ ID NO: 484400 - DNA, 484 bp, Homo sapiens
caggctttgtctacagacctcatttcaggacccaggctgaaaaagcagctccagtttgagacatgcctttctcttttggcaacagaaaagagcaagagagttggtagaaacagacaatgactcttcaagcatctgctgagacttgctgaacatcatgtttgctcatatgcactggccaaagtaagtcaaacgcttcctattcctgctccaccatgaaggatttgctacaagtcttgggcaaaggacagagatacacaacttcttacaggagggagtttaaatattggagacgccagggtacacaactcattactttgggagggaatagactaacataaagggagaacattccacatttttagcacttttgtatttaaacgtagcttttaaaaaaaaacaaatgtttattaagcaccccttttgttccagacacttttctgggtgcttgttatgtaytaatgaacaaaacagaaaaaaaaaattc

SEQ ID NO: 484401 - DNA, 610 bp, Homo sapiens
  misc_feature (1)...(610): n = A,T,C or G
tggtctcctgtgagcaggatttgcaggctgagggttaaaggcgctctaagccatggagcacctctgacccccactggctgctgtcrtgcattgcacctcagggatggccaaggcccctcagtacattgccctttcctaaacacaagtgaccagtttctcctttgctgtattgtcaggactttccaccaagtgccatctatttctcatccatctcctttgaaatattttcactctttatctacttctctgggctggtagatatttctaagtcattgtatagtgcatggattttattttcattnttcgtttgatcagaaaatgagtcgagaagatatgacattgttgcatatgtggttgattttcatttctctttttctcatccttttggtgacaaacacccaggagctgcttctttttgtataagaagtccttcagcacctatactggtcatcatctgaagcgcatactctcttgcggtccctttgatagagcaagagcaccacccacagcaacaaaacatgccctgagtctctggagggagcctggacagttaatgaaacccagggccaatggaccacaaagcccagtccgtaatcagagtgctgcatca

SEQ ID NO: 484402 - DNA, 466 bp, Homo sapiens
  misc_feature (1)...(466): n = A,T,C or G
tcacagctgacaattaacacttggggaatcagccagcacatagtaggtatcaaactcatttgtkggttcttaatagtgactgaccaagggtttcagatagtatattcaatggttttcttctttttatcttcaggaaaaaaaaaatcagaaaaccattgacacacacagagttccaggaaatgttgcaatatgatttttaaaannngtgtttcaannacgtttcccccaccaaaagatctgcttttcgaaaactnngtaaatctttggcaactctgaaatttgcccagcatgcctttcttttgggtctctgagtctcatttcttttaatctgagacttgatgatttagacatacatagaacagattatgcatcagtaactatgactcagactggaatgccagaaaaatactgcttctacttaagacttagatattaatggtcaattctacaaaatcatattcaatat

SEQ ID NO: 484403 - DNA, 576 bp, Homo sapiens
ctggtttttttgcttcagacagaggagtagatgatttctttgcgtctttagggagcttcttaatttcttttttgggttccttttcttcctttttcacttccttcttctcttccttcttaacttccttcttgacttcctttggcggtgtttctttcttaacctctttcttgggttcttttttctcttctttcttgatctcttttttgacttcttttttcacctcttccttttttggtttttcctccttcttgataggtgttttgtcctcctttttagccacttctttctttggcttttctttctcctctttcttgtcttcaggctttacctttgtttcctttttcaccgtcttctccttggcagctttgggtttgacatctgtggcttgcttctcagccacctcggctttcactggagatggctcttctttgctgggaacctccttttcagtcactgaaggtttggtctctgtttttaytggcttgtcttttttcaccattaccttttctttgctttcaactttgggtggcttttccacgtgattcacttttgtgacctcaggggtttcttcttttg

SEQ ID NO: 484404 - DNA, 637 bp, Homo sapiens
ctgaacttacgtaattccagggttattgtctcaggtcttagaacaggagggtatttggtgtagacagaagggkagaagaagagtctattttctcccttttcctgggtacaggcacatttagaacaagagcaaaatttgtctcatgaaccacatttgggattttaaaaaaactctcactgatctagtaactgcaacctttgggatttcagtataagtttgcccctgaacctgcagcattttggccattattttgctgcacaaaatgagtgacctaatttcctggtgaagcccaaatgaagggtttggataacaaacagattagatatttggcatctttacaaacacagttaaaagattgaatacacaacagaacttaaaacaaataaaacttgctcttgtctcctggggccccagaagttctcctccagacagacgtcagacttctcccaattagagcccatcagaaagccatcacatagcaattaaaacacaaacaaactcacccaaagaatctcccaaggaccatttgccagtaccatgctgtgtccagctccagaactgacaaggctgggtttgtaagctttgcaggcatcccaacactctctctctcttatataagttgctttatggagtcccc

SEQ ID NO: 484405 - DNA, 567 bp, Homo sapiens
gttgttggatatttttgtttcccataaaagcacatcatttcaaccctaaacctgtgtgcttctgttgtttcttgtgtgggagtggaaatgactgacatgggaagaggctgaaccctgcacattttttcaaaatgaaagcaccaaaacagcagccactcctttggcctcagtttctccttctgtaaaatgagaaagtttggtaaaggtaaacatcacttagattcttttctgtagaatgcagsatccctcaagatggtaaaggatgttccaacaacaaagaacttctgtgatcaaaaataataataataataataataataataataataatagttccttattactaagcaccagcaatgttccaagttctatgtgagcacttcacacccatcatctcatttaagcttctgaaacaacccaagaggtagccgttattaacatctccatctcctaaatgagtaaatagctttgaagagaaccataattactgctggtagagccaggagtgaattctagcctgtctgactcagagagaccagcttaccactcttattaggcaagatcctt

SEQ ID NO: 484406 - DNA, 531 bp, Homo sapiens
agaatgtttctcaaaacacactgaatattttctcacattgtggttacacaatgccatgagtaaactcaagaaaatctaacaggaattcttcagaattccctgatacctgtccattacaaagttcctgtcttgaaaatgtcttytcacagttggtttatctgaactaggacccaggcagtgcctacacatcacatttgcttgttagatccctaagaccctgcctctttctttgtactattgacttgtccatgtttgtgctactcaagtgagtgctgaaagacaccttggataggagagtccccttctctgctccttccatagtaaagacagagggaaactgcactttggaatcgtttgttattgttgttggagggtggtggtctgtattggttctccagttgagtttctctatcatgttaaaaaatctttgttatgagtcttgatataaaagaatggtagactcaccctcaagtaatgtgttcacaagcaggacacactggaaggagaccagggcttctctcctctaagggc

SEQ ID NO: 484407 - DNA, 510 bp, Homo sapiens
  misc_feature (1)...(510): n = A,T,C or G
ccattaagntgcacaaacatatgtgtagagggagtacyagaaggagaagagagagagagacagacagatgagcataaaaaatattcaaataatggctgaaacttgccaaatttattgaaaaacattaatctatacatccacgaagctcagtgaaatccaagtaagataaaggcaaggagatctacaaaagagacatcatggtaaaaatgctaataccaaagacaaggaaaaaatcttgaaggcagaagagaaaatcaggtcatcatgtataagagaaccccagtaacattaacagctgacttctcatcagtaacaatgaaagccagaaggccctccatgctgtatttatgatcaggcttgaactgcaggtagttgtgtcaggaacagatttttgcatgggtcactgggtgaccactgcaatccctgcagcagctggctagacaagacccccaattatccataaactgcaggaattattctgcaccgacttatataaagctgtgtgcgcct

SEQ ID NO: 484408 - DNA, 626 bp, Homo sapiens
tctccatatcaaagtcctgatcttaagcttgctgctgactgcctccttggtggcaggtgacctgcccaagccttagagcagaacctagatgccaaatcttcctgtttcaggccccagacatctccatggcacttaagctgcactattcagatatttcacagcaattgctgtgaatttgctgagcataaaaagctcagcatcaaagtcaagtgacttgagaatggaaacaaacgccgaaagtagaatttctcttccaacagggtatgtgttttcccatggggagagaaaaggattcataaagcacagtaacaaacatagaaaccacttatatcataatggcaatccttccagagggtttyctgattcacaaataccacacaagagaatcaaccatcaggtaaagccaatgtctatggacaccgccttctacagaacaagttaattagctctctgtccctgtctaccacatcatacatctaaagcaaatggcaccacccgcagatgaggataaattatgatactgatagcacctacttcttggatttgttataaataacctacaaataatacctagcataggggatccactcaataaatgctggctattttagtaattacaatttttt

SEQ ID NO: 484409 - DNA, 510 bp, Homo sapiens
actgggtggctggggagtggaggcaaaagtagtagaagcggtggcaatgggggctatggaggagcaatctctggctggaggcacaagcctcagtccygttatttcccagggagacagtcagccagttctgctttaataatgcactgatagaagctccagttcccttctttagtttagcaaacaccactgctactgcaatccagaacccaaaccaggctaaaatgtttcctttttccgaaagtcagcacaagttctgggaggagtaagctgagatttcaggttctaaaacaacctaaatctcagcatgtcttatgttctcagtgttccgtctctcaaatgcccaacggcccagaggaattttggtttatcaaaccttgaaataccccaacattcctcacagtactcttccatcctatgaactagctcacactgccccccaagactaccccagcaatgtcaccactggagaacacacaggctctggagtcaggcagccctgggttacaatct

SEQ ID NO: 484410 - DNA, 582 bp, Homo sapiens
tggaaagggcacgtttaagtgaaaggcgaaacaggcgtccatcaccaacatcacactgcattctgggagtctggaaatgagataatcagcacatgtcactaaaggtacagatggaaagttgagaattacacagggacaccaaaagacaactgaaatgtgaatacagatttttacagcctcagaagactttgctttaagtgttaattaaatctccatcaaaatactcagcaagacagaatggccctagtaatcatgaccaaacttttagccccggstcctacccatgggattaaaatgtctaagcaaaaaagaagaaaaaaaaagaaaaaaatatatttttcttgtttttggttaagtctgcttttcatcattacagatttgaaaggaaaaaaaatcagttatcggcagattaactgcttgattcaataattcatttaaattcctccagccttggcaaactaagaagtattgactttttcttgaatcataataaactagaaggtcaaatatctctgagcagtataaaagtgcagatcctaaggaggcgggaatctcttttatccactttgctaattgttcgca

SEQ ID NO: 484411 - DNA, 475 bp, Homo sapiens
ctgggccctggccacgtgcaggccagccagagccctggagcctgcaggtgggctgggacagggcttgcgaccgcaggggtggtgtgcgtttgcgctggcgtctgcacaggtgtgtgcgtgctgtgccatcacgctggtcaggcctgtacgccgtggagaggggcgctgtgtggggctcgctgcctgagccctgggtggaccgtggctgccccatgagttgtcggggacctccgctgccccttggacctcgcccgcggccctgggcaatgggtgtggtgacgtcctggggcccccatgagtcagctcgtcctcgtgcccgggcactggcctctccttcctgtgggcgcacagccccggttcctctgaaagcttcgtgggccgggacccgggatgagctggttaaaccctggccctgtgagcaggaggtgtggcttcggggsgcggccccgccctgggctcagacttgatcctgcac

SEQ ID NO: 484412 - DNA, 298 bp, Homo sapiens
ccagtggacagcagcaggcccctggagaccccggagacgaaggggcacaccgaggtggccagggccccactatccaggccagaaacaaagatgttatccttgacacctccttccacccactggatctgagccggtccatcaccarcccggtggctctgcctgtctcccatcagccaccgcccggtccctgcctccatcacctttcaccagagccacagcaacagcctccctccttgctgatcacctgctccaggacattctcccccagcagccaaacaatctttcacgacacaaatgc

SEQ ID NO: 484413 - DNA, 401 bp, Homo sapiens
ctccagcctgggcgacagagcaagactctgcctcaaaaaaaaaaaaagtaaagaaaagaaaatggaagaaggttactggagaatctcagagcgtggtcagggcaggcctttctaaggaagtgacagggacaggggcagaaagggctgcagacaccraaggggcccagcctggaagtgtgagtgtgaattggtgggaagccttgcttttcaggccttctctcatatgtgccttccccccagctttcgtgccttttccagctcaaaatgctcctccagcctgcaggcaaccgcagcccccgctccgtcccagggactctcatcttagctccactgttctgagataagcctgaggctcctgggccaatcctgcccccaggggctcattcctcaaattcaggaca

SEQ ID NO: 484414 - DNA, 401 bp, Homo sapiens
ctccagcctgggcgacagagcaagactctgcctcaaaaaaaaaaaaagtaaagaaaagaaaatggaagaaggttactggagaatctcagagcgtggtcagggcaggcctttctaaggaagtgacagggacaggggcagaaagggctgcagacaccaaaggggcccagcctggaagtgtgagtgtgaattggtgggaagccttgcttttcaggccttctctcayatgtgccttccccccagctttcgtgccttttccagctcaaaatgctcctccagcctgcaggcaaccgcagcccccgctccgtcccagggactctcatcttagctccactgttctgagataagcctgaggctcctgggccaatcctgcccccaggggctcattcctcaaattcaggaca

SEQ ID NO: 484415 - DNA, 401 bp, Homo sapiens
ctccagcctgggcgacagagcaagactctgcctcaaaaaaaaaaaaagtaaagaaaagaaaatggaagaaggttactggagaatctcagagcgtggtcagggcaggcctttctaaggaagtgacagggacaggggcagaaagggctgcagacaccaaaggggcccagcctggaagtgtgagtgtgaattggtgggaagccttgcttttcaggccttctctcatatgtgccttccccccagctttcgtgccttttccagctcaaaatgctcctccagcctgcaggcaaccgcagccccygctccgtcccagggactctcatcttagctccactgttctgagataagcctgaggctcctgggccaatcctgcccccaggggctcattcctcaaattcaggaca

SEQ ID NO: 484416 - DNA, 401 bp, Homo sapiens
ctccagcctgggcgacagagcaagactctgcctcaaaaaaaaaaaaagtaaagaaaagaaaatggaagaaggttactggagaatctcagagcgtggtcagggcaggcctttctaaggaagtgacagggacaggggcagaaagggctgcagacaccaaaggggcccagcctggaagtgtgagtgtgaattggtgggaagccttgcttttcaggccttctctcatatgtgccttccccccagctttcgtgccttttccagctcaaaatgctcctccagcctgcaggcaaccgcagcccccgckccgtcccagggactctcatcttagctccactgttctgagataagcctgaggctcctgggccaatcctgcccccaggggctcattcctcaaattcaggaca

SEQ ID NO: 484417 - DNA, 605 bp, Homo sapiens
tcccctacttttgcagacatgtaattgcacacactggagaaaaaccctatgaatgtaaggattctgsgaagacatttagtttttccatttattttcatagtcataaaagagctcactctggagggaacccctatgaatgtaaacaatctggaaaaccctttggatgcgcctcagaacttcaaatgcatgcaaggactcagtgtggagaaaccttacaaatgtaagaaatgtgaaaaagcatttaataacttatcttcctttcaaatacatgaaagaatgcacagaggagggaagtatcatgcctgtaagggttctgggaatacataccgtttttctggtttctatcatagacataaaatgcctcatgctggcgggaagttttatggatgtaagaaatgtgggaaagcctttattagtttctgtgcctttcgataccatcaaaggactcacactaaagagaaaccctatgcgtgtaaacaatgtgggaaagcctatatttcttacacttcttttcaatatcatcagttgaatcacactggagcgaaatgctatgagtgtaagcagtgtggcaaaggcttcgatttgcccaattccattcgatatca

SEQ ID NO: 484418 - DNA, 605 bp, Homo sapiens
tcccctacttttgcagacatgtaattgcacacactggagaaaaaccctatgaatgtaaggattctgcgaagacatttagtttttccatttattttcatagtcataaaagagctcactctggagggaacccctatgaatgtaaacaatctggaaaaccctttggatgcgcctcagaacttcaaatgcatgcaaggactcagtgtggagaaaccttacaaatgtaagaaatgtgaaaaagcatttaataacttatcttcctttcaaatacatgaaagaatgcacagaggagggaagtatcatgcctgtaagggttctgggaatacataccgtttttctggtttctatcatagacataaaatgcctcatgctggcgggaagttttatggatgtaagaaatgtgggaaagcctttattagtttctgtgcctttcgataccatcaaaggactcacactaaagagaaaccctatgcgtgtaaacaatgtgggaaagcctatatttcttacacttcttttcaatatcatcagttgaatcacactggagcgaaaygctatgagtgtaagcagtgtggcaaaggcttcgatttgcccaattccattcgatatca

SEQ ID NO: 484419 - DNA, 608 bp, Homo sapiens
agctcattgcaacctccacctcctgggttcaagagattgtcctgcctcagccttccaagtcgctgggactaaaggcgcccaccaccacgcctggctaattttttatatttttagtagagacagggtttcaccatgttggccaggctagtcccaaactcctgacctgaagtgacccgcccacctcagcctcccaaagtgctsggattacaggtgtgagccaccacacccaacctagaattcctttgctattaatcagtagcctcagtaaaagacaagttctctattaagaaactgttaagagtagatctgatattcctttacatgtcaaaaagaacattgacatcatccacactatcaagtactcattatgaaggcaacagaatgaaacaaacaatcataaagccattctctttcacctcctacatcaggaatactgaatgctttggggcttcatctgattaaagtttcttcttttccttctccagaatatcccttttttggggggggggggggtggacggagtctcactgtggtgcccaggctggagtgtagtggcacaatctcagctctctgcaaactccacctcagaggttcaagagattctcctg

SEQ ID NO: 484420 - DNA, 483 bp, Homo sapiens
tttcagtttggtgttgttacccaacatctaaattgttagagtcaccaagtttctccatagcattacaggcctaaaagtaaacaacgtgtctgatttgcgaaacatccccttacagcccaaatgttatttgtgggggggggggggggggcggggcgggaatgtaagctgtaaaaacaatagtgctgacaccaaacgtggcaactggatgtatgtggaattccatttcctgacacctcgctctgcgattttcatatgccctttgtgagagttccaacttaaacarctgcccccatgagatttcaaggctggaaaaagctaacaactccaaatctcagagactgtttacaatacacagttctcggttcctagggatgtgacatctctgagttctacccagagctgggcttggacagtctctcagagatgagttactgcccactggtgaggtgagagagagagaatttaaacagaggatttcaaatt

SEQ ID NO: 484421 - DNA, 667 bp, Homo sapiens
gtttgcttccacctggaattgcaacatttctttgcaactctttgctgttgaaggcgttctttttgttctgttktgttttgtttgtttgtttgtttgttttttggggacagaatctcgctctgtccaggctctgaccaggctggagtgcagtggcgcgatcttggctcactgcaacctctgcttcccgggttcaggcgattctcctgcctcagcctcccgagtagctgggattacaggcgcccgccaccacgcccggctaatttttttgtatttttagtagagacggggtttcaccgtgttagccaggatggtctcgatctcctgacctcgtgatccgcccacctcagcctcccaaagtgctgggattacaggcatgagccactgcacccagccaggcgttttatagaaggctggataatacgttcaggggaagtctctaaagcaagggtagtgtgtataaatccccgtcgcagaacattaaccttcagttgtgtgtacacacacacacacacacaccctatatagttgtaacctatatagactttcacacatcctaagttatttgcaagtctagatttaaattaagtctacatagcagggaatagaaaagtgagctgtacctggaaaaaacctttgaacacagcgttcttgatacaagatttaggat

SEQ ID NO: 484422 - DNA, 602 bp, Homo sapiens
tagggaaggcatcgagcttgaggaagaggccccattcatctccgtaccccaggccctggtacacagcaggcaggtagcaagtatgggagggagrtgggggaggaagaagggggaaaaaagggagttccttcctattttctctctagtccaaccaatgtgtcactcataggctcaagttctgtattcgttccctatacctgtctacctgttttcctttttccctttttttttttttaatggagtttcgctcttgttgtccaggctggagtgcaatggcgcgttctcagctcactgcaacctccgcctcctgggttcatgcaattctcctgcctcagcctccccagtagctgggattacaggcgtgcaccactatgcccagctaattttgtgtgtctgtgtgtgtgtatatatatatattttagatattatattatatatgtgttttttatatattatatatatatatatatactttttttttttttttttttactagagatgggtttcaccatggtgatcaggatggtctcgaactcctgacctcaagtgatccacccaccttggcctcccaaagtgctgggattacaggcgtaagccactgt

SEQ ID NO: 484423 - DNA, 602 bp, Homo sapiens
tagggaaggcatcgagcttgaggaagaggccccattcatctccgtaccccaggccctggtacacagcaggcaggtagcaagtatgggagggaggtgggggaggaagaagggggaaaaaagggagttccttcctattttctctctagtccaaccaatgtgtcactcataggctcaagttctgtattcgttccctatacctgtctacctgttttcctttttccctttttttttttttaatggagtttcgctcttgttgtccaggctggagtgcaatggcgcgttctcagctcactgcarcctccgcctcctgggttcatgcaattctcctgcctcagcctccccagtagctgggattacaggcgtgcaccactatgcccagctaattttgtgtgtctgtgtgtgtgtatatatatatattttagatattatattatatatgtgttttttatatattatatatatatatatatactttttttttttttttttttactagagatgggtttcaccatggtgatcaggatggtctcgaactcctgacctcaagtgatccacccaccttggcctcccaaagtgctgggattacaggcgtaagccactgt

SEQ ID NO: 484424 - DNA, 602 bp, Homo sapiens
tagggaaggcatcgagcttgaggaagaggccccattcatctccgtaccccaggccctggtacacagcaggcaggtagcaagtatgggagggaggtgggggaggaagaagggggaaaaaagggagttccttcctattttctctctagtccaaccaatgtgtcactcataggctcaagttctgtattcgttccctatacctgtctacctgttttcctttttccctttttttttttttaatggagtttcgctcttgttgtccaggctggagtgcaatggcgcgttctcagctcactgcaacctccgcctcctgggttcatgcaattctcctgcctcagcctccccagtagctgggattacaggcgtgcaccactatgcccasctaattttgtgtgtctgtgtgtgtgtatatatatatattttagatattatattatatatgtgttttttatatattatatatatatatatatactttttttttttttttttttactagagatgggtttcaccatggtgatcaggatggtctcgaactcctgacctcaagtgatccacccaccttggcctcccaaagtgctgggattacaggcgtaagccactgt

SEQ ID NO: 484425 - DNA, 496 bp, Homo sapiens
cctaagtaccacaaacatgtaaatgatttgccagcgttgtctagcagacattaagtagttttcagtagacattcaactttaccaacaatatgataatctttataaaaggtattttctttttacttccactaagttttcttgtaaaacaaccaataactstcatttactgagtgtgtaccttgtgcaggcacctaccagttctgctggattccagaggctgtgatttttttcttccctgctcaatgccaagtttgggaaaagcaggaaaatgtaacagttaagaatatgagctctagggccagcctttttaggtttctaccacagctcagccttctattatctgtggtaccttcagcgagtgcttcagcctctctcttctttgcctcccgatctgtaaaatgggaagaataatgatacggacacctcatggggtcgtgtgaagatgagtggaaagagtagagcatttccaaaagtgtcttgcacaaggcaactactc

SEQ ID NO: 484426 - DNA, 496 bp, Homo sapiens
cctaagtaccacaaacatgtaaatgatttgccagcgttgtctagcagacattaagtagttttcagtagacattcaactttaccaacaatatgataatctttataaaaggtattttctttttacttccactaagttttcttgtaaaacaaccaataactctcatttactgagtgtgtaccttgtgcaggcacctaccagttctgctggattccagaggctgtgatttttttcttccctgctcaatgccaagtttgggaaaagcaggaaaatgtaacagttaagaatatgagctctagggccagcctttttaggtttctaccacagctcagccttctattatctgtggtaccttcagygagtgcttcagcctctctcttctttgcctcccgatctgtaaaatgggaagaataatgatacggacacctcatggggtcgtgtgaagatgagtggaaagagtagagcatttccaaaagtgtcttgcacaaggcaactactc

SEQ ID NO: 484427 - DNA, 556 bp, Homo sapiens
agtggtcacagttctagagactggaagatccaacatcaaggttccagcagattcagtgtctggtgaggtccaggtctctkcttggaagatggtgcctttttgctgcatcctcacaaagaggaagggacagaaaggccaaaacacacacacacaacacacacaaacaggctgccttttataagggcactaaatcccattcatgagagcagagccctcatcacttaatcacctcctaaaggtccaaacttctaatacattgcatggggattaagattcaacatgaattttagagacacaaacattcaaaccatagcaccattcctgtagactctatatacaactctctgcctttgtccagatactttgtgaatacaattgagtacagcttaattcatgtctatcatgaggttccactaactgtcttgattagacctcctcagtctctcacattttctaaagtacctgctcacaaatgtttaatggcatccaatgtatggctttttactagattaaagccagccagaacatggagtccaagactggagcgttttaagtg

SEQ ID NO: 484428 - DNA, 581 bp, Homo sapiens
tgatttttttaaatgagaaaaagaaaatgtgcagagttcttatcggaaaggggtcacaatccacaccccaagagagggttcttggatttcgctcaagaaagaattcagggtgagtctacagagtaaagtaaaagcaagtttattaggaaacagaaggaataaaagaatggcttactctataggcagagcagccctgagggctgctggttgcccatttttatggttatttcttgattatatgctaaacaaggggtggattatttttgcctcccaattagacaatataaagtmattttctgatgtttccatgatgtctccatggcattttgtaaactgtcatggcactggtgggagtgtagcagtgaggaccaccaaaggtcactctcatcccatcttggttttggtgagttttatccaccttctttactgcaacctgttttatcacccagatctttataacctgtatcttgtgctgaactcttgtctcatcctgtgacttagaatgcctaaccatctgggagtgcagccccataggtctcagcctcattttacccagcccctattcgaaatggatttgccct

SEQ ID NO: 484429 - DNA, 656 bp, Homo sapiens
agctgggactctgggaacatttcatccatgatgtcataattgattttcctccttttgtcctccctctagactcccctctccttccccacaccatccctgtttctctgccgctataatgcttcactgcttcccctagacggttggggagaattcactctccatgacttgttttgtccctgttaatccccaatcaatatgtggcacccaatgtagtcgctgttcygggaaaaataactattattctgcctaggccaagagtcatcttaatttaaaaggataaattgctcactcaacttccagacttttcattcagaagggagacaagttcatgggttggcagagggaggcggcacttcctcataggctatgcatatagaaatactcttcttatcctttcaaaaactttgtttatattttttactgaaggttgtgccaatctctttgaacacattttctctagtcctctcaacagcctgagagtagttgattcatttataacttgaggaaactgaggcaaagagataacaagacttatccaaagtcatttaacttgtcagtagcagagctgggattgaatttagtgtgtcagactccaaagctcatgctgtatattgaagaaaacactcttccggaacttcacaccccagagtttcatt

SEQ ID NO: 484430 - DNA, 737 bp, Homo sapiens
tcatcaccattatcatatttatgtatctacctgtttttcattttgctggctgcctattttatatatgtcctatttcatatacttagccactcagttttcttgcctgattccttagcagggatgatattcaaaatatttaacaacccatattgctgagaccagcttggtcagggagaccctaacctatcagcrctagaggaattaaagacacacacacagaaatatagaggtgtgaagtgggaaatcaggggtctcacagccttcagagctgagagccccgaacagagatttacccactatttattaacagcaaaccagtcattatcattgtttctatagatgttaaattaactaaaagtatcccttaagggaaacgaagggatgggccgaattaattgcagcaggaacacacccttaagacagagatcactaatgctttgtttgtggcttaagaatgcctttaagcggttttctgccctgggcgggccaggtgttccttgccctcattcccttaaacccacaaccttccagcttgggcgttagggcaattatggacatgttacagtgctgcagagattttatttatggccagttttggagccagtttatggccagattttgggaggcttgctcccaacaccgtatgccccaggcaccaaataataaaaacatatgatggcctagtcagactaaacctggccaagaataactggtaagcccattatactggttcatac

SEQ ID NO: 484431 - DNA, 583 bp, Homo sapiens
cccaggtgctggagtgccacgggccacagagccctgcactggccaaaggcagagccgcaacatggcccaggcactgagtgacatgtagtgtctgtttgagggggtaactggttgtcactgcttatggactgagaggcctcttccagggagaagctgtaaggaaggtacagcaagaccctcagaataaaaagcaggcctgatttcatggcagcataaaatagtaacaaatagcccatctgccctgggaaggagaatcaggaagattcccgttgctgttgggcagttcttcctgtcaggtttgtcagactgagactcagagaccaagtttgtaggcaaaatggggcattgctgaagtgtcaccgtttatgtgccagcaagggagtggtaaaaggaagcgttttgcctgtggcaacttgggcggcagaaagttgacagaacaagcacaagccctcaaaccccctgacggcagccgagtctgctggcagcatccgctgcgtgtgaagccccatgcaggatgacatctgtgcaagcgaggctgcccrgggagggttggcgtctggcagcctctccagaggctgcaggc

SEQ ID NO: 484432 - DNA, 613 bp, Homo sapiens
gatggggacgggaggtttgtgttggctctagaatctcccctgtgaggacgctggaaggggaagcctagggttgaggaggcagtgagaaagtctccaagtccacaccatgtaaagctacttctcccctgctttagggaagcgcctgtttcacgatctcattaaatccaaataaatgggcttgcccatagttaaaatgtgttgatttaaccaaaaaacaaaaataggctgggcacrgtggctcatccctgtaatcccagcactttgggaggccaaggtggaaggatggcttgaggccaggagtttgagactagcctgggcaacatagcaagaccctgtctctacaaaaataaaagaaaatagccaggtatgatgctgcacacctgttgtcccagctactcgggagactgaagcaggatcacttgagtctaggaggtggaggctgctgtgagctatgatcgtgcctctgcattccagcctgggtgacagagaccctgtccctaaaaaaaacacaaatagaaagtggttgaaggcaattcactcgcagttggctgcagtctgtttctctctcgtacttggggctgaactagcctcaggagaaggaggctcccgagcc

SEQ ID NO: 484433 - DNA, 446 bp, Homo sapiens
tggtggcacatctgaacttaagatcctggatttggttctgtcctgcccccaatttaaatagtcacaaatacagatgtagcagaagaaaccccgcagcatccaagtcagttctgtgggagtcgcatgttcctgtgtctcacggcatggggcagagccagtgagcattcttgctgtcctgccagtgtgtgggcctcagtgccacctgccattccctggttttgattgcccaggccccctaacacccacaagggacagacttccaccttcctttatccattcacagtccacgyctgccctgcagggacgctggtgggtgctggcctgggcttcctcacatacaactgccatgcttcctgcagggacgctggtgggcgctggcctggagcttcctcacccacaaaccccatgcttcctgcagggaagctggtgggtgctggcctggggct

SEQ ID NO: 484434 - DNA, 609 bp, Homo sapiens
gaaagaattaatgtgactgactcttaggcacatgaaatggtgcccaacctcacttataataaaggaaattaatattatactaagatgacattggatttaaacacatcaaatatgattgaatttatatgttcataatgatacatgtgggcaaacaaatcttcattgattacctctggaagttgcctgagaaccaattcatttttgtgaaaatcagtaagtaaaaagaatcaagcatttgtcctgcctttcctaaatggactgtccctcagtgtagtcaaagaggtggtaaggggagctttctttttatagagctgttctagctaataaataaagaatgataaaatttaaatacctatcaccgttttgcaacccctaacggaaatcatgccttagaaaaacccaagttacacaaagtatgctcctttagcttggctatcccacktctatgctcttagccaatgatattctggcaaaaatctgaaaatgtataggcgattcattgcagcactatttgtgagactgcataaaacttggaacaatccaaatgtctgtcaatcaggtacaaggtgaattaactggggtgcatatagaaagtattagggtactatg

SEQ ID NO: 484435 - DNA, 656 bp, Homo sapiens
atcaaaagctcacagtgcctagccaagcctctcttgcttcttctttagagagaacaaaagcacaccggacctgagcaaccaacatacatttacaaacacagccagcagccaaggcaaccaagtggactaagcccagtagggtcccctccccagagtggaggatgggagagattagggcatgtctgtcttgagagcatgacagatgaacgcacaaatccaaaggctgcttctgggtcctttcctatcgtgcttgatatagctgaccacctgtgtcctttaaatgtccacctctccttggccctactactcagccctgctccacagctctccacaggttcctctgccctgtactaatcttaacataaaaggaatatataaatatacaaatacaatcataaatatwaatatgaaatctatataagtgcatatatacacacatacatatagagtcaatttttgttatttgcaggagttacattttataacacagcaacaaacactgagttagcaaacactaaaccattgcttctaggagaaacacagttaggttcctgcaagcttctggttccattttcatcaaccaatcaatatataatcctattttatgtgtatttctgtccaaagacatcaccttattcaatttctgctgctgaatt

SEQ ID NO: 484436 - DNA, 532 bp, Homo sapiens
tacacattataatgttgcttcttcagaaatcttaaaaatgataaaccagattttatgccaatttgcctttatgcaacaagtttttccgtattttaacagtaaggcatcccatgtttttaataacaaagacctggaaagcaattcttatgagactaagctaaggctgtatacaagggaggaagcattttagttgatatatttyaaaagattaaagaaacacttagtaaacccgggcatggttttcttttacataaaatgttatttatcacatagaatcatgaattatttacaagcactggagtcacttgcaacaggagtaaacagaattgatgatgaccttcagttcactgtactgcagagaaagtcattctctcattagattttcactggagaataaaagaagcctttgcctcatgaaaattcactgccggctccctcattccctttctttcaccatagagttgaaaataaaagtgtttctttattttttttaaggttgcttctacatataatgaaaaaacaactgcaaatg

SEQ ID NO: 484437 - DNA, 541 bp, Homo sapiens
ggttaaagataccctatgaatacagggaaaatgacacacatacaacttactcattaataatcagatcaggagcaaaacacagcaggtttgcacttgattgtctatatgatctccaccccagagcaaatgccataagaaacatccaggagtactgcagtagggtcatttggtcatccagrtgtaagttcctgaaacctgaattaagagaaataaaggtatgaggcaacactcttcagaagatcatctctgtgggaattgccaaggagcaatgagatcaattagccctgtcaaaacaagggcacccctaacagaaaatggaaattaaatactaggtagacacagttttcttctgtcatctgacactttaagactcacaaaccctcttgtgttttttttttttttttttttttttaattgagacaaagtcttgctctgtcacccaggctggagtgcaatggtgccatctcggctcactgcaacctccgcctcccgggttcaagtgattctcagtgccagcctcccaagtagctaggaatacaga

SEQ ID NO: 484438 - DNA, 584 bp, Homo sapiens
tacaaggcattcattccctgctagatttgggcgagtggactgactacacgtcgaaagcctgtaacagaataacctgaaatgactctgctgtaggtccggcacaggccacccctgattaatggaaacttgtgactaatgtagaggagctgctttgggccagagttttccagagaagtaggaaggtcctggaacagtgaatggtgcgacaatgtgttggggaagcaaaaactcctctggcttctattctgaagatactcctattcttgctcagccagtctctgtcacctgacatctatttttagggaccaaacagttgtttgtatattagtttacagaaaacgagtgcattgtttaaaggttaggacagtattctgtaatgtttaccccattaattatatatacacacatatgcatatatagtatgtatttatattttaaataatagtttrtagtacttcgtagttttagctctcaataaccctgtgaaaatgacatcatcacccctggatgcggtcatacgggccgtggcaggtggttcatcagggagcctatctacggtgaagctgacatattttagatcccag

SEQ ID NO: 484439 - DNA, 613 bp, Homo sapiens
agttcagcttggccagatcagcagaactgcccacctcatttgtagactcatgaagaataataaatggttgttattttaaagccactaaattttaaaagcagtcagctctaaactgttaatatggaaggatactattcttcttggaaagatactgttctttttcctatcttatgtaatatctcatttacaggagtgataattgccaaatctaagtgggaaggcacccagtatgtttgttatagagcaaatactaacagatacaacaaacatagctactttgagcaagcagagaaaacaaaagattgcttataaagcttataaaagagggccccgatatgcaaaagcttgatattaagacaaatatttaacaaatccttaattatttgrcttaaatttgcaaagtaagactgaaaaataagacctgatccattcaagaatttgctaggtgctttggtgtaataaatctacttataaacatcagtaattgtgtatttgaaaatctacattaagaaagtaaagtcctttacactgtgggatttaattcacactgaatcatacaaaaaccatttttttttaaagtctttatttgaagaggcagaaccttagtattatg

SEQ ID NO: 484440 - DNA, 626 bp, Homo sapiens
tgctgcccatgggggctcccttggtgccagacactgagctgagagcttcacatttcctcacgattgccccaggagggaggctgttcatacttcgtttttcaagtgggaaactgaggttcaggaaagtcatctaacttgtacaaggtcacccagcttgtaagtggttgacctagaaatcatctgactctaggctgctgagcccaccacaccccacttaactatatgatttttttttttttycaaggagtctcactctatcacccagggtggagtgcagtgatgcaatctgggctcactgcaacttccgcctcccgggttcaagcgattctcctgcttcagcctcccaagtagctgggattacaggcacctgccaccacacctggctaatttttatatttttagtagagacccggtttcaccatgttggccaggctgctcttgaactcctgaccttagcgatccacctgcctcagcctcccaaagtgttgggattacaggcgtgagccaccgcgcccagccatttatcatgtatcatgataaatacatgattatcagacattaatataccagctttcccccactggactgcacactcctcaagggctggcatgagggcttattcctct

SEQ ID NO: 484441 - DNA, 603 bp, Homo sapiens
gtgagaaatacttaccaaagtattaacgcagatcgagttgggaacgcacgstccatttcgacactcatcaatgtcagtgcagacctagtgcagaaaagttcaaagaaagtttagcgagacatgctgcttaaatagaaatgcaaataaatctcctttgttttgctatctttgtgtgaagtgaagatgcggaatttcgggtagaatggtaatctgagggttatttgtgccatctcccttgcatttgtaccagtttgtacttaatctaattgcaaatgagaattgctttcatggtattgaaagttattcagaaaagacaacttgtataattcatctgttccatcacctttttaggttaggaaagttttatttttttttttaatcttgcttgggaatcaatgcagttctcctaaatgaggattcttagcttttttcaattctggaacattctcagcttcccccgactgctttctagtctttctttggaactacaattggatgaatatcgaactttcttgttaatatcttcttttgactcctaacctcttgtttatatgctccatgtcgttatttctctgtgctgcattctagatgatttctttaggt

SEQ ID NO: 484442 - DNA, 575 bp, Homo sapiens
aaaataatgataatgatgccactgactaagtctaaattccatgtgaatcataaaaataaaagcataatgaaaatattctgtgccctggattttgttcaagagactgattttcatagatacgttttgttgggctgctctgttgacagtcccacttttcggtgatgggacccagcctattcagggtctttggagtttgtgttgatgaaggcatgcaaactgcccaaragcccacacctgtgcctgtggcagccagtggctcactctgctgcaggaagcagtcttgcaggctggccacctggaacagtgagcctctcaccaccagcttcagctcttccaagaagtcctggaagaaatcacattcataccacagattgctgacactgttcaaaagccaatgtgcttgcctactcacgcaattttcataatcaagtagtcctgtatacttggaccctctgacatcttacataattttgtaggatcacattttttcctaaagcctgccagccctatctttttgactaaagtgaatatgtaagtagccagtagcctaggaaaatgctggcattgtcaccaag

SEQ ID NO: 484443 - DNA, 597 bp, Homo sapiens
ctgtctcttaatgtttcttaagattgtaagcactgggcttatcctttcttattaacagcaccgtgttcttttcttctttccacatgaaagttttatttttttctccttcttgttcttctctgctctagatatagtttatagttttttcaccagtgtagatattttgccacttggggtgttcttttcatgagagaaacattgaggaactgggtaggggagagaaccaacaaaggaaatttcaagtgtgattctactaggaaaaatacaaagaggttacatattttttcccctgtaactgataagcttgctttttttttttttcctgatacaaatagtaatacttactattttacaaactcatagggcaatgaggcctgatgacactggctaacagtttttgaggtccaccactgtgttatttgagcttgatgtgggttacctcatttagaagtgatccagtgtttggaaaaccactggattacatttaaagaatttatctttctttttgcctaatgtactagcttcctttggtctacmtattctcagttttaaaaagctggtcttttttgattggaatacaggtcattttcattgagg

SEQ ID NO: 484444 - DNA, 569 bp, Homo sapiens
gctgcttctcattaaaataggtattaaagagattggcaaatataaaacaaatccactttcctcatcaattttgggagtttggaatagttattttcacgaaaaacagtatttatattaacacataatgagtgttgttattttaaagcaaattaataaatacttccaaaattgttcttcaaggagttcgtcaagaggaagaacaagtgcattaatccatttgttactttaagtggttggtttatatgaaaacaatgacaggttaggtctcaagtggggaaaaaaaataatcctaaagggaattctracatattattatttccaagcagtattaataactctttaaaatctccctagcatctattttcacagagtcaattgtataatgaagtataaaaaattctaatgaatggattaatgatcactatggctacatgcttttaaatcaaaacatattttataaaactactgaaatgaccacatttcataaagcattatatccactaacaatagtacacagacatgataaaaaaataaagatctttaagatgctatgggttttctcccccctc

SEQ ID NO: 484445 - DNA, 521 bp, Homo sapiens
aaatgctatgacaacactaaaaaggggaacatcacactctggggactgttgtggggtggggggaggggggagggatagctttaggagatatacctaatgctaaatgacccagttaatgggtgcagcacaccagcatggcacatgtatacatatgtaactaacctgcacattgtgcacatgtaccctaaaacttaaagtataataaaaaaaagcgtacattttgtataactggcttggctgctttaccaagttatgttttgactttatagttcccataggaaaatgctggccccatccttcaggaaatacaaatatcaacaatggaacataaagcatcacwtattctgtctgcctacaacatagctaaagcacagagactatcacaaacatatatatatatatatatgcacacacacacacacacacagatacacatatagtcagtgagaaaagaaatagcagagtaagtcactaaaactagtcttctaacaaaattgtgtcctttgcagcaatgtggatgc

SEQ ID NO: 484446 - DNA, 521 bp, Homo sapiens
aaatgctatgacaacactaaaaaggggaacatcacactctggggactgttgtggggtggggggaggggggagggatagctttaggagatatacctaatgctaaatgacccagttaatgggtgcagcacaccagcatggcacatgtatacatatgtaactaacctgcacattgtgcacatgtaccctaaaacttaaagtataataaaaaaaagcgtacattttgtataactggcttggctgctttaccaagttatgttttgactttatagttcccataggaaaatgctggccccatccttcaggaaatacaaatatcaacaatggaacataaagcatcacatattctgtctgcctacaacatagctaaagcacagagactatcacaaacatatatatatatatatatgcacacacacacacacacacagayacacatatagtcagtgagaaaagaaatagcagagtaagtcactaaaactagtcttctaacaaaattgtgtcctttgcagcaatgtggatgc

SEQ ID NO: 484447 - DNA, 563 bp, Homo sapiens
gtcaagctgtgcttcactaataataagaagccattcattacaatacagaactttaagtactgaaagaaaaatataatattaaagcaaatattaggtttagtgaggcagtgatgttgaaaaataacratgtttattggcaaaagagttacccattgttactaatgaagcagtggaaattcatgaccagatattttctagggcatattccatagactatttgaatcttcccaagtcatccaagcttccttacttaatagtctttagactataaaattcttcatagtcttcctatatatccttcagctctacttatcaattagctaccttaaatgttcacttgctgaaaggacttgctggactcagtttacactcttggaacagatttattatgggttaagaatactataaccaatagaaagaaaggatttatatttaaagggaatcttaagtgtacactaaaatcgatgcctgtcatgaacataaatagaaaaatatttatagcatatccagttaaattcagcaatatatgaagatgatagtccatcatgacctgtagaattttt

SEQ ID NO: 484448 - DNA, 363 bp, Homo sapiens
tgggggatcactgtcctctctcggcagcaggtgaggctgggcctgggaggcgcgggtgggccggggcgagggccacctgtgggscggcgcgcgcgtgggagccgcgggctgcgggggcgcgcggctgtcaccgcgacccagccagcgccggggccaggtagcgggcgcagcagcccgtggggggacgctgcttggagtgggggccgccggggccccagagcgctctgcggaggcgagggctagggaccaccgcggccaagatggaggtgggtggccgggggtcagcacagtgtcgagggcccgactccccacggaattgagtctcggggagggtggggacgagggcagggtggggtgagcggg

SEQ ID NO: 484449 - DNA, 573 bp, Homo sapiens
ttcaagactgccctgggaaacatgacctgccctgtttctgtctagtgagtacccatttttccccactcaccggctcacttcccttggctgggtcaattagaaaaagctcttctgttggcctgccctgcagggtggagttcagagggcagctcaagagcccggtgacagctcaaaaaataaaaaaagccgccaggagcagtggctaatgcctgtaatcccagcactttgggaggccgaggcaggcggatcacctgaggtcaggtgttcaagaccagcctgaccaacatggtgaaaccccgcctctactaaaaatacaaaaattagccgggtgtggtggcggatgcctgtaatcccagctactcaagaggctgaggcagragaattgcttgaacccaggaggtggaggttacagtgagccgagatcctgccactgtactccagcctgggcgacagatcacgactccatctcaaaataaataaataaataaattatacattgggctcttttgccttttattcttgtgctttctaatcacaactaaacactaaactcacatcttggctttgcagatc

SEQ ID NO: 484450 - DNA, 596 bp, Homo sapiens
tggtgctgaggaggctaatagagaagctccctcgytctcaaccccaccccttccttccgggagcaaacccaagtctggtcccgactccggatccctcccacattagacctaccacaccctcagggcagacaacagctccacacaccccacactcagccaccagggcaagggagcaaaattccagaaagctcaggtgagtaccagagtggaatggcccagggcgccctcaccctgctcagcttttggagccaacattccagcagccaaggcctctgccatactggctgtttccccacggatatccagtttcactaggggaactccagcctggcttcccttctttcttttttatttttgtttttttgagacaaggcttggctctgacacccaggctggagtgcagtggccaaattgtagctcactgcagcctcaaaatcatgggctcacatgataatcacgcctcagcttccctggtagctgggtgtacaggagagagccaccatgcccagctaattttttaaacttatttttaatttattttttatttttttgagacggagttttgctcgtgttgcccaggctggagtgcaatggca

SEQ ID NO: 484451 - DNA, 572 bp, Homo sapiens
ctggcctcgtttccttcatgtccaatgcaggggttccagtcacatgcrttgggcaccattacatgtccaagctgtgccaggatctagaaaaatggctggactcaggccaaggggccttcctgtctggcagtgaaaataagaggagataccaagggccctgagtctggaggggaagtcatgagcacagggcagtgccagggcccgggagctgccacagaggagcccacctggtgacagacacctgtaggcacatccgtgatgcccagtgcccaacacagggaactggacaaacgtttcatgcacgactcttttttcccttcttggctaccttgaggaccttgattataatagttatcctttttttctttttctttttttgagactcttgctctgtcgtccaggttggaatgcagtggcaaaatcttggctcactgcaatcttcacctctcaggttcaagtgactctccttcctcagcctccctagtagctgggattaccggtgtgcaccactaggctcagctaatttttgtatttttactacagatggggtttcaccatgttggccaggctga

SEQ ID NO: 484452 - DNA, 188 bp, Homo sapiens
caccatatgacggccttaatggagtccaccragtatttcaggttctctcctgggccacttgaaagtggatgtacccatgggatttgctttgacccaggagatgtgagtggaagtgaagcgtgtcacctcgaggcaaaagagttgggagccattgagacgggccactctctccttcatctcttagagca

SEQ ID NO: 484453 - DNA, 188 bp, Homo sapiens
caccatatgacggccttaatggagtccaccgagtatttcaggttctctcytgggccacttgaaagtggatgtacccatgggatttgctttgacccaggagatgtgagtggaagtgaagcgtgtcacctcgaggcaaaagagttgggagccattgagacgggccactctctccttcatctcttagagca

SEQ ID NO: 484454 - DNA, 503 bp, Homo sapiens
gctgactgcaacctcgaactcctgggctcaaacaatcctcccacctcagcttactgtgtagctgggactacaggcgtgtgccaccacacccttttggcttttatttttggcttttattttttgtaaagacagggttcctctctgtctttcatttggcctttattttttgtaaagacagagttccactctgtctttcatttggcctttattatttgtaaagacagggttccactctgttgctcagggtggtcttgaattcctgggctctagctgatcctcctacctctgccttccaaagtggtgggactacaggcatgagccactctgcatggccagaagcccttatcataataccttgaatatatatgatctctatgtcattaacattcaraatctatgaaatgcagtcaacttttgattatgtggagtattttacttaaaaatcccattttcaacagacttccttctagagttcattttattatgggtgacttacctgccac

SEQ ID NO: 484455 - DNA, 586 bp, Homo sapiens
ctgttgtcgggtagttagagcaagcttaataaagaaaagcttatggagagagtatcttaagactttgtgtttcacacatgagaggaaattgtgtggtaacaggatgaagctaatttaggccctcctttaaatgccctaaggaaaattattgcctttgctagccaaggagcaaagctgtacatttcccccrtgattattttatttattcacacagtatagtaagtattttaactgattgttaataaataattatcaagtaacctcattaaaatattaacttgctattaggcttttaaaacatggtttcccaaacactatgttgaagcatgaatgcctgttgtgtagagaacagaggtaatagaggtaatatgcttactccacacacacttgaattttcagaagatgtggctacatagagaaagaacagggtagtataaccacatctcctgaaaacgcagatgtgtgtggaggtaaccatattacccctacacactttttgaagtttctctttttgaagtttcttataaagtttttttttgaagtttcttgcaaagtttctattttaaactggattttatttataaga

SEQ ID NO: 484456 - DNA, 649 bp, Homo sapiens
ctggcaccatgggtgtgctccagagcaacttctgcttgctctgagccccctgccctgcctcccctttcaccatgtttcctctgacaagattttaagtacagcaattcaagaagatttctcctcctaaacgacatttatctgaagtctattgcctcttgattgctggaaaagaatcttaaamtcatttcaaaagtaacttataaacaaacttattaaaagtgatgaaaggagcattgaaattaattagcactaatttttcactgtgccaaagtgtgcagtgtccttcagaggaaacaataacagatctggtgagtgtgccatgccagtggggagaattgaatgtccctcatctccctctttccctagggacattagtcatgagtgccgagtgtgcggggtcacagaagtgggtctttctgcatatgcaaagcacatttctggccagttgcacaaagataacgttgatgcccaggaaagagaagatgatggaaaaggagaggaagaggaagaagattattttgacaaggaactcattcagttaataaaacaaaggaaagaacaaagtcggtaagtaattgattttttaaaaaaagcctatctataacagaacacagcagagaatatattttatatctttgtactggtcagc

SEQ ID NO: 484457 - DNA, 514 bp, Homo sapiens
gaaaaccagtaacagttacaaaggttatgaagattacaacactcccaagctcttatctgagtaatgttttcccccctatcctcctgtgcagtaaaacgtaacttttttttttttttttggaggcagagtctcactctgttgccaggctggagtgcagtggtgtggtctcggctcactgcaaccttggcctcctgggttcaagcgattctcctgcctcagcctcccaagtagctgggattacaggcacgcgccaccacgcctggctaatttttgtatttttagtacagatgaggtttcaccatgttagccaggctggtcttgaactcctgacctcgtgatccgcccaccttggcctcctaaagtgctgggattacaggcgtaagccacygcgcccagccactaaaacgtaactttttcaaacaagaagtaagtgaccaaccttaacaaattctgtgaaagatatggcactgtccccatcctgatcagcctcctgaatggtcctgtctgcgatgct

SEQ ID NO: 484458 - DNA, 493 bp, Homo sapiens
aatacatatatgagattaggacagcaagtatcgtcgtgtaagtaaaaaactggtggtcacagtatccgtgttttttctctaraagttcagattgaaagaagtctcacaatcccagacccctgattgtttaaaggtctccaggcatcgggtcatgtctcccaaagccttactacacggtcttgctttctgggtggttttcccaatttgtgacaagaacttgtttgtaatttcccatagttgtcagaggttttaggtccttacccagaaacggattttctacagaatccatctcgagttcctgaatttgcttctcgggctttacctactgttcaggatgcctcttcatagggaagggtggtgcgaggcaacagaaaggaaaggagttcggggactttgatgggcagggtgcagaaaaggggggcgtcgacgctctacgagtgatcaagagtcccgattttgaagggaaggacagccccacagtagctagagcccc

SEQ ID NO: 484459 - DNA, 523 bp, Homo sapiens
ggtgcacgcaaatcaaagaaaataaaaacaaatccataacctcatcctttatattttttcaaaaatatttaataataaagtgatgcaatggagaatgaaaggagccctaagggatcagcctcctggacaacagccataaatggggctgtcctgggaaaactggcacatctgtgtatcctattcgttraatacatactatgtccccaaattgttattgttgtggggaaatcttcagtgagcaaaaatataaaaattgctattctcatggagcttatattctcatcttaacaatgaccagggttaacatgggggcatgtattgttctactcatataaatggacatgttttttctttcttcaagtaaagacattgtgttttcatccttttatgagaaccttttaaatgtactatatgccttcctgactttttatagagagggccttcaatgtcattttgcattttctaaggaggtaaactggtatgttagaaaggggagtaaaccaagagatattgcccagaattc

SEQ ID NO: 484460 - DNA, 523 bp, Homo sapiens
ggtgcacgcaaatcaaagaaaataaaaacaaatccataacctcatcctttatattttttcaaaaatatttaataataaagtgatgcaatggagaatgaaaggagccctaagggatcagcctcctggacaacagccataaatggggctgtcctgggaaaactggcacatctgtgtatcctattcgttgaatacatactatgtccccaaattgttattgttgtggggaaatcttcagtgagcaaaaatataaaaattgctattctcatggagcttatattctcatcttaacaatgaccagggttaacatgggggcatgtattgttctactcatataaatggacatgttttttctttcttcaagtaaagacattgtgttttcatccttttatgagaaccttttaaatgtactatatgccttcctgactttttatagagagggccttcaatgtcattttgcatyttctaaggaggtaaactggtatgttagaaaggggagtaaaccaagagatattgcccagaattc

SEQ ID NO: 484461 - DNA, 621 bp, Homo sapiens
cttatgagtcatagtaagaaaattttgaaacaaagctgacaagatttatgaaaatttcattccattagtttttggaagaaagtaggcattcgtttctctcatatgtcagtgtctcaactgtgttgagcactacagcaaaaacgttgatctggtttacagagaggtaaataatcctgttacatttgtcctaggtaactttaaaaagcaactataattctgaattttagagtcaaacagaactggctgtagctcttattcctggtgtagacttgaaccatttacttaaactaattaagcctcaatttctctctctgaaaaatcaaaatgatattcatgcctgcctcttagggatactataagaattgcatgaggaaatgaaacataaagcacttagcagygtacctgacacagcgcaaattctcagtaaatgttagataatattagacttgttattgttatgattgttgtgcatttccattgcttgtaactaatgaatagtgacataacaaagtgctttcctccataaacaagtgtaaacttcagtcgagttacttaggctttcttatacctcatataatctccttacatgtgaggtttcttatacatatagtgaagtataac

SEQ ID NO: 484462 - DNA, 637 bp, Homo sapiens
tagccatacagtttttaaaatggacattgcttctgctttgttttcatattttactttttcttataaaaatgttatgcagctgaattgatttcagcgtcttcctttttcctctaagaccctgatttctttacrtcaataccaccctgctttaaattagactttttgaggtttgttttgttgcttagcttactggggctgctgcgataaagccccacaaacttggtggcttaaggtgacagaaatgtattctctcactggaggctggacatctggaatcaacacacaaacaatgccatgttttctctgaaggctctgaaggctgatcctttcctgcctcttcctagctgctggtggctgccagcaagctttggtggtctttggcttgggatgccctaactccaaggtctgccttcatcttagcatggtgttctccctgtgtgtctgtgtctctgtgcccaaatttccctgtttctaaaaggatgtcaatcacattggattaagagcccactctaatccagcatgacctcatctttacttgattatatctgcaatggccttatttgcaaaaggggttgtatcatctgtatcactgattccagatgaacatgaaattttctgggacagtattcaacctagt

SEQ ID NO: 484463 - DNA, 593 bp, Homo sapiens
tgtctacttacatgtcaagtggcctgtctgagggaggctggctcccacctgtgcctcagaagcagcagcatgagaggaggaaaaacacgctgacttgtggggttgagtggacttctcggcaccttcaagaatagtctgggaggccaggcgtggtggctcaatctgtaatcccagcactttgggaggttgaggcgggtagatcacttgaggtcacgagtttgagaccagcctgggcaatgtggcaaaaccccatctctactaaaaatacaaaaattaaccgcatgtggtggcacatgcctataatactagctatttggggggctgaggcaggagaatcacttgaacccaggaggcggagttttcagtgagccaagattgcgccactgtactccatcctgggygacagggtgagactctgtctcaaaaaaaaaaaaaagaatggtctgtgagggagaagtaggcaaggtcctgtgtgctcactccaggcagattgaggtttaaaaactaagacgttcatttcacagactaaacaaattccatcctacttgccatgttagtgtcatgattcctattagtttttcggtgatatgaga

SEQ ID NO: 484464 - DNA, 588 bp, Homo sapiens
atcacaccgtaattagcaggaagatgttgcaccgcagtgcctcatctcagagccagagtcttgggttagggagtaaacttttttacctaggcctgactgtattctggcattgtaggcactcctcaggtttctgtggccctctcatctcactgagggtatcccttcttcatgtgtctctcagctcttttcttagatttctgcccctgggtctggccccttcagattccttttccttttctttcccttccctcctttttcctcctttcaccaacagttttgtttgcacccatagttgcccatcagtggatccatgcctgtaagccagtgtaatacaagctgctgtctgtggagcatttattgcatttattgyagtgagccgtgatcgtgccactgcactccagcctgagtgacagagcgagactctgtctcaaaaaaaaaaaaaacaagatttaggaaccagaggctttatatgcagtccaatacagtagccacaagctgcacgtggctgtcttcttatgtcccttgcttgccttccagccacactcatcttacacaagaggtcatggggtctcagagcggttgcccagc

SEQ ID NO: 484465 - DNA, 537 bp, Homo sapiens
tacctccctcaaggggatgggccatctctttgggctttctgcctgtacttgctaaactgagtgtattttttaaggcgctggaaagttggctcagctgcaatgaccacctgctccatcaagccctgtgcacacagcagcttcggaccccagagcccccctgcttcaagtgggaacggattcgttctaaggctgcgtgggagcagcctgccatcccttgcatcaggcatttggcctcagtgggctcacttggtggttggcaatcaygaaatcagcctcccttgaacaaatgatgatctttttgtttaagcatttgtggttctgaacaaatcgattgggcttggctttcagatgggacaaggtaaagacgcttccatgcttttgagaaaatgacaaagcaagagaatgtatacagcaaacgaccatgtgttacagcctgttctaagtgctttgtaaggcacagccctgcccagcagaaaaatatgcaagccacgtgcgattttacattttcaagtatccatacttaggaagtaaaaatag

SEQ ID NO: 484466 - DNA, 547 bp, Homo sapiens
tctttggtaatcatggagccatggcctggattactgttgtagatatcaaggtaatggaaagagtggctgaaatgaaaggattagggaaaagctaaatkagtgtacattagaatagcctagaactcaaagaagggcaattaataataaaggtgaaattaaggagagagagggagtgagggagaaaagccaagaaaaatagagatgaagaagggatggatgagaaaagagacatttgagcggattcctttctgtaatgaatacaatgaaaatagaatgaaggtaaagaggatgcttaaaacatgtagagtgtgccctatagcgagtttctcccctgtagcatttttccaagcaacttcggtaaagatttaaattagtttttactactttaggaaaaatattaaactggtatctcttttgaatgaatgcaatgctgaaacatcataaggtaacccaagtttgagtcaccttcaactcaaacccaagtttgtttgagttatagatggaactggaataatttcctgggtaagtggagggtgaatgctgtcac

SEQ ID NO: 484467 - DNA, 547 bp, Homo sapiens
tctttggtaatcatggagccatggcctggattactgttgtagatatcaaggtaatggaaagagtggctgaaatgaaaggattagggaaaagctaaattagtgtacattagaatagcctagaactcaaagaagggcaattaataataaaggtgaaattaaggagagagagggagtgagggagaaaagccaagaaaaatagagatgaagaagggatggatgagaaaagagacatttgagcggattcctttctgtaatgaatacaatgaaaatagaatgaaggtaaagaggatgcttaaaacatgtagagtgtgccctatagcgagtttctcccytgtagcatttttccaagcaacttcggtaaagatttaaattagtttttactactttaggaaaaatattaaactggtatctcttttgaatgaatgcaatgctgaaacatcataaggtaacccaagtttgagtcaccttcaactcaaacccaagtttgtttgagttatagatggaactggaataatttcctgggtaagtggagggtgaatgctgtcac

SEQ ID NO: 484468 - DNA, 529 bp, Homo sapiens
tgggcttagaaaaaacttttgctacctgctcctctccttggcatgtaacaactcagacctggccaatacatgtttgcttgagttggggcacccactgggcttgctggtcttagcctctctctcttgctgtgagtaaacakctacagctgcagcgtgggtaggtctgaacagtagaggtacaagtctacagcagggtccaaggaaagagctagagacacggatgctcacaggagacatgcagataccataactgagtggaataaggcaggcataagagagaagctccaaaccctcaattctctctgctattttccccttatagagttaaggatttctgaactccattataagaaaaaaaaaaaaaaaggtgggataaacataattgcagaaattcatactttgtctcagtgtctgagaactgtaggggtcactgtttccagactaacattttctagtttataaagagaagccagaaaaccagatttttgttagctatttcctgagtttcagtatcagaagcttacttaga

SEQ ID NO: 484469 - DNA, 398 bp, Homo sapiens
actattaccaagaagattctgccatatcttctctgacttctaaggccagcctgaggcaaaacatgttttttgttaatggtcccaggttcgaactattcatatttgggtgtctcttctctcccttctatcctttcttccacttttggtacccactgccttgttactctcttctttagaccaccaaatcggctctatgattttttacttttagctttactttttaattttaaccaaaaatatttaaaataaaattgcaagctgattatgttagcagaatcttaggcatcagggagttgaataagaattttaaagatggtaataactttctagaactctgaacatcacttcaygtgaggacttaccatctttctttccacacttcaaagaagaggagttga

SEQ ID NO: 484470 - DNA, 663 bp, Homo sapiens
aactctggggagccacgtcgaacatggacctcagagttacacagccaggggacaacggaactgaggcatgcattctccagtccagtcagtagtagaaggcttttctgcggtggggaatggaacccaggccaagtgggttctagctgcagagaaggggatacacaaccttaggtaagagggtgcacatcccagccattggatgtggggctggaggaagwcattcggctgggctcctaccgtttatacttattataccgttacggtcagtaagagacaggtggtgatgacgttgtcagttaagaatagccatcatttgcttagttaagtgtggaattgtcctgggagtctaacttactaagttaatttcacacttaactcccacagcctgtccacacctaatttcaggatatatgtcaaaaggaaagaataaatgtgatatacagttatataagttacatcagtggtccccagccttttttggcaccagaaatgggtttcctggaagacaatttttccacagatggcagggaggatagttgcaggatgaaatttttccacctcagatcatcaggcattagattctcataagtgcatgtaacctagatccctcacatgtgcagttcacattggggttcgtactcctatgagaatcgaatgctgcag

SEQ ID NO: 484471 - DNA, 419 bp, Homo sapiens
acaccatgccagagaggcctggaccccacgctaggctcagtgcctgttatactcttgggacccagcgctttccttctccatcacgtggcatacttggcattatttgttgtttaaaatattgtccttagttttcacctttcctaggagacacaggcagaccctgtgacactacagctggcacacagtaggtgcatcacaaacatctgctgagttcacacactcttgccttctcaaaccttcttgtcaagtcttcagtgaaaaggaaytgctgattgagcaagaattaaacttctagagactcctggatccactgaagtttgagacaaggtgagatttgtttactgccatattcctagctcatagcatactgtagtcacttaaaaaatgtttgttgaataagtgagtgaattgattcaatt

SEQ ID NO: 484472 - DNA, 419 bp, Homo sapiens
acaccatgccagagaggcctggaccccacgctaggctcagtgcctgttatactcttgggacccagcgctttccttctccatcacgtggcatacttggcattatttgttgtttaaaatattgtccttagttttcacctttcctaggagacacaggcagaccctgtgacactacagctggcacacagtaggtgcatcacaaacatctgctgagttcacacactcttgccttctcaaaccttcttgtcaagtcttcagtgaaaaggaattgctgattgagcaagaattaaacttctagagactcctggatccactgaagtttgagacaagktgagatttgtttactgccatattcctagctcatagcatactgtagtcacttaaaaaatgtttgttgaataagtgagtgaattgattcaatt

SEQ ID NO: 484473 - DNA, 536 bp, Homo sapiens
ctcttttgttacttcctcatggacagcctcaaacttccaaatgaacagaccagcatggagcctccaggaaagtgcatagaattctgtctggtacccagagggaagggggttcccagtgagggcaggaccaggcttcatgcacctcttcaggaatgttctcctcatagtccagcctcaaggtgtgcatcctctgtgtgcatggaktccatggcaggctctgcctggggagccgtccagctgcacacctgcaatgtggtggtgaccctcttgaatgggtggttctgggccccatggctggcagcagagagggagatgttcagccaccaagcccagagccctgccacaggcttctgtgaggcctccatctgctctgggttcttgccctgagaggctgccctgaagtcagacagaagcaggtgggcctctcttccagggctgctctctcccccactgacagctccctagagggcgactcagacagtggggacagattcttcaggcagaagcactggagtttaggctggccggttcattcc

SEQ ID NO: 484474 - DNA, 626 bp, Homo sapiens
agctgctgaagaggctgtgatgggagtatcacttgaacccagcagttcagtgctgtagtgagctatgactgtgccactgtgctccagttgggcaacagagtgcaatcctccctgtaaaaataaataaataaataaaaagctgactaatttatctcaaataagataaaaatatgcaacgtgaaaacatttttatttttaaaataagtatgtttagcattcttacagagcaaaattgagagacagcattcattaaaacagaacaataaattataaaatcaactttaagtaatgattcaagaatggataaatttaaagaacaaactggaaatcctaagaaacgataaaattaattcactgaaattgagaacataagtatgagacaaactccaatctgaagtattgtgaagaaaaaattagtaaactcaaagatgatatagaaaaaaatcatctagaatataggccaaaaagataaaatagaaatcttaaaaaacaagtcaaaaacaataccttgagaagttctagcatacgtctaacagtaatccttggaaagaaagaataaartaaaaacataaaacaaaatgacatacataataaaaagataaaccagtaaacacaataagcaaaca

SEQ ID NO: 484475 - DNA, 558 bp, Homo sapiens
agaactactaccgtaaaacgcgaaaaattaagcaaaaaagttactaaagaaaaagaaaagacatactaaatttaaaattaaggtaaaaagaagttactactcagccatgtgacacatggtcacacagctttgtggtggaacagccaacaggaaacctggcccgccccactctcttaagtggcgtttctcttcatcaccactgctcttccatttggstgaacactcacaaagtagaatccaggactggaatcctggagagctcaggctttcagagttgaagagctggtaggtgttagcgcagccacacacacctagtctctagattcctaacgcagtgactgttacaaaaccaggccaccccagataggaacgaaaggactaggaaaacatgaacgaagcagagagaaagaaatgacgaggggtaaatctgcggcagagtaacccagtacaatccccatctctcccttccgccctggggcggaatccaaggctcaccgagggcggcagcggccagggccgggttgtgtgggctgaggaggcccacgagggttgacacca

SEQ ID NO: 484476 - DNA, 574 bp, Homo sapiens
atatccagttatttcaaaataataacaatgataagaatgataactaatattattgatgatttactccatgtcaggctcaatgctaagtgctttatagcatatatctcatttttatcctcacaacagccctagatgaggcaggaactattattaacctaattttacagatgatgtaacacagagaggttaagtaaattaccctaaatcccacagcctataatttgctcggttgggattaaaatccaggctgcctgcctagagcccattaattaatttacccatctgctgtagtctaaccatgtcaccttggtgcaccaggcagcaagagcagggaggaggggctgagaagtctgcacacttcggcctcatcaggcctagggacagccctgcaaggtagayataatagtccccactgtgctgatcagaaagtgacacactgcccctcctatgtgtagagcccacactcacacacaggtcggcgtgactccaaatgctaaaccacctgctcccagtgtagacctgacctcagagagcaccatgatgttggtaatgcccactgaatcaaccccacagc

SEQ ID NO: 484477 - DNA, 625 bp, Homo sapiens
tgaggatacacagatccccagagggtctggcaggaaacacttactattttgaattggctgagtgaaaatcatcattgtggccacacggcccagactggatgacttgggccaaatttagaagccctctgtctttcacagtgggttaaaatgacatttttctggataaccccacaaccgtccacctgagtcgacggacatgagagaagcagacagcggtttccttttgtttatcccacagcattgaggaacccctaccagaagaggctttgcaacccagccagcacccagacctgccccacacccacagctccctcccacctctggcaggcccagaggtgtgtggtctccacggtggcaggccatggtctcagcatggaaccttgctcatggacgctggcgctgtttcttccagctctttgtctcctggcttccaggaacaggctgccagygtgttgcactcctgccccaacacaaacaccccacctgccttggtcaagctcatttccatggcacttctcagcctcccaggctcagcccccagccacatcctggcagcctcccttgcaccctgcacagtgcctgcccctacacacaggcctttagaaatgccatcaaagcagcttta

SEQ ID NO: 484478 - DNA, 625 bp, Homo sapiens
tgaggatacacagatccccagagggtctggcaggaaacacttactattttgaattggctgagtgaaaatcatcattgtggccacacggcccagactggatgacttgggccaaatttagaagccctctgtctttcacagtgggttaaaatgacatttttctggataaccccacaaccgtccacctgagtcgacggacatgagagaagcagacagcggtttccttttgtttatcccacagcattgaggaacccctaccagaagaggctttgcaacccagccagcacccagacctgccccacacccacagctccctcccacctctggcaggcccagaggtgtgtggtctccacggtggcaggccatggtctcagcatggaaccttgctcatggacgctggcgctgtttcttccagctctttgtctcctggcttccaggaacaggctgccagcgtgttgcactcctgccccaacacaaacaccccacctgccttggtcaagctcatttccatggcacttctcagcctcmcaggctcagcccccagccacatcctggcagcctcccttgcaccctgcacagtgcctgcccctacacacaggcctttagaaatgccatcaaagcagcttta

SEQ ID NO: 484479 - DNA, 571 bp, Homo sapiens
ttccctcccctgtgggtaagctggtgtttggaactcacttctagggaaaagaaaaacaggagccttggggtttaactttgatgttcatytgtatgaatcatctcattctggagtcctggagcaatcatattagagtctgattgaaagctatacaccctctcccaacacaaacgcacattatgcacagtgaatttgcaactactttcaagaggttcatgagccctttcctaaagccccatcttggagacccttaatttatggtctccaagtaaaggccccatttcctgaatggttaatatttcttttaaacagagtttaccatccactaggtgtgactgtgggcactggtaagagctggtaagagctgtaacggggtaagagctggaatggggtttgtaaaccatgaagttatctacaaaggcttggtgatgttacttggattaaccagcccttgggttgacttttcggttgactggtaggagctggaaaggtgttcgaatccagcccatctggctctagactgcctccctgttttataagaaaatcatagaggtgtttgctgttgtttcta

SEQ ID NO: 484480 - DNA, 643 bp, Homo sapiens
gctgctggcctgggtactaagcccctcactgccccggcgcccgcggctcagagtgcgggcccactgagcccacacccacctggaactcgcgctggcccacaagtgccccgcgcagcccagttcctgcccgtgcctctccctccacacctccccgcaagctgtgggagccggctctggcctcggccagcccagaaaggggctcccacagtgcagcagcgggctgaagggctcctcaagtgcagccagagtgggtgccgaggctgaggaggcgccgagagtgagcgagggctgcgagggctgcaaaggctgtcagcatgctgtcacctctcactaacaggtgtgacatgatgtctcattatggttttaatttgcattccctaatgatgactggtgctgacattttttgtgcacctgttggccaatagtgtatcttcttttgcgaaatgttcaatcaggacatttgccccttttttaattgggctatttgttctcttgctattgaattgtttgaattccttatgtatttgggatattaattccttatcaggtgtatggttggcaaaaactcttattcatcttttttctctctygtgcctcttactcttaggtgagaacttaactcctcatacagcccctgtcactc

SEQ ID NO: 484481 - DNA, 644 bp, Homo sapiens
aagagagtaagccaggaccacaatcatcattccctatcattcccaatcttactctcctataccttataacagctctatccatttaaaaaaacacaaaaattgaaacaccaagagttgaagtgatttattcagaggcacacaatctgatattcctccagttgaacacgaaaaaaaaamacatagaattcaggctcatgagcacctaaaatgtaagcaagacatcatcatattaatagtagcggctagagtataaaattaaccatacttgtcaagagaacagggacttaccaaaaagacaaaaacacattacttttttaaaaattatgattatttagcaaatatctacctagtggtttctatgtacaaaattccgtgttccgtgctctgagagataagaaaaggactccacctctgtcttcacagagctttccagccaatggagaacacataggactacaaatagatcaagaaagagaatagaaactggggaagaggaatgtggagagtggcggtgcgtaggctgagcgtggacacagccagcctcaagtttccaaaccagagtgtaggagcatgggtatcaagcagacagtgtgggtgaccctgccttcctcctcctcccaggggatgagaatgctggaagctca

SEQ ID NO: 484482 - DNA, 561 bp, Homo sapiens
agtagcagggtggtaagtatacataaggcaactagactcttagaaaaaagcagttagaaaatgtattcaataaatattcacatccaattgtggtctcttcctttaactgtgacaaagggaatacaaacaaatcatcagcacacaattagcgctctatccatggaacagaatttctcaaaatttccacgtgtgacccaccctaagactgccacgtatgcccagatgctagtaagaaaactgccygagatgcaaagaaggtgccgcttctttggttacctttgctcactgtcccatttgttttctcagactctggttttggtaaatcttctttgccctggtagttgacaaagggccagatttgtagctggtcagtggtttgaaactaattggtcaaaacatcagggtgttttcctaaagcaggaggaaataaacagccctaactgtaatagcatttatcaggagatttttttccataagcacataatacagacaggtagagagagaatcaacatgataacaaattcatcagtataattattgtcaatgaatttgatccaaggt

SEQ ID NO: 484483 - DNA, 616 bp, Homo sapiens
attatgaattttaataggaccttccatcagaaaccaaaaagggcctcaaggagcttaagaccrtattcctccggcaaccaaagtaattgctctatatctgtattaacaccaaagtgtagtcacaaacaacttcagtaccacctgagaacttgttagaaatgcaaaattttgagccccaccccagatccactgaatcagaaactctgggaatgaagcccaacaacccattttaccaggccctctgggtgattctggtgcatattatggtttgagaatcattgctgtatataagcaagttgatagaaagatgaactcaggagaaggggaaggagctaccttttaccgagcttctacaatgtcccaggcacacttttaggagactcatcagcatcagggtatgaacccaaatctatctaactctgaagaccatgtgttcattccatttagtcaaatttcctcaccttcaaatatatatgaagtatctcaattggaccaagtgcttcttatatgttatcctgtttaatctttacacagatattaggaagtaggctacattatttctatttcacagatgaagaagttcagatttatagaagctaagtcactttctcatgtg

SEQ ID NO: 484484 - DNA, 563 bp, Homo sapiens
atttatatttatatatttcttttctaaggatgctagaatatgatactggaaggatgtgggtgggcaagcttggaggagttcagaccaggttaaataattctgcatttaaaaggaagagatcaagaactatggtaaaaagctaaaaagatttacaaagccatgactggcaagggacaaagaggagaaagaagattttggaaaaacatgggcagtttgggaacaaaatacagaggagaatgaaatataagcacctcctattattttccatacaaatattgagtgaaatcatcctgctaaaatggtagggtcagagtggagtcttcatagtgaatgtgaggatgtgttgagttggtaccctggtcaaaacagatgatgcacagagggactgctacatatgaactayggtataacacgtctgaaaccaagtattgacctggtgtcatacaggaaggatctagttctcagaaaggctaagtgatgttctcaaggtcactttgataaaacagtagagttgggatttgaatcaaagtctctctaacttcaaggtccatgtcctcagctga

SEQ ID NO: 484485 - DNA, 555 bp, Homo sapiens
tatttgtaaaatagcacaccatatggcagttgtagtgaatgaactaggtgtatgtgaatcaacactaaaaatctcaaaagcaacattgaaagaataaaaagcgagtatcaaaagaatatattcagtggccgggtgcggtaggctcacacctggaatcccagcactttgggaggccgaggcaggtggatcaygaggtcaagagttcaagaccagcctgaccaacatgatgaaaccccgtctctactaaaaatacaaaaaattagccaggcatggtggtgcgtgcctgtaatcccagctactcgggaggctgaggtaggagaatcacttgaacccgggaggcggaggttgcattgagctgagatcacaccactgcacagcctgggtgacagagtgaaactctctctctctctctctctctctatatatatatatttagtattattccacatatttaaaatgtaaagacacaaagtcattctatgcattgtttctggaaacatgcaggtatacttaaattttaaaatattaatggctaaaataaaataatactaacaa

SEQ ID NO: 484486 - DNA, 555 bp, Homo sapiens
tatttgtaaaatagcacaccatatggcagttgtagtgaatgaactaggtgtatgtgaatcaacactaaaaatctcaaaagcaacattgaaagaataaaaagcgagtatcaaaagaatatattcagtggccgggtgcggtaggctcacacctggaatcccagcactttgggaggccgaggcaggtggatcatgaggtcaagagttcaagaccagcctgaccaacatgatgaaaccccgtctctactaaaaatacaaaaaattagccaggcatggtggtgcgtgcctgtaatcccagctactcgggaggctgaggtaggagaatcacttgaacccgggaggcggaggttgcattgagctgagatcacaccactgcacagcctgggtgacagagtgaaactctctctctctctctctctctmtatatatatatatttagtattattccacatatttaaaatgtaaagacacaaagtcattctatgcattgtttctggaaacatgcaggtatacttaaattttaaaatattaatggctaaaataaaataatactaacaa

SEQ ID NO: 484487 - DNA, 539 bp, Homo sapiens
gaaacatcctcacagaaaaacccaagatcaatactttgcawccttcaatccaatcaagttgacactcagtgttaactagcatagcatctactgatatttcataatactcccagtgggtctagggtagcatcctgtaatcagacatattaactttttttgcaaagaaagaaatgaatattcacacaaagtaagataaataaaatctacaaatagctttacatcagtcctggtcagattttgctgcaactgagtttgtgccaaacttaggggaaaaaaatctttctgttttgagaaccttttggatttaagaattgcagacaagagacagtgaatctattatttgacttggaatttggtgtttctctggatttctttttcttcatctgtactttttgacagagtatgtttggagtttctcctctcattcatctgtttccattctacattctgtcttctgggaattcttcatgatttctggtctgttagtgacatctgttctcatttactataataaacttatcgttaagccacttttctgt

SEQ ID NO: 484488 - DNA, 610 bp, Homo sapiens
ataatttccattggaaattgaagggagtcctctataagtatcaaaacctaataaataaacaaacttacataagattatggacaaaatcataytaaacttttaaacagtctaattctatattgctttaaaagttaaattgattatataatgccatcattagacttatgccctctttaagcaaactctactaatattgcttccaaagtaaaacatatttatagaacattgctgtcttcaaataagccaggtttataaatttactactgctaaatgcaaggtggggttgggaaagggtggtggtagggcagttaggtacttagggcctctgtctagggttgttttgttgttgtttgcttttttataggcagtgcctcgctctgttactcaggctggagcacagtagtgagatcacagctcactgtaacctcaaactgttggactcaagcattcttcccagttcagcctcccaagtagctgggactacaggtgcatatcaccatgcccagctaatattttttaattctttgtagaggtagggtctcactatgttgcccaggctggtcacaaactcctggcctcaatgatcctcctattttggcatcccaaagta

SEQ ID NO: 484489 - DNA, 644 bp, Homo sapiens
atgaattataatcttatttcagaggaaataaaactaaagctctaagaagctgacttattagctagtagtttacttacctgcatctgaaggtractttcctagaaaaaaataatttgcctcaatagtgaaacattcagcatttaagtgaagttccatttagtcttttttcccccatgttgttttacttactagttgttaggcattttgaaaaaaaaaaattatgaagcctttaaaagtatatatcttttaaaatttcctatgaaaatcaacatgtttattttccgttcttctccatggccccaagataatttcagtgccaacctacatgaataatatgcatgctctcaggattcctgctgagattaagggaaatattcttattctaaaagtaaataatttgctgaatttttttctggcacagacatctgctttaaagctttaattaatgttgcatggctttaaagagactagtttccaatagcccgaaaaatatcaacattatgatgaagatgaaacagatgtagaacactcagatcaaataaggagctcaattatctttggaaggtaaacgttgctgacgccaacttttgcttcctgatactaattacaaacaaaaagaatccgaggagggcaattcagatggg

SEQ ID NO: 484490 - DNA, 588 bp, Homo sapiens
gggcaagaattctggtaccatgaaaaatatgaatgtagtgataccatcaaaggattgcactagctctccagcaattgytgctaaccaaaattgaaactaagaaatgacagataaagtattcaaagcatggactaggaaaaaaaaaaaacgcaatgatatccaagacagggttaaaaatcaacacaaagaaacttctaaagcaatctctgggaaatgaaggaagagataaacatcctaaaaagaaattaatcagggctaggtgcggtggctcacgcctgtaatcccggcactttgggaggctgaggtgggcagatcagttgaggttgggagttcgaggccaacctggccaacatggtgaaaccccatctctactaaaaacacaaaaattagctgggcgtggtggcacacatttgtaatcccagctactcagaaggctgaggcaggagaattgcttgaacccaggaggcagaggttgcagtgagtcgagatcatgccactgtactccagcctgggtgacagagtgagtctctgtctcaaaaaaaaaaaaaacagaaagaaaaagaaaaagaaaaaaaaaagaaatcaatc

SEQ ID NO: 484491 - DNA, 522 bp, Homo sapiens
tgacaattaactgagatgggggtggaggcacactctatgcaggttctaaacctaaaatcctagctctaycactcattagccatatattctaagttcctttatcttcctgtatttcattttgaggttgaacttcgaataggcccttgcacacggtgagtagacaggaaatctcatcagcaacaaatattagtttcccctgtccttctcattctcattccaacatgttttctcctaagaggacaagatactctggactgttgaagtccatttagggtattctccagatgagggttgttgcaggctgaattgtgttccccaaaaattcatgtgttgaagacttaattcacagcacctcataatgtaaccatattcacaataagatctttaaacaagtgattaagttaaaattacacaattgcaattggagtaggccctaatccaatctgattgatgctcttacaagaaaaggaaatttggacacacagagaaacatcagatgcatgcaagcagaggaaagaccag

SEQ ID NO: 484492 - DNA, 589 bp, Homo sapiens
gttctttccttcagttgttgctgggcacagtcccaaaattaaatgcggagaggactcctttgttttcaaaggtgaagcctccctgttgttcaatcttcttctttgcctctagcatttttcaaaagaaaaggggagaagaaaaaaaaagaatgcttaaggtgacaaagttggagatgactcaaaggagccagattctttatatgcttagaactgtgaaagaatgtgactggtagtattagttatcctgccaaagaataactaagaataacagacctatgtcaataaggtggtatgttcactaccatcggaaaatctgcaaaaaaygagtgaaaagaaaacacgtctcagaggtggattctacttcactgtctctactgctgaaagggggcccagacttctcatatcaggaaggctgactgagaatctgcacagaactgaaaatctaagtccatgcagaagagccagcattctaaactctagatgtctagtttgccatgtttcctactaaaatttttttgtaactacaaaatcttttccaatgacaatctacaagtaactacaataatcaacacagagtaattcctccagc

SEQ ID NO: 484493 - DNA, 589 bp, Homo sapiens
gttctttccttcagttgttgctgggcacagtcccaaaattaaatgcggagaggactcctttgttttcaaaggtgaagcctccctgttgttcaatcttcttctttgcctctagcatttttcaaaagaaaaggggagaagaaaaaaaaagaatgcttaaggtgacaaagttggagatgactcaaaggagccagattctttatatgcttagaactgtgaaagaatgtgactggtagtattagttatcctgccaaagaataactaagaataacagacctatgtcaataaggtggtatgttcactaccatcggaaaatctgcaaaaaacgagtgaaaagaaaacacrtctcagaggtggattctacttcactgtctctactgctgaaagggggcccagacttctcatatcaggaaggctgactgagaatctgcacagaactgaaaatctaagtccatgcagaagagccagcattctaaactctagatgtctagtttgccatgtttcctactaaaatttttttgtaactacaaaatcttttccaatgacaatctacaagtaactacaataatcaacacagagtaattcctccagc

SEQ ID NO: 484494 - DNA, 368 bp, Homo sapiens
taaaataccaagtggaggcattcyacagacaggtgtccacaccacggccacgcggacacggagtcggggaatctggatccccacatgcccgccgagaactctccagctcccgcttacaaagtttcctcgcatggtacgttcatctttccgatccctagctgcgaggccgagacgcctgctgctgtggcctccgacgaagttcggagatgccctttccttgcgaaagctgggcccggtagcgtcggccgcggggtcgggcgttctcgggcctggcggtcggcgagggagcgccgggcgccggggcggggcggcccctaggcgcgcgctgcccacccgggctgcaagagccgcgggcccgcgagccccgg

SEQ ID NO: 484495 - DNA, 368 bp, Homo sapiens
taaaataccaagtggaggcattctacaracaggtgtccacaccacggccacgcggacacggagtcggggaatctggatccccacatgcccgccgagaactctccagctcccgcttacaaagtttcctcgcatggtacgttcatctttccgatccctagctgcgaggccgagacgcctgctgctgtggcctccgacgaagttcggagatgccctttccttgcgaaagctgggcccggtagcgtcggccgcggggtcgggcgttctcgggcctggcggtcggcgagggagcgccgggcgccggggcggggcggcccctaggcgcgcgctgcccacccgggctgcaagagccgcgggcccgcgagccccgg

SEQ ID NO: 484496 - DNA, 518 bp, Homo sapiens
ctgggattacaggtgtgtgccaccatgcctggctaayatatgtatatattatgtgtgtgtgtgtgtatatatatatataaaatacatgatatataaaaatatatataacataataatatgtagtatacataaatgtatacggtatatataatacatatatataattttttttttgagacgcagtctcaccctgtcgcccaggctagagtgcactggcggatctcggctcattgcaacctctgtctcgcgggttcaagcgtctgtcctgcctcagcctcccgggtagcttggactacaggcgcgcaccaccccacccggctaattttttaaattttttggtggagaccgggtttcatcatgttggccaggctggtctcgaactcctgacctcgtgatccgccgcctcggcctcccagagtgctgggattacaggcgtgagccaccgcgcccagccaaacctgcacttttaaagctaccctaggtgacctgacagtgtggcgcaggtctgttgactggct

SEQ ID NO: 484497 - DNA, 518 bp, Homo sapiens
ctgggattacaggtgtgtgccaccatgcctggctaacatakgtatatattatgtgtgtgtgtgtgtatatatatatataaaatacatgatatataaaaatatatataacataataatatgtagtatacataaatgtatacggtatatataatacatatatataattttttttttgagacgcagtctcaccctgtcgcccaggctagagtgcactggcggatctcggctcattgcaacctctgtctcgcgggttcaagcgtctgtcctgcctcagcctcccgggtagcttggactacaggcgcgcaccaccccacccggctaattttttaaattttttggtggagaccgggtttcatcatgttggccaggctggtctcgaactcctgacctcgtgatccgccgcctcggcctcccagagtgctgggattacaggcgtgagccaccgcgcccagccaaacctgcacttttaaagctaccctaggtgacctgacagtgtggcgcaggtctgttgactggct

SEQ ID NO: 484498 - DNA, 635 bp, Homo sapiens
tttagatgtgtcttttataagcagcatataattgggttttatgaaaatttctgtcttttgtttgatatattagggccatttacatttaatgtaaattattgatgcactggatttaattctaccatcttgcttttactatttttttttttttttggtcccatctgttgtgtatttcttttcctctttttttgttgccttcttttggagaaatcaagtatttttaacattattatattttttatttttgttgaagtgaaattcatctaacataaaattaaccattttaaagtgaacaacccatggcacttcacaatgttgtataaccaacacgtctatctaatttcaagacattttcgtcattccagaaggaaatcccatatccgttaagcagttgctccacaattttccctttcccctgtcccyggtaaccacaaatctgcattttgtctttttggattatggacaaatcaagtattttaataattccatttcctcctctaaccacttgttagtcatacattattttactgttcttttagtgattacctcagaaattacaacacacattcatgatttcactgtaagttagtacttttattgcttctagggcaaagaaagcatttagcacacactcc

SEQ ID NO: 484499 - DNA, 603 bp, Homo sapiens
aaaaaaaagatcaattacaaagttgtatttcagtccaaagtaaaataaaccaagagagaagttgtgggattcaaaatacaatgctaagcacagggatgaataaaacatcactaaatttaattaacaataaaaaatagttagctgggcacagtggctcacacctataataccagcattttgggaggccgaggcagaaagattgcttgagcccaggagttaaagacaagcctgggcaacatatcaaaaccccatctcttcttgcactttttgtacaaaaagcagaaaaattagcaggaygtgggggctcgccatctgtagtcccagctactggggaggctaaagtgggaggatcacttgagctgagggaggttgaggctgcagtgagctgaggtcatgccagtgcatgatcctgtctgtctcaaaaaaaaaaaaaaaaaggaaaatagccatattaaaataatataatttctgtgtttaacaatattgtttttagataaaaagactaaaatgggagttattcaacaagttcctttgttaaagaagttagaaatactaaataacaaatttttaaataaaatcattcatacaaaagaattattaaga

SEQ ID NO: 484500 - DNA, 595 bp, Homo sapiens
aaaaagaaaatctctgctgttttgggaaagcccaaaatccagagaacagaatcagctctctgttgtgtaacagagtttatttattatggttgccaatactgaaaatttgaacaacaggtatggttcatttttatatttctgtaataaaaaagaaaaaaatgaatatagtaggcggcactaagtattacrgaaaataatagataccatcataaatcttacctaaaatagaacaacatttgatttggctttttcagtttttctgttttaaccctgatagcatactttgtagagaaaatgtcattaagcaggtctgagaaaaaaattttcagagctcatttgtttctatatggttttacattgataatgtcccatagcagctaaggtacttgatgagataaatgcatgtgtggggtttaaaactaagcaacagcctatctggcaaccttagctgcgaatcaaacaattacaaaatggaaagtacatcttgtacaagctgacagagccattaaatcaggagagctgtgggcagacatactgacactgcaataattaccagaaagcattaatttcagcattaataaaatggcagtaaata

SEQ ID NO: 484501 - DNA, 595 bp, Homo sapiens
aaaaagaaaatctctgctgttttgggaaagcccaaaatccagagaacagaatcagctctctgttgtgtaacagagtttatttattatggttgccaatactgaaaatttgaacaacaggtatggttcatttttatatttctgtaataaaaaagaaaaaaatgaatatagtaggcggcactaagtattacggaaaataatagataccatcataaatcttacctaaaatagaacaacatttgatttggctttttcagtttttctgttttaaccctgawagcatactttgtagagaaaatgtcattaagcaggtctgagaaaaaaattttcagagctcatttgtttctatatggttttacattgataatgtcccatagcagctaaggtacttgatgagataaatgcatgtgtggggtttaaaactaagcaacagcctatctggcaaccttagctgcgaatcaaacaattacaaaatggaaagtacatcttgtacaagctgacagagccattaaatcaggagagctgtgggcagacatactgacactgcaataattaccagaaagcattaatttcagcattaataaaatggcagtaaata

SEQ ID NO: 484502 - DNA, 468 bp, Homo sapiens
tttacctgcatgagatttcagatgatgattttctcctcttagcctatgacttcactacctgaagaataagctctggctattgaggaagccacttgtacattggtagaatataatacagtggtcatttcaactcctcacagycttcaccaatcttatgtttataccaacaaataataccagaattgaaattacatggtttaatgataaagaagatctggaaagcagaatattttgttattcctacataacatcttaaaaaaataagttacctatattttaaaatggagatatttcacataaaatgtggattactactgactgtttaaaaacagggagcactgtagcaccggaggaacaccctggaaagtggtgcatgctctcagggcaactgtgagcaggaaccatctagctgccgcctgccttggatgggacatcggccctccagtttgccatgataacaaacacgct

SEQ ID NO: 484503 - DNA, 595 bp, Homo sapiens
aattgcaggttttcatagttatgaatccaaaagataaaaataagaaatctctcaggtaaaaattagtttcttttatctactataactaagttactgtayttttatctttttaatacactgcctcatttaaagacacttcataatctaaaacatctcctgattttaaagatgagggaatgcagatttggatagaagtaatatgactgtattagtccattctcacgctgctataaagaaccgccagaggctgtgtaatttataaaggaaagaggtttaattgactcacagttgtccatggttggggaggtctcaggaaacttacaatcatggcagaaggggaggcaaacacatccttcttcacgtgatggcaggaaggagaagtgccgagcaaaaagggaaaaagccccatataaaaccatcagatcttgtgagaactatcatcagaacagcatgggaaaaaccacacccatgattcaaatatttccacctggtcctgcccttgatatgtgaagattattacaactcaaggtgagctgtggatggggacacagagtcaaatcatatcaatgaccaagatcagaaagttaattagcag

SEQ ID NO: 484504 - DNA, 595 bp, Homo sapiens
aattgcaggttttcatagttatgaatccaaaagataaaaataagaaatctctcaggtaaaaattagtttcttttatctactataactaagttactgtacttttatctttttaatacactgcctcatttaaagacacttcataatctaaaacatctcctgattttaaasatgagggaatgcagatttggatagaagtaatatgactgtattagtccattctcacgctgctataaagaaccgccagaggctgtgtaatttataaaggaaagaggtttaattgactcacagttgtccatggttggggaggtctcaggaaacttacaatcatggcagaaggggaggcaaacacatccttcttcacgtgatggcaggaaggagaagtgccgagcaaaaagggaaaaagccccatataaaaccatcagatcttgtgagaactatcatcagaacagcatgggaaaaaccacacccatgattcaaatatttccacctggtcctgcccttgatatgtgaagattattacaactcaaggtgagctgtggatggggacacagagtcaaatcatatcaatgaccaagatcagaaagttaattagcag

SEQ ID NO: 484505 - DNA, 595 bp, Homo sapiens
aattgcaggttttcatagttatgaatccaaaagataaaaataagaaatctctcaggtaaaaattagtttcttttatctactataactaagttactgtacttttatctttttaatacactgcctcatttaaagacacttcataatctaaaacatctcctgattttaaagatgagggaatgcagatttggatagaagtaatatgactgtattagtccattctcacgctgctataaagaaccgccagaggctgtgtaatttataaaggaaagaggtttaattgactcacagttgtccatggttggggaggtctcaggaaacttacaatcatggcagaaggggaggcaaacacatccwtcttcacgtgatggcaggaaggagaagtgccgagcaaaaagggaaaaagccccatataaaaccatcagatcttgtgagaactatcatcagaacagcatgggaaaaaccacacccatgattcaaatatttccacctggtcctgcccttgatatgtgaagattattacaactcaaggtgagctgtggatggggacacagagtcaaatcatatcaatgaccaagatcagaaagttaattagcag

SEQ ID NO: 484506 - DNA, 535 bp, Homo sapiens
taatagacatttaatgtaatattttttgtactttaaaatgtttcataagggctgcatctttttaccacttgctttttcaatacaacatttgggtcttacctgtgttgactcatgcagacctagttcacttacaaacattatatatgattatatacatgaaggtaccacaattcattaatccgttcactgattgatggacacttaaattgcttccagttttcaccatggtgacaacaatgcaatagacattcttggacatatctcctcatgtacagtgtgctagtttttctagaataaatactaagccatgcaattgccaggttgcagggtatgtgcatttcatcttcactgacattgccaaagtgttcaaaagtacatgatacaccaatttccctaagctgcatcaaaaygcttactcctcttgaggaaggagataatgctccaaccagtgttgtatctacttaccagaagtccaattaatttctacaggaagtctaatgaagagatcaatttgcttcaaattggtgcaggtttg

SEQ ID NO: 484507 - DNA, 455 bp, Homo sapiens
catggagggaagatacccttataaaaccatcagatctcgtgagaacttactgtcacgagaacagcattggggaaactgccgccgtgtttcaattacctccacctggtctctcccttaacacrtggggattacagggattataattcaaggtgagatttgggtgaggactaactgagggtaaagaagagacttctttcttttcagtgatacccgcaagccatactcagaaggtccttaaggaagaaaggagttggctggaagtccagtaaggacacaaaggtggcctttccatgcaagcagtgaggttagcttggctctggccagaagaggggaggacgagtagtcttcctttgtgggccagtgaggcccctcttgtttgtggctcattgaaagtgtgaaagtactcagaatcaaaatagagtcactagtgtttttaaaaatctgaaaaatagagc

SEQ ID NO: 484508 - DNA, 455 bp, Homo sapiens
catggagggaagatacccttataaaaccatcagatctcgtgagaacttactgtcacgagaacagcattggggaaactgccgccgtgtttcaattacctccacctggtctctcccttaacacatggggattacrgggattataattcaaggtgagatttgggtgaggactaactgagggtaaagaagagacttctttcttttcagtgatacccgcaagccatactcagaaggtccttaaggaagaaaggagttggctggaagtccagtaaggacacaaaggtggcctttccatgcaagcagtgaggttagcttggctctggccagaagaggggaggacgagtagtcttcctttgtgggccagtgaggcccctcttgtttgtggctcattgaaagtgtgaaagtactcagaatcaaaatagagtcactagtgtttttaaaaatctgaaaaatagagc

SEQ ID NO: 484509 - DNA, 174 bp, Homo sapiens
ttcctgaaatccctcttgctagaatckaatccatagaccaccatatcttgcaaatccttcccctgtcctcctttcttcgcccctccctcaggtggaatgttccttcccagcccccagttccccacctttgctaactgtatggatgaacgctgtgccaccttcaccacctgcagt

SEQ ID NO: 484510 - DNA, 174 bp, Homo sapiens
ttcctgaaatccctcttgctagaatctaatccatagaccaccatatcttgcaaatccttyccctgtcctcctttcttcgcccctccctcaggtggaatgttccttcccagcccccagttccccacctttgctaactgtatggatgaacgctgtgccaccttcaccacctgcagt

SEQ ID NO: 484511 - DNA, 598 bp, Homo sapiens
caaatggatggtgagggcaggaaccagaaagagaggttataaagcagaggacaagtgatctgtggctatacatgagcggctcatataaaaccacaccccaccctctacaggattcccagagttaagaaaggatagacacacgcctcttagcatttggcaatgaattcaatggatctgtggacaaattggaaattaatcttaccaagaacataaatattggtgtcttctagactactttctggttccacatatacaaccctctaagttctytattattcatgaaagtaggggcttggagacttgacatgtagaattactaaaaggacataaaggctgtccttgctgggagataaatcatagacattactctttaataaacatctccggggttgaataacatacggtttaaagctgctaatcagtaatgatgtgctaaatgaatgaatgaggaaatctcaggtggcagagtagacacattgttcttgcatgaattttaaaaaaatgataaaattacatttttataaagaccaaaatacatttcattcattggtttaaactaatcttttttggcaaacctaccttttaaaattctatttat

SEQ ID NO: 484512 - DNA, 276 bp, Homo sapiens
gatggtagccatggcctcacccttactgcctgcttttccaacttaagagtgtttatcatggaagcttctgtgtcctgaattaggcttataccttagacttagatgttggactggctgtttctagcctcaggacattttccatccaatagtaatacytggcttcttgccaggtggcccaggtatcctcaaaggcacatgagagatctctgttactcccctttctaccaccttcagggtctagctccataaggcacattggaactccgtggtagcccc

SEQ ID NO: 484513 - DNA, 553 bp, Homo sapiens
caaatgtgtcatttcactattacaactactgttattacagccggtctagaaactgcttaggtatgtaaaattttggttaaaggccattgggacaacagaaaaggagaaacccgaattcaaagactatagcggtggggaaaaggtaagagaggctccccagagacaggcacgaacaggtactgccctytgcatgcgcccctccctccctccgccgccggagcctcttgcggacggcctcagcctgctgggaactagccgccggttccggcgaggggccgagcctgtgccttccagagggcgagtagtggtctgagtataagtgagagctccccacaaacaacagcgccacgctcaggagccccagccgcattttggaggctggtgagcaagatggcggcaggtacttcccacccgccctgggcacgcggggcgcacggcctggcggggaggcgcgagtgaggcccggaggtgtgggaggcggccgaggaataggtaggtcagtttagaaagaacccctcaccctcaaggtctgatcggcttcctcatccaccac

SEQ ID NO: 484514 - DNA, 585 bp, Homo sapiens
gaattgggttttgtcagttttgtctccccagcacataacacagttcctaacatgtaataatactaacagctaatttctggtatcatttacaaaataccacataccatattaactactgtgcatggattaactcacaaatcctcacagcagccattgattattattcccatctcacagaggagcagcaggattcagagccttaaggaatttgcccagagttacacagttggtaggggcagagccaggtgacaggcagtctgacccctgtgctgtggactccagtgttatgttgcactcagtatatgtccragccacatttctctctttttctttctgtcagagcgtcatgatgcattgtatgtggtgggagcgctggatgaaacactggagctgagaggattacgataccacccaattgatattgagacctcggtgtcccggatccacagaagcattgctgaatggtaactccctcagcatacactgtgcttcccacttcagctttagtcataatctcaactgatctaattaattggtcattgggaccacatacctaccttgaaacatagagctccatgggaggag

SEQ ID NO: 484515 - DNA, 598 bp, Homo sapiens
aattgggttttgtcagttttgtctccccagcacataacacagttcctaacatgtaataatactaacagctaatttctggtatcatttacaaaataccacataccatattaactactgtgcatggattaactcacaaatcctcacagcagccattgattattattcccatctcacagaggagcagcaggattcagagccttaaggaatttgcccagagttacacagttggtaggggcagagccaggtgacaggcagtctgacccctgtgctgtggactccagtgttatgttgcactcagtatatgtccaagccacatttctctctttttctttctgtcagagcgtcatgatgcattgtatgtggtgggagcgctggatgaaacactggagctgagaggattacgataccacccaatygatattgagacctcggtgtcccggatccacagaagcattgctgaatggtaactccctcagcatacactgtgcttcccacttcagctttagtcataatctcaactgatctaattaattggtcattgggaccacatacctaccttgaaacatagagctccatgggaggagtaaggaaatagact

SEQ ID NO: 484516 - DNA, 562 bp, Homo sapiens
ctggatgtggaggctcacacctgtaatcccagcattttgggaggctgatacaagaggatctcttgagccctgaagtttgaggttacagtgagctatgattatgccactgcactcctgcctgggtgacagactgtgtgacagactgcctcttaaaaaaataataataactggacaagattaagagcaaactgaagatggcagaagtcaaaagttcttcttaccaaaaattaccaatctaaaaactggggcaaggggtgggaggaggaaggaggagaacccaaagaagagatagaatgggatagaaaaatattcaaataaataaaacatccccagatttgtgaatgacattaatttacagatccaataagctaaatgacaaaccccacgcaggataatacaaagaaaacacaaatagacacatcacagacaaactrcttaaatctatatagggaaaaaaaaagatagcaaagaaaacctatcttgaaagcaacagagaaaaatggcatattacacacaaggtaacaaaaatacaaacaggtcagttctcaataaaaacaaaaaa

SEQ ID NO: 484517 - DNA, 526 bp, Homo sapiens
tggtactttgtaactcttgttttaggtccagatctatattagtctctatttaaggcaacgcaaagcaagatttattcaataggtgggcaggtagcatcaagttattgccccaaagagtttgggctgatcctgattctgggtcccaattaacccttagtgaatttctaccttcttcccaagattacagayttttcctcatgcaagttcattgtatctctaccctttctctgatgcattgatctctgtctgaggtatctcctagtaccctgttcctcttagatttggaggtgggcttacaattgctatttagctcctatttacttaaagaggagttttgttttctttatcctaatttcatactctgcttacctttgtgatatatttcaaatagatttcatagcaatacctctttttgtagtccacaaacccatcaaatactattttcttctgcaaatggtcctctctgcctccaagcccaatcaacatcttgtttgaggtcctcacagtcctgtcttgctactatgaa

SEQ ID NO: 484518 - DNA, 602 bp, Homo sapiens
caggtctacttgttaatttactagtcaaattttgaaagatatttaagaatactagaaataaatccwtcagatcagatgactgtattctatcattcctttaaatgtattctgcccttggccaggtatggtgactcatgcctgtaatcctagtactttgggaggctgaggcaggaggatcacttgaggacaagaattcaagaccagcctggacaacaaagtaagaccctgtctctacaaaaatttaaaaaataaaataaataaactgttaaaaatgtattgtattctaatcagtgtatttatgaatctaaaacctcatacaagtgcctgccttaaagtatgcatccaatgtaccccaatatttttaactcaaagattgacattgcaatgttctaaattatctctatatattgccaacacatttagttagagaagctgtaagttagttcctgaaagggaatatgcagggtataatgttccctgtgcagtgtaaccaataggccagtggtatttgaactgctatagtggttttatatctctcttcagcaaagcagggcttgaatccagaaagagattgcagcttactattaagtattttataccag

SEQ ID NO: 484519 - DNA, 602 bp, Homo sapiens
caggtctacttgttaatttactagtcaaattttgaaagatatttaagaatactagaaataaatccatcagatcagatgactgtattctatcattcctttaaatgtattctgcccttggccaggtatggtgaytcatgcctgtaatcctagtactttgggaggctgaggcaggaggatcacttgaggacaagaattcaagaccagcctggacaacaaagtaagaccctgtctctacaaaaatttaaaaaataaaataaataaactgttaaaaatgtattgtattctaatcagtgtatttatgaatctaaaacctcatacaagtgcctgccttaaagtatgcatccaatgtaccccaatatttttaactcaaagattgacattgcaatgttctaaattatctctatatattgccaacacatttagttagagaagctgtaagttagttcctgaaagggaatatgcagggtataatgttccctgtgcagtgtaaccaataggccagtggtatttgaactgctatagtggttttatatctctcttcagcaaagcagggcttgaatccagaaagagattgcagcttactattaagtattttataccag

SEQ ID NO: 484520 - DNA, 610 bp, Homo sapiens
gctggctacaaataggcgaaggcatgctggagaaaggaaaaagataagagtaacccacaagcttacaaaactgcgccctatctacatggtaattaaaaactgtacgttttgatggcagatttctggatgacagcattgcaaaaagtaaatgatccaaatgtgcacactttccagcagaattccagatttggaacttgatccaaaggaaataaatagagaagtgagtaaatatttagctgaaataatttacaccgcagcattctttatgagtaaaaaaattgaaagcaatttaaatgaccctcagcataggctaaacacggaatgggtaaattccatgtagccattaaaaatgatgctggagaaatatttccttcacatgaacagatgttcgcaatgtctattaagtgaaaaaaataagttataaaataacatgttcaatgtgattccattcttgtctgaaaatatatgtgcaattgtatatgcagagggaaaaataccttggaggtaagtgktcacattgtttatatctggatggtggaatacagggactttactactttcttatttgtgtttactactttttttttttttgtaatgagcttgtaaaact

SEQ ID NO: 484521 - DNA, 624 bp, Homo sapiens
tttgaggagagcttactaggaaatgtttatttttcattaactctatttctttctattagagccaacagaaaaccagaagagcaaaagagaaaggagatctgttcaattagcctcattagacttcccacttcaggtctctgtccagctctagtaaattcaccacaggrgacactgggaaaaccgtgatcctgctggtcccttctgttacaagtcaatgccttgttggttcatccgctcaatgcttgttaagtcctcaggatgtgctagatgctctcacatggaatgtccttttttttttctttttataagcaacactgaaagatacgggttattaacttcatttaaacaccaggaaattgaagtttagagaagctaagtgacttgtccaagattccttgcgtggaaaatggtggaaccagttttgaatctttagacaccacatagttttctattctcagtgtctattttgaggaagtgagtgggctgtgctttgtggctatattggcctagatagcataggcagaggagaattcctcatgcccacatgcccagcctggctcactgagcttttgcctggaatctagggggtaaatcatgagctcagtagctattttttcttctctc

SEQ ID NO: 484522 - DNA, 527 bp, Homo sapiens
gtttgaggagagcttactaggaaatgtttatttttcattaactctatttctttctattagagccaacagaaaaccagaagagcaaaagagaaaggagatctgttcaattagcctcattagacttcccacttcaggtctctgtccagctctagtaaattcaccacaggagacactgggaaaaccrtgatcctgctggtcccttctgttacaagtcaatgccttgttggttcatccgctcaatgcttgttaagtcctcaggatgtgctagatgctctcacatggaatgtccttttttttttctttttataagcaacactgaaagatacgggttattaacttcatttaaacaccaggaaattgaagtttagagaagctaagtgacttgtccaagattccttgcgtggaaaatggtggaaccagttttgaatctttagacaccacatagttttctattctcagtgtctattttgaggaagtgagtgggctgtgctttgtggctatattggcctagatagcataggcagagg

SEQ ID NO: 484523 - DNA, 624 bp, Homo sapiens
tttgaggagagcttactaggaaatgtttatttttcattaactctatttctttctattagagccaacagaaaaccagaagagcaaaagagaaaggagatctgttcaattagcctcattagacttcccacttcaggtctctgtccagctctagtaaattcaccacaggagacactgggaaaaccgtgatcctgctggtcccttctgttacaagtcaatgccttgttggttcatcygctcaatgcttgttaagtcctcaggatgtgctagatgctctcacatggaatgtccttttttttttctttttataagcaacactgaaagatacgggttattaacttcatttaaacaccaggaaattgaagtttagagaagctaagtgacttgtccaagattccttgcgtggaaaatggtggaaccagttttgaatctttagacaccacatagttttctattctcagtgtctattttgaggaagtgagtgggctgtgctttgtggctatattggcctagatagcataggcagaggagaattcctcatgcccacatgcccagcctggctcactgagcttttgcctggaatctagggggtaaatcatgagctcagtagctattttttcttctctc

SEQ ID NO: 484524 - DNA, 527 bp, Homo sapiens
gtttgaggagagcttactaggaaatgtttatttttcattaactctatttctttctattagagccaacagaaaaccagaagagcaaaagagaaaggagatctgttcaattagcctcattagacttcccacttcaggtctctgtccagctctagtaaattcaccacaggagacactgggaaaaccgtgatcctgctggtcccttctgttacaagtcaatgccttgttggttcatccgctcaatgcttgttaagtcctcaggatgtgctagatgctctcacatggaatgtccttttttttttctttttataagcaacwctgaaagatacgggttattaacttcatttaaacaccaggaaattgaagtttagagaagctaagtgacttgtccaagattccttgcgtggaaaatggtggaaccagttttgaatctttagacaccacatagttttctattctcagtgtctattttgaggaagtgagtgggctgtgctttgtggctatattggcctagatagcataggcagagg

SEQ ID NO: 484525 - DNA, 543 bp, Homo sapiens
tcttgtgctacccctgaggcttttctaaatccctgtttaaacattttaggttatctctatagtagtcttggcaattaggggaagggagggaaactatgcagaaacaggataggagaacagtaggtgcagggggaggccagaactagagtcccagcaagccaccaggagactcaggtgagcacgccactaccggcccctgccactgtgtgctcctactgacttggctgtttctagacctaatattggctgaagctgccaccgctgcttctgctggagggactcctttgggatccctgagtgatcttgtctctagcacctggtcaaagtacgctgaggggacacaggtataccaagtactgggagagcatcactgtggaatgtgagcctctgggctgtctggggctttctgggcttatgtgtcaccacgactctcagggtgaggatttctccaaacataggaagaggacttagattgccaggaagcctcccaccgaaacaaatattcattayggagattatatcaagaataacacaccttgaggc

SEQ ID NO: 484526 - DNA, 633 bp, Homo sapiens
tgggattacaggcatgcgccatgcgccaccacaccaggctaattttgtatttttagtagagatggagtttctccatgttggtcaggctggtctcgaactcccaacctcaggtkatccacccgcctcggcctcccaaagtgctgggattacaggtatgagccaccggcctggcctaaatgtttatctttatcttgtgcatctagagccctggttctcaaagtgtagttcccagatcagcagcattggcagtaatgggaaaatattagaaatgtaaattattaagcttcaacccagacctgctgaatcagaaactctggggaccttatgaggtcagcaggacaggtagcatgatcatcatttcactgatgaaaatggagattcttgtccaaggtcaaatggttaggtaataataaagtcaagttctgggtctagaatctggattttttttcccctagctccagagctctcctttcacttgattttactgtcccgctcactgtctgtacagactatttcttcagtcttttctctgctcactgggtttatgttgatctcttgtcaaagctggctactatttccatagaacctgctttgagcgcctttattccagaactactcattctacttccagcc

SEQ ID NO: 484527 - DNA, 408 bp, Homo sapiens
tctgactctagccttgtacaatgtctttgagctattttgcaccacttcgtaagttgtagataactgatagatatatataaattctgtcttacaggctgtgattttaattgacttcctaytgtggagaaaacagttttatctcaatttgcaactcatcttaactctcttttagtccatataaatttgtgccattttgacttttcctttgagccagttataacatctgcctggttctctcaaatcatataagtaaaataaaatctttagcatgtgttcatttttatacctatatgagtcataactttaccttttactgaaaattatattttaatgacccaaaagattagtaagaattcagatttatttcaaaatctatctttaaaaactttaaattttgagtgatttcac

SEQ ID NO: 484528 - DNA, 408 bp, Homo sapiens
tctgactctagccttgtacaatgtctttgagctattttgcaccacttcgtaagttgtagataactgatagatatatataaattctgtcttacaggctgtgattttaattgacttcctactgtggagaaaacagttttatctcaatttgcaactcatcttaacwctcttttagtccatataaatttgtgccattttgacttttcctttgagccagttataacatctgcctggttctctcaaatcatataagtaaaataaaatctttagcatgtgttcatttttatacctatatgagtcataactttaccttttactgaaaattatattttaatgacccaaaagattagtaagaattcagatttatttcaaaatctatctttaaaaactttaaattttgagtgatttcac

SEQ ID NO: 484529 - DNA, 628 bp, Homo sapiens
tgatcaattccacatggaattggtcatgaggagttagcctagattatcttggctaatagcaagtgctcaataaatgcttgttgaatgaatagccaataatcataagaaataatatgtggtccatttctcatactgaaaatgttcactgataccagtctctaaacatagatcccttctatatctctctgcatatagattatttacattgacatatttgatggtaaaatattttggttaaaaaaagtttttaaaaataatttaaagtggcttttaaaaacttcttcctcttgttcttatagcttctctgtctgcatttgcagcagtttaaataaacagatatttaaattttgttgccaatttaaattttagtatagaaaaggagaaaaaatcttattaagagtaaagtcttattcatttctatgccactctacttgttatattaaactttaagtaagtttggattgaagaatgtaaaataaaaatgactcaaaaatgaaatagattgaagcaaccctgcttagaaaaaatcttgaaatatatttgatgtgtgtttaattaataaaattaaaaatgaaaatsacccaagtatgagataatttgaaataaaactgtttctaattatttcttc

SEQ ID NO: 484530 - DNA, 608 bp, Homo sapiens
ccgtgtctcttaggctgctgttccgtggctggaagtgagacttgtgcgctcctgttctggagcagtctgggcctgcacagttcattgagataaatgttaaacgtctgcttttcttgactgttccatatcaaggctcccttgggaataaacagcagggcccagctttgcatttattatcctgaytggtagcctggtggagaggaaggacagggtggtgtttaaccatgaggcctgaagttttgttcccttatggaacaataggttcttcgagtaacttgcagttcaaggcggaacgcattaaaatcccatcaacaccaagatatccgcggagtgtcgtgggctccgagagaggtaaggacttctcgacattcccatctctcctgcttttcctgcggtctgactcctcatggtggagtctctgggcttagctgagaacttcatagtcatctcagtcagtcagtaaaaattcactgagcccagcagtaggcctggtggtgtggggggtagggggcaatgcagagcctagcatctgagctccagactatgcgatgcagtggggatagagctgtgtgtctggatcgcacctgcctcttggtcttggctgttgg

SEQ ID NO: 484531 - DNA, 538 bp, Homo sapiens
agcgtgcctctttcagcagctatctggaagccctaacctgtgacttcaacttgcatctcattgtccacttgcatgtgcaagagaggtcaaaaaggcatgttttggccaggcacagtggctcacacgtttaatcccagcactttgggaggctgaggtgggtggatcacctgaggtcaggagttcaagaccagcctggccaacatggtgaaaccctgtctctattaaaaatacaaaaattagccaggtgtggtggcatgcacctgtaatcccagctacttgggaggctgaggcaggagaatcrcttgaacccaggaggcggaggtgcagtgagccaagatcacgccaccgtactccagcctgggtgacagagcaagatcctgtctcaaaaaataattaaaaagaaaaggcatgttttagctgggtgcattgctggcctcagtaagaggttcagttactgaggaagaatggagggatagctattgggtaggcaagaagcaatctctgctgagtgccttgcttgccatttgtttttaggttc

SEQ ID NO: 484532 - DNA, 515 bp, Homo sapiens
tgagtcagctgagtctaatactctttggaaaccagtaggtgacagacgccacagccaactcttcccccacatttaggtcgctcattcttgtacrcaatagaccctgccttacttcactcatttcacctccatctcttctctcttgagatcctaaatttaactcactgaagggagggaccacttcatctgttacatcccttttgacatgcaacacagggctgatttttccagaggttaccagccaaattcctatggcatgaatgaataaatgggtgcttctgattaccaaatcagtctccagccctcagttccctaagaccatctcaaaattcatagttctcccatcatctctagtctgaaatatctaaaatcctccacttctattttctccttcaaatctggccctcttaaccttctcatatctcttaatgatacagttattctctaatactcagcagaaacctcaatcatcttggaatccttctcttcttggtctctaaaaatcaccaaaatcc

SEQ ID NO: 484533 - DNA, 528 bp, Homo sapiens
cacccctgctcccgctcctcacttccctctatcaaagcagcagcctctgctttgaaagaacagaatggcagcgctggctgtgccctcactagactgagtttcttcaaaatgtgcctcattcatgggagtgccctaagcctgggaccagccaggggctcagtcatgttcacaagcccagccgaaggagggtgggaagggtggtcaggagaagagaagcaagcagaggggtagggggtgacygcatcaaccaaggcttgcatggagaagagggtccaggtcggggatactcacacttgctcacacatcagaacacctggaggtgcatccaagctcaaagagctgggcccaccccatgctcctgattcaacaggtctgtgctggggcccagggacaggcatccccaaatggtgctgggtgatgctgatgctgctggtcctgggaccacaccttgaaaccccatctggtctgaatgacggtgaagccaagagtaggaggaggatgaagaaactaggacgagaagagggctgg

SEQ ID NO: 484534 - DNA, 624 bp, Homo sapiens
ttcatgttagctcaaggtttgcagagctcaagtttctctttctgaatcctcccttccctgtgcactatttccagtgcagtcagcagcccttctttatagactgtgttttccttgttactttaaaggagaagagggaatagatgtgtgttatcggtactatcttaaataaggaattagcatratacattgttgataaaaatagtcaagtttgccaaccatcagtcaacattattacataggttaactgatgacagtacttaaataaccagatgtactctttttttttttccttaccactttaaagtttggatttttttttctctctaattaaatccaacaggtcaaaacctaatgttagaattgatcagcaaagctaatgctttatggtgtgtctaacgcctacatccaaagagcctgcatcttaacaattcccttgcttttttcaggaaaattgttgtttttattccaaatactaaatgtaaatattaaaatttttttattggatttacctacacagaaataaattgttagactaagacctgagttctgtctaaataataaaaactcattgatatggggctttgatgctacctataggtctatttaaaacattgacctgaaaat

SEQ ID NO: 484535 - DNA, 646 bp, Homo sapiens
actcagggtttctggaaggacagctctaaatgcacagtctatatccaatttgcactgtcatcttggaatgggaagaacattggaatgacaagttagattgaaaagctgttaaaagccagaaaaataatgagtgtctaatccataaatggaaaactgtcagtcccttatgtctttctaagacttggcttcatggtaaattcaagcacaactcctgagttttcaaccagcccttaattgcaaggaaataaaccattcagagaagaggaacaatggacctcactttggtgtctgcagtgggtaaatttgggataatataatttattttggagatctgtacagaggtatgcatctacagatgtaaagcctggctggtgattttggaagttaaatccctttgctttatgatgatgaccttcaatgaccttgctctgggcatcacactggaatgtgtatccctggataacaaaaagatccctggaaaaattatcactctgctgcctatatcccacyctcccctgcttactatcaaggatttgtgtctgagtagttgacctcctaggctaagagagctgtctcaaagcttggggtttccatggcttctctttctctacgctgagatctgggaacccccatgaagtctaaatgg

SEQ ID NO: 484536 - DNA, 646 bp, Homo sapiens
actcagggtttctggaaggacagctctaaatgcacagtctatatccaatttgcactgtcatcttggaatgggaagaacattggaatgacaagttagattgaaaagctgttaaaagccagaaaaataatgagtgtctaatccataaatggaaaactgtcagtcccttatgtctttctaagacttggcttcatggtaaattcaagcacaactcctgagttttcaaccagcccttaattgcaaggaaataaaccattcagagaagaggaacaatggacctcactttggtgtctgcagtgggtaaatttgggataatataatttattttggagatctgtacagaggtatgcatctacagatgtaaagcctggctggtgattttggaagttaaatccctttgctttatgatgatgaccttcaatgaccttgctctgggcatcacactggaatgtgtatccctggataacaaaaagatccctggaaaaattatcactctgctgcctatatcccaccctcccctgcttactatcaaggatttgtgtctgagtagttgrcctcctaggctaagagagctgtctcaaagcttggggtttccatggcttctctttctctacgctgagatctgggaacccccatgaagtctaaatgg

SEQ ID NO: 484537 - DNA, 664 bp, Homo sapiens
gttcaaaaccttccttttagtcttctttgtggactctatacttagcccttttctctctcaaaaatgtccatagccaatttcatatacctctatgcatggaggtttttacctccacgcttaaactattggttttggaatatatatctttagctgagtctcaactcatgccagaaaaatatttataactgcttactggacagttgttgattttacagaatcagataaaaacctgcaatgctaactgattttctttcttcctcacactagatctccctcttaatccagatcttgatttttggcattattatttatcaaaaactgtaagccacagtcaatcttttgcctctctctctttctttcacccattttaagtttctgcaatctgcattactttttcctgcacatcctattactactgcctttccctgaagctttgctgcagtcccgtaacctccctgcrtctgattttggctcatcacattaatttattcttcagcatactgtagctctgatcacatcactttcctgcctaaaaccttttaatggctgtcagtcttgcatgcaattaaagttaaacttgttagcatggctctctgattcctccccaacatggctactcccttcctttctcaccccataatatcctctctctccaaatatcaca

SEQ ID NO: 484538 - DNA, 506 bp, Homo sapiens
taaaaacaggcagtggtaaaaccttggctgttctcatccctgcwattgaactcgttgttaagttaaagttcatgcccaggaatggaacaggggtccttattctctcacctactagacaactagccatgcaaacttttggtgttcttaaagagctaatgactcaccatgtgcacacctatgggttgataataggtggcagtaacagatctgctgaagcacagaaacttgctaatgggatcaacatcattgtggtcacaccaggccgtctgctggaccatacgcagaataccccagggtttatgtataaaaacctgcagggtctggctattgatgaagctgattgtatcttggacattgggtttgaagataaattaaagcaaattattaaacttttgccaacacacaggcagactatgctcttttctgccacctaaactcgaaaagttgaggacctggcaaggatttctccgaaaaaggagccattgtatgttggtgttgatgaagat

SEQ ID NO: 484539 - DNA, 506 bp, Homo sapiens
taaaaacaggcagtggtaaaaccttggctgttctcatccctgctattgaactcgttgttaagttaaagttcatgcccaggaatggaacaggggtccttattctctcacctactagacaactagccrtgcaaacttttggtgttcttaaagagctaatgactcaccatgtgcacacctatgggttgataataggtggcagtaacagatctgctgaagcacagaaacttgctaatgggatcaacatcattgtggtcacaccaggccgtctgctggaccatacgcagaataccccagggtttatgtataaaaacctgcagggtctggctattgatgaagctgattgtatcttggacattgggtttgaagataaattaaagcaaattattaaacttttgccaacacacaggcagactatgctcttttctgccacctaaactcgaaaagttgaggacctggcaaggatttctccgaaaaaggagccattgtatgttggtgttgatgaagat

SEQ ID NO: 484540 - DNA, 506 bp, Homo sapiens
taaaaacaggcagtggtaaaaccttggctgttctcatccctgctattgaactcgttgttaagttaaagttcatgcccaggaatggaacaggggtccttattctctcacctactagacaactagccatgcaaacttttggtgttcttaaagagctaatgactcaccatgtgcacacctatgggttgataataggtggcagtaacagatctgctgaagcacagaaacttgctaatgggatcaacatcattgtggtcacaccaggccgtctgctggaccatacgcagaataccccagggtttatgtataaaaacctgcagggtctggctattgatgaagctgattgtatcttggacrttgggtttgaagataaattaaagcaaattattaaacttttgccaacacacaggcagactatgctcttttctgccacctaaactcgaaaagttgaggacctggcaaggatttctccgaaaaaggagccattgtatgttggtgttgatgaagat

SEQ ID NO: 484541 - DNA, 506 bp, Homo sapiens
taaaaacaggcagtggtaaaaccttggctgttctcatccctgctattgaactcgttgttaagttaaagttcatgcccaggaatggaacaggggtccttattctctcacctactagacaactagccatgcaaacttttggtgttcttaaagagctaatgactcaccatgtgcacacctatgggttgataataggtggcagtaacagatctgctgaagcacagaaacttgctaatgggatcaacatcattgtggtcacaccaggccgtctgctggaccatacgcagaataccccagggtttatgtataaaaacctgcagggtctggctattgatgaagctgattgtatcttggacattgggtttgaagataaattaaagcaaattattaaacttttgccaacacrcaggcagactatgctcttttctgccacctaaactcgaaaagttgaggacctggcaaggatttctccgaaaaaggagccattgtatgttggtgttgatgaagat

SEQ ID NO: 484542 - DNA, 671 bp, Homo sapiens
tgaaaattattttttctaaaacaccttcaagaacagtacagattttctatttcaaattaatattcattacattcaaagtgcagagaagggaaacagtgacatagactattcaataaataaataatattgctatggtttgaaygtatgtgtcccaccaaaatttatacattggaacttaaaccccaagatgatgatatgaagaggtggtgctatgggaggtgattaggccatcagagactaatcccacccttattaatgggattaatgccctaacaaaagaggcctcagagagcttccttgcccttctgtcgcttctgctatctgaggacacagcaacaaagcaccatcttggaagcatagaatgagccttcaccactaattgaacctatcaatgccttatcttggacttcccagcctccggaattgtggaaaataaatatttttaaagacagggtctcactatgttgcccaggttgatctcaaactcctgggctgaagtaatactcccaccttggcctcccaaagtgccaggattactagtgggtgccactgtgcctagcctgcaaaataaaattctgttgtctacaaagtacccagtctaaagtattttgttatagcatcaggagcagactaagacaatatcgcttaccagaaaattgtcctgtcatttt

SEQ ID NO: 484543 - DNA, 671 bp, Homo sapiens
tgaaaattattttttctaaaacaccttcaagaacagtacagattttctatttcaaattaatattcattacattcaaagtgcagagaagggaaacagtgacatagactattcaataaataaataatattgctatggtttgaacgtatgtgtcccaccaaaatttatacattggaacttaaaccccaagatgatgatatgaagaggtggtgctatgggaggtgattaggccatcagagactaatcccacccttattaatgggattaatgccctaacaaaagaggcctcagagagcttcctygcccttctgtcgcttctgctatctgaggacacagcaacaaagcaccatcttggaagcatagaatgagccttcaccactaattgaacctatcaatgccttatcttggacttcccagcctccggaattgtggaaaataaatatttttaaagacagggtctcactatgttgcccaggttgatctcaaactcctgggctgaagtaatactcccaccttggcctcccaaagtgccaggattactagtgggtgccactgtgcctagcctgcaaaataaaattctgttgtctacaaagtacccagtctaaagtattttgttatagcatcaggagcagactaagacaatatcgcttaccagaaaattgtcctgtcatttt

SEQ ID NO: 484544 - DNA, 671 bp, Homo sapiens
tgaaaattattttttctaaaacaccttcaagaacagtacagattttctatttcaaattaatattcattacattcaaagtgcagagaagggaaacagtgacatagactattcaataaataaataatattgctatggtttgaacgtatgtgtcccaccaaaatttatacattggaacttaaaccccaagatgatgatatgaagaggtggtgctatgggaggtgattaggccatcagagactaatcccacccttattaatgggattaatgccctaacaaaagaggcctcagagagcttccttgcccttctgtcgcttctgctatctgaggacacagcaacaaagcaccatcttggaagcatagaatgagccttcaccacyaattgaacctatcaatgccttatcttggacttcccagcctccggaattgtggaaaataaatatttttaaagacagggtctcactatgttgcccaggttgatctcaaactcctgggctgaagtaatactcccaccttggcctcccaaagtgccaggattactagtgggtgccactgtgcctagcctgcaaaataaaattctgttgtctacaaagtacccagtctaaagtattttgttatagcatcaggagcagactaagacaatatcgcttaccagaaaattgtcctgtcatttt

SEQ ID NO: 484545 - DNA, 335 bp, Homo sapiens
tttgtaattttggtaattcctggagtttggctttcagttacctctgtcctatggctgtgagaaatgagatccattttagtatggwcttagaaagtgtgtgtgtgtcaatctgtgttatgatctgagaatttaaggagctgagcttgtcatctatttttgttgaagcagactagagccaagaaaagaaatgaacaccactctcaagttcttgaatttcttttgactttcctatagtttgcaggggcaaataattgctttaataagtagtgatctggaaaatatttatcttttaatttttttctgccactatacaatatcaagcacatattatccct

SEQ ID NO: 484546 - DNA, 478 bp, Homo sapiens
ctgcagaatgccacggagctcctccctgggcagtcagagcttcttgcagccttggggcccacaggactgctgcttggaatctcccctccagctactctcaggccttttctgctcctgargagaccattgaaattcttgagtcttaaaaatatgcataccttttgactctatttctggaaatccagcctaatgaaataatccagaaaatggaaaaagctgtaatgtctgcacactctttccagcattgttttaaatagcatgaaagtgtaaacaagatatatgtcaaacaatatggaaaagatttgatgcattattgtggatcttcttactggaatttgaagcatacattcacaacgatagttatgatgacaattcaacacccagataaacacttaagaaatagaatgaagaggaccagggagctgccagttatggagtgttgtcccagcacacactcggtgttttgctcacctcccac

SEQ ID NO: 484547 - DNA, 530 bp, Homo sapiens
tggagcctgatgaggcctggctgcaccccgggtgtggctttcctggggctcacmcgttgactggtacctggactcgctgcccgggctgctgtcagtcccttaacatcagcttctgttagcgtttgataagcaccaatcagcaaggtcagagtcaaggccactcttcctgtcttgcaagcagaaggcagaatccagaactgacctgctgagcagaagctggtgtcctggtggggcacctctctcctgtccttgaagtttccggcatggcgtggcacaaaggcagcaccatatgggtggaagtagcctgtgaggggggcctcatggggtgggtcccaccagggcttggggtcctcatcccctggggagtctgctggctgtggagggtgagctggaagcctggcacctggagtggcttctggggggtctgcaccatgcagggtgaggctgggtcccaccccgggcccatgtgccatcactgccagggagcagggtagagcagcacaggctctactctctgcttctgcacagtg

SEQ ID NO: 484548 - DNA, 420 bp, Homo sapiens
ttggtgtggagggcactgcaaggcactgaagagttggggctccagaccccactcagggagcctccagatgagtgttctagaaacctgcttccactccagctaagcttgttttcatttacatattcattatgtcatcacttatggtttgctcaaaccctttctgaatgagatggacctaatttaataaaaattacactgacaagtactctaaggagaaggggcccttatatttctatgggaagagaaaagaaacagtaatgtgtgactgtccctaaagccaacgcgtttgtgtgaagacatgtcttatatgggagggtggggacaccgttggaagacgacrcctcaccctccccacacaggtggccaaaggtgcaaaaagaaggtggaggagctcaggtgaaagcactggtggcctcacag

SEQ ID NO: 484549 - DNA, 485 bp, Homo sapiens
ttcgctctggctttctctttgccttacatttagagggggacaattagcatggacatacatgcatcagggatattgtgactcccgttgatattatctcaratccttaaagccaatttggtaaagcagctaggcaaattttaggggtagctagctgttgctagcactgaattcctaattctgctgctattgccaaaccactgtatgctttctccccacatgccagtcaagagcccatcctctggtccttagaggcattaacttcctttgaagccttgaagttagcattgtctacacccctgcccgccccaccccaggcttacctaattttgataaaccttttcacctatattgtcatgaagataatgggattactgcaagttttctaggccagccttttgcctctcagatatgccctgtagcatatttctcatgccaagtggatcctgtggcagcagccatgctcccatgcccacgtgcagtgtcag

SEQ ID NO: 484550 - DNA, 583 bp, Homo sapiens
agcagaacgagggtgttccccggagggcgatgcagcattgcagcctgttagacggcctcagagcggtgctggccccatccatcgagccaccttgagcaagtggctgaggctggtctgagctggttccctcacacccactcctttgcctgctggagtccttgcatacacacttgctccatccacacacccracccagtgcgtgggagtcaccgagagactcctgccctcacctgcagctttcctagaacagctccactcagccataggtggctgtttcctgaaaccttacatcttgggccctcaaagctgcaggccccagacagggcatttggagcaggcagacctgacactcgcctggtggagagaaagcggcgctctggcaggtgaggcagcccacctgtccaggcagggcactgaaggtgtccgcaggcagagccggcagtcttcagctgccctggccctgctgctgcttctgaaggtccctgctgggcagggccttgggctgcgagtccctgcagggcagtagtggcccaccgggcaggaatggccctggtagctctctgaccctggaggaacacagagg

SEQ ID NO: 484551 - DNA, 583 bp, Homo sapiens
tggccagcgccctgtccccatgacactgctgggtgcacatcagtcctcctatctcccgcacaagctcccttccaagggtcgctttccagagtggctacagcgcggtccatgctgtcatgggtgatggaacagccctggaggccaacatactgctgtgtggggagccagggaagacacttctctttcccatcacctttgaggtccaatgagccatcatgtccctgatctcctcacccagggcctgcaccctcccaccgacctgtgcagggcccaggccacctgacatcggagctgccatgggcaaagagctataaaaccagaggcacataccagcgtcctaaagagacatgcactactgacagaccacagggtggggcagccttgtgcatgccttgtgcatggatagccttacttgcctcccccttcaacccacatgcttcagatggatgagggcgtagctagagagcacaggtaaggcagggctgatgggttgggacccatccatctcagcctctgccaccacgcacccctggcacagagaaccttttaacactgmgtccgtttactgtcactttgaattgtc

SEQ ID NO: 484552 - DNA, 462 bp, Homo sapiens
acagaagggatgtcacagaggccatcacagacaccgtctgctcggaaggtttcttcccagagtcaagatccacttctggcaataccctggtcactgttctcttgatttccccagaagacgtcttagtggtttttatgcggactttggggattggtggtgtggaccctgcgggagaagccggggttcctttgatgctgttctcacttgagatgtttctgggactatccagttgctttagggatgtttttttggtcccgtcgatgagattctgggattcaggagacttgtcggcggctctcggactgtcgtttacttcttttgataacgaggaggattccctcgaattggccacttgttctttggaggagtctgatgccacctttttagtgctgagagctgcgatggcagygatgcaggacaagaagttggagaacgactttgtttttgatggcgcaatgccgg

SEQ ID NO: 484553 - DNA, 628 bp, Homo sapiens
atatacttgaatcatcctggaaccatcccccacctcaggttcctggaaaaattatcttccacaaaaccagtccctggtgccagcatggttggggacacctggttaacagatgtgagacccctttgccttgtcttggaataatgtgcagatatgcattgtgtgaatgacatctgatggcgccatcttgccctgtacatcattttagggacagctccagtatttcatgaaaattaaaatttcttctagtgacgaacaaaatgatactcagaagcaattttgtgaagaacagaacactggaatattacacgatgagattctgattcatgaagaaaagcagatagaagtggttgaaaaaatgaattctgaggtattttctttagttattttcaaatgtttttatatgtgtgtatattttaaagaactgtattttggaaatataaaggatttttaagtcatatatatgtgtgtatatattctatatatcctttgtcatatatctatatacgtacgtataggataaagccatgttcttaattcaccttcatttgcctgcaacagttgagtagtgacytgcacaatggcctcaatccaaaggagaagtatttgatgtttttcataagaattgacg

SEQ ID NO: 484554 - DNA, 568 bp, Homo sapiens
caatataaagcattatcctaacagacatctactggctgagagtttgagtctgtagagaaggatcgttggtccaagtcaggtcttaacatccattggtttttctgcccttggtgtgattgatcaactccgtaatagtggacaatcacattatctactttaatgagatatttatgaataaatttagttataaactatgacatagttgagatgccctgaattataagccataaagagtaggacaactaagaagcaaaattaggacttaataacattttctgaaaactacaacatttgcatattagaacctatgaacaaaatacgcattgggttttatttgggattccaagataattttagtcataaagtttaggaacagattattccattgctttactatttctctgagcatttaaaaaatgttatctcgttaaayctttataacaacctagtgaaataaggcagcaaagtcctcactttgttgaagaagacattgagcctaagagaagcaagttgcccaagaacaaatagctgttcattatggagctaggacttatgcagagttgggaca

SEQ ID NO: 484555 - DNA, 542 bp, Homo sapiens
gctactgccacattactggcttctgactaacatgtgaaaaataattcaccttagcccaacgaagaaaaaaaacgtgaaccagcaaacttaayttggtcaccatttgtttggactaaacttgttatgtgttaaatctaccaaaaatgaatcagcagatgatttgtagtgttccaaaatcttcctcacttgaaaagagtttacctcatgaaaccctaactagtgagcccctacagtgcactgaagtgcttttctaaaagattcctaactggattgtaggcaccatttaaattattaggagccgaaatcaacaccaaacagaaagagatgcaatttctcaaattttaattgagattatatactgtcatatgatagtgttatgtatccagattatctgcttaagtccagttctaatatattctaatgtgtactaattacagtggataaagatttttttaataatatgtactaattttctgcaactgaaataaattagaatgttattgtgtttgtgcactaacaccaaaggttccattctgcaagat

SEQ ID NO: 484556 - DNA, 542 bp, Homo sapiens
gctactgccacattactggcttctgactaacatgtgaaaaataattcaccttagcccaacgaagaaaaaaaacgtgaaccagcaaacttaacttggtcaccatttgtttggactaaacttgttatgtgttaaatctaccaaaaatgaatcagcagatgatttgtagtgttccaaaaycttcctcacttgaaaagagtttacctcatgaaaccctaactagtgagcccctacagtgcactgaagtgcttttctaaaagattcctaactggattgtaggcaccatttaaattattaggagccgaaatcaacaccaaacagaaagagatgcaatttctcaaattttaattgagattatatactgtcatatgatagtgttatgtatccagattatctgcttaagtccagttctaatatattctaatgtgtactaattacagtggataaagatttttttaataatatgtactaattttctgcaactgaaataaattagaatgttattgtgtttgtgcactaacaccaaaggttccattctgcaagat

SEQ ID NO: 484557 - DNA, 639 bp, Homo sapiens
ctgaaagagggacaggtgggatcctaggatatcaatgaataaaaaaacaactctggttcctactgttttagccactgctcatctagtatttgcagtccaaagcattctacctggtcaattcccatggcccacaggataagagctactcatttctatagtattaaaaagtctatcataaacttgccttagctaagtattcacctcactcccaacctctggtatctcacacttttggtaatascaaaagtgaactgctcagaaaccctgccatgttcactcaagcatcttgtcttctgcacttgctgctcttcctcccaaacgggcaatctcattagatgttccttctggcaaacacacaatctcactccatgttccttctgccaaatgtcattcttctgcttctttccctgaaaaattcttctcactctgcatgcttacattaaatcctgcctcctttctttctaaagctttcactcctcatcacatatgtctggcacataatcaatatcacatataataaatcataattataagattccagtgggcatctagcacacagtaagcactgaataaagcagcaaaataataaaaatgacaatgataataataataagctcctgtctgtgtttttgtgttctg

SEQ ID NO: 484558 - DNA, 639 bp, Homo sapiens
ctgaaagagggacaggtgggatcctaggatatcaatgaataaaaaaacaactctggttcctactgttttagccactgctcatctagtatttgcagtccaaagcattctacctggtcaattcccatggcccacaggataagagctactcatttctatagtattaaaaagtctatcataaacttgccttagctaagtattcacctcactcccaacctctggtatctcacacttttggtaatagcaaaagtgaactgctcagaaaccctgccatgttcactcaagcatcttgtcttctgcacttgctgctcttcctcccaaaygggcaatctcattagatgttccttctggcaaacacacaatctcactccatgttccttctgccaaatgtcattcttctgcttctttccctgaaaaattcttctcactctgcatgcttacattaaatcctgcctcctttctttctaaagctttcactcctcatcacatatgtctggcacataatcaatatcacatataataaatcataattataagattccagtgggcatctagcacacagtaagcactgaataaagcagcaaaataataaaaatgacaatgataataataataagctcctgtctgtgtttttgtgttctg

SEQ ID NO: 484559 - DNA, 639 bp, Homo sapiens
ctgaaagagggacaggtgggatcctaggatatcaatgaataaaaaaacaactctggttcctactgttttagccactgctcatctagtatttgcagtccaaagcattctacctggtcaattcccatggcccacaggataagagctactcatttctatagtattaaaaagtctatcataaacttgccttagctaagtattcacctcactcccaacctctggtatctcacacttttggtaatagcaaaagtgaactgctcagaaaccctgccatgttcactcaagcatcttgtcttctgcacttgctgctcttcctcccaaacgggcaatctcattagatgttccttctggcaaacacacaatctcactccatgttccttctgccaaatgtcattcttctgcttctttccctgaaaaattcttctcactctgcatgcttacattaaatcctgcctcctttctttctaaagctttcactcctcatcacatatgtctggcacataatcaatatcacatataataaatcataattataagattccagtgggcatctagcacacagtaagcactgaataaagcagcaaaataataaaaatgacaatgataataataayaagctcctgtctgtgtttttgtgttctg

SEQ ID NO: 484560 - DNA, 514 bp, Homo sapiens
atggcccaaggtcccactgatgcaactataccaccccagcctgctggctttgggtggcctgagggcatagcttgccaggtaattttccagacagtctgaggctcagagttgacttccctaataagatgccatacatacctctcatgagagtgtgatttattaacaagatgcatggctgcagcgctctgggaaccacccaaggcagcctgcactaaggtggagacgtacctggcactagccatcccttagccgagcagtcactgattgtggccttgatctggggtcttgggaggggcttagcccacaggttgagggtcaggcactcacaaggctccaaacccaccaggcccttgcccccgaaagtggggtccacttggccaggtgcggtgctcatgcctgtaatctcagcacctggggatgccaagatggggggactgcttgaggccagaagtttgagaccagcctgggccacatagctagacctgtcttyacaatatcagaaatattagctgag

SEQ ID NO: 484561 - DNA, 651 bp, Homo sapiens
tgacagctgtcggcagccgcccctccgccccgtgacatcccgcaggtttcagaaccgcggcgccgcgggcacagactccgggtccagagcgcgcgccctttcctctgcggccgccgtttcctgaaagggctgcgcgggtgtgaagaacttgctcaatgcgctttgtaggatccactgttcctctttcggccgcggtgcgccgatggtccggggagcccgcttctcgccccctgccccttccttctcttcccttytctcttttcctctcctgtctctccgcccacccgccgcagccccacaggagaggggtcgcttccctggttgctctcctctcctgtcccttgtgtgtccccttgtcttccctcggtctgcagaagggacggggtggcggctggggagcgtcaggggaagagggcaagagcgtgggctacgagcttgcaggcgatgcccggcttcgcgctcggcgggagctgcgggccaacccgggcccgcgctccgtccctccgcggtgtctaggggtcgcccgggctggggtcgcgtcaccctccgcccagcgccggcgtggtggggcttgcgcggtgcaggacccccgagggcccagggggtcccaaggcgctgcgggtccagtgtccctttgtttgcagagtcttg

SEQ ID NO: 484562 - DNA, 601 bp, Homo sapiens
gtgaagtctggatgacattcttatggagagcagttttcttttttgcatttgatcccccacttctgttacaaataaaacatgtaaggcattgtgccagaaaagaatctgcacacacaggctgggaacaaggcagtagtgcggtggctcacagcagcagcagcagctatcaggggcaagtgggtttctcctgcctctgtgggctgagtggggctgggagacggggcctccagctccataagccttttccctcctccacagagccaggagagggcccaccccaccaygcaggtcctgcctgcctggctcccagctctctacctcccaacgctggacctgcatggcccaacatctatggcagcgggtttcaagcttattttttatagcagaaccccttttacaaatataaccctgatctgtgaatgatcagggaaagggagggattagggcagccagggacaagacagagggcaccctggagaccaagggggagaggactctcccttcttgctcatctaatgctgcagaagagggggcccaaaggcctgcaacccagagggccctggcaggacagagcactaaccctgagaatggagaccgagtt

SEQ ID NO: 484563 - DNA, 522 bp, Homo sapiens
tgaggaccctgtctttcttccctccaccgaatatcttcacacacaaggaggagcagagagaggcagcagcagcccagtcagggcagaggtagtgcttcgcttcagagggaagggttgactcttagcttgcttctcaaagctcaagtcgggggctgggcatggtggctcacgcctgtaatatcagcactttgggaggccaaggcaggcagataacctgaggtcaggagttcgagaccagcctggccaacgtggtgaaamcccatctctactaaaattgcaaaaattagcctggcatggcggcatgcccctgtaatcccagctactcgggaggctgaggtgggaggattgcttgaacccgggaggcagaggctgcagtgagccgagatcgtgccactgtactccaccctcttgacagagctagacctcgtcaaaaaaaaaaaaaaaaaaaaaaagctcaagttgggagaggagaggctccttaagacagaatgggctggagtccactccactctggcagggaac

SEQ ID NO: 484564 - DNA, 339 bp, Homo sapiens
gcatttatgggtccaggttttccgtcttgtcttgtcytgtcctgtcctgtcctgtcctgtcctgtctcctcttcttttctttctgacagggtctcactctgacccccaggctggagtgtagtggtgtgatctcggctcactgcaacctctgcttcctggcttcaagcgattcttatgcttcatcctcccgagtagctggggttagacatgcaccaccatgcccagctaatttttgtatttttagcagagacagagttttgccatgttgatcaggctgccccattcttatcctaaaagtgcatccacaggttgctgaggttaaaacagaaccagcatact

SEQ ID NO: 484565 - DNA, 526 bp, Homo sapiens
caggcctacccagctgcaacctggctggataacttctcccagcaccagttccacgggtatccctcatattmttggtattcttggtatctagctccctgctccccctatagatgtaatttctcaagctgtgatgcagtatgcttctgggtttttccagggcagaccagagagtagtactgcagcaggctccccagaaacagatggggaatggtaccccaagttatcactctcctggctccttcccacagcagcagtttggtgcactggagtggtggccagacctggggagacacatcacagcacacagcattcccatggagggcagatgtttcccctggagaattgctcccacgcagggctcactcacacccttgcttcaaccttgtaggccaaaagcctggctcagctactctaacaagggagacagaggctctgcagtgctgcccctacgaccaaactcctgtagctctgcggctgcacgtgaattacagcccactctgtgactgtggcccaaggcttggaggtg

SEQ ID NO: 484566 - DNA, 526 bp, Homo sapiens
caggcctacccagctgcaacctggctggataacttctcccagcaccagttccacgggtatccctcatattcttggtattcwtggtatctagctccctgctccccctatagatgtaatttctcaagctgtgatgcagtatgcttctgggtttttccagggcagaccagagagtagtactgcagcaggctccccagaaacagatggggaatggtaccccaagttatcactctcctggctccttcccacagcagcagtttggtgcactggagtggtggccagacctggggagacacatcacagcacacagcattcccatggagggcagatgtttcccctggagaattgctcccacgcagggctcactcacacccttgcttcaaccttgtaggccaaaagcctggctcagctactctaacaagggagacagaggctctgcagtgctgcccctacgaccaaactcctgtagctctgcggctgcacgtgaattacagcccactctgtgactgtggcccaaggcttggaggtg

SEQ ID NO: 484567 - DNA, 526 bp, Homo sapiens
caggcctacccagctgcaacctggctggataacttctcccagcaccagttccacgggtatccctcatattcttggtattcttggtatctagctccctgctccccctatagatgtaatttctcaagctgtgatgcagtatgcttctgggtttttccagggcagaccagagagtagtactgcagcaggctccccagaaacagatggggaatggtaccccaagytatcactctcctggctccttcccacagcagcagtttggtgcactggagtggtggccagacctggggagacacatcacagcacacagcattcccatggagggcagatgtttcccctggagaattgctcccacgcagggctcactcacacccttgcttcaaccttgtaggccaaaagcctggctcagctactctaacaagggagacagaggctctgcagtgctgcccctacgaccaaactcctgtagctctgcggctgcacgtgaattacagcccactctgtgactgtggcccaaggcttggaggtg

SEQ ID NO: 484568 - DNA, 394 bp, Homo sapiens
ttctcattagcatcctttgcacaggggtaggggtgggggataactcagggacagctctcagagtgcagagctggggcttctgttcccaacccaggcccccggcaggccccctaggtgtgtcatctgcctccagcccagctaggcaagtgtgyttccatctgggttggggagagggatgggtggaagtctcctgtggggtaattgtgagtcctgatctggtcccagaatgtgagcccaccttagttgtgggaccctgggacctccaccctccccagcccgctgagcagggaggggcatgcagagctgggtggaggggaagcaggttcctctggccacacaggctcttcctgtgccaggggcagcccaggcacaagatgacaaggagaaccggaaa

SEQ ID NO: 484569 - DNA, 635 bp, Homo sapiens
actcctcaggggttatttgttagtttatctaaaagacaacaaatgtctttggatacattttattaagtagtgttgtattcaaaagttgaaaggctccctaggtgtggtggctcatgcctgtaatcccagcactctgggaggctgaggaaggcatactgcttgagtctaggagttcaagaccagcctgggcaaaatagcaaaaccccttctcaactaaaaatacaaaaaaattagccaggcatggtggtatgtgcctgtattcccagctacttgggaggctgaggtgagaggmtcacctgagccctgcctgggcaaccagagatcctgtctcaaaaaaaaagaaaaaaaggttgaaaggtgctactgttagcccacttgtgttttacaccctagcaatggtatgaggttggtcctcctccagtcttctggctttctggcttcttcttcacacaagccttcctgaccggtgcccagcagaactacgccaggaaatacacaattcctattgatcttcttgggtttgactatgaagtgatggaagacaaagaatacaagcatcctcctgaggatggtaagtgcagggacagaatgagtcggctcatatctgggcactgaacaaaaacatgacattctag

SEQ ID NO: 484570 - DNA, 705 bp, Homo sapiens
ccagcctgggtgacagagcaagaccctgtctcaaaagaaaaaaaaaatcatttagatgaaatatgcattttgttatcacaggctaagcagctattgattgcaaagagacccctctcaaaaggcagtggtttaagaaatgggcaagtttttgtctctctcaataacagttgaagatgactactccatattaaatcacttggacattaaaaaaaaaaaagatgaccgctccgggtctgagtgcagctccgctccagtcattcagagacataacattcttacatagttgatattccagccaacagggaaagagaaagaatggaagtccaggttcagaagtttcttcttcagtatcaagggaagtagaagttgcaggcatcacttctcatcacattccaytggcaaggggttagtcacatgatctcaattggctaggaggccagggtctcaccaacttacagagtttcccaagcattccagtagatgttaacaatcttttccatcgacagcacaaagaggatctctgagatggagacaggaatgggggaaatggtagaagcccatataccactcaaccctaaaaactgacatttataggacacagctttgcccaagccaaaatattctattatgtctcttgtgttttggagttttccaagttttatgcaataagaatatgttagttttataattgataaaattttttca

SEQ ID NO: 484571 - DNA, 584 bp, Homo sapiens
ctggtgcccactcccttccttcttctctctcctcctttcttgatctttctcccaggcactttaagtacatcagctcatttaattctcccycacacccctaggtgatacgatgtccatttgacagaggagggcattggaggtggaggaggattcattacatgtctgggtactgcaactcagaggctcagacaggaaagcctgaatctacccttacatggctgacccgactctctgtaactggcccttacgcagaaggccatgcagctgttaaggtaacaatgtgttgtccttagcagccttccctaccggaagagactattagtaaattgaggctggtaaatcccagcagaaataaaagggaggaaaatccattcagctcctaggtccaaaaccaatgctcagtacacatcaaacctaaagtatacataatcaccaaccccctgctagaaactctttctacataaatactcacccaagggcctaatgaaatgtgcaaggatgtttgcggaagcactatgacagtggcaggaaacgagatgatatatggggaaagggaatcacccttatttctttctttctcatgg

SEQ ID NO: 484572 - DNA, 584 bp, Homo sapiens
ctggtgcccactcccttccttcttctctctcctcctttcttgatctttctcccaggcactttaagtacatcagctcatttaattctccctcacacccctaggtgatacgatgtccatttgacagaggagggcattggaggtggaggaggattcattacatgtctgggtactgcaactcagaggctcagacaggaaagcctgaatctacccttacatggctgacccgactctctgtaactggcccttacgcagaaggccatgcagctgttaaggtaacaawgtgttgtccttagcagccttccctaccggaagagactattagtaaattgaggctggtaaatcccagcagaaataaaagggaggaaaatccattcagctcctaggtccaaaaccaatgctcagtacacatcaaacctaaagtatacataatcaccaaccccctgctagaaactctttctacataaatactcacccaagggcctaatgaaatgtgcaaggatgtttgcggaagcactatgacagtggcaggaaacgagatgatatatggggaaagggaatcacccttatttctttctttctcatgg

SEQ ID NO: 484573 - DNA, 636 bp, Homo sapiens
acagctttagtatcaaccaccagatgatgctgtgggcagtcagaatatgccaccccagaacatccttttttggcatatttcaagttgattatttagagaactgcagataggaatagttctgaaagctgtccttttataaaggaaatttatatttatctacaatagtaaagtaaacagcagatgcaagcaaagctttttgctactgaaggcccctttatytgcctaaagaagaatgagggtgctgatatcttcccaagacagagataaccacaggcaatcacctattcttttgatggctgtgacctgaccttatcagcacaataagataacctttgctcacagtgcattcctcccctcaccctccaatagtttgtcaccagcatctcccagagccttaattctctttttataactcaaaatactatctgagcttctagacctcattgggttattgggtactcactttcttgtgatacctcagtgcatgtaaataaattggcatgctttttctcctcttaatctttctattgcctgtatatttcagacccaaaccttcagaggggaaagggaaaaaatttcctttgcctctatgatgactttagaagattctatcttccagctttcatattttccacc

SEQ ID NO: 484574 - DNA, 669 bp, Homo sapiens
aatgaagggatgtgccaactctgttaggaggtaccactgattatggtaaaaatggccctggctggtacattgcactctccacatatctgatggggatgtcatggagttggacttccctgatgcagtgactgactcttttaacaggcatgtcccctgcagggatccccggaagttatgcctgtagaattgtggggcaccaggcttctacaccagcacagctcctgtacctctgccatggtagggcctttgtccttttctttgcattgggctgtcccctggggatgggacagctcccgggatagccgtagggctgctgcaaagacamgcccgagaaggaggagcgcccggtgctgcctggggacagtggtggttcctgccttatggccttcccagaggctctgactccaggcaaggcccatggttgacttgtgagtctaatgtttagtaaaacctgagaaggttccctgctggggcattgctggccttgtccactgctggtcagtaatgaagcgtggctaggatttaaggctcctgactcccagcaggtactcttgtttcatcctggagacctccttgagagacatggatcctacctgaagaacctctcagtctgagtcagaaaatacacacacacacacacacacacacaactctgaacaatacaaacag

SEQ ID NO: 484575 - DNA, 669 bp, Homo sapiens
aatgaagggatgtgccaactctgttaggaggtaccactgattatggtaaaaatggccctggctggtacattgcactctccacatatctgatggggatgtcatggagttggacttccctgatgcagtgactgactcttttaacaggcatgtcccctgcagggatccccggaagttatgcctgtagaattgtggggcaccaggcttctacaccagcacagctcctgtacctctgccatggtagggcctttgtccttttctttgcattgggctgtcccctggggatgggacagctcccgggatagccgtagggctgctgcaaagacaagcccgagaaggaggagcgcccggtgctgcctggggacagtggtggttcctgccttatggccttcccagaggctctgactccaggcaaggcccatggttgacttgtgagtctaatgtttagtaaaacctgagaaggttccctgctggggcattgctggccttgtccactgctgrtcagtaatgaagcgtggctaggatttaaggctcctgactcccagcaggtactcttgtttcatcctggagacctccttgagagacatggatcctacctgaagaacctctcagtctgagtcagaaaatacacacacacacacacacacacacaactctgaacaatacaaacag

SEQ ID NO: 484576 - DNA, 586 bp, Homo sapiens
tgctttacaaaatggtatggcaattccccccaaaattaacaatacagttaccatatgatccatcaatttcacttctgggtatatttccaaaataactgaaagcagggtcttaagggggagttagtgtttaatgagtctagaggttcagttttgcaagatacaaggaattctagagagggacagtrgtgatggttgcacaatgatgtgaatatacttaatgccactgaactatacacatttgaaaatggttaagatggcaaatctcacgtctattttactacaatttaaagaaaagctagaaaaaaaggaaatagctaactaactccgcttatttttccctcaaggagaaaagaaaaacatcattcctggagaggtagggagagtaatgaaggacggaaccataggtcctccacataaaaataccacacgttttcaagcttttcaaatttcagactcagctacagaacagtccaaccagtcacatctacccccaggagccacagaaagctactcacctcactgaggtaaataaaaaaagagcaggtggatccatccactccatagtctgcgtagcagggatctgaac

SEQ ID NO: 484577 - DNA, 586 bp, Homo sapiens
tgctttacaaaatggtatggcaattccccccaaaattaacaatacagttaccatatgatccatcaatttcacttctgggtatatttccaaaataactgaaagcagggtcttaagggggagttagtgtttaatgagtctagaggttcagttttgcaagatacaaggaattctagagagggacagtggtgatggttgcacaatgatgtgaatatacttaatgccactgaactatacacatttgaaaatggttaagatggcaaatctcaygtctattttactacaatttaaagaaaagctagaaaaaaaggaaatagctaactaactccgcttatttttccctcaaggagaaaagaaaaacatcattcctggagaggtagggagagtaatgaaggacggaaccataggtcctccacataaaaataccacacgttttcaagcttttcaaatttcagactcagctacagaacagtccaaccagtcacatctacccccaggagccacagaaagctactcacctcactgaggtaaataaaaaaagagcaggtggatccatccactccatagtctgcgtagcagggatctgaac

SEQ ID NO: 484578 - DNA, 528 bp, Homo sapiens
tgctcactccctgacagctaccagaggaagagaatgaaaagccctttgtgattatcgtcatgctaagtcccctctccctgggcaggaacagaccaagaggggacagggaagctgtctgaagcccctgctcaggtcgtcaaggcctttaaacacttttactgggaatgcggggttgagagtgtccacagctccccagtcctggatggcaaacaagggtgacttcatggacacagggcctcccaagttctcctctcttttttgccacgactgtttgttaagcaaattaacaacctggccccagtgaaaccccagtgagtttcaatgtttaacatgcagacataagactgcttggaagggaatgctgtcaaacaacctacccaagagagaaatgggccagaacttagctagatgagcaaacctctagaaagktagcaggctgtcccacaggaaatgggagcaggggagggtatgggaggggacagccccagagcctgccctatcggcaatttcaatcctacctactggagg

SEQ ID NO: 484579 - DNA, 572 bp, Homo sapiens
gctgctcactccctgacagctaccagaggaagagaatgaaaagccctttgtgattatcgtcatgctaagtcccctctccctgggcaggaacagaccaagaggggacagggaagctgtctgaagcccctgctcaggtcgtcaaggcctttaaacacttttactgggaatgcggggttgagagtgtccacagctccccagtcctggatggcaaacaagggtgacttcatggacacagggcctcccaagttctcctctcttttttgccacgactgtttgttaagcaaattaacaacctggccccagtgaaaccccagtgagtttcaatgtttaacatgcagacataagactgcttggaagggaatgctgtcaaacaacctacccaagagagaaatgggccagaacttagctagatgagcaaacctctagaaagttagcargctgtcccacaggaaatgggagcaggggagggtatgggaggggacagccccagagcctgccctatcggcaatttcaatcctacctactggaggtggcaggggcacatggacggagacacctgagcccagatcctg

SEQ ID NO: 484580 - DNA, 615 bp, Homo sapiens
tcatgcttggtgtagacgctcctcagcttacattgggcatatgtcctggtaagcccatcataagttgaaaacacatttaatacactaacctacccagcatcatagcttagctgagcctaccttaaacatgctyggaacacttgcattagcaaaattgcctggcaacatggacaccgtttaccctcaggatagtggggctgactgggagctgcggctcactgcttctgcctagcatggcaagagactgtcctaccactttctactgaacgtgtatcgctttcacacccttgcaaagttgaaaaaccataaatcaaaccattgtaagttgggacaatggtatgaggacagctcagagccatggagatgtgctgattaataagaaatccacttcagtaaaaagggaagctgccagcgtgctgttgaggctcattggaagggaagatgagaccaagtaaatgattcttttttttttgccctttgcaatccagaagtatttgggagcctgaaacccaacgtttagtttggttttaatttttgttctgtccgtggcagtcagagcttcattacctgtgatgatggaactggaatggtggttagccatttgctgacttggca

SEQ ID NO: 484581 - DNA, 615 bp, Homo sapiens
tcatgcttggtgtagacgctcctcagcttacattgggcatatgtcctggtaagcccatcataagttgaaaacacatttaatacactaacctacccagcatcatagcttagctgagcctaccttaaacatgctcggaacacttgcattagcaaaattgcctggcaacatggacaccgtttaccctcaggatagtggggctgactgggagctgcggctcactgcttctgcctagcatggcaagagactgtcctaccactttctactgaacgtgtatcgctttcacacccttgcaaagttgaaaaaccataaatcaaaccattgtaagttgggacaatggtatgaggacagctcagagccatggagatgtgctgattaataagaaatccacttcagtaaaaagggaagctgccagcgtgctgttgaggctcattggaagggaagatgagaccaagtaaatgattcttttttttttgccctttgcaatccagaagtatttgggagcctgaaacccaacgtttagtttrgttttaatttttgttctgtccgtggcagtcagagcttcattacctgtgatgatggaactggaatggtggttagccatttgctgacttggca

SEQ ID NO: 484582 - DNA, 615 bp, Homo sapiens
tcatgcttggtgtagacgctcctcagcttacattgggcatatgtcctggtaagcccatcataagttgaaaacacatttaatacactaacctacccagcatcatagcttagctgagcctaccttaaacatgctcggaacacttgcattagcaaaattgcctggcaacatggacaccgtttaccctcaggatagtggggctgactgggagctgcggctcactgcttctgcctagcatggcaagagactgtcctaccactttctactgaacgtgtatcgctttcacacccttgcaaagttgaaaaaccataaatcaaaccattgtaagttgggacaatggtatgaggacagctcagagccatggagatgtgctgattaataagaaatccacttcagtaaaaagggaagctgccagcgtgctgttgaggctcattggaagggaagatgagaccaagtaaatgattcttttttttttgccctttgcaatccagaagtatttgggagcctgaaacccaacgtttagtttggttttaatttttgttctgtccgtggcagtcagagcttcattacctgtgatgatggaactggaatggtkgttagccatttgctgacttggca

SEQ ID NO: 484583 - DNA, 608 bp, Homo sapiens
ttctcttgaaccgggcctccccatgactgtgggaccgtcccgccagtggagctctggaccgggtgatcctctggctcagagtagtgggaacagctaacaaaaccaacagcccccatgggtgcccatgctttgttagagttgggagaaaatgagggacccagcartgtgatttgggcagtggttcattcattccctaattcattcttgcatacattaattcattgcagccatgcacttacccttttagccacctgtgagctcataatctagggaagggagggccccactagtgaacacactggtgttcagagggagggaggagcacctaaggggtgctgcctggggcagtcagagaaggcttcctggaggacgaggcatttgaactactcctggagactaaatgtgccttctgggtggacaaaccatgggtgggtggcattccagcctccaggctggcacatgcagaggcagtttgatgctgctggactgcaggaaggtgtggagggagtagaggggaggaggccacgtggctctgtggcctcacaaaggtgctctgtgtagtcctagaggctctgagtagtcactgagagtcctgatgggcaggtaca

SEQ ID NO: 484584 - DNA, 608 bp, Homo sapiens
ttctcttgaaccgggcctccccatgactgtgggaccgtcccgccagtggagctctggaccgggtgatcctctggctcagagtagtgggaacagctaacaaaaccaacagcccccatgggtgcccatgctttgttagagttgggagaaaatgagggacccagcaatgtgatttgggcagtggttcattcattccctaattcattcttgcatacattaattcattgcagccatgcacttacccttttagccacctstgagctcataatctagggaagggagggccccactagtgaacacactggtgttcagagggagggaggagcacctaaggggtgctgcctggggcagtcagagaaggcttcctggaggacgaggcatttgaactactcctggagactaaatgtgccttctgggtggacaaaccatgggtgggtggcattccagcctccaggctggcacatgcagaggcagtttgatgctgctggactgcaggaaggtgtggagggagtagaggggaggaggccacgtggctctgtggcctcacaaaggtgctctgtgtagtcctagaggctctgagtagtcactgagagtcctgatgggcaggtaca

SEQ ID NO: 484585 - DNA, 261 bp, Homo sapiens
gccagaaggtgttgctgagagtcctgaatcccactgccaaggctgtggctaatgtgtgcgtgagaagcctgcaaggtcatttccctctgttctgtttctttctgacaaaattgaacacgtttttgccacaaattatctctgaacttccctacagctctgagctgttggcctcacagtgcagcgatgtttgcaagagtctgagggcccctggctgtaggctgggctacckctcccttcctcctcacctccttcgcgcttccc

SEQ ID NO: 484586 - DNA, 285 bp, Homo sapiens
ctggagatgtaaatccccaggaactctgacaggtggtaggcagagagacaggcagaaggtgggtcatgggcaggaggtaggttgggggctggggcgctgacaggggtgggaggaggtagggcaaacgcagtggggaatagtgaggagggaggaggggaggaagttgggagggaagcrggagggaggtgctgggggtgaggtgggagggagggcagctctccctgactgctggagcccttgtgtatggcccaacccacacctgggtgtccttgactgttctgggac

SEQ ID NO: 484587 - DNA, 667 bp, Homo sapiens
ctggctttcccctagccacagtgtgctctcacttccagtcccacgcagcccctccctgtctctgtctgaagaatctgctgaccacaccgtctcctgaccaggccacttcttcctacagacaagggttgtctcaacaagcatgtgtcctgtgaccccatcacaatcgagtgacagagccagcccactgccagactccagccaagcatgaggcggctatgccttggtcaatggggagctgcaggcattgcaaagggtcacggggtaccctgctgggcatttgggcwtttgggcagaagacagccaggccatgatggcagctttacctcacactgccatcctcatgcccttcctcctccatgggtgatggggcggagagaaggcatggcactgatgggccccagggaaagaggatcagcagatgaggtccagtgccgtcggggcagtggcacttcatgcttaggaaagggatgagcaaatggatgggaagcccttgcagaagccggtggttggtgtaaacctgacatgtgggacagatgccatgaggacagtccgactgtgtccttgggtctgcgctgagacaaagcctaccagcagggctttggggcaggtgggtgtctggacccctgttttctcagtgcgtctcccctggtggaccaggctccccaca

SEQ ID NO: 484588 - DNA, 626 bp, Homo sapiens
tgcatcaaataagtaacaacactgtagkaagggacccagttggtaggtggaccagagattaggtatgcctctgtgtattagtctgttctcatgctgctaataaagacatactcatgaccaggtaatttataaagaaaaagaggtttaatggactcacagttttacatggcccaggaggcctcgaaatcatggcagaaggtgaaggaggagaaaggcacatcttacatggtggcaagcaagaaagcatgtacaggggaactcccctttataaaaccatcagatctcataaaacttattcactctcatgagaacagcacaggaaagacttgcccgctcccactgggtccctcccacaacatatgggaattatgagagctacaattcaagatgagatttgagtggagacacagccaaaccatatcactctgtatgacttaggatgctttggatagcaataagtagaaaatcctattgaatatgaattaaactccaagagtagttactttttatttaagaagaattatgagttaattcggcaactcgatgatatgattcaagagccaaactttttctgttatcctagctgccatcatctgcgtagatcacattctctttcacagctacaa

SEQ ID NO: 484589 - DNA, 518 bp, Homo sapiens
tgcactccaggaacctgcgaaaggagagacagatggcagccagactaaaggacacggcccaccccagctctatgtctgtccttgccccgggcttcagtgtcctacctgatcccaaaacaaaactcsaaatacacatcttgaggcacaactactgaaagggcatgtgcttgctgtgtgtgcactctgtggcctttcgtaagatgatcttgaccttgcgatggttggccagcctgtctcagagaaggccctgccacatcttattctggcatcacatgtaagttttattctaagccagagacagtcagcagatttctcagttcccagaaatagaaatcagagcacttttgcacccatctccagaaatggcctctggagcacaattaggggacaggagggtggacagggatgctgctgaaggagttagcagccagtgacacagagctcagcccccgttccaatatttcataccccattgcccctcagccccaagcccacccttccatactccgcctttgaca

SEQ ID NO: 484590 - DNA, 573 bp, Homo sapiens
ggtatttgtcaggattcaacatataaatcaaagtgatcaacattgatttagcaatgttgtgatgtgatcaacgtattaatcaatagactttgagtaaagcagatcaccctctaaaatgtgggtgggccttgtccaatcaggtgaaggccataagagcaaagactgaggtttcccgaagaagaaggaattctgcctcctgactgcaacacagaaaccctgcctgagcttccagccactgccctgtggaattcagactcacgactgcaacaactccccttatcttagtgtgcagtatgctggccagccctacagacttcacacctgccaccaccacactgacaggagccaacactttaaagtcactgtgtgtgtgtgtstgtctgtctgtctgtctcttttgagtctgtttctctcgagaattttaactgatgcaggtgccttcgaggaggtcacctacaggcagggcccctacagtccctccagacagcagctatcatgcagcgtcattgccgcagttttttctgtgaaggtggggaagttaaaatataacagcaacaacagtagcagacattt

SEQ ID NO: 484591 - DNA, 621 bp, Homo sapiens
aagctgaggtcctgcaattcaacccacatccctgaccctcggccctggagactctggggggcagtgagctgtgcaccccaaagagacagagctccggaggccgaggcgggcggatcacgaggtcaagagatcgagaccatcctggctaacacggtgaaaccccgtgtctamtaaaaaatacaaaaaaaattagccgggcgtggtggcgggcgcctgtaatcccagctactgaggaggctgaggcaggagaatggcgggaacccgggaggcggagcttgcagtgagccgagattgctccactgcactccagcctgggcgacagagagagactccgtctcaaaaaaaaaaaaaaaaaggagacagagctcctctgcttccagcaaacctccctttttctctccaaaaatacacatgcatgccttttttcctgcttccactgctgacttagtcatttattcattcggtcaatattaaccgagagtcaaaaagtcccagccgcgctcaggatgcagcagagagaaaagcgaagacccctgccctcatggagcacgccctctagtggggagagacggaaaacaacaaagataaataaggagtattccaggatttatcatggttaag

SEQ ID NO: 484592 - DNA, 621 bp, Homo sapiens
aagctgaggtcctgcaattcaacccacatccctgaccctcggccctggagactctggggggcagtgagctgtgcaccccaaagagacagagctccggaggccgaggcgggcggatcacgaggtcaagagatcgagaccatcctggctaacacggtgaaaccccgtgtctactaaaaaatacaaaaaraattagccgggcgtggtggcgggcgcctgtaatcccagctactgaggaggctgaggcaggagaatggcgggaacccgggaggcggagcttgcagtgagccgagattgctccactgcactccagcctgggcgacagagagagactccgtctcaaaaaaaaaaaaaaaaaggagacagagctcctctgcttccagcaaacctccctttttctctccaaaaatacacatgcatgccttttttcctgcttccactgctgacttagtcatttattcattcggtcaatattaaccgagagtcaaaaagtcccagccgcgctcaggatgcagcagagagaaaagcgaagacccctgccctcatggagcacgccctctagtggggagagacggaaaacaacaaagataaataaggagtattccaggatttatcatggttaag

SEQ ID NO: 484593 - DNA, 621 bp, Homo sapiens
aagctgaggtcctgcaattcaacccacatccctgaccctcggccctggagactctggggggcagtgagctgtgcaccccaaagagacagagctccggaggccgaggcgggcggatcacgaggtcaagagatcgagaccatcctggctaacacggtgaaaccccgtgtctactaaaaaatacaaaaaaaattagccgggcgtggtggcgggcgcctgtaatcccagctactgaggaggctgaggcaggagaatggcgkgaacccgggaggcggagcttgcagtgagccgagattgctccactgcactccagcctgggcgacagagagagactccgtctcaaaaaaaaaaaaaaaaaggagacagagctcctctgcttccagcaaacctccctttttctctccaaaaatacacatgcatgccttttttcctgcttccactgctgacttagtcatttattcattcggtcaatattaaccgagagtcaaaaagtcccagccgcgctcaggatgcagcagagagaaaagcgaagacccctgccctcatggagcacgccctctagtggggagagacggaaaacaacaaagataaataaggagtattccaggatttatcatggttaag

SEQ ID NO: 484594 - DNA, 621 bp, Homo sapiens
aagctgaggtcctgcaattcaacccacatccctgaccctcggccctggagactctggggggcagtgagctgtgcaccccaaagagacagagctccggaggccgaggcgggcggatcacgaggtcaagagatcgagaccatcctggctaacacggtgaaaccccgtgtctactaaaaaatacaaaaaaaattagccgggcgtggtggcgggcgcctgtaatcccagctactgaggaggctgaggcaggagaatggcgggaacccgggaggcggagcttgcagtgagccgagattgckccactgcactccagcctgggcgacagagagagactccgtctcaaaaaaaaaaaaaaaaaggagacagagctcctctgcttccagcaaacctccctttttctctccaaaaatacacatgcatgccttttttcctgcttccactgctgacttagtcatttattcattcggtcaatattaaccgagagtcaaaaagtcccagccgcgctcaggatgcagcagagagaaaagcgaagacccctgccctcatggagcacgccctctagtggggagagacggaaaacaacaaagataaataaggagtattccaggatttatcatggttaag

SEQ ID NO: 484595 - DNA, 643 bp, Homo sapiens
ggtcatagttggctcaatgaccctcagtcaccagcatcaggaaaagcctgggtcctgcaygctgctgccctgataacacacgggctgagctgcataccaccgcctacaacagcattgcttggccctgtagatattgtcacactaccattgcctgacactgcccatcagccagcacagaggaatgttcaagggtctatgctgggctcctaccagacacttctcttacaagtgtccaactccttctacccgtagtggtagaggtagcctagcaagcacctaacaagtctggttaagctcagtggtgccccacagttacattaaaatcctatctgggactttccctacatgatctcaggctctgcactcatttggaaaaaatcagtggtcagagcagggccagctcatgctcctgatgagcagctcctattcaacccttgatgctgacaggaggctgagctttctcctctttctggctttggggatcttttctctgtgtcctgtggccttgtccatctgcaggctgcctaggaacttatgaggatcccgtgttttaagaatcgttggctcaggaagttggccaccgtagtataaagaaggaaggtacctggagctgcctccctccaaactgccctgcctgaagcca

SEQ ID NO: 484596 - DNA, 618 bp, Homo sapiens
caatgaccctcagtcaccagcatcaggaaaagcctgggtcctgcatgctgctgccctgataacacacgggctgagctgcataccaccgcctacaacagcattgcttggccctgtagatattgtcacactaccattgcctgacactgcccatcagccagcacagaggaatgttcaagggtctatgctgggctcctaccagacacttctcttacaagtgtccaactccttctacccgtagtggtagaggtagcctagcaagcacctaacaagtctggttaagctcagtggtgccccacagttacattaaaatcctatctgggactttccctacatgatctcaggctctgcactcatttggaaaaaatcagtggtcagagcagggccagctcatgctcctgatgagcagctcctattcaacccytgatgctgacaggaggctgagctttctcctctttctggctttggggatcttttctctgtgtcctgtggccttgtccatctgcaggctgcctaggaacttatgaggatcccgtgttttaagaatcgttggctcaggaagttggccaccgtagtataaagaaggaaggtacctggagctgcctccctccaaactgccct

SEQ ID NO: 484597 - DNA, 643 bp, Homo sapiens
ggtcatagttggctcaatgaccctcagtcaccagcatcaggaaaagcctgggtcctgcatgctgctgccctgataacacacgggctgagctgcataccaccgcctacaacagcattgcttggccctgtagatattgtcacactaccattgcctgacactgcccatcagccagcacagaggaatgttcaagggtctatgctgggctcctaccagacacttctcttacaagtgtccaactccttctacccgtagtggtagaggtagcctagcaagcacctaacaagtctggttaagctcagtggtgccccacagttacattaaaatcctatctgggactttccctacatgatctcaggctctgcactcatttggaaaaaatcagtggtcagagcagggccagctcatgctcctgatgagcagctcctattcaacccttgatgctgacaggaggctgagctttctcctctttctggctttggggatcttttctctgtgtcctgtggccttgtccatctgyaggctgcctaggaacttatgaggatcccgtgttttaagaatcgttggctcaggaagttggccaccgtagtataaagaaggaaggtacctggagctgcctccctccaaactgccctgcctgaagcca

SEQ ID NO: 484598 - DNA, 600 bp, Homo sapiens
tgatacactagcccttgaggccatcaacacctaggaacagtgcatttcttacttattgggtctgtaattcctattgcaaagtgcacagcctttcaaaccagttaggcaatccctgcccctcccaactccttgatgaataaaacacatgtcccggcttatctgtctcaatgcatatctattgccccagcagagttattaatagcacctcgtagttattattagtgctccagtttggataataagttatatgagttacttggccaccctacctataaatgcatgaggccatagagagcaaggacccccttctggagtgcagccaaggtggaacacacccatccctgcaacaagcaaagctcactttgggatggagggaggctgggctgtgggcacctggccarcctgggcctctgccttcctgctggatggttctctgagggctatccacatctcaccttgccccttgctaacagttggccccatgagcagaatgtggtgggaccctggaggtgggagagacccctccgggtgttctggttgcgtgggatggttgaaatgcagtggtcagtgagggggctggaagggaggctatatttgcag

SEQ ID NO: 484599 - DNA, 495 bp, Homo sapiens
aaagagcacctcaagaaaagagtcctcccttggtggcatctcttgggactttggtgggtaagtgaccattggggtcaatggtacattggtgtgagtgagtgtgtgtggagataagtgggtgggtgcacacatatccccttaatctgtgtgagcctgtttctgagtatgtacacagacaggtccacatctgtgtctctgttctattcatgtagatataatagtygtgtcttccatcccctgcaggccactgtgacacaggcatgggaaggcttcctaggcaccctgggcgggtgcatggaaggtagtgccctgggcgtgtgccctgggtggatgcatggaaggtagtgacttcatgccactgactttcaagggccccttccaaggtgctgcagaggccatagcaatgtgttcccatggcccaagtgtttactgacaggttctaaagcaagatatttctgctgtactccccgaagacctctgtcttagaggaaaatg

SEQ ID NO: 484600 - DNA, 457 bp, Homo sapiens
cccggggcgttgggccagccctgcaggttaaaggaagcggggtcagaaaaacgaaatctagatcctaggtttggggcctgccttcacctgttggggaccttatgcaaattcttagttcttttgcrccttagcttccaatttgtataatgagagcctcagggcatgcgccaattggacagtggagtagagtaaggaccaggagcagggaccctcattccctctaaaggtggagaaaacagtaaaccacttctcctttgaggcaggatggccctgggtagacccttccctggtaagaacatgtggacagtgcaaggaagcttgcaccccggcaaattcaataagctgccgagtctggtcaggatgctggaccttctgagcagagggagggggttaagcctgctccaaccccaggccacctctagcctggcaaggtctggagcttggcctgttgccacag

SEQ ID NO: 484601 - DNA, 457 bp, Homo sapiens
cccggggcgttgggccagccctgcaggttaaaggaagcggggtcagaaaaacgaaatctagatcctaggtttggggcctgccttcacctgttggggaccttatgcaaattcttagttcttttgcaccttagcttccaatttgwataatgagagcctcagggcatgcgccaattggacagtggagtagagtaaggaccaggagcagggaccctcattccctctaaaggtggagaaaacagtaaaccacttctcctttgaggcaggatggccctgggtagacccttccctggtaagaacatgtggacagtgcaaggaagcttgcaccccggcaaattcaataagctgccgagtctggtcaggatgctggaccttctgagcagagggagggggttaagcctgctccaaccccaggccacctctagcctggcaaggtctggagcttggcctgttgccacag

SEQ ID NO: 484602 - DNA, 457 bp, Homo sapiens
cccggggcgttgggccagccctgcaggttaaaggaagcggggtcagaaaaacgaaatctagatcctaggtttggggcctgccttcacctgttggggaccttatgcaaattcttagttcttttgcaccttagcttccaatttgtataatgagagcctcagggcatgcgccaattggacagtggagtagagtaaggaccaggagcagggaccctcattccctctaaaggtggagaaaacagtaaaccacttctcctttgaggcaggatggccctgggtagaccsttccctggtaagaacatgtggacagtgcaaggaagcttgcaccccggcaaattcaataagctgccgagtctggtcaggatgctggaccttctgagcagagggagggggttaagcctgctccaaccccaggccacctctagcctggcaaggtctggagcttggcctgttgccacag

SEQ ID NO: 484603 - DNA, 666 bp, Homo sapiens
cgcccaggcaagcactcatgggccccacaggtaccacgcaattgaacccttgtttgtctgataacttgcagtgacgtttatgacatgtgctgtctccacatctctttaccccttggatttctctaggatgactgagggacgtggctgcctctgggggcaccagcaccttctgtagcattgtggaacatttcttccatgaacttctactctggagctggagagaacagtctgccaagtcttacctgttcttccccatagccaccttggaatactctttgaacaagctctgctaaaaccaaacccatgaccactgtgttggtggtggggcctcatgctgtggctcagggagggcccctccctgcatgtgagtctagccttcctagacattacatgatgaccctttaaaaaaaaattagagatggaggtctcactatgttgcccaggctgatctcaaactcctggactcaagcgatccacccmcctccacctcccaaggtgttgggattacaggcgtgagccactgcacccagcctcatgttgaccctggccctggatagcagctttgtttgtagaggcaggtggtgggagagaccctaggacagcctgagagtaactggacctggtattggtgcggagtggggaatatcccttgtctaaatgcagagc

SEQ ID NO: 484604 - DNA, 666 bp, Homo sapiens
cgcccaggcaagcactcatgggccccacaggtaccacgcaattgaacccttgtttgtctgataacttgcagtgacgtttatgacatgtgctgtctccacatctctttaccccttggatttctctaggatgactgagggacgtggctgcctctgggggcaccagcaccttctgtagcattgtggaacatttcttccatgaacttctactctggagctggagagaacagtctgccaagtcttacctgttcttccccatagccaccttggaatactctttgaacaagctctgctaaaaccaaacccatgaccactgtgttggtggtggggcctcatgctgtggctcagggagggcccctccctgcatgtgagtctagccttcctagacattacatgatgaccctttaaaaaaaaattagagatggaggtctcactatgttgcccaggctgatctcaaactcctggactcaagcgatccacccccctccacctcccaaggtgttgggattacaggcgtgagccacygcacccagcctcatgttgaccctggccctggatagcagctttgtttgtagaggcaggtggtgggagagaccctaggacagcctgagagtaactggacctggtattggtgcggagtggggaatatcccttgtctaaatgcagagc

SEQ ID NO: 484605 - DNA, 556 bp, Homo sapiens
ggtctggtctgggactttgtccagagcaactggaagaagctttttaacgagtgagtctgtggaatgggtgtcagggacagcgagcgccgaggctggggcccggggggtggcctgtgcgggtaagacacgccgggggcactaaccagaagtggacaaaaatcagccaagcctgggggctagggtggggcaggaatggaaagacaagctggggtatgggccgtcccttttcccatttggaaggaaaacgtggcgkgtgggcgtattctccagaagagaggggagtgaggaactcggcagtcagacctgtgttcaagctgtgactcccccacatcctagtggggtctcccagggcgtgtcatttcatctcctctataatcatggctccctacccagtaggtgtgaggatgagcctccttagttcccggcctccctcacagttcacctctctccctccctgcagttatggtggtggctcgttctccttctccaacctcatccaggcagtgacacgacgattctccaccgagtatgagctgcagcaggtaagaagtcattc

SEQ ID NO: 484606 - DNA, 582 bp, Homo sapiens
ttcttctgcctcagcctcccgtgtagctgggactacaggcgcatgccaccacacccagctaattttttttgtatttttagtagagacarggtttcaccatattggcctggctggtctcgaactcctgacctcgtgatcctcctgcctcggcccccaaagtgctgggatcacaggcgtgagccgctgtgcctggcccatcttcctttttagagtcaggtttttggatgataaccaatttattccataaaatgcgcttaggtagtaggattccttgttctaagttttaaaaaataacttaatgtaacatccaggttttaatgtacttcaactttaaaaaattctactgtgaccccattagggagtcagttctttttttaacatctattatttcatcctaatattatttcagtgcctttatgttgacctcatttgggcagttttttgttcttgtttttttttttgagatagagtctcgctctattgcccaggctggagtgtaatggtgtgatctcagctcactgcaacctctgcctcccaggttcaggtgattctcatgccttggctacccaaacagccaagcag

SEQ ID NO: 484607 - DNA, 582 bp, Homo sapiens
ttcttctgcctcagcctcccgtgtagctgggactacaggcgcatgccaccacacccagctaattttttttgtatttttagtagagacaaggtttcaccatattggcctggctggtctcgaactcctgacctcgtgatcctcctgcctcggcccccaaagtgctgggatcacaggcgtgagccgctgtgcctggcccatcttcctttttagagtcaggtttttggatgataaccaatttattccataaaatgcgcttaggtagtaggattccttgttctaagttttaaaaaataacttaatgtaacatccaggttttaatgtacttcaactttaaaaaattctactgtgaccccattagggagtcagttctttttttaacatctattatttcatcctaatattatttcagtgcctttatgttgacctcatttgggcagttttttgttcttgtttttttttttgagatagagtctcgctctattgcccaggctggagtgtaatggtgtgatctcagctcactgcaacctctgcctcccaggttcaggtgattctcatgcctyggctacccaaacagccaagcag

SEQ ID NO: 484608 - DNA, 591 bp, Homo sapiens
tgacacacatttatgtgactggtagagagaaggttggttacttagtcctcaagaagaagaatcttaatttccctggaaagcccatctgataacacctctgttcctgcaaactgtatactctcctagtcttctgcactatatacctgttcctggagttttagatcctcctttgtaatgaaagggggaaaaccccatcttcctcatctacactggttaccaaagtagtcatcccaatacccaaacttttccaatcggctccccaattcttctgacacaactaggtcaactgactccttttccataatttctaatctttcagcatgcaattctttccatatggtactatatttccacagacacagagaacaacattctaagcctcctaaaaagattgttttctaaaagtcaaaattatatatctaaaaaaaatagattgttttctaaataaaattggcatggtttgtatgtatatcttaagcactgcagggtaataaaaactggcctagcatgcagactgtgactcaattaggagcccttcgctgccccmcaatgacggaaatgtgaacctctgcactgtttaacaggcaggca

SEQ ID NO: 484609 - DNA, 496 bp, Homo sapiens
aaatatatgggactggtgaagacatctagtttaatagtgtacacaaagaagaggaggcgaagccaaaaaagggagggaggtagtggtcaaccatgttgaatgttaccgtataagatgmctttggtaattaggaggattttaatcattttgacaagaacaactttaatggggaagaggggccttaaggttgggtagagtttttttcaagatagaagaaagcagaatgtttatatggcaatgtgattaaactcgtagaaaggaaaaactgctgcagatgaaagaggggaacattgtaaagggtagttgttgaatacctgagaaaggagaagaccctaagcaggtgagtagttggttttgaaatgagcagggacacttactctgttgtaactagaggggaagctgagataacaggtgcagatacagtgggtggtgggaaaagagtctattggtataggcatccatcagcttagagggagggcagcgggggagaggaaag

SEQ ID NO: 484610 - DNA, 641 bp, Homo sapiens
ccggctggacactgggcaacacactcaggcaccttggctttggaagctctccataaatgtgagccttatttttaaataaaaaatatttgcaaaatttagacaaagataaaaatggaagataaatatgcaaaacaatgactctattccactytccgataagaaatgttttctttttaagtttttcatcttcatctgtcatctcagggcttgtctccctgtctccacccccatcaaggtgatgttctttcctgggtctcctcctcactttcccagacatgacttgcttcgtctcaactgctcacctccctgtcagccttttaggttctggttttgatgatgtgctatgtcttgctgccactgcttgaccttctacagaaaaacaatctgtgtttcagtagaaaactgtttttatctacagcagaacctgctgggttctctgattctggctgtctccactgtctttgagctattttacaactctataaataaacaggtcctttgaaatctcttttgagccagttttaacatctgcctggttccctcactgaatgagttaaataaaatctttaacatgtgttcatttttatatctgtaggaatcatgattttaccttttcctgaaaattatcttccagcacttcc

SEQ ID NO: 484611 - DNA, 647 bp, Homo sapiens
ttgattatacttttacaatgaaaagtaacaatgactgagtaatcctaatgtgctaggcactcttctcaactttctatgagtagcaattcatttattcttcaacagcccttgaggttagccatgttttatrgataggaagactgaaacatatctggctagtatgtggtggagttgggacttgaacccatgcattttgagcattattgagcctgcattttgaacctatttgtcagtggctttccaagtttcttatccatgtcccatcatatgaaataaattccttgtagagactcagcacacacacacgtatacatacacacgcatgctcatacacacgcacatacacatgaataaacattttttcctttgataaagtgacagaaaccacacacttctgatattttcatctattttatttttaaaatgctagtcaagtctcactaaactgatttcacaacccatcaatttattgcaatgcactgtttgaaacgatttgtacaagttcactgattctgtgaagggaaaatcaggggttcggatagataaaaaggatagagcccttatgtctgaacactgaggctgtaggggatttagaggttgaatgggtggtatacagcagggcacaccactgtgctatgcccaaacag

SEQ ID NO: 484612 - DNA, 666 bp, Homo sapiens
taccctctacagagttacctaggtgaggtgaatattgaaacggcctcatttaaacccctacccaaaagcctccagtgtcttatgattatgcttagaatgaaatccacatttccttatgtgattyacgtggccctgtgtaatctgtccttggcctctctcttctccctttctgcctttctcttccgtatttccaatcactttagtgttctagcagattgtccaataaatcaaaggtgttttagtgtcatggacttcccctccacttagaattttcttctccaaaaccttactttttcaccttatttaggtgtctgttcaaatgtcacttcctcaaagagatattatttcaggaggaaagaaaagtatatatacatataaaacagagtctctgcacttagctgggtttatttctctctttgtcacttacagctatctgaaattatattataatctatctatgaatgagcaggctgggtgtgaaagcaatggggagttttgggggttgtgtcttaatcaatggcacatgccttgaggagatagccagtcactgcaccgctccatgtacttgctgtaaattattcagatttattattcttactgcctgcatcccttactgtaagttccatgaaggcaggagtattgcgtgttcatggcagcgttgcttag

SEQ ID NO: 484613 - DNA, 504 bp, Homo sapiens
tgtgccaatagcaaagggctacctgggggccaggcataaccaacatggaggctccatctttcctttttttttttggttaccacttgtgcagtaaaggaatgggaaggggtgagtaaatacagcaccttcaactgaagcatccaggtactcacactgggcctaatcaagaaaaccaacttgacccagagtatgaagaaaagcaaggcaagaygatggcccatctgggagcaacagagagccaggggatcaccccctgcccagaaaagtggtgaatgaatgtgtgaccctagggtcctacacttctcccatgaatctttgcaacttttgggtcaggagcacccctcatgaacccactccactggggccttcagtctgacagacagaaatacatagagtctcagcagagaagccatttgggcacacacagagaccaggaaccctggatacttgggctttctaggcttcctggcaaaagtagatgcatctccggcaaagtgggaggtt

SEQ ID NO: 484614 - DNA, 619 bp, Homo sapiens
taacaaccagcttgtggtaattcctgcttacacttagagcactcagaaatcatataatttgtgtgataattgttagttttgcttaactgttttgctgtttgttcctgccttgttggggtgtgtgtgtgtgtgtgtgtgtgtgtgtgtgtgtgtgtgtgtgtgtgttttggtactttccccttttggatttgaccaaatctgaaccctctatctcatgagtatggaatctttcacaccaaataaataagagcaccttgctcccctcagcctttcggggcattctcaggtgactgagaatcacatgagggtgactgggtggaactctccctaagatgtgcagcagctctacataagctttcccctcaggagagcatacttaggttctaatctaagccagcaggtgcatataaggcgctgacccctcccgcaccttgagcccctgacacagtgccaggtagctgtgacacgggtggaccaaaccggttcagggagtaacgtccatgaaaaactaggtctgcaagccacacatttcgggtcygacacacgtcctgatttgatcaaatccaaaagggaactctaaattatgggaaatgaggcaagttagttagctaaaacccca

SEQ ID NO: 484615 - DNA, 563 bp, Homo sapiens
tcagttgtggatctctgcagtgcctcctttagtattcctgtagatccggacagccaatatttgtttccatttacttggaaagaatggcaacatatgtggactataatgccccaagcgtatacagtaagttccagttacttctcccaaatattaaaagctaatttaaaggwtttaaattttcccaagagctcaacactcatccagtatgtagatgaccttctcctttgttcaaacacaatctcttgctctcaggaagatagtctatatttactcaaatggccaccaagggacacaaagtgtccaaagacaaacttcagctatagttacagcaagttaagtatttggggcatattatcttggtcaaaggactgagtattaacccggacaaagtgagaggaattttagctttttcactgattgtcaccaagaaacaagttagagcatttttgggcctggcagtctactgtagaaactggatatgaaatttctcccttatggcttaacctctgtatgcatacctaaaaaacatgcaatctgatcccatcatgtggactccagaagga

SEQ ID NO: 484616 - DNA, 646 bp, Homo sapiens
ctgccataatctcagtgttacaatatgttttaataaaagtctgcatgttttcccattgggttgaagctttccctgcaggcaagcaacagctatggcagttggaaacatcctactggaaacaattattccattgtggggagtaccttgtgaacttcacagtgacagggaactcacattactggtcagtttattcaaaatatttgtaaaatttggctcatatttwaacattttcattgtgactacaatccctagtcttcaggcttggtggagaggaccaatggaataattaaaacacaattggctaagttcacagagacatttcactttccctggcctaaagcacttgccctagtgctacttacactctgatccaccccttttggaaaacatcacctgtccccttatgaaattataacaggaaagcccatgtgtatgacaacgaaaattagcaattcaaattatctcaagggaaacatattgcagtattgtaaaggactcatttatcatcttagaaaaggccaagatttggtaaataatttttctcagtgtgctccctgaagataaggtgcctgggcatgatctgcaacctggagattttgtttattggaagagacatctaataaaggattccctccaaccccaatag

SEQ ID NO: 484617 - DNA, 626 bp, Homo sapiens
ttaacctcaatcaaacagactatgaaatgaggattttattttaaaagtaagactcttaataattcactagagaaaggttaagtgggggtgyccatgttctgaagcagtgggcctcaggtataaataattaatctaatttggtgcagccaaagcagaaagaatgtctaatagtccacataaactttgctttgaggagactgacaatgaggacctttgcagaaagccatatttggttagaatgtatattataatagaaaactaatacactctaaaaaaaaaagtgagttttactagttaaacgctagtaattaaggaccagtaaatgacttctctgaaaacatttccataaaaaaatttgctatggtaaaagagataagaaaatgaggttaatataagttattttaaaagtgtgtgtctacagcccaaataccctcatcattaatactgatccttaaataagtcctattaattgactgacttttgacacgtctttagctgggaagctctagttccttactgaaaaagaaaaggaaagaagatatctaaagctcctaattggtgtttattttccttttccctcttgttctgtacttctgaagggtcagaagcatggacgttagaattac

SEQ ID NO: 484618 - DNA, 612 bp, Homo sapiens
gaagcaaatatttgcaacatttgcagagtgtacagagcaggccttactgagcaagtgatatctgagtaagcctttaagaaagatgggacaaagcagtgtgagaactggggaagagccctccagcagagaggccagcacatkcaaaggccctggggtaggagcatggctggtgcatctgagagagattgaaggggccagggtgactgtagcgcagtcaagtgcacagtcaaataaaatatataaggtcacaccaggccagattatgttgaatcttgtaaagcactataagaacatagacatttacctggagtgctttggagtagctttgcaggattttgaacagagcccttaaatggctgcaagacctttggttggtcactaatacaagcatcagttttcctgcttctaaaatgcaaaggttatgccagtaaatatctaagttatcttccatctgaaaaaaaagtagatcaatagagacctagagtatgcgaagttcctacaggctgatggctaatcaaaacattagcacccctctctgctgctgccaaagtcaatggtagtgacccggcacagaaccagaaggaaacatgggtgtaccaggggacactcaca

SEQ ID NO: 484619 - DNA, 553 bp, Homo sapiens
aatctctttgagccttagtttccttgtctacgagaaggtaataatagcattatctactgcaggggactgttgaaaaaactgagcaagatacataatgtctgtcaaatgcttaaagcctgatatatagtgagtggtcaatatgcattagctagtataatcataatttccatcatcaccacttatcagccaaatttgccaataatttactaataatgtaaagatggtcccacaattctttcataytggagatcctgctaggatatggtaatctaatttgggatctgccattacaccatagtcaaaaaaaaaaaaaaaaaaggactcagaaaccaccaaatgtggagaataaagtgcaaagaataaaatctaggaaagattaaagaaactcaaatcatgctgcttaacagggggtttgatgcaagatttaatatttgtcctcaaaaatattcagaattctgcaaacaaaaacagtgactccctggtttatttccagtgataatattaattttcatacaaaatttggtgtttaaagttatctacagcaagaaaaaaa

SEQ ID NO: 484620 - DNA, 553 bp, Homo sapiens
aatctctttgagccttagtttccttgtctacgagaaggtaataatagcattatctactgcaggggactgttgaaaaaactgagcaagatacataatgtctgtcaaatgcttaaagcctgatatatagtgagtggtcaatatgcattagctagtataatcataatttccatcatcaccacttatcagccaaatttgccaataatttactaataatgtaaagatggtcccacaattctttcatactggagatcctgctaggatatggtaatctaatttgggatctgccattacaccayagtcaaaaaaaaaaaaaaaaaaggactcagaaaccaccaaatgtggagaataaagtgcaaagaataaaatctaggaaagattaaagaaactcaaatcatgctgcttaacagggggtttgatgcaagatttaatatttgtcctcaaaaatattcagaattctgcaaacaaaaacagtgactccctggtttatttccagtgataatattaattttcatacaaaatttggtgtttaaagttatctacagcaagaaaaaaa

SEQ ID NO: 484621 - DNA, 304 bp, Homo sapiens
gcatattttcattaagtggttttcggtggatgagtttcttattatttcatctgacaattacaatatactttatgtgaaaaagacatagactgtgtgttttgttttgttttttcgaaacagagtctcactcttatctcycagcctcaacacactggactcaaacgatcctccaacctcagcctcctgagtagctggggttacagctacaaaccatcatgcctggctaatttttgaatttttgtagagatgggggtctccctgttttgcccaggctggtctcaaactcctggactcaagatcctcc

SEQ ID NO: 484622 - DNA, 591 bp, Homo sapiens
aataaaactttttctttctttctttcttttattttttattttgagacagagtctcgctctgtcgctggagtacaatggtgtgatctcggctcactgtacccgtcgcctcctgggttcaagcaattctcctgcctcagcctcccragtagctgggattacaggtgcctgccccaacacccagctaatttttgtatttttagtagagacgaggtttcaccatgttggtcaggctggtctcaaactcctgacctcatgatccgcccacctcagtctcccaaagtgctgggattactggcatgagccacctcacccggccctatttctttttcttaattcctctaatagattaattgttcaaagtaaacataggaacagtgtattgggtgattatgttatatggataactgaaatgaatgatagcagtattataagaaatgggagggaggaattgggatttctgttataaggtacctataataccaacaaagctgtaagtgttatttgagaacggacttggattagttatggatgtattttgcaactctggagaaaccactagaaataattgtaaaggagtataattgatatact

SEQ ID NO: 484623 - DNA, 676 bp, Homo sapiens
aactgaggtatcaacaggtgaggttccttgcctgaggccacacagctagtaaatagtagagccaagatttcatcccaggccgtgtgaaatcaaggactcggaggaatacaggatgtatgaaatgcaatgatagacaatgagatcagaacattagattggagccactttataatgtacacagttgcgttatcatttttctctaaggcagggtcaggctggggtcaaacctacttgctttatcttataagktatgcatccctttcttcatggttccatcaattgtctcctagcatcccactttgcatcatttgcacgcaatataattcatttataatatcaaaataaatagttgaggccggacatggtggctcatgcctgtaatcccagcactttgggaggctgaggaggatggattatttgaggagaagagttcaagaccagcctggccaccatggtgaaaccctgtctctattaaaattcaaaaattagctggacgtggtgatgggcgcctgtaattgcagctactcaggaggctgagacaggagaactgcttgaacccgggaagtggaggttgcagtgagctaagatcgcgccactgcgttccagcctgggtgacagagtgagaccttctcaaaaataaataaataatagtagagatgatactacccacatattt

SEQ ID NO: 484624 - DNA, 676 bp, Homo sapiens
aactgaggtatcaacaggtgaggttccttgcctgaggccacacagctagtaaatagtagagccaagatttcatcccaggccgtgtgaaatcaaggactcggaggaatacaggatgtatgaaatgcaatgatagacaatgagatcagaacattagattggagccactttataatgtacacagttgcgttatcatttttctctaaggcagggtcaggctggggtcaaacctacttgctttatcttataaggtatgcatccctttcttcatggttccatcaattgtctcctagcatcccactttgcatcatttgcacgcaatataattcatttataatatcaaaataaatagttgaggccggacatggtggctcatgcctgtaatcccagcactttgggaggctgaggaggatggattatttgaggagaagagttcaagaccagcctggccaccatggtgaaaccctgtctctattaaaattcaaaaattagctggacgtggtgatgggcgcctgtaattgcagctactcaggaggctgagrcaggagaactgcttgaacccgggaagtggaggttgcagtgagctaagatcgcgccactgcgttccagcctgggtgacagagtgagaccttctcaaaaataaataaataatagtagagatgatactacccacatattt

SEQ ID NO: 484625 - DNA, 643 bp, Homo sapiens
agcagtgggggagtagggttctcaggaagctgctgccgtagtcaggacagtacagagctcctgtagttgttacccctgtagccacaaagatagttggtgctgatagattcattcaataaataaccaagtgccaactatgtaccaggcactgtgctaggcctgggattcagaagtgaacaagacagacacagttccygctttctttaccttctattggggagatgggatagaaacagcctaatacatgattgatcatttaattgcaatcatagtaggtgccacaagggagaaatgcaagatgcatatctgtcagtctttggtaaatgaatgatgtgttagttcattttcacatggctataaagaatgacctgagatggggtaatttataaagaaagaggtttaattggtgcacagttctgcatggctggggaggcctcaggaaacttacaattgtggcagaaggcgaaagagaagcaaggcataccttacatggtggcagaaggggcaggggggaggtgccaaacttttaaaccatcagatctcatgaaaactcactatcacaagaatagcatggggggaaaccgcccccatgatccaatcacctcccaccgggtccccccccctgaaatgtggggattacaat

SEQ ID NO: 484626 - DNA, 643 bp, Homo sapiens
agcagtgggggagtagggttctcaggaagctgctgccgtagtcaggacagtacagagctcctgtagttgttacccctgtagccacaaagatagttggtgctgatagattcattcaataaataaccaagtgccaactatgtaccaggcactgtgctaggcctgggattcagaagtgaacaagacagacacagttcctgctttctttaccttctattggggagatgggatagaaacagcctaatacatgattgatcatttaattgcaatcatagtaggtgccacaagggagaaatgcaagatgcatatctgtcagtctttggtaaatgaatgatgtgttagttcattttcacatggctataaagaatgacctgagatggggtaatttataaagaaagaggttkaattggtgcacagttctgcatggctggggaggcctcaggaaacttacaattgtggcagaaggcgaaagagaagcaaggcataccttacatggtggcagaaggggcaggggggaggtgccaaacttttaaaccatcagatctcatgaaaactcactatcacaagaatagcatggggggaaaccgcccccatgatccaatcacctcccaccgggtccccccccctgaaatgtggggattacaat

SEQ ID NO: 484627 - DNA, 648 bp, Homo sapiens
cgctctctatcgtctctccaaatgtcaaggaacatgtggagatggtacctatccccagcgccaagattcgctgtgggactttttttcccctcccctccttagcacagatgagcccagttctacaaccctctattcaacccgtactgatcttattgtttggctgattccccaggtcaatggcagaagtcagtcgacttcttgccaaaacccctctgtaggggcaaagtagacgtccaaccaactgcacaaacctgtcccgtgtcattcgtgggatcttggcacagtcggatcacctgcagggaccagaccctatcggggatagagatgtttgccatccccacgggaggctggcttgcttgccagcgtgttgtgggtggatgtcagtgggtgacagcgacggamgaaggtgtccgatcccgtggctggcgtccaccctagcccggggcaaggggctgacaccaaggaaaggagagaagcatgtcgcgtgctgggagctggaagaaggagtccagggtgtccagggggtgcacagggctggctggccaggtctgggagtgaggctgtgcagtcaaacggaggttgtgcagatgcctggggcgttagggcacctcgcgggctgcctatgccataggtcggagggatcccagc

SEQ ID NO: 484628 - DNA, 648 bp, Homo sapiens
cgctctctatcgtctctccaaatgtcaaggaacatgtggagatggtacctatccccagcgccaagattcgctgtgggactttttttcccctcccctccttagcacagatgagcccagttctacaaccctctattcaacccgtactgatcttattgtttggctgattccccaggtcaatggcagaagtcagtcgacttcttgccaaaacccctctgtaggggcaaagtagacgtccaaccaactgcacaaacctgtcccgtgtcattcgtgggatcttggcacagtcggatcacctgcagggaccagaccctatcggggatagagatgtttgccatccccacgggaggctggcttgcttgccagcgtgttgtgggtggatgtcagtgggtgacagcgacggaagaaggtgtccgatcccgtggctggcgtccaccctagcccggggcaaggggctgacaccaaggaaaggagagaagcatgtygcgtgctgggagctggaagaaggagtccagggtgtccagggggtgcacagggctggctggccaggtctgggagtgaggctgtgcagtcaaacggaggttgtgcagatgcctggggcgttagggcacctcgcgggctgcctatgccataggtcggagggatcccagc

SEQ ID NO: 484629 - DNA, 665 bp, Homo sapiens
ttcaaccatttcttttgacatcagtaggaacacaagctcctccttgttaagctgttaagatatcaagaacttctattttggggtgctattgaggctaacttgctcattttagattgtattgcttgaaaggaattcagagtattcttctattaaaaaaacaaagttaatatttggagcaaattatgatcttagtttttgagtttagagggcagctaggtgaaacaatttctagaggtgagtttgaggcaagtttaaatggtagactgaagatagcagttgcaatgtgatgtgctttactggtttgcaatttgaatgtctctggttatttcattaaacattctggtaaactctctgagtgacccagatagcagcaggcattaagattggcattaaggcataagtgctctgttgcagtgatttttctgaagcttaaagtcaccagtttcagtttgcagagctttggaaaagggcagttttagtttytagtggaactaaaaaacaaaaattcaggagtcaatctggtttatagggagataataaaacttcaaagaaaatgaacaggcctagaatttgacaatggatgcacaatagttttctactaaaatataatcttttttattctggagaaaaatatttttattttccatttttaccgaaaatcaaag

SEQ ID NO: 484630 - DNA, 587 bp, Homo sapiens
ctgaccctggagaaggcgcgctgggtgtkgctgggacggcccaggccgcggcttcccgcgtggggatgcgctgtggcgcagagctggtcccggcggggccaggcgtttgtgggcgggtgacggggatctagggcttccgctcgtgattcctcttgggctgtctttccgggtttggactcgcctgccaggctgtgtgcagggttcccgctgcctctggccggcaggcgtccgggctgcaggtgggccggcaggcaggtgttagcgggaagggagcacaggtagcgaggtgggatcggcgacctggctagggtgtcggcagaatggaatgcgcggccggggtccgaggggtcggaggaaaggacaggatgttggatggcgtgcctctggtgggagacgtgtgtgcggctccacgagcgagtcgctcgctgctgctcagcggtcagaagttggagggtgaaaccgggcgggctgttcaggccaggacgcctctgggcagcgcagcggcgattcaaggcggtgggcggtgggcggaggccggtgggaggaaggagggaaaaggaggaataggggaagaatctgggctgtgt

SEQ ID NO: 484631 - DNA, 587 bp, Homo sapiens
ctgaccctggagaaggcgcgctgggtgttgctgggacggcccaggccgcggcttcccgcgtggggatgcgctgtggcgcagagctggtcccggcggggccaggcgtttgtgggcgggtgacggggatctagggcttccgctcgtgattcctcttgggctgtctttccgggtttggmctcgcctgccaggctgtgtgcagggttcccgctgcctctggccggcaggcgtccgggctgcaggtgggccggcaggcaggtgttagcgggaagggagcacaggtagcgaggtgggatcggcgacctggctagggtgtcggcagaatggaatgcgcggccggggtccgaggggtcggaggaaaggacaggatgttggatggcgtgcctctggtgggagacgtgtgtgcggctccacgagcgagtcgctcgctgctgctcagcggtcagaagttggagggtgaaaccgggcgggctgttcaggccaggacgcctctgggcagcgcagcggcgattcaaggcggtgggcggtgggcggaggccggtgggaggaaggagggaaaaggaggaataggggaagaatctgggctgtgt

SEQ ID NO: 484632 - DNA, 587 bp, Homo sapiens
ctgaccctggagaaggcgcgctgggtgttgctgggacggcccaggccgcggcttcccgcgtggggatgcgctgtggcgcagagctggtcccggcggggccaggcgtttgtgggcgggtgacggggatctagggcttccgctcgtgattcctcttgggctgtctttccgggtttggactcgcctgccaggctgtgtgcagggttcccgctgcctctggccggcaggcgtccgggctgcaggtgggccggcaggcaggtgttagcgggaagggagcacaggtagcgaggtgggatcggcgacctggctagggtgtcggcagaatggaatgcgcggccggggtccgaggggtcggaggaaaggacaggatgttggatggcgtgcctctggtgggagacgtgtgtgcggctccacgagcgagtcgctcgctgctgctcagcggtcagaagttggagggtgaaaccgggcgggctgttcaggccaggacgcctctgggcagcgcagcggcgattcaaggcggtgggcggtgggcgsaggccggtgggaggaaggagggaaaaggaggaataggggaagaatctgggctgtgt

SEQ ID NO: 484633 - DNA, 551 bp, Homo sapiens
gacctccgcgttgtgtggttcccaatgtcctcttctgccttagtgctgtacgggtaattttgaggtatttggtttttccgactagggttgtagtgataactcttagctgcttaaccacggcaattacgttatggaaactgacactttaagaaaatttactgaccaaaggaagtaagtactaataataccaaaacraattgtttgtctttccaccaaacctgtacctgccttgcctttctatttcctaactcagaaaacgggcactatgtgtggaacctggtccttagtcacgccgtgtactgctggctgccaattcttggagagtcggcctcctaaataccttgttgattaagcaccttcctctccagcctcaccgccagttacttcctcattgctccctttgggttactgcatcctgccttgctgccctatttggcttctggtcttcaactctcctgtcccgtccatccatcaagtagttgcgagagaatccttctaaaatactatacggtacaaacctggtctgcttaaactctctcaatgtattgcag

SEQ ID NO: 484634 - DNA, 551 bp, Homo sapiens
gacctccgcgttgtgtggttcccaatgtcctcttctgccttagtgctgtacgggtaattttgaggtatttggtttttccgactagggttgtagtgataactcttagctgcttaaccacggcaattacgttatggaaactgacactttaagaaaatttactgaccaaaggaagtaagtactaataataccaaaacgaattgtttgtctttccaccaaacctgtacctgccttgcctttctatttcctaactcagaaaacgggcactatgtgtggaacctggtccttagtcaygccgtgtactgctggctgccaattcttggagagtcggcctcctaaataccttgttgattaagcaccttcctctccagcctcaccgccagttacttcctcattgctccctttgggttactgcatcctgccttgctgccctatttggcttctggtcttcaactctcctgtcccgtccatccatcaagtagttgcgagagaatccttctaaaatactatacggtacaaacctggtctgcttaaactctctcaatgtattgcag

SEQ ID NO: 484635 - DNA, 551 bp, Homo sapiens
gacctccgcgttgtgtggttcccaatgtcctcttctgccttagtgctgtacgggtaattttgaggtatttggtttttccgactagggttgtagtgataactcttagctgcttaaccacggcaattacgttatggaaactgacactttaagaaaatttactgaccaaaggaagtaagtactaataataccaaaacgaattgtttgtctttccaccaaacctgtacctgccttgcctttctatttcctaactcagaaaacgggcactatgtgtggaacctggtccttagtcacgccrtgtactgctggctgccaattcttggagagtcggcctcctaaataccttgttgattaagcaccttcctctccagcctcaccgccagttacttcctcattgctccctttgggttactgcatcctgccttgctgccctatttggcttctggtcttcaactctcctgtcccgtccatccatcaagtagttgcgagagaatccttctaaaatactatacggtacaaacctggtctgcttaaactctctcaatgtattgcag

SEQ ID NO: 484636 - DNA, 551 bp, Homo sapiens
gacctccgcgttgtgtggttcccaatgtcctcttctgccttagtgctgtacgggtaattttgaggtatttggtttttccgactagggttgtagtgataactcttagctgcttaaccacggcaattacgttatggaaactgacactttaagaaaatttactgaccaaaggaagtaagtactaataataccaaaacgaattgtttgtctttccaccaaacctgtacctgccttgcctttctatttcctaactcagaaaacgggcactatgtgtggaacctggtccttagtcacgccgtgtactgctggctgccaattcttggagagtcggcctcctaaataccttgttgattaagcaccttcctctccagcctcaccgccagttacttcctcattgctccctttgggttaytgcatcctgccttgctgccctatttggcttctggtcttcaactctcctgtcccgtccatccatcaagtagttgcgagagaatccttctaaaatactatacggtacaaacctggtctgcttaaactctctcaatgtattgcag

SEQ ID NO: 484637 - DNA, 536 bp, Homo sapiens
cctgcgcccaccgcccaccgccttgaatcgccgctgcgctgcccagaggcgtcctggcctgaacagcccgcccggtttcaccctccaacttctgaccgctgagcagcagcgagcgactcgctcgtggagccgcacacacgtctcccaccagaggcacgccatccarcatcctgtcctttcctccgacccctcggaccccggccgcgcattccattctgccgacaccctagccaggtcgccgatcccacctcgctacctgtgctcccttcccgctaacacctgcctgccggcccacctgcagcccggacgcctgccggccagaggcagcgggaaccctgcacacagccgggcaggcgagtccaaacccggaaagacagcccaagaggaatcacgagcggaagccctagatccccgtcacccgcccacaaacgcctggccccgccgggaccagctctgcgccacagcgcatccccacgcgggaagccgcggcctgggccgtcccagccacacccagcgcgccttctccagggtcagcc

SEQ ID NO: 484638 - DNA, 536 bp, Homo sapiens
cctgcgcccaccgcccaccgccttgaatcgccgctgcgctgcccagaggcgtcctggcctgaacagcccgcccggtttcaccctccaacttctgaccgctgagcagcagcgagcgactcgctcgtggagccgcacacacgtctcccaccagaggcacgccatccagcatcctgtcctttcctccgacccctcggaccccggccgcgcattccattctgccgacaccctagccaggtcgccgatcccacctcgctacctgtgctcccttcccgctaacacctgcctgccggcccacctgcagcccggacgcctgccggccagaggcagcgggaaccctgcacacagcckggcaggcgagtccaaacccggaaagacagcccaagaggaatcacgagcggaagccctagatccccgtcacccgcccacaaacgcctggccccgccgggaccagctctgcgccacagcgcatccccacgcgggaagccgcggcctgggccgtcccagccacacccagcgcgccttctccagggtcagcc

SEQ ID NO: 484639 - DNA, 651 bp, Homo sapiens
acctacgctctctatcgtctctccaaatgtcaaggaacatgtggagatggtacctatccccagcgccaagattcgctgtgggacttttttcccatcccctccttagcacagatgagcccagttctccaacctctattcaacccgtactgatcttattgtttggctgattccccaggtcaatggcagaagtcagtcgacttcttgccaaaacccctctgtaggggcaaagtagacgtccaaccaactgcacaaacctgtcccgtgtcattcgtgggatcttggcacagtcggatcacctgcagggaccasaccctatcggggatagagatgtttgccatccccacgggaggctggcttgcttgccagcgtgttgtgggtggatgtgagggggtgacaccgacagacgaaagtgtccgatcccgtggctggcgtccaccctatcccggggcacggggctgacaccccggaaaggagagaaacatgtctcgtgctgggagctggaagatagagtccacggtgtccagggggtgcacacggctgtctggccacgtctgggagtgaggctgtgcacacaaacagaggttgtgcacatgcctggggcgttaaggcacctctcgggctgcctatgccatacgtgggagggatcccatc

SEQ ID NO: 484640 - DNA, 651 bp, Homo sapiens
acctacgctctctatcgtctctccaaatgtcaaggaacatgtggagatggtacctatccccagcgccaagattcgctgtgggacttttttcccatcccctccttagcacagatgagcccagttctccaacctctattcaacccgtactgatcttattgtttggctgattccccaggtcaatggcagaagtcagtcgacttcttgccaaaacccctctgtaggggcaaagtagacgtccaaccaactgcacaaacctgtcccgtgtcattcgtgggatcttggcacagtcggatcacctgcagggaccacaccctatcggggatagagatgtttgccatccccacgggaggctggcttgcttgccagcgtgttgtgggtggatgtgagggggtgacaccgacagacgaaagtgtccgatcccgtggctggcgtccaccctatcccggggcamggggctgacaccccggaaaggagagaaacatgtctcgtgctgggagctggaagatagagtccacggtgtccagggggtgcacacggctgtctggccacgtctgggagtgaggctgtgcacacaaacagaggttgtgcacatgcctggggcgttaaggcacctctcgggctgcctatgccatacgtgggagggatcccatc

SEQ ID NO: 484641 - DNA, 563 bp, Homo sapiens
tagattgaatcacttttcatttaacatgttttttaaaattcacccattttgtcacgtgtcaatagttcattttatattgctatatattccattgaatgcatatcccaaaatgtatctacttccctattgatagatatttgggctatttccattattgagctatcattagtaaagttggtataaatagtcatatgtaaattttctgtgtcaaatttttcattattcttgattaaataccaatatacagaataattggatcatggggtagttttataagaaattaccaaatcattttgcaaaatagttttactatttcacactcccactagcaatatatgagagttatatttgctccatgtttatcaaaatgttgtactcagtattttttattttggtcaacaaatacgtgttcagcaatatttcattgtgcttttaatttgtatttccctattatgaacttatttatatgattattaggtattttttaaaattttacctaactatacaatgttttgtgtatacaacacaaaaacrtatagtagatagcacaagacataaaaagc

SEQ ID NO: 484642 - DNA, 607 bp, Homo sapiens
actgatggagctaaatactgaaatgtcattttggatcagtgcacagcatgattcaaggctgtacagatggaagagtctgaagggmtatcaaatatgtgtgagtgtcaatatcttgaggtgcaatggaaatctaaactgaccactctccttttttaaagtcaattgatgtatttaccttggtttttcccacaagagatttttatgctgagaagtaaaattaatcagccggtttcccatcaaatttgatttaattatttggaacaagagttccaaataatttgtagatcacttaccttatttagattattgatagacattttgtacactgtaataagggctagtcaaattaggacctattcaaagtcacatacacacaacaaatacactgataacgtcttgtatcattttaactttgtgaaatcatttaggattctgtacatatatattgaaatctatcttgtgctgaaattagtgtataaaatcattttattattagtgtgctccttttcatctattgcaactcctgtaatttctgttttataggaatttgatgtgttatgtggtgcatagatattcaaactattatatcttcgttgtgaattatgat

SEQ ID NO: 484643 - DNA, 634 bp, Homo sapiens
tggagctcatgccagttgagctttattttcctattgaaagtgaactctatttttctgttgaaaaacagagggatttaatgtagagaatagactgaacagttgaaggaaggtaacagggaaaaaactgctaccaacccagggctataaggacagaagaagctggtattttataaaattaggaggtggcaccaacagaaagtaaaattaggaaggagatgagaccactgctgtggacatcccctgagacagagaagggaagaaatatcctggcttcttctccccgccaacctttcaccaccctcccagtgtctgtcactggcaaatctcacagtagcctgttggcaaatgagcctgggatatatggttcactggagtcagctctttgggagacagagcagaacagaggagaaggggatgggaaatgatcataacgatgtttstttggagagaaaggaggctgagaagcaacatttttttgatagactaaaatatgtaccaaaagacttcatgcaatctacttatttgtgcgtttcataactaggtgggtaaaatcttgtctttctctgttagcaggaccatagaatagatgatatcagttattttcaactctgtgattttagtataccataaaaat

SEQ ID NO: 484644 - DNA, 634 bp, Homo sapiens
tggagctcatgccagttgagctttattttcctattgaaagtgaactctatttttctgttgaaaaacagagggatttaatgtagagaatagactgaacagttgaaggaaggtaacagggaaaaaactgctaccaacccagggctataaggacagaagaagctggtattttataaaattaggaggtggcaccaacagaaagtaaaattaggaaggagatgagaccactgctgtggacatcccctgagacagagaagggaagaaatatcctggcttcttctccccgccaacctttcaccaccctcccagtgtctgtcactggcaaatctcacagtagcctgttggcaaatgagcctgggatatatggttcactggagtcagctctttgggagacagagcagaacagaggagaaggggatgggaaatgatcataacgatgtttctttggagwgaaaggaggctgagaagcaacatttttttgatagactaaaatatgtaccaaaagacttcatgcaatctacttatttgtgcgtttcataactaggtgggtaaaatcttgtctttctctgttagcaggaccatagaatagatgatatcagttattttcaactctgtgattttagtataccataaaaat

SEQ ID NO: 484645 - DNA, 630 bp, Homo sapiens
tattaacatagagaaaacgtcttgtactatgcttatgcaggacagctacctggtagagatgacatagagaatgcactactctatagacaagttgataaataatttcataatttaacatattactgtacattttgttttattcaacatttactacaaatttatggcttcattcatagcatgtttgactatttacattctactttatgtaccttgtgcatgcatgtctatttaggatattggttaagaaataaacacgggatagttacagttggaaaatatgcccaattacatttccgtagagtggcattatgtgtaattagtgtccatgagtcaatgaacgtatttgaattaatattcttttactgatttctcatagcaacaatacagaatcattcgtgtcaggctttggaacagagtcctgataactattatttaccgcagacatcagccactgctgaaatttgagtggaaacagctatatctayatctggtacttgcaccaggtggggatgaagtaacttgctgtagcaccgtgttaaaagattaatccattctaatggtttttagttgcagtagcatattcacctttgtttactgctgtgtggcagcagtcatgctttcttgaggtag

SEQ ID NO: 484646 - DNA, 636 bp, Homo sapiens
tgaattttttttttaactcaaacagattctgatagacaaaatctatttctgagtattgctaatattctgtaacttaatctgggtgctggttacacagtatattccatttgtgaaaattgagtatgctatacacttatactataagcatttttttctgtatgtatgttttacttcaataaaagttttgtaaaactgtccagttccatatattaatcaaaaagtatttaagtctctcyttcatcatttggatcctttaatttgtgagaagctaataaaagcaagtggtccttcttccatttctaatgcttccattccatcttgctaaccagagtttctgacaactccatggtcaggtgaagaaaggatacaggttagagggttacattagttaggattgtccagagaaacataattaatgaaatgcatgtataggtatggaaataaatttattttaaaaaattggttcagattattgtagggactgggaggtctggcaggctaaagacccagagaagagttgatgttgctgtcagagtttaatggcagtcttgaggcagaatgtcctcttccttgggggacctgggtgtttttctcctaaaaccttcaactgattggatgtggtccacatgcattatg

SEQ ID NO: 484647 - DNA, 635 bp, Homo sapiens
gtctcctcagaaaccaagtagaacagaaggcagtatgagggtataaagtgctaaaagaataataaatatcaaccaatagttctacaagtggcaagtgtattcttcaaaaatgaatataaaattaaaacattcacagatcgtaaaagtagagagagtttattaccagtagctcagccatacaataaatgttaaaggaagtctttcaagtygagatgaaaggacattggaaagcaatacagagccacacgaaaaaaagtaaagacttccagcaaagataggtatataagcaaattttgaaaccaatattatgtatttttagaatgtaactccacttttcatttcctgaatcatttttaaaatttataaaaataactataaatctatattatatataatttatatggatatgtttgacaacagcataaaaagtttgagtagagatgtataatagatttttttgtatgatattgaagtttaagttgatattaattaaaaggggctattaaaccaaaaccaaatttgaataaatttaaaagagtaaagacatgaaatatatcccctaaccacaatgaaatgaagttagaaattaataactgcagaaaaactggaaaattttaaaatacgtaaaaatcaaa

SEQ ID NO: 484648 - DNA, 495 bp, Homo sapiens
gtctcctcagaaaccaagtagaacagaaggcagtatgagggtataaagtgctaaaagaataataaatatcaaccaatagttctacaagtggcaagtgtattcttcaaaaatgaatataaaattaaaacattcacagatcgtaaaagtagagagagtttattaccagtagctcagccatacaataaatgttaaaggaagtctttcaagtcgagatgaaaggacattggaaagcaayacagagccacacgaaaaaaagtaaagacttccagcaaagataggtatataagcaaattttgaaaccaatattatgtatttttagaatgtaactccacttttcatttcctgaatcatttttaaaatttataaaaataactataaatctatattatatataatttatatggatatgtttgacaacagcataaaaagtttgagtagagatgtataatagatttttttgtatgatattgaagtttaagttgatattaattaaaa

SEQ ID NO: 484649 - DNA, 666 bp, Homo sapiens
acaaaaggcagattaataggagaaaaggcataccaaattaattttaacattggtggttgtgggaggatcacagaagaatgattacccaaaactcaatggggtacagatgtttatatacctttcctcataaggcaaggagaaatggggaaaatttggcaatttgaaggatagtaatgaatggatttggagaatatgcaatggcctagatcaaagtctgttgagcctgcagagcagataatggctggtaaatgattctctttgaaataytgaatgagactgcaagacagtggttggtgacaaaagactgtacaagtgtattaacagacctcagtcttctcatgatatgagttaagtaagcaagaactcagggaagagaccagagataattgctctcttctttagaaggtctgtgctttagtcagataagggaatttcagtatttcgttggtttctttgagcgagacggagaattgaaagtctgaagaggtgcaggaatggtcagagagaccttgagattgcttctttagtctggcatatccaagtgctatattttggggtatcagttgctgacccccaaaaagggcctaaaccagaagagtgccagtgggagaggtaaaaaagggggagctgactgagcagctctataactcacatgaaccactatga

SEQ ID NO: 484650 - DNA, 641 bp, Homo sapiens
tgagaagaactatactgctaatattatttgcaaaacctttgccaaataagattaaagcgtaaaccatattaaagcatttgatgtgtactgtagctaaatataccatatctatagaaaatgttgcatcctctgcctccmaataataaaagcacatagcaggtgttattgtttggtcccagatatataaagacaactaggaataagcacacccttacctgacacttaagcttagcacattgtcactacatattgtagttacttgtgtacatgtatatgcatgtatatgtatatatacattatacacatgtaaacgtatccttgccttgttcacctttcattaaaataagcataataggccaaatagtgtctgtctgtactaaactccatttctaccccttgttctctgttctgtattgaggaggttggaaaattaaaaatgacattctttggactccatttccagttagattctgatcagtccccatcagcagaagcagcagaaaaaggatggaaaaattggggctcaaaaagcatttgtaggtagggttgatgcactagttctattttctctcttttgcttctctagtcctagaagaagggtttcagatacttgccccactttctgatctctggattgtacc

SEQ ID NO: 484651 - DNA, 641 bp, Homo sapiens
tgagaagaactatactgctaatattatttgcaaaacctttgccaaataagattaaagcgtaaaccatattaaagcatttgatgtgtactgtagctaaatataccatatctatagaaaatgttgcatcctctgcctcccaataataaaagcacatagcaggtgttattgtttggtcccagatatataaagacaactaggaataagcacacccttacctgacacttaagcttagcacattgtcactacatattgtagttacttgtgtacatgtatatgcatgtatatgtatatatacattatacacatgtaaaygtatccttgccttgttcacctttcattaaaataagcataataggccaaatagtgtctgtctgtactaaactccatttctaccccttgttctctgttctgtattgaggaggttggaaaattaaaaatgacattctttggactccatttccagttagattctgatcagtccccatcagcagaagcagcagaaaaaggatggaaaaattggggctcaaaaagcatttgtaggtagggttgatgcactagttctattttctctcttttgcttctctagtcctagaagaagggtttcagatacttgccccactttctgatctctggattgtacc

SEQ ID NO: 484652 - DNA, 641 bp, Homo sapiens
tgagaagaactatactgctaatattatttgcaaaacctttgccaaataagattaaagcgtaaaccatattaaagcatttgatgtgtactgtagctaaatataccatatctatagaaaatgttgcatcctctgcctcccaataataaaagcacatagcaggtgttattgtttggtcccagatatataaagacaactaggaataagcacacccttacctgacacttaagcttagcacattgtcactacatattgtagttacttgtgtacatgtatatgcatgtatatgtatatatacattatacacatgtaaacgtatccttgccttgttcacctttcattaaaataagcataataggccaaatagtgtctgtctgtactaaactccatttctaccccttgttctctgttctgtattgaggaggttggaaaattaaaaatgacattctttggactccwtttccagttagattctgatcagtccccatcagcagaagcagcagaaaaaggatggaaaaattggggctcaaaaagcatttgtaggtagggttgatgcactagttctattttctctcttttgcttctctagtcctagaagaagggtttcagatacttgccccactttctgatctctggattgtacc

SEQ ID NO: 484653 - DNA, 638 bp, Homo sapiens
ttctgttccacaaagaagtgcagctcttctagtaataaagtctatcatttttgagtcttcaatatgtgtcaggtaagcaatttattaatatattattttattttctcaataaccctgaggtaggtactgtcatctgcattgtacacagaaggcaactgaggcctaaaaaggttaagttccttgttcaaagtctcgagctgataaggtgcagtcagggatggaatctggctggttggcttcagagtctaacctttagccctcttgctgcatcctctttctagtaaaagacagacagattagctgagtaggcagcagctcttggaaaggagctaaatgcaggttctgggaaatgtgagcaccagcagtcttgcattcatgggacttgaataagtcaaaagcattttgctgagttctggatttctgcaccctccacagggattcttccgagcagggatggtggttccctgcactttccacatcacactataacacactgtcacttctcccctrcagcccccctcccttttcttagaacccactgcctttttgacatgaaaaatgtactataatgagtctactggctaattaattaaaagggaaaaaaaatcccaatcttcacatatgaaatgattaattac

SEQ ID NO: 484654 - DNA, 628 bp, Homo sapiens
accttgtcctggacactaagtgctggctgggcaggctttcagaacaaaaggcaaagtgcctcttgtggagacttgtaagaccctcctggggaaagcatgatttgaaggcccatggcacccactgagtctcctaggtcttctctaggaccagccctgtccttgctggggaagtttccttggtgccttttcgtgttgggggtaaagcctgaaaaacactrtgtacaggcagtctcattagcctactgaaaagcaataatactccactgtttgtggaagaatcctttgcaattaaagcaagcagaggaaaaattattagggagctaagttattagatctgttccatggaacacttttttttttttttttaaaccaagctcattttcctgagaaaaaatttaatgcaatctctccctcttttaaagccacctgatgccaccatgttctgcctgtagcagcaagcagatgcccaaaacaggaggacatcacggtgataggccacagagaacatggctggggcgtgtgccaggcaggacaatgcagggaagccaaaaacagtgggagaaaacacaataaagtgagacccgcccagaatggtaaacacagcagcagagctaccacacacttccct

SEQ ID NO: 484655 - DNA, 307 bp, Homo sapiens
taattcaaaaccctaagtcatacagctaatacaatttgcactgttttcattcaataaggacaatatttctttgaaaattccagaagctattaacatcttcagtaaagaatttataaaaattctaaggcgatacaccccatgaagattgcccctttagacagaaatggtctctaataaactttgccatcttggcagattttgggggacaaatgaaggtctcttaactgacctcaagttacccaaatcagaggactatctgtgtaaagcatacckactgatgccaaaagaacactaaatattcatgttt

SEQ ID NO: 484656 - DNA, 650 bp, Homo sapiens
ccttcctacccccatgtccccacaaaatgccaacattcttgaaatataggcttcatgaaaggatagtcagcaggtagctagattccatggagatccactcagtgaaaggatagtcagcatttctagcagagacacagagacacatacatacacaaatgtgtctatgtgtcgtgttttgtctggaatttgaatggagattttttttcaaaaataatttgtatataaaagcctttacccataataatcttctgttttgttttcttcttgaaatggagtctctctctgtcacccatgctggagtgcaatgaygtgatcttggctcactgcaacctccgcctccctggttcaagcgattctcccacctcaggctctggagtagctgggattacagtcacttgccaccatgcccgagtaatttttttgtatttttggtagagacggggtttcgccatgtcggccaggctagtcttgagctcttgacctcaggtgatctgtccgccttggcctcccaaagtgctgggattataccactgcgcctggcctctgtcagcatttgtcagtgttgaaacagttgtcatggaggcctgcctgttcagctgttagtgatacttggcctgccacaccatgacacaagtttacctatataacaa

SEQ ID NO: 484657 - DNA, 648 bp, Homo sapiens
tgttaaaccatcgaatagcaagaagagaagactgtctaaaggcttaacatactaattgatttttccttaacagaaagccataatattacttcagttgaggcctagacaacctacagataaagttttctaaatattatgtgatgagaaaagcattacctatttaaataaaaaagatacaacactattttcataccaatttgagggacgttaaatcctrtgttgccaggataagaaaatacttccacctaaaaatatgacagccatctatttgtagtacctttttaataggtcttaagtttctctacatggcaacttttaaaagcttctaacattttatttgttctaaatgtatagttactctaatgcctatcatgccgtttggtatgttgaaaaactctaagagaattcacgcctttgtgaatgctgttctactgaggaccttgtttccctaggacaggtctaagttcaaaagacagaagttagatgtggaaaacactgctgcctctagtttagatgctacgtacgtgaaggggagacatctccttctccttgttcctagatttgcaactcagtgttttaaatatttgagacatgttttctgccaaaggattccttcccctcgggaactaaacccacactagcaaagcc

SEQ ID NO: 484658 - DNA, 634 bp, Homo sapiens
actaggcgggaggccagctctgcagacagcaggtctcaggaagacggtcaaggcatggctgctgatgatccgcttatgggtgtgtttattgtcttagcccatgttagatgcgaggaaccactcacactgcaaatgacagctcctggctcagtcttagtgtcatacttgcctttaactggcaactcccctgcaatacagggattgtcatctttagtcctgactttccaattccatcttggatgtgctaccctggccagaagccactgggtgtgcccttactttgacctttcaccagtamattccatcttagggggctttctctaattgcttcagactccctcctgaccctttataccaccccaaaaccaaaggccctggtttaggagctgaattgtagcagccgttcctcagtatctagatcgcagggagatttcactggagctggctgaagctgttggcgctttgagcagcgttgagccatcagtcctagttctgcgtctttgccccactgcagcttttggccacttgccccagtttagtgtcaccaggccccgactataagccacagtaatttttatggctgcaggtattagagggcagccagtctacagaggtaggggctgcccatcctcca

SEQ ID NO: 484659 - DNA, 497 bp, Homo sapiens
tctcctcttaacacttggtttcaactcttgggccaccttgaaactggtggcctagtctggatggttaattctcttctccaaggtgtcttataaaactaaaagcaatatccagtgttgtctcatcactatggcatctgcagcaccattactgccctaggtttggattctatacttttacatgcaaagcaaggcagaatgtgcttttatagttagtatataatatttttgaataaatgagtgaaagaaaaccatgcacatttggtttatatcaagcatttgaacatttgacattcctaactaagcctttccccccataaactattttcaactaacccatacatacatatatacatccctaagggaatgattttaattttaaatttattttaaagtcatcttgtttatatggcctaccttgaactccccaaggagttctttatgactcttggttaagtcacctgacatgttttgtcatttwcaagtttgtaaagtcttgt

SEQ ID NO: 484660 - DNA, 530 bp, Homo sapiens
ctactgacacgtagaatctcagctctggcttatcaaagcagatattgaatacttttgaatttttatataacattagtgtaagtagagattgctggcccctatctcttgtgattcttttttgcccctgaaaatcactcagaagttctcccttcattggccacctggaaaataagataattctcgtagatttttataactatgggtgaaaattcttctgtgtccaggagtgcagcaacaaaggactttgcagtagagctggcttctraccagttctttctgtgagctagaagattaaagtgcacgaatcatgcaagtaggttagtctggaaaacataacacagcagaaaaaaatggctttcaaaaatgttcagaacagctgtttctcagtatgtaaaccagcctcttggtgcagtggatatcagagttccttgccttgtgcatattttatcattcttcgatcctgagcagtttaagacaaaataaattttatgcaaacccattccaggccatgggcatgcagttgagttttt

SEQ ID NO: 484661 - DNA, 530 bp, Homo sapiens
ctactgacacgtagaatctcagctctggcttatcaaagcagatattgaatacttttgaatttttatataacattagtgtaagtagagattgctggcccctatctcttgtgattcttttttgcccctgaaaatcactcagaagttctcccttcattggccacctggaaaataagataattctcgtagatttttataactatgggtgaaaattcttctgtgtccaggagtgcagcaacaaaggactttgcagtagagctggcttctaaccagttctttctgtgagctagaagattaaagtgcacgaatcatgcaagtaggttagtctggaaaacataacacagcagaaaaaaatggctttcaaaaatgttcagaacagctgtttctcagtatgtaaaccagcctcttggtgcagtggatatcagagttccttgcctygtgcatattttatcattcttcgatcctgagcagtttaagacaaaataaattttatgcaaacccattccaggccatgggcatgcagttgagttttt

SEQ ID NO: 484662 - DNA, 644 bp, Homo sapiens
ataagcaatttaaaaattctattttagacctgtttaagatcacgaatcttcaaatatgtctraaagtagatgagaatagataactgtttcagatataaaaataaaaactgtaactataattgaaggagaaaaggatattgaactagtactcatcaatgctaaatcagatataaaacttacagacagaccctgatgtcgaatacagtagtttactatgattcattggtaactaactgaaatgactttaacagattctagaacagcaggaaaagctggtttagcaaatctcgtcatcattaccaaaccacagaggtaagtttgaaaaatattggttctattactctgttgatgtttggtgaccagtgagcaagacaaactttttatagaggtctacatttgatttgcaaatcatagataattataatgattgacataaattgtattaatatacagtctctcagctaagaagtagatttagtaacaatgagcacagattaacataagactttaaaaccttcctcatcaataactcattgatattataacagatacatcatggcaaaaatcaaaaagtgagctaatttcaacaatacagaagaaaaattagtttaaatatggtatttaatgtcaccgaattttagaag

SEQ ID NO: 484663 - DNA, 582 bp, Homo sapiens
cactctcatcaacaaaatttaagaggtaacttcaatccctttttgcctttgaactaacacaaatacacttctacagcagaaatcaactgagtctttcctcaatagatatcacatttctggaacaaacattctccaaaatctctaagtttggctgggttctgaaataggtattttccaagaaatgtgaaggtattttctttttgtttttatttcaatccactctttggttgtgctctgggtcaaagctacagcagagtacatcaggggtgattcagatcttcactattcttattgactttctttgaaaaagctttcatttgcagagaaatctagtcttactgttcaaatgtcattcagaatgacttcaccatgtctttgtctttgagtcatttgtctgaatcctttgtagaggcagtgagcataaagatgcattttaaactcagaacaagtgccattgaaaaactctgtaaaaaacaaacataatgaatgatgataggttttaccatgakgtattaatgtctgaatatggtgttagattctgttgctaatgttttatttataatttttgcatcaatattcatt

SEQ ID NO: 484664 - DNA, 459 bp, Homo sapiens
tctgtgcttaagggactttcaatrcaatgcataatctcaaacctcctttctaatatgttttcagaatgatatgaacaagcataggtttgaaactgatatttcacatattcatttcttgtgtagaaatatttgtctccttgtatcttgaactgtcatatgcccatgactttttgtaacaatagcaatgcttttaagactattattttacctaaaattttaaagagaataacattataaggtgcttatctatatctttagtttttctctgccctttccctaggttctcccctcttcgtaattgcaaaatgattgtgggctagaggaacataaaatattgagatgtggacagaactaattagctttagaaccctagtcagccttcttatgggagagccataattgtaaatacaagcctgcttcaacccacttcctcatttgagagcaatcattacaagtacc

SEQ ID NO: 484665 - DNA, 459 bp, Homo sapiens
tctgtgcttaagggactttcaatgcaatgcataatctcaaacctcctttctaatatgttttcagaatgatatgaacaagcataggtttgaaactgatatttcacatattcatttcttgtgtagaaatatttgtctccttgkatcttgaactgtcatatgcccatgactttttgtaacaatagcaatgcttttaagactattattttacctaaaattttaaagagaataacattataaggtgcttatctatatctttagtttttctctgccctttccctaggttctcccctcttcgtaattgcaaaatgattgtgggctagaggaacataaaatattgagatgtggacagaactaattagctttagaaccctagtcagccttcttatgggagagccataattgtaaatacaagcctgcttcaacccacttcctcatttgagagcaatcattacaagtacc

SEQ ID NO: 484666 - DNA, 459 bp, Homo sapiens
tctgtgcttaagggactttcaatgcaatgcataatctcaaacctcctttctaatatgttttcagaatgatatgaacaagcataggtttgaaactgatatttcacatattcatttcttgtgtagaaatatttgtctccttgtatcttgaactgtcatatgcccatgactttttgtaacaatagcaatgyttttaagactattattttacctaaaattttaaagagaataacattataaggtgcttatctatatctttagtttttctctgccctttccctaggttctcccctcttcgtaattgcaaaatgattgtgggctagaggaacataaaatattgagatgtggacagaactaattagctttagaaccctagtcagccttcttatgggagagccataattgtaaatacaagcctgcttcaacccacttcctcatttgagagcaatcattacaagtacc

SEQ ID NO: 484667 - DNA, 459 bp, Homo sapiens
tctgtgcttaagggactttcaatgcaatgcataatctcaaacctcctttctaatatgttttcagaatgatatgaacaagcataggtttgaaactgatatttcacatattcatttcttgtgtagaaatatttgtctccttgtatcttgaactgtcatatgcccatgactttttgtaacaatagcaatgcttttaagactattattttacctaaaattttaaagagaataacattataaggtgcttatctatatctttagtttttctctgccctttccctaggttctcccctcttcgtaattgcaaaatgattgtgggctagaggaacataaaatattgagatgtggacagaactaattagctttagaaccctagtcagccttcttatgkgagagccataattgtaaatacaagcctgcttcaacccacttcctcatttgagagcaatcattacaagtacc

SEQ ID NO: 484668 - DNA, 560 bp, Homo sapiens
ctgctgatccatgcaccatctgttgtttccactaccggaaagaagacttttcttcatgtattccctttttcttagaaaagacaaccttcctcaaagccctcccacacttttgctcagattctactggccagaattgagtcacgtgtctatgctctcactgtaggagagactggaaaaggaagtattttgcattttcaggctctgtaggtggaggtgaccactcccagcaagttagaagtaggggtaggtgggtggatggttagtaggtagacagccaaatatgctgatcctccacacatctctttatccttatataaagacacagtatttstgtgtctatatagatatagatatggatatgtactcaggaatgggatgatatcatacatgctctttactatggtcatcctccctgtcacattctgttattgttgttattaccattttgacttcccgcactttactcagtaacatacgttaacacttggtgtttatcctttaataatttcctcaatgcttacataaatcatagaatatacatatacttatagaatggaagt

SEQ ID NO: 484669 - DNA, 578 bp, Homo sapiens
tgtctgctgcatgtagcatcttggaatatatctgcaagataagagaggtgctgttaaaatgttctcatattctacaggtgaaaaacaagggctgcattatttttaaactcatcaaccattcacccccctcgccctagcaggctcgggaaaaaaacaaacccaagatttayttcaatgagaaaaaaaacacaaaacactattatgccaaaccactgctaatttagaggaccaaaaggacatgactagatgaaatacatgccgaaaatttttgagcagtgctgaagggcgttctcgtaacatatacctactttgcatggttgtaggcttcaatctcttccagtaatacgctgtcgttcaaagagaaaggactggtctttgccagaactttaagtaccatgccagcttcagagccaacaaagatgactgtgtagttctggtagggtccggctgaatggtccactgagatggccgtcagtctgtacctacaagaggaggcggcacagatcagaaggggaggccaacgggcagagaaaacgttgaataggaaggagtgtttcacacacaatctcacctgaccc

SEQ ID NO: 484670 - DNA, 402 bp, Homo sapiens
ctgatcactgaaatagctgcagtagtagactatgcctacttagtcccagaaatcatccaaatatccaaactgtgggtatcatatacaccaatgagtctgacttactggaatgctttccaagatgcgagatgatatgggaataaagggaggtgtggtccagtatgtttggaaatcctacatgcaatgcctaatcttggaacacytcagcaacatccaaggctccaagatgtctcactgtaaagaagcctgcttactgcagcatttcccaaacttaggtcacgggaaaccattcctttttctataacaattatcccccttccttgaaaacttcctgtgcacaattcttaagaaacactgaggcaaactctagactgtgttgaaaggcagtgtgatgtggtagga

SEQ ID NO: 484671 - DNA, 577 bp, Homo sapiens
ttgtatttggttgatttccccccagttgatgatattaaaaccccacgtggcctgagtagagttgctgaaagagcggtgagagaaaacagcaaatgcttgtctgagttcacgtagccctgggagttggcaattccaatcacaattacagtcttttctgtcagggttgacctttaaggagattgcctcaattataaaaggtcaacatctcctggttctggcacaagcaagtcctgagctcggtaataaaatatagccaaataaccccatggagtctcttacctctgccacccagcaatggcctgtggctgttagacttctttggaacatagtggtcatgtagctgtcagatgcaaggtgtgtactgggaaatttgtatttacatcttaatgtcagtcagcctgtggacttttaaattagcaattcaaactttgcttttatagctagttagtcattacgcccaaacgagtcaatttcaaggattatgcacttctccatacaaaagttaaggtatgtgagttaaggctatartatgtaacttttagaggactcattcctccaggtatgagggcaagtgggc

SEQ ID NO: 484672 - DNA, 544 bp, Homo sapiens
cttccttttttatttttacagatctgcctttattgtgttttagagatcatctggattttctctgtctcaaacaaagtcaacaaagagtactttttcattagtgagatgcttttatatatcactgtagtcagagagcaaagaaagctcttctctccaggcatgggtcaaactgctacttggtattagcatagacatatttctaatatttgcttgaataattctaagttaaaaacgcataaakaaaggttttttttttcccctgctgctttaggaaaaaagaatggtgtatgatttcttgatggcagtaataaaatagcaccgctgaaagcttgagctctgtattttgttcccggtacacaacactgactcttctcagtgaatatttctggctacttgcaatttttgatcacaatcacatattagtttttcatgaactagacacactaatgcaagcaccacaagagaaaagaattttaatctaataaaccaatgagaggaaaattacctgccagcaatataaagtgtgtctcgaattttcaacatc

SEQ ID NO: 484673 - DNA, 544 bp, Homo sapiens
cttccttttttatttttacagatctgcctttattgtgttttagagatcatctggattttctctgtctcaaacaaagtcaacaaagagtactttttcattagtgagatgcttttatatatcactgtagtcagagagcaaagaaagctcttctctccaggcatgggtcaaactgctacttggtattagcatagacatatttctaatatttgcttgaataattctaagttaaaaacgcataaagaaaggttttttttttcccctgctgctttaggaaaaaagaatggtgtatgatttcttgatggcagtaataaaatagcaccgctgaaagcttgagctctgtattttgttcccggtacacaacactgactcttctcagtgaatatttctggctacttgcaatttttgatcacaatcacatattagtttttcatgaactagacacactaatgcaagcaccacaagagaaaagaattttaatctaataaaccaatgagaggaaaattacctgccagcaatataaagkgtgtctcgaattttcaacatc

SEQ ID NO: 484674 - DNA, 608 bp, Homo sapiens
agttattgttgtcatgtaagactgtagggctgccaatcacttggtaccacattgtggggtctgttttgattggttagtgcccatgccagagggctggcaacatatttttattataatctcccaacacacaaaacttcttggsctgaaaatcagaaaatcctcagggatgtcaatatttgtatattagagttttaaggtcttggctatagatttttttttaagtgtggcaaaagtacaggagtgagttaagtctcttctgggaaattagcataaaatctacagaaacaaaaggacagatccaaatgaaatgagcagaataataacagtgctcaatcaatttgattttatattttaaaaaccaccaaactgcatgtaggccttggctagaagtcaaagatttcaactacacagctcaactttctcaagaagagtgctaatttcaatttttattttggtcccataattcccataatcccctaatttctagttttgaaagtagagtcaccacacttaaaactcaaacctaggcttggcattattttacctatgtcttattccctgaggtatcaagattaccagccatgttcttggagaccatgtgtagtctg

SEQ ID NO: 484675 - DNA, 589 bp, Homo sapiens
tcacagatgtgacaaatccaagtctagcctggcctctgctttatcctttcttacttctgcctttccccaatcccactggcccatgtcccttcttttctgcatgtttgtagcagggttcaccctcatcctcactaatgtcaagtcaaacctcaaatttgtatgtggctcctcaattgagtactcaaaactcaggaccacatgtttgaggactctaatgatacagtaattggccctcaataggctaagctccattcactcaaacactcaacaattttttttgcagttacctcatgctaggtattctgttgggaatagaaaaatgaatgagatagtcccctcttgtatggaacacatgcttgactgggaagatagatgttagacaaatatacatacrtgcacatacaataacttgtcagttcaaattgtgataaattctatggtgcaagtagtatgaccagaggatcttgtataccttggaaatcacagggagcatttttaaggaagcggtaatgaaaggaagatttgaaaggcaggaaggagtaatccgggtgaagaccaagagaaagaactttttaggtgtgtgatggcc

SEQ ID NO: 484676 - DNA, 607 bp, Homo sapiens
gccttttaaaaatctgttttgctcttaatatttattaaactcatccacacataaaactccttgcctttctttcttatccgtgtctatttcttcttataattccctatcctaatggctatgaaaacacaggcatatgactggaaataaatctttaaataaagaaagaaaagtcactcaaaggagaatggagattaatagacagcayagtcggtttcctgtttggaacagcctcagcgagtttctttttcctcctattctctcctgaaaaatggaaccacaaaagaccaaggctcagtgaacattctttatgtttttttcatgtaaaataaataagaaatttttgatgcccattagctttaatagagggcagaactttacttctactgatcataattcttttacttttaagtgagaatttggactgactataccatatgtgaacattgacacagatactgcccgatgataatcacatcaaggttcactgtagtgattctggctctgaaaagtctattagagtgatggccattcccactttgatatctaaatgtattttcaaattcaatcaatgtaggccaggcgtggtggctcacacctgtaatcccag

SEQ ID NO: 484677 - DNA, 529 bp, Homo sapiens
attataatgcctatcttgggcatctctgcatttttactaatatctatttgtgtgtattaaagccctagtagttttaatcctttctttctaaaaatcttccattgtctaattttgtatgcaatgagaaatattaaaatatgcacttactagttgtgggactttgggcaatttgtttaattgcgcctcaacctcaaattccctgagtattgaatgtagatagtaagaatatctacttcatcagactgcacggaaattaatcatgcatgtgttcatgctcagtgcctggcataggattttcacccatatcctctccatccttacctactatggctccattttagttaccaccaaggtctccccattctgcagctgcctggcttaaagtgcgggtatcgaactctctacccaaagccaatcctttttaaacattctraactgttcttttttctttgtattctaacacaagctacaaattaaccacatcatggttaatttgatgaatacattatcctctaagattaataaatta

SEQ ID NO: 484678 - DNA, 627 bp, Homo sapiens
ctgatttaaaagaatgagagaccatatagtatatttcatcatcttcaagcagacttacaagtaaatccccaaagatataaaattcgattaccatgttagaggtgccagaggtagataatatgatccttattataaataagtttacactaacacataaaataaaaaagactgaacaaagcaataaatatagaaaaagtcatgccaatttaaccttctgggagcagttacaggagagactgctgaaatagaaaacagtagtagttacattttaatgattaaagaaatatgttttattttaaaagtcatttgttatattaatgtacagatatctttaaatttctttagaaatttcccagctcaagagaaaaatcttaaaggaatttaatataccgtaatttactttacaatgtcatcattcttttaagatcttttcatatataattgtgtaagaactcacttaggattctaagaagaatgcttacaatcagcacacaagttcttatgttctcttgacagtcctgggtgaaaatatttcygtaaccttagccaaaaaaaggcatgcatgcatgacacctccatggctctttgaaattggtatccttttgcacagtaccaaagtgtttctaa

SEQ ID NO: 484679 - DNA, 515 bp, Homo sapiens
tttttttgtcttgcaaagttctctaccaattttaaaaccccttgatagaagcaccatataaaagcaatttactaatattattttcattaaactattcaccagagatctatactattatttgaacagctataatcaaatagaagtttcaaacttatcaatgtgtaggtttagatgggacaccagagctaagatggcagataggaggcaagactagcttgcagatcccacttggatggacagagcagagtgtggagacccatatcatgaacttttgcttcaagaagtactgcaggaacataccaggaaaaccaagataatccatagaccctttgaaagaactggatcaccactgcaggctccttgagacatggaaaaactgtgwgtctgccagctttctcagtggggaggctcatggtctgaggaaagctctcagccatggccaccggttgcctggaaatagacttggttctgttgaaggggcatggtgggagtgagaacagcctttacgactgcca

SEQ ID NO: 484680 - DNA, 624 bp, Homo sapiens
ctggtccttgcctgtctccaagctcatgtcttgctctagcccccatttactgctccatctctagtcaggcgaagctcattcttacctcccaaccattgtccttgcattctcactgctaggaaagctctctccccatgtcggtaatttttggggattgatctcarattggcttctgttcagagacttttcctgaccacattatctaattttgtctgccttaacatcagtcactctctgtcacaccaccaggtgtacacttctgattacctgaggtcctctatgtattaactgttgtaagtccatctcttctcaattaattgtaagctccttaagaaaaggaattccttagggaatcccatttgtgtgttcttgttcattgctttatacccagtacctagaatagtgtctggaatatatgctgaataaatattggttaagcaaatgaattggttgaaatggggtgagattgaaattcaaggcttaaagttctccaaattgtagacaaagaagagcctaaatatacagataaagtagtggaagttcacataatccatactggcagtgtctgcagtactagaagaacactatttgatgaaccagatgtccatgacccaccttcatagt

SEQ ID NO: 484681 - DNA, 612 bp, Homo sapiens
ggatgatagtatctaccttttagatttgttgtgaagattaattgatatatattaattatatgtacagctttaaattggaccttgcaataggcactaatagattatctactctaaatkttgttgatttggtctgagttcagatattttatagtgatggaaatgaaagtctgagtaaagtgtttggtgatttaaaaagatgatttaactcaactgaatagtggattggcaaactaccatgtgtctggcactcttgtaaggtatgaatatgatcatggtttaaagaaaaatttagggctgaaaactgagaataactgattatgctaatgtgatccagtcattaataatgtctgcagaaacactaaacacttgagtttagcattttatgtttctttatatcgatccatttaagacatattagattttctagctaggataaaatgcatctcaaatatgtacttgaactctgatgctgaggcacagatttggtaaagattataggacattgttaacacacagttatgcccagagagaatttgttcatctgcataactaagagaaatatgatgtattgttaagtataaggttatcgagagaataagggaatattcccat

SEQ ID NO: 484682 - DNA, 292 bp, Homo sapiens
ctgtcattgttcctccttacattttatcaggaatggggacagatagaagtgaagacagaaaatgagcagtaggcataataaataagttaygtagtacaattttatacagtgatacatgctttgagaaaaagaaaaatagtggagcccagtaaaatagtttaaaggatggtaaatgagagatctgctgagtgcagttttagtaggttagatttgatcaaagacttaaggaaaccgaggaaggtagccacacagatgtctgcgggtaggcctgctaggttgaaacaacagctaa

SEQ ID NO: 484683 - DNA, 292 bp, Homo sapiens
ctgtcattgttcctccttacattttatcaggaatggggacagatagaagtgaagacagaaaatgagcagtaggcataataaataagttacgtagtacaattttatacagtgatacatgctttgagaaaaagaaaaatagtggagcccagtaaaakagtttaaaggatggtaaatgagagatctgctgagtgcagttttagtaggttagatttgatcaaagacttaaggaaaccgaggaaggtagccacacagatgtctgcgggtaggcctgctaggttgaaacaacagctaa

SEQ ID NO: 484684 - DNA, 292 bp, Homo sapiens
ctgtcattgttcctccttacattttatcaggaatggggacagatagaagtgaagacagaaaatgagcagtaggcataataaataagttacgtagtacaattttatacagtgatacatgctttgagaaaaagaaaaatagtggagcccagtaaaatagtttaarggatggtaaatgagagatctgctgagtgcagttttagtaggttagatttgatcaaagacttaaggaaaccgaggaaggtagccacacagatgtctgcgggtaggcctgctaggttgaaacaacagctaa

SEQ ID NO: 484685 - DNA, 292 bp, Homo sapiens
ctgtcattgttcctccttacattttatcaggaatggggacagatagaagtgaagacagaaaatgagcagtaggcataataaataagttacgtagtacaattttatacagtgatacatgctttgagaaaaagaaaaatagtggagcccagtaaaatagtttaaaggatggtaaatgagagatctgctgagtgcagttttagtaggtkagatttgatcaaagacttaaggaaaccgaggaaggtagccacacagatgtctgcgggtaggcctgctaggttgaaacaacagctaa

SEQ ID NO: 484686 - DNA, 473 bp, Homo sapiens
ttgtatgcaaccatccattaaataaatattttttaaacaaatatgttttccaattcaatccaagagctcaaacaaaagaaacttcatcttcttcatagttctattcatagaacttagcacaatgccaggcatatagtgtttcaatacactcaagtaacagatttatcttcttacagtgccagaattcctaccttgatcttgtctacttattagctcagattcctctggtattaaagtttgtatgtgtctcttcattgtttttaagagaaagcatcctacgtgctaactttaggctctcygattatattcctgtccatgtagccaaattccctagtaggatttctgcctatattctattatcttttgtacccctttcctaaccacttttcaactatcagcataagtaggtaccttccccttctgtcctttggaacttccctagtttctctgttcctaccatctttgataaaact

SEQ ID NO: 484687 - DNA, 582 bp, Homo sapiens
agctttcctgggtggttctggctcagagtccctcaagaggttatagccaagttacaagtcaggtctgtagtcacctaaagctcattcacgtgactattggcagggggttttattatcttatcacatgagcctttccatagggayggtcaggacatatcagggggcatcacccagagcaaatgacatgagaggaagggaaagcaacactccttttgtaacccagtctcaaaagagacatttcatcgtttctgccacattctattcactcgaagagaatcactaagtccagccacactcatggaaggtgaatgaagctcctgttcttgaggagaagagtactaaagaatgtagagagatatctttgagataatctcaaccagagtaaggagaactgagagtaccgggtccaggagcttagagggaaggaggaagcaggatgaaggactattataaatacggtgattataggatatctcactgagagatgagagttgaacaaagacttgaagtgacagaccagagataacctactgagtcctttccactactacccctcatttcctgagaaactcacaaggatat

SEQ ID NO: 484688 - DNA, 641 bp, Homo sapiens
tttgaaaagcaattcattcatagactctctgaamcttgctgttaaatacatgtaagtgtattcatcttagagtcaaataaatgcaaatttataaaatattagaaaatatagaagatatgtcaattttctttatcaactagatctgtattaaaacttactgaaacaagttaagagtgtgggaaaacaagctctgttataactggtagtgggagtttatgtcaatccatttaaagaccaatttggaataatttttaaatgtttaaatgcatacagttttgttagtttcattctagtttagtagatcatttatcatttaataaatatttttgaatgcaggtcattttagtcattcaacagatatttattgattgcctactatatcttaggtcctattcttgatgcagaagaatacaatagtgaactaaacaaagaaaaaagaatctttaattgtctttcacattctggtgtggggagatggacataacaaccaattgtatagtacagtaactggcaattatgtgctaagaaaaaaacagagaatttgaataaaaagtgtcagaggtatttaattttagacaggatagccaagaaaggtctaattgagaaggttgttatgtgtgtattagttaggttgtttgcag

SEQ ID NO: 484689 - DNA, 634 bp, Homo sapiens
ttattaaagtttagtgtgcttgataaaacacaggttgctgtacctcaacctatagttttggcttagctgtctgggataagaccaaagaatgtgcatttctggcaagttcccaatattcaaactttgagaactactcgtcttactcttgtactacacccctgaatgccatgatcatcttgatcatgtaggctttcwtgggtcacttgctccatctttactcaatatctttgctcaaatatcatcttttcaatcagtatatgttaatcaccctatttaaaatttcagcatgcatcccacaattcctaatgatcttatcacccttctctttttatttaaactgtaccattaatgtatatatgtatgttgttcattatctctgttatcccttcatactcacttaaattagttgtataagctcatgatggcaggaatttgtttgttgtttgcttttaatgctccccagcacctagagcactgcctggcaaatgtgacatacaaagccatgtgttaagtggaggaatgagtagattgcttacgatgaagaatgacccctccaaagcttaatcagaatgcaatctccataagtctgaaaaaggatggttgttaggcccttacaaaataaatacatcccagc

SEQ ID NO: 484690 - DNA, 634 bp, Homo sapiens
ttattaaagtttagtgtgcttgataaaacacaggttgctgtacctcaacctatagttttggcttagctgtctgggataagaccaaagaatgtgcatttctggcaagttcccaatattcaaactttgagaactactcgtcttactcttgtactacacccctgaatgccatgatcatcttgatcatgtaggctttcatgggtcacttgctccatctttactcaatatctttgctcaaatatcatcttttcaatcagtatatgttaatcaccctatttaaaatttcagcatgcatcccacaattcctaatgatcttatcacccttctctttttatttaaactrtaccattaatgtatatatgtatgttgttcattatctctgttatcccttcatactcacttaaattagttgtataagctcatgatggcaggaatttgtttgttgtttgcttttaatgctccccagcacctagagcactgcctggcaaatgtgacatacaaagccatgtgttaagtggaggaatgagtagattgcttacgatgaagaatgacccctccaaagcttaatcagaatgcaatctccataagtctgaaaaaggatggttgttaggcccttacaaaataaatacatcccagc

SEQ ID NO: 484691 - DNA, 634 bp, Homo sapiens
tggcttggaaagtttgggtaggtgaattgctttgtagctgatttcagtggcaagcacacttgaattgtttatttcaagtgtcttggggttgtctagtggagactgtataagggacaaaagctataaacttcaaataacccactggaactacttactggttaaaatctcttctgttgtattagttggatgtcagatgaccctttcaagttttgaacttttagaaaccattttgatttcatagtagtctatatatgtattaattaaaggtagtagtagttttaaaatccatttctttaaggacattttagtattcasaggagtagatttgggtagagatgctgaaacctgacaaatggtacattcttgagaaagaagaagaaaatacaaggaagcctcattgccattagtaagagaactaaagctcgaagttccaaaaagactatgaaaacttcatcaccaaagccgtaagatggcatgtatgcacagaaatatgctgagaagttatagaacattctatcgccaagaaatatttagggcaccctgagcagaagtccgagtgataatctcatcactagtataaagtcatttaataattaatattataccttttaattacatgataattataattcct

SEQ ID NO: 484692 - DNA, 521 bp, Homo sapiens
agtagtcctggtagactgatatgtgagaagtactactataaagtacattgccaagcagataaagaaattcttgagaaatattagcaattatgaatgtactgaagcaattggaaatttattcaacaacatgagcaaatatacttggacataataaattaaaaatcaagtttccaaagaatgtatatagaattttcctcatttcctgtttaaaaaaatttaccccctccccactctttcttattcaccaaaattgtagcagggtttagatttggcttataggattattaatgatgtttttctttagtgttagtttctattttctacaatgagtatatattacttttgtaagtagacaagaaaaagatagcaaatgcatagtccagagtgtctacaatgaagtctgcttattcatttcaggtttagtaaataatatattataatctggtacacwtgcaaaaggccatgggcttctcagagactggaggttcccagacatggagaagtaagcaatgagaatgctg

SEQ ID NO: 484693 - DNA, 573 bp, Homo sapiens
tactgtatactcaatatctaagacaattcctgacacatagtaggcattcttgagcatttgctgattgaacgaaggattattcatacttttaatctttggctgaaattatttttatgataaatttcattaaaatttattgagattttagagaaaatgttctatgtagaattttcttaattgcttttatttttatagytgaaaactggccatggtagacttttcttttcccctctgtcaatcacaatgattggttaccggtcacagcaagatgataatgggcttttagtatcctctttgtgcaactgtcatattttccccctttggcttatgtacttaatttttcattaattcttctttcctgaaatgtaaatatttttgcttagtaatcattatagaaaacagtagagaggggaggagaaaacagtacgttgttcaaatcatcaaattcttaataccaccttagggcaacagaagaatggcagttgttactgaattatgtaactgaaagggaacaaaggcattaaaagaaaggctccataatgaatcttctggcaggtttcagagaaagaagca

SEQ ID NO: 484694 - DNA, 573 bp, Homo sapiens
tactgtatactcaatatctaagacaattcctgacacatagtaggcattcttgagcatttgctgattgaacgaaggattattcatacttttaatctttggctgaaattatttttatgataaatttcattaaaatttattgagattttagagaaaatgttctatgtagaattttcttaattgcttttatttttatagttgaaaaytggccatggtagacttttcttttcccctctgtcaatcacaatgattggttaccggtcacagcaagatgataatgggcttttagtatcctctttgtgcaactgtcatattttccccctttggcttatgtacttaatttttcattaattcttctttcctgaaatgtaaatatttttgcttagtaatcattatagaaaacagtagagaggggaggagaaaacagtacgttgttcaaatcatcaaattcttaataccaccttagggcaacagaagaatggcagttgttactgaattatgtaactgaaagggaacaaaggcattaaaagaaaggctccataatgaatcttctggcaggtttcagagaaagaagca

SEQ ID NO: 484695 - DNA, 573 bp, Homo sapiens
tactgtatactcaatatctaagacaattcctgacacatagtaggcattcttgagcatttgctgattgaacgaaggattattcatacttttaatctttggctgaaattatttttatgataaatttcattaaaatttattgagattttagagaaaatgttctatgtagaattttcttaattgcttttatttttatagttgaaaactggccatggtagacttttcttttcycctctgtcaatcacaatgattggttaccggtcacagcaagatgataatgggcttttagtatcctctttgtgcaactgtcatattttccccctttggcttatgtacttaatttttcattaattcttctttcctgaaatgtaaatatttttgcttagtaatcattatagaaaacagtagagaggggaggagaaaacagtacgttgttcaaatcatcaaattcttaataccaccttagggcaacagaagaatggcagttgttactgaattatgtaactgaaagggaacaaaggcattaaaagaaaggctccataatgaatcttctggcaggtttcagagaaagaagca

SEQ ID NO: 484696 - DNA, 628 bp, Homo sapiens
tttaggaaaactattttaaataattattttatgtcaaaataagaaagaattgagtgaataaaagaagttaaagaaccacacaaaagtagaacccatcaactagatgctaatattatttgaagaaaacttcagaaactttccatgttttttaatattccaagaaataactacacatagatcattaatgccgttatatgttgtcttttgttaattagaatttatgaaaaagatcagtcttctagtttaaaatagagtggttctagttggcttttaatgctcttaattctcatcctaaagatggaaaattaaataaggtaaactggaatcaagaatcaacattttgacccaaaaaaaggcagtgatttcctatacagcaaatgaaacatttaaaacttctcgctttgggctattcatgttattaggctgagagaggcagctcattaaataggtctttaatccawccccactctctgtccttgcatcagcaaaaaggaaatgctaatcctgctcttcaaactgactcttctatgccgccctgcttcttttcattcatcctcccagagatgagagcttctgaaagcaattgtatggtattagaattgacagtgatgacttaggaggagatgct

SEQ ID NO: 484697 - DNA, 633 bp, Homo sapiens
gctgcagtaaagaatacaaaatatgctaggcacggtgacttattcatataatcccagcactttcggaggttgaggtgggtggacctcttgaggacaggagttcgagaccagcctggccaacatggtgaaaccccatctctgctaaaaattcaaaaatccagctacttaaaataattatgtgacactaagaagcacataaaattaatawaattattccagattatgtaaataatgaagttactccagaaataaagcttcctgagacaagaggaagagaactgtcttgcagattttgaggattcagaagctggtgcatgttatttcttagttacatttttccatgatcacattccttttctatctgaaccttgactttaacatgtaaaggtttgtggctttagactttataagttccgcatatttgaactcctgtgcaactttatacttatgattaaatgatgggtctgatttttataatagtctcccttgtagctttagaagataaggatctctaaatgttttctttcacagggcacttttgatttcacagcataaactgagtttagattttcagaactgagtctattatttcttaagtctttcaatgtagttaataaaaccccacttactcat

SEQ ID NO: 484698 - DNA, 633 bp, Homo sapiens
gctgcagtaaagaatacaaaatatgctaggcacggtgacttattcatataatcccagcactttcggaggttgaggtgggtggacctcttgaggacaggagttcgagaccagcctggccaacatggtgaaaccccatctctgctaaaaattcaaaaatccagctacttaaaataattatgtgacactaagaagcacataaaattaatataattattccagattatgtawataatgaagttactccagaaataaagcttcctgagacaagaggaagagaactgtcttgcagattttgaggattcagaagctggtgcatgttatttcttagttacatttttccatgatcacattccttttctatctgaaccttgactttaacatgtaaaggtttgtggctttagactttataagttccgcatatttgaactcctgtgcaactttatacttatgattaaatgatgggtctgatttttataatagtctcccttgtagctttagaagataaggatctctaaatgttttctttcacagggcacttttgatttcacagcataaactgagtttagattttcagaactgagtctattatttcttaagtctttcaatgtagttaataaaaccccacttactcat

SEQ ID NO: 484699 - DNA, 633 bp, Homo sapiens
gctgcagtaaagaatacaaaatatgctaggcacggtgacttattcatataatcccagcactttcggaggttgaggtgggtggacctcttgaggacaggagttcgagaccagcctggccaacatggtgaaaccccatctctgctaaaaattcaaaaatccagctacttaaaataattatgtgacactaagaagcacataaaattaatataattattccagattatgtaaataatgaagttactccagaaataaagcttcctgagacaagaggaagagaactgtcttgcagattttgaggattcagaagctggtgcatgttatttcttagttacatttttccatgatcacattccttttctatctgaaccttgactttaacatgtaaaggtttgtggctttagactttataagttccgcatatttgaactcctgtgcaactttatacttatgattaaatgatgggtctgatttttataatagtctcccttgtagctttagaagataaggatctctaaatgttttctttcacagggcacttttgatttcacagcataaactgagtttagattttcagaactgagtctattatttcttaagtctttyaatgtagttaataaaaccccacttactcat

SEQ ID NO: 484700 - DNA, 442 bp, Homo sapiens
gacccccgcgtgtacggcgtcgccccgcactgcctggacgagggcaccgtgcgcagcgtggtcatcgaggaggtcggcggtggcgacccgggggaggaggccgccgaggagcacaaggccatccacaagacgtcctcccagtcagcccctgcctgtccccgcgaacaggagcagtgattggggccgcaagcccgcctgaaaccggcccgggcggccctgcggggagcgtccgagtacctgcacagatcccatgctgtgaaagaggtgtttctggcctggtcacaccggggattcccttccagtatttgcccttcccctccgctagttttcagtgaactcgcttacgatccaaatcttgaacacacctttgtctgcgtagtacaacgttaatcttgcaattcgrtaaggaagaagagtgtctctgatttttcaaaccatccat

SEQ ID NO: 484701 - DNA, 391 bp, Homo sapiens
aaattctctttactggtgttatccatgttttaccactaacaggtttctaggtggagtttgtttttgattagcattaccagcaaacactgatacaaattaacatcaagtctaaacaaggatattgcattgccactaccccagattcctcctttccctgaactaggaatwcaaattctgaatgggtagagttaccatggtacagtaggtgaaaattaatcaggagtagaaaaacaccctttgatgaaaaaatttagaatttagtcttatagaatgctcttgttaaaaacaggttatgtagaattacatctaacagtcattttagctctttcttttttctttttgctagctagctttgtgttagcttttgagaccttgcatataaacttaaata

SEQ ID NO: 484702 - DNA, 489 bp, Homo sapiens
gttgcccagggaccagctggggcagcactggttggctgctgtccgctggcacagagccccgaagctggtatgggagcggatctgtagggcacacgcaggaggggagagttcaggggcagcccaagggctcaggttttcccagtcctatacaaggctctctcatctcctttcacactacagggcaagcgcagagagggatcttgacagcctggtgagataggcttgtctcccagctgcctttggctcctggcccaggtgccagcagctacatcttgacttcatcaaagaggagcctcagggatgctgcccaaggcttcagcctcagagaccctgctgtaagggcccctgtaggtcacacaccccaactccrtgtaaaagtggaggtagcagccacagatagaacagggccaagggtccaatgagctgaagcaagcaatgggaagagtggaggccaaaacattccaggttcagggtcactgccaaaaccca

SEQ ID NO: 484703 - DNA, 581 bp, Homo sapiens
tcagcctgtgaactatacccatggtccttcgtgctccctcgtcctttcccttagtgartgataaagctggaagagacctatggggctgggctttgcggggaggagaggtaaagaaaacctcagggccagtcaggatcgggtaagacgaaagagaaaagacaatcctcagaatgtatctccccagttcaggcccaggtgtttgagggacaggagttggcagctctggaagggacctcatgcaatttcttccactctcagctaagccctgctgcctggcatggcaaaggctataaatcataactgaagaagacagtggaagtgtaggggcccagcccaggagtggggacagtgcaaatggacagacacacaccctcatgcagagacacggaagcacggataccaattcaatgcatatacacacccagagagaccctgaccacatgcacacacaacataccccacagagaccctactgtccccagccaacagcaagtagagccaggtccctacctgagagtgcagagcaggggcaggaagtctggggcactgtctgtcctcaggtgtatttgtacaggtcaggg

SEQ ID NO: 484704 - DNA, 339 bp, Homo sapiens
tctttaataggacagaacttatgctcctcttttatgcctcaaaagctaccatttcgccccatgcctgatgacataaactccaaagcctggtaatgcgcactcagggcatcctgccactgctaaatcatttgcatccctaaactaggacaacttttttaccctcttyttttgaagtcagtagagatgaatgcatgcaaacttctgattcctattttgatttggtggtggaaacacaagaaatggaagaagacagaaataatatgtaacagaataaatgacttacttcataagtaaactttccaagttcacgtaggtgatgaagtcagtagcttcctttta

SEQ ID NO: 484705 - DNA, 262 bp, Homo sapiens
aggaggcagctgcttttacttaattgctaccaatgcaagatccatttttaaataagtaatgcaatttacactcataaagaataggaaaaggataaaggttccaagacagtatttgcaaagcagctttgcaggccaaaaaatgtttctaagtcataagtccaaagttcaggactgagctttctatcccraatgttgagggcacctattgaaacttggaaccacctacttttgccagccatgcagcccgattccactcgccgta

SEQ ID NO: 484706 - DNA, 631 bp, Homo sapiens
ctggaacaagaatgccattgttgaaaaaatcatcaagaacagtaaatactttaaagaagatgacattcgtaatttattctgaaactattccaaaaataaagtatctaaggaagaatggcttgtgcttttataarttcgtatttctaaaatagtaaaatactgaatattcacaaatcagaaaggaagacattctttaaatctatagtttcccatttaaacataaatgttaatctttgcatagaaaaaactaattattttgaattttccgtcaataaaatatcatgcttaatttgttaaatactataattatatgtaacagattctagattgcaaaaatgtgttacgctttccccaagaactccttgtagacccatattttttcctttcttattcccagtacattctgttaaatgcccttggctctagggagcacattaatttcttagccagacctgtgcacaccagcacctgacacagagaactcattttagaagcgggaagcagacccagaatcaccctgcgattcgtctcccgctgtgaggcttcatggaggtttgtagtagaggcaagctgagctacaaggatgctcccactatgcatctagtcctgccttgatgtgagatcagagcag

SEQ ID NO: 484707 - DNA, 631 bp, Homo sapiens
ctggaacaagaatgccattgttgaaaaaatcatcaagaacagtaaatactttaaagaagatgacattcgtaatttattctgaaactattccaaaaataaagtatctaaggaagaatggcttgtgcttttataagttcgtatttctaaaatagtaaaatactgaatattcacaaatcagaaaggaagacattctttaaatctatagtttcccatttaaacataaatgttaatctttgcatagaaaaaactaattattttgaattttccgtcaataaaatatcatgcttaatttgttaaatactataattatatgtaacagattctagattgcaaaaatgtgttacgctttccccaagaactccttgtagacccrtattttttcctttcttattcccagtacattctgttaaatgcccttggctctagggagcacattaatttcttagccagacctgtgcacaccagcacctgacacagagaactcattttagaagcgggaagcagacccagaatcaccctgcgattcgtctcccgctgtgaggcttcatggaggtttgtagtagaggcaagctgagctacaaggatgctcccactatgcatctagtcctgccttgatgtgagatcagagcag

SEQ ID NO: 484708 - DNA, 631 bp, Homo sapiens
ctggaacaagaatgccattgttgaaaaaatcatcaagaacagtaaatactttaaagaagatgacattcgtaatttattctgaaactattccaaaaataaagtatctaaggaagaatggcttgtgcttttataagttcgtatttctaaaatagtaaaatactgaatattcacaaatcagaaaggaagacattctttaaatctatagtttcccatttaaacataaatgttaatctttgcatagaaaaaactaattattttgaattttccgtcaataaaatatcatgcttaatttgttaaatactataattatatgtaacagattctagattgcaaaaatgtgttacgctttccccaagaactccttgtagacccatattttttcctttcttattcccagtacattctgttaaatgcccttggctctagggagcacattaatttcttagccagacctgtgcacaccagcacctgacacagagaactcattttagaagcgggaagcagacccagaatcaccctgcgattcgtctcccrctgtgaggcttcatggaggtttgtagtagaggcaagctgagctacaaggatgctcccactatgcatctagtcctgccttgatgtgagatcagagcag

SEQ ID NO: 484709 - DNA, 631 bp, Homo sapiens
ctggaacaagaatgccattgttgaaaaaatcatcaagaacagtaaatactttaaagaagatgacattcgtaatttattctgaaactattccaaaaataaagtatctaaggaagaatggcttgtgcttttataagttcgtatttctaaaatagtaaaatactgaatattcacaaatcagaaaggaagacattctttaaatctatagtttcccatttaaacataaatgttaatctttgcatagaaaaaactaattattttgaattttccgtcaataaaatatcatgcttaatttgttaaatactataattatatgtaacagattctagattgcaaaaatgtgttacgctttccccaagaactccttgtagacccatattttttcctttcttattcccagtacattctgttaaatgcccttggctctagggagcacattaatttcttagccagacctgtgcacaccagcacctgacacagagaactcattttagaagcgggaagcagacccagaatcaccctgcgattcgtctcccgctgtgaggcttcatggaggtttgtagtagaggcaagctgagctacaaggatgctcmcactatgcatctagtcctgccttgatgtgagatcagagcag

SEQ ID NO: 484710 - DNA, 186 bp, Homo sapiens
gggtgggggcgtggatatgtggggctagtgggtatacacacctgtacacacacacacacgtgtgtgcactaaaaagccaagtggggtgaggcgtgaagggggtaggctgcagcctggctctctgtgctgccttttttcraaagtcaactcctcagaattctaaattcaaaccttgccttcatgatg

SEQ ID NO: 484711 - DNA, 559 bp, Homo sapiens
gttatttttaaatcgatcttttaaagttggttacatataacaatgcacttaaaagtagaaccggtatcctattttttaatgaatctgtctgttcaggctaatggtcctccattttaccatgtatttgtgccaacaacatttccatgtaaacaatgatgaggcctttctagggcaattattagagaataaaagaataaatatataagcatgaaatatwaaaaaaaattccaaggtgaaagaagtactttcaaacatgttttataaatggcaacatgtttattcaatatgacaaacctatttggatctttaaaaacaaacctgttggaagatcaaccagttgaagttcatttctcactaatcccatattgtttggtgttgaggtagcaaaagaaagaaaactagtcaaacttgtccattcaatacccctataataggaaatgagataaaggttaaactaattctcttttttatttgaaaggttcatttatttgaaaaataagttttccaaagacctaaattttattacacaaattaattaaaaagtaagcatgacctttta

SEQ ID NO: 484712 - DNA, 608 bp, Homo sapiens
tagtttcagatgggttgctgaaggtgtcctcaaggtatcctctcacctggttttgctctgctggtttggttccagtccattgctgggcactgtactgggtgctgyaggggtacagagaggaggtagatgcagtcctgccctcaagaggcttccagtttagagagaaggcaagtgccttcattcacagagtgtttgcactggaagaaattgtagagataatctggtccaatcctttcatattaaaaggtgaaagagaaacccagagttagtttattacaccagatcagagaacttggcgacagagcagacattagatctcacctctccgggccctctgtctagtctgctgtatcacaggtgattatttccaaacaaaaatgttgttttcttaataagtaaaaagaaatgctatagtggaccagtgaaccacttatgggaaatttaaaagcaatattgaaaccccaggaaagcgaaactcagttatcttttaggacttataaaaaaaagtatgataaatatattgaatcatgttgaggcatttgaatagactacaacacaaacttcttgaaacaaataacctaataacttaaacacacgcaccagattca

SEQ ID NO: 484713 - DNA, 518 bp, Homo sapiens
ccaaaggtaggaagaaagcagagggaaatatttcagtcatcatttccaaagtcattatcaaaatctgtgaggaagtttaatcttccaaagagtcaatgtcagacatcaggcctctgttgcctgcttctctcgaggcactagattaggagtcttcaataagagacttaacatgaggtatatggaagatgaggcaccgagataagttcatcattaggtgtgagcactgctcacccttgctggcaagttctccttaagggcctgaagcacaggtgtccaaagaaaagcgttaagtccatcttaatagaatctatgtggtatatgatgtggtcagcccctggtctgtgatcagcaagaacctacagcacagattatgccctgcccacttcaatgaatacctactctcctccattctccatcactttttttgctrtcaagaactccggaccttgcccatggagaagtttagagaggaactcttgtggagagctggtttattttctgccctgtgcgacgagttt

SEQ ID NO: 484714 - DNA, 639 bp, Homo sapiens
ttctagctgaactcttcttacctttgtatctacttgactgggccctcacatttcttctttcaccgcatgcctcatgtttccaaagattttgtaccagttggctgctctatgacctcttctctacaatagatttaaaaggttgtgagtttaatgttagcccagccaacttcaaatttcattgtgagaattcgagtgatgtttcttccaggtctctacamtctgggttggaagctggaaaaatgatagaaatgtaagggcctaaacattcttaaagtgacttccagagtattataaaagactaaagcccacgcttttataagattcctatttcccaatcatatgaaatcaacagaacagcaattagtaagcatgacttcttcacactaaaggacgagctcaacagatgagaaattttaaccaatttctagaatttgcaaagtacatgatagactatatacggatgactcaaagcagagaaagtccctgtctaatggaggatgctgaagacaaagaagctgagttgcctatggcgccaaagggactctggacttggaaatagcaggcttattaaagggaaagagaaaggtggtggcagaaatcagaaatactaactggaaactcgaatgccatttacaaaca

SEQ ID NO: 484715 - DNA, 639 bp, Homo sapiens
ttctagctgaactcttcttacctttgtatctacttgactgggccctcacatttcttctttcaccgcatgcctcatgtttccaaagattttgtaccagttggctgctctatgacctcttctctacaatagatttaaaaggttgtgagtttaatgttagcccagccaacttcaaatttcattgtgagaattcgagtgatgtttcttccaggtctctacaatctgggttggaagctggaaaaatgatagaaatgtaagggcctaaacattcttaaagtgacttccagagtattataaaagactaaagcccacgcttttataagattcctatttcccaatcatatgaaatcaacagaacagcaattagtaagcatgacttcttcacactaaaggacgagctcaacagatgagaaattttaaccaatttctagaatttgcaaagtacatgatagactatatacggatgactcaaagcagagaaagtccctgtctaatggaggatgctgaagacaaagaagctgagttgcctatggcgccaaagggactctggacttggaaatagcargcttattaaagggaaagagaaaggtggtggcagaaatcagaaatactaactggaaactcgaatgccatttacaaaca

SEQ ID NO: 484716 - DNA, 392 bp, Homo sapiens
ctgcctctgaagccttgggttttatctctgatctgcagtgtgctgtcatgttctgcgattgtaataatagcagcagagataagcacttttgaartagattgctgtgaagatgaatagactggatggcttcacagcaccttttccagttgcaactttcatgttaactaatgcaacatttcgtttatttaaaatgcactgagatattcaaaataagaaaaaattgttcttagctggactttgattaaagtaatgggtacatttaatctgtttccactaattagagcaattcaatttaaaaagaaacttggttaccccaaattaaatgactatctctaattgaagtatataggtgcagtttaaattagccctatagcaatgacctcaagtagaac

SEQ ID NO: 484717 - DNA, 466 bp, Homo sapiens
aacaagtttaaaaaattgttttatagtgtgartttggtcaaggggtaaaataattgggtgcatagaatagttctgctatgaaaaaatttaacctcctttgtcctcaataacaaaattgaagccacaagcagagatcctacaaaactgactttgctttagtaacaactagaatatattcatcacattattaaacattctcttcataagaacatagtaccacagaaacactaggggaaaaatgttgaaacagtatttagcagtgggatcatttcattaggagaaaatgtaaatgaagctgaagttttaaggcagatatgctcaagcctgccccatttgaagtggaaagatgaattgggaacttcagtaggtcatccaacattccagcctccagtaaccaaggcagtatctcagagaaacttctatatctctcctgattctgtgataaaaggaccatgttagaccactc

SEQ ID NO: 484718 - DNA, 667 bp, Homo sapiens
aaaaaaggaattggttttctttttttctcttgtgtctaccttccttggagtggattcttcaagtcagcaagatgtagggaaatccagcagctccagccactattcctctttccttctaggtccagcaggaaaaaaaaaaaaaaggaaaaaatatcctctttctcagaagtcccaagaaaaatcacattgcctctctggctctgccagagtcctggcccatctttgaaataaccactgtggtcaggtgaatacagatgctaattgcttagttctgggttgtaagttccttcctagaatyactcatggagtcagtgtctctagaaccatacagattcagaggagtagaagagggatacttttgacagcagataacagacttgcttatttatacggctgtattatctcacataacaagaagtccacaggtaagcgatctgggttggtgtcttaattcgtctgtgttgttataaagaaataactgagactggatcatttataaagagaaaatatttatttggctcatggttcacaggctgtacaagaagcatggtgccagcatctgcatctggtgagagcctcaagctgcttccccttatggtggaagatgaaggggagcctgtcacagagcgagagcaggaagagggagggggagagagagagagggaga

SEQ ID NO: 484719 - DNA, 402 bp, Homo sapiens
gcttatatccatcagaataggctatgtcatactacaacaataaatgactcaaaaattctattgatttataatgataactatttatttctctcatgctaatgtcctcacttattagctctggctctrctccttgttgctttccctgtagaactcagggtaatggagccttctctctctggaattgtgtcactgaagagagaaaagagacatgaaagaccacacataggctcttaaaacttttgcctctcatcaactcacatcacttcatgaacatatcatgggcccaaacaagtagcatacctactcccaagttcaacagcgtgaggatgtggaaacatcactctcagagggacattacaagaagggaaataataatatttaaccttacagtaaataacaaca

SEQ ID NO: 484720 - DNA, 546 bp, Homo sapiens
aaaattgtgctttaggctgtacatgtttaaagtacatggtatgagctatgaaactccttatttttagctccaacaagacaaatttscataaaaagctgtttcaaaattgatgtgcatgtaggctctaatttttgtggaaacaagtaacgtgtttttctacgaacaatcttataaaatatgtatgtttatattttattcttctcaaaatggacacatatttctgcatggtttataggaaaattagtacaatctaggtgacaggtgtgctttcatgtttctttgtttctttaattttattaaaaatacatatgactgctaactttttaaagattttgaaatgtgtattcattcatggagaaaacaaaatattgtattgacaatataaagctgaattttaaaatttttttgagagttatctatggagttgttcattgcccagtattcaaagatgaatgttatttaccataggaaatactttggaattaagaaatcataagtgtctaaagagttatcatcccaagaaatcctaaaattacccctttcttt

SEQ ID NO: 484721 - DNA, 546 bp, Homo sapiens
aaaattgtgctttaggctgtacatgtttaaagtacatggtatgagctatgaaactccttatttttagctccaacaagacaaatttgcataaaaagctgtttcaaaattgatgtgcatgtaggctctaatttttgtggaaacaagtaacgtgtttttctacgaacaatcttataaaatatgtatgtttatattttattcttctcaaaatggacacatatttctgcatggtttataggaaaattagtacaatctaggtgacaggtgtgctttcatgtttctttgtttctttaattttattaaaaatacatatgactgctaactttttaaagattttgaaatgtgtattcattcatggagaaaacaaaatattgyattgacaatataaagctgaattttaaaatttttttgagagttatctatggagttgttcattgcccagtattcaaagatgaatgttatttaccataggaaatactttggaattaagaaatcataagtgtctaaagagttatcatcccaagaaatcctaaaattacccctttcttt

SEQ ID NO: 484722 - DNA, 594 bp, Homo sapiens
agaagtaggagacagaggctgagctctggtctgggccactggatgactactagcagagtgagaggcattttagagtatagcattctaagcacccacatttattgtttcccaactagttcctagaaaaatctcttgtgaatacaagagaaagagaaggactataagcattgttttaatatcaagaaacrgagaaagccagacttaccttaagaatggataggaacatcctttctttccctctactagaaatttcagagaggaagaatgacaaggaccacacagggaaagggagaacaatatcagggttggaacacaagagaacagcagtgtggctcaggtcagcatgactgtcagagtaacacaacagataaccccagtgatcagagatataaatgcagaacatcagttatagaaaagcaagttttaaagcctacaaaagaaaatggacaaaacattcaagattccatagaaggaataattattataataatgattgctgatacttcaaatttgccaaaaactgtcttaaatattttgcatatattatttcattaatatccaagccattcctatgggatagggacaattattatg

SEQ ID NO: 484723 - DNA, 525 bp, Homo sapiens
aaaataaattctaccaataacctaaatgagcacagtaacggattttttccycagacaagcctccagatgaaaacacagcccggtgatcccttgagtacaatcttgtgaatacagattatgaagccaaagaattattcacatatataaaagttaaaccatatatttggattgtagcttcctggaagataatgtaaaaagaaaaaaatgtttatttacctcattcttattgtataaacacactatttcttattcacataaataacaacagcaaaatgtgatacgaagtacctcagtattcaatgctgtgcaagttcctgacccttatgttcagaactcttgtaaagtctgagctaaagtgcacagtctaaatgctccaaaaagagacacctaattccatgaatctgaagtcttgagaatagcacattaatgcatgcctgagaaagaatgaggaggagagggacaaagaaagagaagcagagcagaagaaattaccatgtcccaagaaaacccttcactcacttgacc

SEQ ID NO: 484724 - DNA, 614 bp, Homo sapiens
aaaaactacacattcagtatctgtaatagttatcaggatttcatcaatttgatacaatttctttgcattttaacactcatgtttctctttgtctctcgtgttgcatgctgtataatttttttattcacatatttcttccagttctttacttctctttcaattgtatttcttctttaaaacaatccactgtgctttgtaattttaacaaatattttaacacacatttagaataatgcacaactcrtaagcatacaactcccttaattttaaaagcatgaacacaccaaatgcagccaaaacccacaccaaccacaacaagaaataaaacatttacagactcttaagaagctttccttcatgcttcttttcaatcactatcacaatcattcagaaaggcaatcattagccttacttctatcactgtggatagtttcacctatttttaaactttatataaatgtggcttaacttcttcactgctagctaacaaaaaagttgcataaattttattggtcttttcaaagaaccaacttttgattgctttgatttccttttatatccctctcctgtttcgttgattttcagctttgatattcatatttttattcttcttt

SEQ ID NO: 484725 - DNA, 514 bp, Homo sapiens
gcaaatctcctctacgacatcttttactattttaacttggctacacatttatttgtttatgtttattgtctatcacctctttcctaaatacaaataccatgagactaggtctttatctcttttgttgattctggtatccccggtgcctagaactatgcctgtcttatgttaaagtccccaaaaatatttatatgaaataataaaaagaatgctcccttcaatgtggaatttgttaacccatttatgtctgaggttgcaatttattgagtttttgcwatcagaccttgctgatgaccttgagctatagaatataaataactccaacatgcttagtgttccagtaatggaatactaggcataaatggctcatgtatctgctttcccttcatctattctattcagaattttttttacctgaaaaccccaattctaataccaccacctctcctaggaatccttacttcaccctaagaaaacattacttatatcattgttcaatacatgttttatttta

SEQ ID NO: 484726 - DNA, 487 bp, Homo sapiens
aataggttttgaggaacctgaagccttaaagtaagaatgttgaagaagaggaccagttctccaaggcagaaaacgctattacaaaaagtagtatgrttcttctaggcattgtgtccctgagatcaggggctaaaccaattttttttagacactccctatctaacatctataaatctaggaactggaattggaagtggaagagtctatgtataggaaacatgttattgtattattttttcacatgatgccatcttctatctatgtgccaagtggaaaatgtcactggaagtgtttcttggccaaatataactctgttctgggaaactacttcctttatcaaccgcaggtatctagacacatcttagaatatactacagctctccgaggagtgcccaccatgctcctctgagcccaaaaatcaactctcaggaaaaaattgcaaattaatcacaaaggcatctagactagcatgcatgttgcttctttt

SEQ ID NO: 484727 - DNA, 233 bp, Homo sapiens
gaccacaactactaaactattagtcaatcaaatgtataaatgacaaagcctatgatctttcccctgtagtacatggatctggaataacactgcraatttgccttttctataaaaccaagcgctgagaactaaatataaacaaaatacacaattctcacctgagccaaataacaacagagaatttgtatgtatcctaattatgctttcattaatttatacgtgttttatttttc

SEQ ID NO: 484728 - DNA, 595 bp, Homo sapiens
cccaagagtgtccaggttctggtagtgcccactggcagcgtttggcaggtgtgacagcagaggagtcggaaaaatagcaaatctggcctcccctcccgcargaggaacacggcgggactcagggtgctggctctgtagaagaacatgccctctgcaggccatcccacctctggtcctctttttatcctgggcaaagaagtgtcttaatcccagcctgtctgagcaccgccctttcttctacactcacactctccttcacagccccagggcacgtcattttgtcctacacaatgccattattactccctttttgtttgtcttcttaggcgagccacttttaaaaaatattccaatgttcctattccaaacctcttctcccctttcaagctcagataaaggcaccgatataagcaaagcttttttatgcctccttgactaggtacccagtactaagttcccagaactgcagtcccatgaacagtagcattcagaggcattgaggagcagagggaaagtgacttgtcactgatcccccattgaaagggctggcatcctggtcaggctgacaggctctcaacccttcttcctctctgtg

SEQ ID NO: 484729 - DNA, 454 bp, Homo sapiens
atgtgaggaaagccatccaggattctccatccccaggcaacccaccccagccaataccatatggatcagagataagtcctctctgcccaamcctgcccagaatcatgaacaaatagatactatttctttaaaccactatattttaggagacattatggaataataaatcctgaaacacttacttaaactttagtagagatggaaaagtgtagaacacagttagtaaactcattccattcttctttagttacggccttcgtgttttttgttttttgtttttattttccagtaacttttgactttaaaatagtataattgaatagattcaatagctttcaaagtaccaatgagatcatgattataagcttaataccactacattttgcataaaaggagacaaaacttattttgcccttgacttacatatgatatttaagtgtaggccaatggctat

SEQ ID NO: 484730 - DNA, 454 bp, Homo sapiens
atgtgaggaaagccatccaggattctccatccccaggcaacccaccccagccaataccatatggatcagagataagtcctctctgcccaaccctgcccagaatcatgaacaaatagatactatttctttaaaccactatattttaggagacattatggaataataaatcctgaaacacttacttaaactttagtagagatggaaaagtgtagaacacagttagtaaactcattccattcttctttagttayggccttcgtgttttttgttttttgtttttattttccagtaacttttgactttaaaatagtataattgaatagattcaatagctttcaaagtaccaatgagatcatgattataagcttaataccactacattttgcataaaaggagacaaaacttattttgcccttgacttacatatgatatttaagtgtaggccaatggctat

SEQ ID NO: 484731 - DNA, 527 bp, Homo sapiens
cacactgaggaagggattgagaagaggcagaaaaggaggaaaagcccttccattgaatgttactgagggtcccactgtgaccagatggggctcattcacacccaggagcttccagacatgtgggaggcctctcaaaatagcctatccaggccaaggcgggcggatcacttgaggtcaagggttcgagaccagcctggccaacatggtgaaactctgtctctaaaaaaaaaatacaaaaaattacccaggcctggtgatggatgcctgtaatcccagctactggggaggctgaggcaggagaattgcttgaacctgggaggtggaggttgcagtgagccaagatcgtgccattgcactccagcctggatgacggagygagatatcttaaaaaaaaaaaaaaaaagcctatccaagaactgatggggagaagcttgaagccactgccgcctgtctccttagatggagagctgcccctgtaggtattgatgaccccccaattctggcttgcgcctgtgtgcttgcaggga

SEQ ID NO: 484732 - DNA, 527 bp, Homo sapiens
acctgaagatcttcaccgcttctctatgaggatttttctctctctggttttctgccctgccaactctagcctttctaaaatcccgastctttctcctcaacttagggattgtggtggactctttcgaggtcctgcttttctgtgccatggcaaggaagctcactcagtgtgggtctggtcctcagcaggatgctctgggctggtgatgtacatttgcaggttaccaatatgtacagcgaggggtgccttgggagtaaattaaagtccctcaggaaaggggtacagagtgagaagagaaaatcctaagatagagccctaaggaacatggaaatatatgtaggaagtgaagtgataagtctattataaggattttagagaaatgcccctaagccatttgtagtctagagtttctgatatgattccagagtgtagtcattatccagaaatttgataagtcaccagatgagattactctgggtctactgggtgacgtgcttcctttgggaacatcactaggagctcaagat

SEQ ID NO: 484733 - DNA, 527 bp, Homo sapiens
acctgaagatcttcaccgcttctctatgaggatttttctctctctggttttctgccctgccaactctagcctttctaaaatcccgagtctttctcctcaacttagggattgtggtggastctttcgaggtcctgcttttctgtgccatggcaaggaagctcactcagtgtgggtctggtcctcagcaggatgctctgggctggtgatgtacatttgcaggttaccaatatgtacagcgaggggtgccttgggagtaaattaaagtccctcaggaaaggggtacagagtgagaagagaaaatcctaagatagagccctaaggaacatggaaatatatgtaggaagtgaagtgataagtctattataaggattttagagaaatgcccctaagccatttgtagtctagagtttctgatatgattccagagtgtagtcattatccagaaatttgataagtcaccagatgagattactctgggtctactgggtgacgtgcttcctttgggaacatcactaggagctcaagat

SEQ ID NO: 484734 - DNA, 527 bp, Homo sapiens
acctgaagatcttcaccgcttctctatgaggatttttctctctctggttttctgccctgccaactctagcctttctaaaatcccgagtctttctcctcaacttagggattgtggtggactctttygaggtcctgcttttctgtgccatggcaaggaagctcactcagtgtgggtctggtcctcagcaggatgctctgggctggtgatgtacatttgcaggttaccaatatgtacagcgaggggtgccttgggagtaaattaaagtccctcaggaaaggggtacagagtgagaagagaaaatcctaagatagagccctaaggaacatggaaatatatgtaggaagtgaagtgataagtctattataaggattttagagaaatgcccctaagccatttgtagtctagagtttctgatatgattccagagtgtagtcattatccagaaatttgataagtcaccagatgagattactctgggtctactgggtgacgtgcttcctttgggaacatcactaggagctcaagat

SEQ ID NO: 484735 - DNA, 527 bp, Homo sapiens
acctgaagatcttcaccgcttctctatgaggatttttctctctctggttttctgccctgccaactctagcctttctaaaatcccgagtctttctcctcaacttagggattgtggtggactctttcgaggtcctgcttttctgtgccatggcaaggaagctcactcagtgtgggtctggtcctcagcaggatgctctgggctggtgatrtacatttgcaggttaccaatatgtacagcgaggggtgccttgggagtaaattaaagtccctcaggaaaggggtacagagtgagaagagaaaatcctaagatagagccctaaggaacatggaaatatatgtaggaagtgaagtgataagtctattataaggattttagagaaatgcccctaagccatttgtagtctagagtttctgatatgattccagagtgtagtcattatccagaaatttgataagtcaccagatgagattactctgggtctactgggtgacgtgcttcctttgggaacatcactaggagctcaagat

SEQ ID NO: 484736 - DNA, 602 bp, Homo sapiens
ttgcccagaggtaccagctaactgttagactcatgaaaaataataagtggttctgattttagatcacttaattttggagtggttcattacacagcaaaaggtaatgactcaagggagtagcatattcaaaatcctgcccatcttaaaataattgtatctgcacataggctcccggggcccttgacaaagtacttgcctttattttccttgacagaccaaatagtggatgtggaggrgccccaggcaagacacaggagcactgggatacattgtgatgagcataaaagaaaggttcagaaattttttttcataaagcctgatgaagaccatgacgaggatgatcccagccactgtttgcgtggtcaccatgtagcaaatatgttgcgtatattatctaatttaatccttgaaccacagcatgggataggtgttcttatcactcttttacagatgcaaataatgaaatttggagagagtaagtaattggctgaataccgcatacatagtttcaagtcaaaaaatcttaattctaacccagttctgtgtgattccaaagcccacactgttttctgttattgccacactgtggagtcattatttgg

SEQ ID NO: 484737 - DNA, 602 bp, Homo sapiens
ttgcccagaggtaccagctaactgttagactcatgaaaaataataagtggttctgattttagatcacttaattttggagtggttcattacacagcaaaaggtaatgactcaagggagtagcatattcaaaatcctgcccatcttaaaataattgtatctgcacataggctcccggggcccttgacaaagtacttgcctttattttccttgacagaccaaatagtggatgtggaggggccccaggcaagacacaggagcactgggatacatygtgatgagcataaaagaaaggttcagaaattttttttcataaagcctgatgaagaccatgacgaggatgatcccagccactgtttgcgtggtcaccatgtagcaaatatgttgcgtatattatctaatttaatccttgaaccacagcatgggataggtgttcttatcactcttttacagatgcaaataatgaaatttggagagagtaagtaattggctgaataccgcatacatagtttcaagtcaaaaaatcttaattctaacccagttctgtgtgattccaaagcccacactgttttctgttattgccacactgtggagtcattatttgg

SEQ ID NO: 484738 - DNA, 509 bp, Homo sapiens
ttaaagaactgaaggcatcatccatcccaaagtgtcacacccaagcagcccagaatgtagcaatccatatgactctgggtgagcccaaggaggcctgcaaatcatagmagtgatgggcaaagcaaggctctggcagccagaaattgccgagctcatcacgtaatttgcaaccccagagtataacagcacaccaataaaatacgcagcacacaaaatggtcctttagaaatatgtcactagtaacacacatgccatctcatcaaaagccaaacttatgctgagaaaaattccaccttcctgtttttaattgctctacattttaccccaattacaaacatcaaactgtgttcattatggaatgtatggaaaatatgtaagtatttaaagcagaaataacaacaacaatattaattctgctttctacaaaacaccatcagtttttagtgtatttccttagtcttttctatttagacatgctaacagatgggaagtatagtcatatttttata

SEQ ID NO: 484739 - DNA, 632 bp, Homo sapiens
gtaaacattcacccctagatgctgccgtggggtcggagccccacagcctgcctgtttgcatgctccctagaagtttgaatggtggggcactgaagaagcgagccacacccccataacatgacctgcgagggggacaagggaacttttcccgtttcaatactacattttaaacactactaagaagagatcctatctgttcatctactactccacgtctagtacctagyacagtactttgcacatggtgagcataagataaacatttgtttaatggataaataaatgaatgactggagtggagtcattttattttgatatcatgaaattccctaaagtctccatggtaagcattgggctgccagaggtcattgttcctctcagggtgtcatgataacagaggaacagctctggaaatgttgttccccaggactcaaataatatttttttaaatgtatttttctgtcacctcctagtttattttaatctatatatcaagaagtctagaatttttggaaagtctttcctactatagatttggtaacaaattctgttgtttctaccccttaactacttcttaagtatgtttcttttttaccatttttattcctgatctgtaacatgtgatcaataaa

SEQ ID NO: 484740 - DNA, 515 bp, Homo sapiens
aagcagataccatgttttaactctracatttatgttccccagacttcctgagcttctgtttccttacctgagaaaaagaatagttagttttatcttctagaattcaataaaggattaaatgagataaaatgtgaagcaacttgtgcagatcttggcactcaatagattgtacttaatacaagttacttttcccctcttttctcctgagaggtatctagatataacttatcatcagaagatcagattcttatccatcctatagataagatactcaaagtatagattatttttatgaatataggtcacttgatgattgaaaatgatcaaatgtacagatgataaactagaattgatagagaacacagtgttcataaggcataaatatatcattgaacaagtactcattaatctcttaataatgtcagtcacaaaaccagaggtgagtaagattaaggtgtcaaccttatgatatggctcttttaacttctaagttcttggtttttcgagtgacacaa

SEQ ID NO: 484741 - DNA, 515 bp, Homo sapiens
aagcagataccatgttttaactctgacatttatgttccccagacttcctgagcttctgtttccttacctgagaaaaagaatagttagttttatcttctagaattcaataaaggattaaatgagataaaatgtgaagcaacttgtgcagatcttggcactcaatagattgtacttaatacaagttacttttcccctcttttctyctgagaggtatctagatataacttatcatcagaagatcagattcttatccatcctatagataagatactcaaagtatagattatttttatgaatataggtcacttgatgattgaaaatgatcaaatgtacagatgataaactagaattgatagagaacacagtgttcataaggcataaatatatcattgaacaagtactcattaatctcttaataatgtcagtcacaaaaccagaggtgagtaagattaaggtgtcaaccttatgatatggctcttttaacttctaagttcttggtttttcgagtgacacaa

SEQ ID NO: 484742 - DNA, 515 bp, Homo sapiens
aagcagataccatgttttaactctgacatttatgttccccagacttcctgagcttctgtttccttacctgagaaaaagaatagttagttttatcttctagaattcaataaaggattaaatgagataaaatgtgaagcaacttgtgcagatcttggcactcaatagattgtacttaatacaagttacttttcccctcttttctcctgagaggtatctagatataacttatcatcagaagatcagattyttatccatcctatagataagatactcaaagtatagattatttttatgaatataggtcacttgatgattgaaaatgatcaaatgtacagatgataaactagaattgatagagaacacagtgttcataaggcataaatatatcattgaacaagtactcattaatctcttaataatgtcagtcacaaaaccagaggtgagtaagattaaggtgtcaaccttatgatatggctcttttaacttctaagttcttggtttttcgagtgacacaa

SEQ ID NO: 484743 - DNA, 515 bp, Homo sapiens
aagcagataccatgttttaactctgacatttatgttccccagacttcctgagcttctgtttccttacctgagaaaaagaatagttagttttatcttctagaattcaataaaggattaaatgagataaaatgtgaagcaacttgtgcagatcttggcactcaatagattgtacttaatacaagttacttttcccctcttttctcctgagaggtatctagatataacttatcatcagaagatcagattcttatccatcctatagataagatactcaaagtatagattatttttatgaatataggtcacttgatgattgaaaatgatcaaatgtacagatgataaactagaattgatagagaacacagtgttcataaggcataaatatatcattgaacaagtactcattaatctcttaataatgtcagtcacaaaacmagaggtgagtaagattaaggtgtcaaccttatgatatggctcttttaacttctaagttcttggtttttcgagtgacacaa

SEQ ID NO: 484744 - DNA, 624 bp, Homo sapiens
tgtgtctgagaaaaacaaattagtaaattctatagaacatatgctataaaaacaattactaaagttttctaagctgattatttcaggctaatttctcttctaaaaattagtatatcctagggagcctactttctaaattaatgggagcaaatgcttagaaaacacttttatacttgataactcagtttggaaaaaaagaatatgggaattagctctatgatgattattacaatttacattatcttgaacagagaagaaacagaccattttgataagttcaagaacattaacttttttttctctttacaagtcctgcataaaaactcctcaatggatgttgctttaaaaatatataaaaggcaggtgtggtggcatatatctgtagtcccagatacttgggaggctgaggtgggagaattccttgagctcaggagttcaagtctatcctaagcaaaatagtaaaaccccatctctaaaaatacatatatattttttaacatacagatatgctacaaatttaagacrgtttattaatttatatgtacaaaagcaacctacatatttaagataatataatcagtaattataatataatataatcagtctgatatgaagttttgtctt

SEQ ID NO: 484745 - DNA, 662 bp, Homo sapiens
cctgtttaggtgcagagagaaacatgcttgtaagggacttgccttccattaatggagactgcttctttatttaggatttaaacaagctatgtcttctcacttagttaaatgaaacatttcgtgttttgtgggcagtttagctagaatctaattgttttgttttctcaaggaaaagcactcttcttccttcatgagggattagtttgatctggtactattagacaaagaaattacagagacaacatttttctgagttaatagggtttaagtcatttttttattttgatagcctaatataaactctcatgctactacaaacattgctcccaatttaaaaatgaagagattcaccactcatctcttttcaagacagcttgaaaacaccctgctacctttttccaattagctttctagctttactgagtctgatcaagagttttgagctgtgtctctacgtttatttatgtttcagagaaatgttctctggtgctgtctttagaagcagatmaagatagagcttactctattgcaaaaaaaagtcactgaaaatttcaaaaacttttaggcactgttttaggtactgggcataccacagtgaataaaacagactattgtttgcataatatttgcataatatttctgcatattatgggaaggacaca

SEQ ID NO: 484746 - DNA, 662 bp, Homo sapiens
cctgtttaggtgcagagagaaacatgcttgtaagggacttgccttccattaatggagactgcttctttatttaggatttaaacaagctatgtcttctcacttagttaaatgaaacatttcgtgttttgtgggcagtttagctagaatctaattgttttgttttctcaaggaaaagcactcttcttccttcatgagggattagtttgatctggtactattagacaaagaaattacagagacaacatttttctgagttaatagggtttaagtcatttttttattttgatagcctaatataaactctcatgctactacaaacattgctcccaatttaaaaatgaagagattcaccactcatctcttttcaagacagcttgaaaacaccctgctacctttttccaattagctttctagctttactgagtctgatcaagagttttgagctgtgtctctacgtttatttatgtttcagagaaatgttctctggtgctgtctttagaagcagatcaagatagagcttactctattgcaaaaaaaagtcactgaaaatttcaaaaacttttaggcactgttttaggtactgggcataccacartgaataaaacagactattgtttgcataatatttgcataatatttctgcatattatgggaaggacaca

SEQ ID NO: 484747 - DNA, 562 bp, Homo sapiens
agcccttctttctacaactcagtgtctgagggattttgtctgcgkcttgtcctgctacaccaccaggtgaagaaggaagtgtttgcttcttcttccaccatgattgtaagtgtgctgaggcctcccaaggcatgtggaatggtgagtcaattaaacctctttcctttataaattactcagtcttgtttatgttcttatagcagcatgaaaatgaactaatacagtaaataaataaatatatacatgcacacacacaaacaccatgaccaaatgatcaagtcaagtctatttcagggataagcgcaaggtaatttcaatattcacaaatgtaaatcaatattcaccacaacaggttaaagaagaaaaatcacataattatgccaattgatgcagaaaaagcatttgaaaaagtcagcacccatccatgataaatagttctcagaaaaacaggaatagagagaaacttcctcaacatgataaaggcattaaaaaatctatatctaatttagcactttgttgtgaacagatgagaaaggaaaaaataaaactgttcttacttgga

SEQ ID NO: 484748 - DNA, 562 bp, Homo sapiens
agcccttctttctacaactcagtgtctgagggattttgtctgcgtcttgtcctgctacaccaccaggtgaagaaggaagtgtttgcytcttcttccaccatgattgtaagtgtgctgaggcctcccaaggcatgtggaatggtgagtcaattaaacctctttcctttataaattactcagtcttgtttatgttcttatagcagcatgaaaatgaactaatacagtaaataaataaatatatacatgcacacacacaaacaccatgaccaaatgatcaagtcaagtctatttcagggataagcgcaaggtaatttcaatattcacaaatgtaaatcaatattcaccacaacaggttaaagaagaaaaatcacataattatgccaattgatgcagaaaaagcatttgaaaaagtcagcacccatccatgataaatagttctcagaaaaacaggaatagagagaaacttcctcaacatgataaaggcattaaaaaatctatatctaatttagcactttgttgtgaacagatgagaaaggaaaaaataaaactgttcttacttgga

SEQ ID NO: 484749 - DNA, 508 bp, Homo sapiens
tattgcaataaaaagtcactatatttcctcttattacttttttacctaactcatttttagatgaatatacaggaatttgtattaaaacaagaccgtactattgaaatagtaagaaaataaagtgaaaaacttggagaatgacaaccaattctgaaataaaatactgtaggtattatgatgaaaaatttgccctgaagttattttgctaaggcacaaataaactacgatgagaaaatatcaagttcttgaaactttgtttgcttgactgagaattaaatctctatatttgttccagggtaaaaattaagtctctggactctstctatattaaaatatggattgacattaattatttaataattcaaagtttcagaaatgctaaacatattgtacagtctcatttctaacatcaaactaggacataccgacagtggtttgttcttatagtcgtgtttccaatagtactccttttcttttttaaataataagacaaaggaaacttatttcc

SEQ ID NO: 484750 - DNA, 508 bp, Homo sapiens
tattgcaataaaaagtcactatatttcctcttattacttttttacctaactcatttttagatgaatatacaggaatttgtattaaaacaagaccgtactattgaaatagtaagaaaataaagtgaaaaacttggagaatgacaaccaattctgaaataaaatactgtaggtattatgatgaaaaatttgccctgaagttattttgctaaggcacaaataaactacgatgagaaaatatcaagttcttgaaactttgtttgcttgactgagaattaaatctctatatttgttccagggtaaaaattaagtctctggactctgtctatattaaaatatggattgacattaattatttaataattcaaagtttcagaaatgctaaacatattgtacagtctcatttctaacatcaaactaggacataccgacagtggtttgttcttatagtcgtgtttccaatagtactycttttcttttttaaataataagacaaaggaaacttatttcc

SEQ ID NO: 484751 - DNA, 575 bp, Homo sapiens
tttctaagattatgctttagatggtttggaaaatgtccaggctttggtgttaattttagagagatatttagggcattctaatatayagccagtgatgagaaccactgtcctaaatcaataattctcaagcttaatgtgcatatgaatcccaggggaaagttattaagatgcaggttctaagtcaggaaatgttgttgaagctgactgaaaactaaaattccctgggccataagcaaagtcacctgtaagttaccttgtataacaagcttctttgaggaatgtcattgaaagaaggtcttttgttactaagaaaaagacttaggataaatagcaaaaaggttttcattcaattacagagaaagtatgtatcatttaaaagtatccctcaagtaacacttcaagtagagaaccacgaaatttatgtgcagacaggaaagagctgggagaggaaaaattgagagtcttcaagtaagaaatgggtcaggagaagtgatactgtgagcacaaaaggaagtgttaacatcgaacagaaagaaagtcactgttcccctgaaattggaagaataacaggtgcc

SEQ ID NO: 484752 - DNA, 575 bp, Homo sapiens
tttctaagattatgctttagatggtttggaaaatgtccaggctttggtgttaattttagagagatatttagggcattctaatatacagccagtgatgagaaccactgtcctaaatcaataattctcaagcttaatgtgcatatgaatcccaggggaaagttattaagatgcaggttctaagtcaggaaatgttgttgaagctgactsaaaactaaaattccctgggccataagcaaagtcacctgtaagttaccttgtataacaagcttctttgaggaatgtcattgaaagaaggtcttttgttactaagaaaaagacttaggataaatagcaaaaaggttttcattcaattacagagaaagtatgtatcatttaaaagtatccctcaagtaacacttcaagtagagaaccacgaaatttatgtgcagacaggaaagagctgggagaggaaaaattgagagtcttcaagtaagaaatgggtcaggagaagtgatactgtgagcacaaaaggaagtgttaacatcgaacagaaagaaagtcactgttcccctgaaattggaagaataacaggtgcc

SEQ ID NO: 484753 - DNA, 575 bp, Homo sapiens
tttctaagattatgctttagatggtttggaaaatgtccaggctttggtgttaattttagagagatatttagggcattctaatatacagccagtgatgagaaccactgtcctaaatcaataattctcaagcttaatgtgcatatgaatcccaggggaaagttattaagatgcaggttctaagtcaggaaatgttgttgaagctgactgaaaactaaaattccctgggccataagcaaagtcacctgtaagttaccttgtataacaagcttctttgaggaatgtcattgaaagaaggtcttttgttactaagaaaamgacttaggataaatagcaaaaaggttttcattcaattacagagaaagtatgtatcatttaaaagtatccctcaagtaacacttcaagtagagaaccacgaaatttatgtgcagacaggaaagagctgggagaggaaaaattgagagtcttcaagtaagaaatgggtcaggagaagtgatactgtgagcacaaaaggaagtgttaacatcgaacagaaagaaagtcactgttcccctgaaattggaagaataacaggtgcc

SEQ ID NO: 484754 - DNA, 343 bp, Homo sapiens
tttctgaaatccctagactcctctatttcttagatctgtcttataagacagctcatgaaacagacaatggagagaatttattgaatgttcactgcgtgaacaggaaaggccaaggtaagatgcagaaatacttatggtccagttgggagacacaatataaatgcatgaaaatgacaagcagagatgaagcaaacagtgccagtaagtagctccagatggataattgagggatatccagtgggatcaggttcattaggggagatattctggaagagaaaaattgagagtrgaggacaaaaggaaggactggagcaagactactgggaacaggagagaatgctct

SEQ ID NO: 484755 - DNA, 517 bp, Homo sapiens
ctgaacaaaatcttcaaactttgcaccaccatcatgggacagcctgacatatgtgcaccttgagataaggtagtaaaaagaacacagtctaattctgtaatgttccaggcaaaartctttaacctgagtcttatgaggaatacatgaaactaatccaaagtgtgtgatatattctttatgataactacctggaatcttcaaaaactgttctaaaatcagagaaggtaaaggcaatgttatagatcagaaatcagtaaactttttctgtgaagggcagatagcaaatgtgtcatgctttgtgggtcacatagaagtctctgttgtatattcttctttcttttttcttcttctttgttttttgtccgtgtagtttggctttacaactcttaagaaatgtaaagatccttcttagcttgagatacaagaacagaccatgcaggattggtctgtgagccacagtttacttactaactgttgtcctagagtaaaagaaaatgacaagacataacaaccaaat

SEQ ID NO: 484756 - DNA, 517 bp, Homo sapiens
ctgaacaaaatcttcaaactttgcaccaccatcatgggacagcctgacatatgtgcaccttgagataaggtagtaaaaagaacacagtctaattctgtaatgttccaggcaaaagtctttaacctgagtcttatgaggaatacatgaaactaatccaaagtgtgtgatatattctttatgataactacctggaatcttcaaaaactgttctaaaatcagagaaggtaaaggcaatgttatagatcagaartcagtaaactttttctgtgaagggcagatagcaaatgtgtcatgctttgtgggtcacatagaagtctctgttgtatattcttctttcttttttcttcttctttgttttttgtccgtgtagtttggctttacaactcttaagaaatgtaaagatccttcttagcttgagatacaagaacagaccatgcaggattggtctgtgagccacagtttacttactaactgttgtcctagagtaaaagaaaatgacaagacataacaaccaaat

SEQ ID NO: 484757 - DNA, 517 bp, Homo sapiens
ctgaacaaaatcttcaaactttgcaccaccatcatgggacagcctgacatatgtgcaccttgagataaggtagtaaaaagaacacagtctaattctgtaatgttccaggcaaaagtctttaacctgagtcttatgaggaatacatgaaactaatccaaagtgtgtgatatattctttatgataactacctggaatcttcaaaaactgttctaaaatcagagaaggtaaaggcaatgttatagatcagaaatcagtaaactttttctgtgaagggcagatagcaaatgtgtcatgctttgtgggtcacatagaagtctctgttgtatattcttctttcttttttcttcttctttgytttttgtccgtgtagtttggctttacaactcttaagaaatgtaaagatccttcttagcttgagatacaagaacagaccatgcaggattggtctgtgagccacagtttacttactaactgttgtcctagagtaaaagaaaatgacaagacataacaaccaaat

SEQ ID NO: 484758 - DNA, 517 bp, Homo sapiens
ctgaacaaaatcttcaaactttgcaccaccatcatgggacagcctgacatatgtgcaccttgagataaggtagtaaaaagaacacagtctaattctgtaatgttccaggcaaaagtctttaacctgagtcttatgaggaatacatgaaactaatccaaagtgtgtgatatattctttatgataactacctggaatcttcaaaaactgttctaaaatcagagaaggtaaaggcaatgttatagatcagaaatcagtaaactttttctgtgaagggcagatagcaaatgtgtcatgctttgtgggtcacatagaagtctctgttgtatattcttctttcttttttcttcttctttgttttttgtccgtgtagtttggctttacaactcttaagaaatgtaaagatccttcttagcttgagatacaagaacagaccatgcaggattggtctgtgagycacagtttacttactaactgttgtcctagagtaaaagaaaatgacaagacataacaaccaaat

SEQ ID NO: 484759 - DNA, 402 bp, Homo sapiens
tttaccaccctcttccagtaggtcaatgttggaggtggatagggaagaggaaaagttcagatccttgcacaagacagatatgtaggtacctcagtcagtctggcaacatgggcttccagaaagaccttcaaagtggccgaaatgattgcctccctgttctgtgtccaatttgctgaattgtgtgcatccagagaatacatatgtggacaaaagaaattgacttcctgattcaaaggaagatgaacaagacagatgctaaggaatgttctccccattttttctgtaattgaacattttagtaatctatccagaagtatttttaaaagtcttcagaatcaaaggccccayaaaaatatttaaaggagttccaagtaattatatcagtaatcttcctgtccacac

SEQ ID NO: 484760 - DNA, 634 bp, Homo sapiens
tggactttcttttccattgatgcttttgtgtattcctggcctattactgaagtgatatgaactgcagctttaccgtatgttttattatctggtacaactccttattcttcctctttataatccagctagttttatatatttacttttcaggctactgtagtgacagttttattttgtagattttagagtgttcttttttttccccaaaagaaatgatgatttaacattgagctcttatttctaagaacaagataaattgcaatttattgaaggcatacagtatgtctttccatagattctgaaaaatgttcaccttgtaatgtcctacacattccatataaagtttgtttttataaagatctttctgtttgggactgtgattgagatcttttcttccattatatttttaaagtggttattatttatatatgagagtttatatttattaactatataaatatcataatgtcttcatttgtaacaaatttctagttcattctattttttcacatatgcaattatattatctgtaaacaacactttatyttttatttttaaatatttataatctgtttcagattagtataattgttggtagtactgctcatctgggtccaaaatcagatattgccaa

SEQ ID NO: 484761 - DNA, 627 bp, Homo sapiens
ctcctctcaaaaacctgtggtcttgtccaatcatgaatcctttgctgggcctgcaatagggtggctgcctgggattctattaggaaggagaaagagggagtggaggtagggaggttgccaagtgtcctccccaggcctcaagctcacctgttactcataggattcatggttcagtctagagtccctctgtgggactgaaacatcttagaagactcacagaagkgctctcaggaggacgtttgcttagggggtgtatgtgtgtgtgtatatatgtgcgtgtgtatgtgtgtgtgttttccattgagctgactggcatagggaatattcatgcctctcagtcagaaagaaagaatagacagagatggttcagttctggttctgtgcctaccaggagagaataagcttcctcctctcaacttttcccaggacactcaccctcaaacatatccagctcttcctgcaaagctcctttcctgctattacctcattggacccttgcctcctgttgggttactcatatttttttaaattattaacttataagaactctttacatattatagatatcattcctcttttacttatgttgtagacatcttcttccattggtcacttttcatttacctt

SEQ ID NO: 484762 - DNA, 594 bp, Homo sapiens
tctgggtatgtatatgttccttttcagaagacattkctacatttgtgtaactactgtccaactgctgagttacacagacaattatattacattgtatatagttacacaactattatactattacatctaattttactgtgtagcagctttttcttaaatacttatataaaagtagtaaatatgtaacagaatatttaaaaaacaatgagaaatcactcatcacattactaccctaacataagcacttcatctggccaactgccttcttccctatgtgaatataatttaacttaattggattcttggtacatgcaattttataagtgatttcttctctaataagcattgctgtcatgatactataatgtcaacaatattatttgcaaaagcataatcagttttactaagactatattgtgtagggcatttataaacacacttatttcactttaccagtgtgttgttagacaagaataacttcccgtgtggaggatacctaccaggtgtaactcttcagcagtcagcctgcttaccaactgctgaaataacagcctttgagttgctgtgctctcctctggacttcctagcatccag

SEQ ID NO: 484763 - DNA, 615 bp, Homo sapiens
aaagtgttcactgaggcatcagagatttaggagtaatccatttattttcatagaattcaaattcttataaaaactgtatttgctaaaaaataaaaagaaattaggcttagttctgtgagcctggaaattttcttagaaacaaaatccacagttcttcatctgtaaaataaaaatagtacctacctcctgtggctgtagaaagaatacttttataggatttttattacctgacatatagaaagatctcagtaaatactagctatcattctgatgtaccacaataaccaaagtactttgagacctacaaactgaccttactgaatcaaagttcatttatacatcatcagtaagagtatctctgaagaacacacaggatcatggggtcagcagtcttgcattaaaataaaatcaagatcctacagaaaactgggtagggtttagatatcaaaaccctctacatgttcctttccagtaacttgtgaattactgcagacatggaagasatgttttgatctagaattccataatcagacaaacctagatcttttctgtatttcacatataaccttcaagctcataatataaatggttaacaaaatttttcccctttgatat

SEQ ID NO: 484764 - DNA, 614 bp, Homo sapiens
tgcttgggtggcttctcatgtgggctttgcctactctacagcaatatttttaaaagtcatatgctgcttaatatatacccataatgaaatgctggctaaaaatagaaaatataaaacatttgctggaataaagtaaatgaggaccataaaatgagaattctacaattttgaaccaagacgattttcattcactagacctacaaattgcattcagcccatcaaactgtttatatggctcatcacggtgtctcttgtatatctgaaaccaaagtcatagagaaaatatagtgaccattagatctgatttggcctctcattattagaaatgaagaccagccatacccacatcatgctatttgcagaatgtcacttgcatacagcagtctgaacccttctgttttatctcatcatttagacacaaaaaatgaaagtaataaaaataaaccagttttttwaaaaaaatgcaaaaggcatgaattccaaacattcatttaggaaagcagtttttgtctatttttgatgctacaatgagtcattaagtttcatacattttaatatacatttgtcccaataccagatatatgttattttaaaagatatttgttaacaaagca

SEQ ID NO: 484765 - DNA, 595 bp, Homo sapiens
ttgcacgtgggaggtatgtgattcatgggaggcagagggcagacattgtggcagctagtcttccaagatagcacccccgtgttcacacccctagtatgcccaaccttgtgtattcccctctcttaactctgggttgtctccgtgactcgcttttgaccaacagaaagcagtgayggtgaggctgcatgacttctgaggataggccatgggaagccttttgcctttcagctgggtctgttagaaagcttgctctggggtaagtcagctatcatcttagaaatttgattcctctgaggccatcatactataaggaagccaagatagccacatggaaaggccacatggagaaagcaatagattcagccagattccacttgttccagccatcccagctgaggatgaaagaagataggtgaaagaagatgctgccatcttggatgtgcagtccagttgagccaacgtttgactctagaccaagggtgtccaatcttttggcttctgtggccacattggaagaagaaggactgtcttgggccacacataaaatacactaacaatagctgatgagctaaaaacaaaaatcacgcacacaaaa

SEQ ID NO: 484766 - DNA, 461 bp, Homo sapiens
ttatggctacactgtgttctctccggagggacgccctggcaaaagagccttcaatatttcttttttctttttttttcctcttttttttttaaattatactttaagttttagggtacatgtgtacaacgtgtaggtttgttacatatgtatacatgtgccatgttggtgtgctgcacccattaactcatcgtttacattaggtatrtctcctaatgctatccctccccgctccccccacccaagccttcaatatttctatctagcactgtgttgtgtgtttcctcagaaagcattccatttgtggatgggaagaaagggcctagacggctgaggttgatccagtagagctgtggtgcttggctggctgtccatgcctggcatcttaatgtcttttccaaagcagagttgttcaactgcaaagtgtagccagggggagattgtctaggggaagatttgttggc

SEQ ID NO: 484767 - DNA, 553 bp, Homo sapiens
gctctcgtcgctcactgggccctgccggccccgcgtgaggcccagcaaggcccggctctggtggaggaagttggggctagagaagcagtagagcacggggtccaggacactgttgaggtaggtgaaggccagggagccatggaagagctgtgtgcagaggtccagggakcggcaggcggacagccagaaagccaccatggaagccatgccaaagatgatgctgggcaagaagcagatggtgtagacggccaccaccatggccagcacacgcatggccctctgcgggcctgcctgcccgcccagaccacggttccggatggtgagcccaatgctcacaatagcaaagaggatgagcgccagtggcaggaagaactccagcaggtacagtgcctggtgccagcggagcgaggccgagggcttcgtgcccaccctgtagctgaggcaggaggggccggagaaggtgctcaggagcaggtgcccgttgaggagcaggatgcccacccagagtcccccggccacccgggcagctgcccccacggaagcacggctcagc

SEQ ID NO: 484768 - DNA, 523 bp, Homo sapiens
gtcagctcacagaacagaaaagcaaacaagcaaatgacccttaaacacatcaagagaggctacaactcagtcaaaatgcgaaagtgtaaatgaaaacatgctgagatcctctttctcgcctgagcagtggaaatgtctacgtgtggccatccgccrctggaaggctgcagggaaaagacacttccacatattttctggtgcaggaacatgggaaccatcccacaaacagcatctgcaacacccaccaatatggcgacacactgtgctttgaccctgcagtctcacttccgggtatctctccacacagaagaaatgatgggagaacaaagctattcgcggcggcattgcttttaatggcggaagactagaaaccacgcgactgagcaccagggagccagcaggagaagccaggcagccgcagggggagatccacgcagcctggagagaagtgaggacggtgtctagggtggacactctgaggtccccagactgcataaatccgaaaagccaaggttcagaacag

SEQ ID NO: 484769 - DNA, 625 bp, Homo sapiens
ttaggagtgagaaacatgtcactgaaatgcattagaatatgttatgacattgtgatacgtgcaaaaatagaagtttgtatccaagatacaaagatagcatggaggggagtcttccaggatgaaggctgtcccatggggagatagtctttcctggtgaataataaagtttctagaaatgtgactatgtgtgggaagggagtgtgggagagtgaagagaaaaggtaagtgttgtcagcaaacactatggtttgcccaaagaaatacagtgtaataccattggtaatgttatagtgtaaagtcgtggggagggaatgtcaggaaatgagagagaggccagactgggcaagcccatgagttcatttgtatgacaaatgaaagtctgggacattatcaagtgaaagggaggcagtaaagatttaaagagagaaacgttattagaattgtgattcatagaatgwctgttaagtccaggaacggaagagactaaagtgctcaggttagagcagggagaagaagtgagtggcaaatgcaacagtccagtagacataaggaagtcctttatcaggtagtcctatacataaaaaaaaagacagactattaaaattattttagaagaaaacagaat

SEQ ID NO: 484770 - DNA, 500 bp, Homo sapiens
gtagaatgtaaaagcttatgttggaccatactgagttttagtttcaggaggtcatcaaaatgccaatgtccaatgacagttgaattttaaaaaatcagaatcttcaaggtaattaaattaaacaacatggtggtttgggaggtatataagacattattaaccaatcatctttgtagaagtaaaattaaataggaaagaaatgatactggtctcttttaggatgaagggagggttgcaaaatcagatagggacacaaacaggtgcttctgagactctcagattgttctacttcttgacatgtagcttaggcaggtattttctttttcttttcyttttttttttttttttttttttgagatggagtctcactctgtcacccaggctggagtgcagtcgtgcaatcacggctcactgcgacctgcgacctccacctcccgtgttcaagtgattcttctgcctcaggcttcccggtagctggaactagacacgcgccaccacgc

SEQ ID NO: 484771 - DNA, 609 bp, Homo sapiens
gcacacatggttttggtgaatggagatcttacatgactcctttcaagtcatttagctgamtatttcatttttcttatagtaagtgtggcttcatgtatctactgaataaacatttatatagtgcttactatgagtcagtcaaaatacataaacacactccaaaattaacctattttattcttcaaacaactttgggaggtggatgctattattatttttatttttagttgagaaactggtgtacagaaggctaagtgatgtcacgtagggaaagggaagagcgctggtaggtttaggaaccagatcaaaaaagtgacctaagtctggagtacaaattttcaaaaactttgccatggtgtctaaaatctggtgaattttaatagagaggataattgtgttttttttgtgtactacttttccattcatataaaatgcaatgctctgtttcagaaagagctttaactttcttagctaaaattcacctagaggctgaaagccttcattttctttagtgtagtgagttaactacaattttaaatttaaatttggttggctgaggactcaaagtgacccttatctgatatttgtcattcctattcctcttgcccc

SEQ ID NO: 484772 - DNA, 617 bp, Homo sapiens
atttcttaaaaatgggtccatacatagtttcaaatttttatccagcttggcaaatggtacagtttagccaaagcctaaagggctccattctctccttacccagaatcaagatggaccataagaactgatggattgaccaggcaggaacttacaacaccctctagttttcacgttctgttttcctttgtgctttctaccagagcctggctgagacttctaaaggtgaagggcagcatatggaagctccaggggatttaaatcagaggtgctgccttagcagttgacaatattcaaaactacttctcagactatgctttaccccaggacaaagttggtgggcaagggaagagcctgggcagaatcctacttgccagccacacttaaactttcttctgccttttcgaatcacgtgcttggcaagagggtcctttggttaggttcagaaaccaaggtgggtgctcagtccccatttgtccttgttcggaatgtagcttttcctgctaggcagcaaaagaaggcaggcattgatcygacacctcacctttctactgagatttccaaagcactggcatgacccataccctgcatgtgattgtcaaccacagatataagagcag

SEQ ID NO: 484773 - DNA, 645 bp, Homo sapiens
acagtattgattttgacatccacaaaatcaatatggaaacatacacacatgcaaagttcccaaactccccccaaaatcttatcttgaaaacaatactagtctacactttaagaaaacgttgcaaaggataattcattctgttctttgattacttaaagctggaaaatccttttccactaataacctgttatttcaacagttgaattagtatagtgctatactatttaacagttttgtagtacctggggttgttaaaaaaattgtagtgccaaaataaatttgaaggatcacctggaattaatatccctacagactttgcactgtatactgtttagtcactctcaacaattacaaagactttgaaatcacagcacttatttgtgatactactactatttcttcttcacctcttattatgtaaatataagtgagtgtacagaagtacatagttttccttttcacttgagtgcatttcccatcccttaagggaaaagacaagatacacttttggattcttcaattgccattcaattgttttccatgtaaaaagcttgagtgatttctctgtttccyggctatttccaagttgttggaataatacatttaagtaagagaaggaaaaaatagaagaaaagatattattat

SEQ ID NO: 484774 - DNA, 542 bp, Homo sapiens
aaaactgattacgtagttctttatgggtaaaataaatccccgatcatagcagattaagtgaataaagcagattaagtaaataattttctcacagtatacaatgtctggagggagactgatgctgtcattggttctgcaggttgataatcagggtcagcatctctgtggagaatgtactggtactgctcaagttggtcccattctaggtatttaaagtagagggtatttaataaagggaattggctatgtaaacactggaatagcagagaaccaagtgaaggtagtgagaacctccagatattaatggcagcagaaaagaccaggtggataaaaggaataactgaggtgtattatatatagattcattgaggtctccagcrgacttttactcattattctcctgctcacaaatgtcccctgtgttagcttgcttcatttacctctagtcctgccagttcttcctagattacctcttagtaaataatctgcattcacatccttgtctcagcttcggcttctgggaaaatcatatatgcccacca

SEQ ID NO: 484775 - DNA, 560 bp, Homo sapiens
ttaatgtgtgatgcattttcaaaaatttctaaatggatttgtattactttaattgtcagggaaatacaaaataaaagtttcatatttacaaataattgttatggatggtgaaatgcttagtgtaagcatttattatcaaacatttattcacttccatkatatatcagacattgttccatgtgcttagggtttgtcaatgaacaaactaaagcccccccacccccccaccaatgtggggcttatattgtagcagtgggagacagaaaattaacagtaagcatatcaaataagtgagttatgtagtatattaggatgataagagtgttacagtaaaaagaaaaataggataagaaggatcaaaaatcaaataaagcaggggtgtgggggtaagggagacaggttgaggtgttaagtggttgcaattggcctcactgggaaagtgacataggagcaatgacttgccagtgcggaaattaaccacgtggatacctggggaaaagggcctctttttactgccagaaagaactgccagagcaaaagccctcggactaggggttgca

SEQ ID NO: 484776 - DNA, 560 bp, Homo sapiens
ttaatgtgtgatgcattttcaaaaatttctaaatggatttgtattactttaattgtcagggaaatacaaaataaaagtttcatatttacaaataattgttatggatggtgaaatgcttagtgtaagcatttattatcaaacatttattcacttccattatatatcagacattgttccatgtgcttagggtttgtcaatgaacaaactaaagcccccccacccccccaccaatgtggggcttatattgtagcagtgggagacagaaaattaacagtaagcatatcaaataagtgagttatgtagtatattaggatgataagagtgttacagtaaaaagaaaaataggataagaaggatcaaaaatcaaataaagcaggggtgtgggggtaagggagacaggttgaggtgttaagtggttgcaattggcctcactgggaaagtgacataggagcaatgacttgccagtgcggaaattmaccacgtggatacctggggaaaagggcctctttttactgccagaaagaactgccagagcaaaagccctcggactaggggttgca

SEQ ID NO: 484777 - DNA, 601 bp, Homo sapiens
tgagggctcctgaggatgtgtttcctgtccagagagtatagagagagtatcctaggtccaggggatgagatggatatgtacattgacaaaaaaaaaaaaaaaaaaaaaaagactagaaaatgtgggaaaaacacaaaggaacccaaagttatataaaactgtggggaaaagagctacagataatatctgcacaagacatttgagctgggtattgagcacaaggggaaatgcatctgggaagaagacaggtggtggggggtggggaatggagcttagycacatgaactgaggtcatttcttggactttattccttacatgatgaagaagattagaactaaaggccaaatgcaaatgtattattgtctttaacaaagacgaatcttgcccacatggaagagttgacagagaaaagtgatgttggaagtaggaagtggtcaaaggaaaccgtttccctcattaaagttcccgagtttcaggtctggcgcttcatggaagaacattgaggttaaggcaaaagtttaatttcttagagttttattttctcttgaaatcacactcatcagaagcaattgcttgatttttgaaaatgcgtgtagaaca

SEQ ID NO: 484778 - DNA, 517 bp, Homo sapiens
atccagcctgtaacagacaccacccagtcattgtgcaaagcctgagagacacagccttcctgccctcttggcaacaggagtcagtggacaggaaaggagagacaccactgctagggccaagggggacactgaaagcaagaagctgggtgcactcgagagacagcacagccagttagagggaggctccattcttccaccccaggctcattccaggtactcatcccaggtaatgtcctgactctctataaacactagccgggcacctgtaatcaccctccatctctgcaggaccagtttcccactgtctgctgttacacctcaggcttcccagtttaccttctgcttactatagccragaccagcctctaggatgggctcagcgcccaggcactgcagaccccagccaggagtaggggtatacttactcaaacccagagatgcggccgtgctgggaagccacggcccacacacgccccaagccgcccaccttggctgaccccacaatgataactgccag

SEQ ID NO: 484779 - DNA, 443 bp, Homo sapiens
tgtgtagcaggagcagataaagacttttcaagatggggagacgcgcagaatggaaaaccacagagcagtcaatcctcatggtggtggggtcccggggagcctctgaatgtacacaatcatgtgtgtccctttctgggcctgtctcagtccccagattggcatgctgtgtgcgcatagccagcccgggccctgtgggtgatctgaacactggcttccaccccacccctccaggagaagacgggcaggccagcttggggttaagtagagaataagccattgatgagcctgccyctcttggggattgcagttctatactcctggccccattcactccggcctctgatctgtgtctggctggagggctggagggaacagagctggagtggtgtcagaattatggattactggatggggtcaagggagccctagaaggggacaaaagt

SEQ ID NO: 484780 - DNA, 437 bp, Homo sapiens
gtgctattaatattagtcaaacaaatgtaagcaacctgaatgtctaacatttaggcaatggctgaacaaaccayattatgtgatagaaccattaaatataatacatcaactcagaaagtttaaaaggaaaaaatgagcagatttgagtatatcaaaagtttaaacttctgtgtcatgaaatataccacaaatcacgttcgaggagacaagtgacagagaactgaaggaattgccgctagtgtgtggaggcttcccgggtccccagaagggtggggttccaccacctgggcctcagcaggaagtagaagacagaaatctccctagaaaccctatgggtactgaatggggtccaggagccgcagagatgagtgccttgtttccaggaaggttagagagaaggccctgcctacagggtgcctgggaggtcaggaagcagc

SEQ ID NO: 484781 - DNA, 581 bp, Homo sapiens
tgtctcgtctcagggatttccacgtcacaaataaacaaatgaatagaataacatttcaaataatacccaacaggttttggggagagggagagagaactgaactaaatgttttgaagacttatatggaagaataagtctgagaatagatggacacatattatagaagaatagtgaggtggtctttgccttactatatggtagaacagatagatgagtagtacacgggaaagtccagaaacagatgtaaacatggagagagaatgagtatctgacaaggtagcacttaaattcatgccaaggctggaaacaaagcaaatagataaacaaaataatgcttaatgggaaaaatatatgtatttttttgasggtctcattctgtcacccagactggagtgcaagggcgtgatctcggctcactgcaacctctgcctcctgagttcaaatgattctcctgcttcagcctctggagagctgggattacacgtgcccaccatcatgcctggttaatttttgtatttttagtagggacagggtttcaccatgttggtcaggctgttcttgaagtcgtgacctcaggtgat

SEQ ID NO: 484782 - DNA, 485 bp, Homo sapiens
ctgtggcttcagcatctatttttggctactggggcttatagacaccaacaaattatgtatactcactttatctgttgggccagttgtatgcatagaaaaatgaagacgggccaagtgcagtgcctcacgcctgtaatcccagcactttgggaggcccaggcgggcagatcacctgaggtcaggtgttcaagaccagcctgaccaacatggtgaaaccccgtctctactaaaaatacaaaaattagccaggtgtggcggcagttgcctgtmatcccagctactcgggaggctgaggcaggagaatcacttgaaccagggaggtggaggttgcagtgagctgagatcatgccactgcactccagcttgggtgacagagcaggactccttctcaaaaaaaaagaaaaaaaagaaaaatgacaggttctgtgactctaggtagcttcatcttcttgtggacttccatgtttagctagttttcccttaag

SEQ ID NO: 484783 - DNA, 599 bp, Homo sapiens
ctgggcacttattgacagggtctcactgtcgcccaggctagagtacagtggtgctatcatagctcactgcagccttgaactcctgggctcaagtgatcctcccacctcagcctcccaagtggctgggaccacaggcgcacaccactgagcgtggctgtttacatcacctgctctctccaaaatgggtttggggcatggataggctgagcaggaaagtcagcactcagtcaactcagcagctcccagttcagggtcaattctgggcagtgacactccaggactgggttttttaggggctctagctggagtgtattatcagacttggccattcaactgagctgtgctgagtatctcacatgcagacaaagcagggtcctccaggctgggctctggagagggggccccctcaccctctggtgttgggtgcctcactagcttggtgcaaaagtcaggraagtggggcagactgctgtgtgattacagaggcctcggctggtggctgggccgcagtttctggccttcctggagccacactgttccatcaccaccgagactttctacccaacgctgtggtgttttgaggggcgactacaaagcat

SEQ ID NO: 484784 - DNA, 607 bp, Homo sapiens
catccagctagataccttgtttccatagtatggagtttaagtattgttccttgcctgacttcagggtgattttttaggattttagatcaacattgcagataacccttggccatttgaaaaagtaataatgaagcctgattatagtttgtctcataggctgaaacccccagaaaagcagaaggctctaaactgtgggggatggggataatgcacatatatgtttatccaccctgtcgatcttgtttgcatgtggattctgcactatcagtgttcaatgcccagcctagcttcccctaggctcccctggcacacccttaggttgtgatctatttgggaaacctttagaaaatccatgggttatgccacttggtagttgagagaaccagaacatctgcactgcagtttcatcatctaaaaatggggctaatgccagttacatgagaggtctcttggaaagactaaattaataaggtctgtaaatgtgctctgtcaactatatagcattcaccaaatattattttttaaacagagaatgtaaattaacttttgtaaaggcataatcttaactgatatatttayttatttttggcaagggacagcagaaagc

SEQ ID NO: 484785 - DNA, 594 bp, Homo sapiens
aaaagaaggaatcaagctaataggaatacttcctccccagtatgtgcttttattcttgatttccatgataaaagaatcatatgaattaccaagtagttccctccagttgggattttaccacaccaaacaagtaaaactcaagccttctataaagaaccaagagaaaaagttcatcaatccctcatataaaaaactttaaactcctcaacttttcccacagctaaaatgttttacttttacaaatggagagatgatttatcatgaatgaatgtcctatcttctctcamccttctgtgctctaggctaattaatctcaaaaacaaaaaattaccagctttcttgagatagccaacatctatatttcttttttttttaatttgattattattatactttaagttttagggtacatgtgcacaacgtgcaggtttgttacatatgtatacatgtgccatgttggtgatatttcaacacacttcctctgactttttctgtgagaaattttagaaactgctttctgacttaatttctaacactgaaaactaaggtcactccaagttacaaaaggaaaagatttcccaggagagatggcca

SEQ ID NO: 484786 - DNA, 594 bp, Homo sapiens
aaaagaaggaatcaagctaataggaatacttcctccccagtatgtgcttttattcttgatttccatgataaaagaatcatatgaattaccaagtagttccctccagttgggattttaccacaccaaacaagtaaaactcaagccttctataaagaaccaagagaaaaagttcatcaatccctcatataaaaaactttaaactcctcaacttttcccacagctaaaatgttttacttttacaaatggagagatgatttatcatgaatgaatgtcctatcttctctcaaccttctgtgctctaggctaattaatctcaaaaacaaaaaattaccagctttcttgagatagccaacatctatatttcttttttttttaatttkattattattatactttaagttttagggtacatgtgcacaacgtgcaggtttgttacatatgtatacatgtgccatgttggtgatatttcaacacacttcctctgactttttctgtgagaaattttagaaactgctttctgacttaatttctaacactgaaaactaaggtcactccaagttacaaaaggaaaagatttcccaggagagatggcca

SEQ ID NO: 484787 - DNA, 606 bp, Homo sapiens
agcggtggtagcggaggctgtagtggggctggtggtgcttccaactgcgggacaggaagtggccgtagcggcttgttggataaggtgaggagccggttcttgggaacagttgaatcctggggaggcctgggaggcggcgagccmaccttcccatcccggtctcccttattttctacggccttttgaggggagcccttgtgtgaccactatcacaaccctacgcacgcttggagcctgcccttgccctcatcacacttcaaacctggacccagtcctctttagaacttcttcttttctcgcaagtgttctggtcctggtcgccacacctttttcggtaatttgatttttcctatatttaatcgtgtccatctcttttctcctggggggctgggtgcactgttgtcagtgcccatttcacagacacggaaaaccgaagcccaaagattaaagaatcagtatcccccaaactctctaccaccatcacccttgcgtgctgctacagattccaaagtgcttcttgtccttttgcttactgaagtttttaggcgttttatcatgataggcgaatactgaaaatatttgagtattgactgttctactgggctg

SEQ ID NO: 484788 - DNA, 606 bp, Homo sapiens
agcggtggtagcggaggctgtagtggggctggtggtgcttccaactgcgggacaggaagtggccgtagcggcttgttggataaggtgaggagccggttcttgggaacagttgaatcctggggaggcctgggaggcggcgagcccaccttcccatcccggtctcccttattttctacggccttttgaggggagcccttgtgtgaccactatcacaaccctacgcacgcttggagcctgcccttgccctcatcacacttcaaacctggacccrgtcctctttagaacttcttcttttctcgcaagtgttctggtcctggtcgccacacctttttcggtaatttgatttttcctatatttaatcgtgtccatctcttttctcctggggggctgggtgcactgttgtcagtgcccatttcacagacacggaaaaccgaagcccaaagattaaagaatcagtatcccccaaactctctaccaccatcacccttgcgtgctgctacagattccaaagtgcttcttgtccttttgcttactgaagtttttaggcgttttatcatgataggcgaatactgaaaatatttgagtattgactgttctactgggctg

SEQ ID NO: 484789 - DNA, 600 bp, Homo sapiens
actcaaaaagtagcatggacctcaatgtacaaaagaaacaggaattctcttcactttatgggaaaagaaagagaacccagtgacagagtgaagactgctttagtcccagctctcctctgaaatttmttacctctcagtgttaattctggagaggaaagtgatgtacaaaagaaaaatgtccaaacttgagaagttatctcatgcctagggaggcactggagtatggaagaaagagcattggcctaagaggcaaaagaactaggctctgccattggccctatgacttctataaactatgtaaacggccaagtgtttgtttcctcatctgtacactaggaataataataaatgctcctacctccaggggcttcccaggagggtcaagtgggaaaatgagtgggaccggtttgtctgacatagagccctagtgagagaagccaccactgcataaaccctgcttaatttcatcccttatgtcatattctttgatctccctagaaactttccatttcagtccaactttgttatttgtttaaacagcaagccgaaacatcacctttaccccttccagaggttgcccaaagcatgaggagaaaaatc

SEQ ID NO: 484790 - DNA, 600 bp, Homo sapiens
actcaaaaagtagcatggacctcaatgtacaaaagaaacaggaattctcttcactttatgggaaaagaaagagaacccagtgacagagtgaagactgctttagtcccagctctcctctgaaatttattacctctcagtgttaattctggagaggaaagtgatgtacaaaagaaaaatgtccaaacttgagaagttatctcatgcctagggaggcactggagtatggaagaaagagcattggcctaagaggcaaaagaactaggctctgccattggccctatgacttctataaactatgtaaacggccaagtgtttgtttcctcayctgtacactaggaataataataaatgctcctacctccaggggcttcccaggagggtcaagtgggaaaatgagtgggaccggtttgtctgacatagagccctagtgagagaagccaccactgcataaaccctgcttaatttcatcccttatgtcatattctttgatctccctagaaactttccatttcagtccaactttgttatttgtttaaacagcaagccgaaacatcacctttaccccttccagaggttgcccaaagcatgaggagaaaaatc

SEQ ID NO: 484791 - DNA, 613 bp, Homo sapiens
catcacgttatttataccaaaatatgcccacaaggtccctgggacagagaagggactatataaataacaaaaagatttcgctggtaaacaaatagcaagaatacttctgcctttcacacagtaaacattatgcttctttcttttgcttgctgatgaaaaaaatttaccaaagcaatcagtcctgtttttccccttctattttttgatttgagatggctgaaacttaccaagtaaactacctggcatcactgtagtactcaaagtccatggtgtctctcaccactcaaaaagcaagggcatctttggcattscaaatgcacataaagtaatcaatatagaaaaagaacaaattaattgaaagttatgtaatcttataccctgaaaagaacttgattaaatctccatcctttgtagcgatttctaatctaggatcctgcaggtgtttacaatcttttgtgagttgacctcaggtgacccaaggatagttttaattgcttagcaaatgtacttttacgaacaagataaagatattgtgaatgcatataaactacctttgaaatacagcgagcctttcaagatgggattttttagttagcttgctactctttcttta

SEQ ID NO: 484792 - DNA, 532 bp, Homo sapiens
tggtcatctctggctagtactgacttggagtccactaaaracatccctcgcatcttctagcaacagttctccagctctccattgtctccatgtcatccctgcagcctgtgggccactctgcagcctgcattcctgccaggtgtcctgtcaggcaaagctggtttatttgaggtcacactggcagctgagcccaagagcctgctgcctattccgttacccttgccaagttgagcttcatctattttttttttctttaatcattcctagaaatatcaattctggaaaactctgttttcccacagaaggttttggcagccaatcctcagcagttacctcattctttgctctgctgccatctgagaaagcataccaggaaaaacagtgcacctgtaggcagaacaaatgcacagagggtgaaggattggatcggctcttcatcctgacaggcttatggagggaagatctccatggagttaaagaacgttagtgctgccagaaacctgagactccacctagaccaaattcatcattt

SEQ ID NO: 484793 - DNA, 633 bp, Homo sapiens
agctggcccacctaatataagccctcatagctcctttggataggtagccacatttcggccatttataaggaagagagagtggatcttgggccctgaatgccaagaaaaggcaagttttggtgaggcaatacccagaggaaaggtcttgatcacagatcattgcttaagtgtaccaagttgcaggcccagggcaagatgaaatcttggctccctagggaaacctacaagttaagaggaaaagcttgctaaaagcaaagaggcatctaaaatggaaaagtggctttgcagcttcacagactcccctagggatatgtctatagaaaaatctccagtaaggcagattgtattttccaagatggtacaacatgatctcccattccacatgttcttctcrtaatatgacactgatgctcttcccatcaaaaagtgagcctgtgtttcctccccttaaatctaggcaggcctgagactacaataaaagtgaaactgtgtaactcccaaggctaggtcataagggtgatactacttctgtctggtgtatctaggacatttacacttgaaaccaggctgaggaagccaagcagggaaacagagatgccacatataggtgttctggcccatatccttagccaa

SEQ ID NO: 484794 - DNA, 632 bp, Homo sapiens
tgagttattattaccattttccagatgaggaaactgagattcagagcgattaagcagtttgtccaagtcctaaaacaattaagcggtggaatttgacctcaggtctttctgacatcataattcttacttgcttttcaactttacttggattgcccacttaggcatgtactgaactatgccattttctaaaagggacttgagcatccgtgaacagtggcatgcataggggggctctagaaacaatctcccatggttacagagggccaatgactgtactcacataacagatggagactgtctcctccttgactgagtactgattgggtcccagtktccaccccatttgctcacaaagcatatctcccaggaaatctgggaagaccacaccagaaacatttatttacctcaaaccaatggaactaagagaattataatctcaaaatacagcttgccttctctgaaaatttcttaagaagttacgcagacatgttgggcttttgctttattaatctctcaccctccgctgcaattaactgcagtctgacttgaaaaattacttaatacttatgcactccacttcccttgcctgtgaaatggatatattacttacctcacatggctttcctaagaat

SEQ ID NO: 484795 - DNA, 578 bp, Homo sapiens
gccatattgatgttctctttcttacagtcagagttctagttaacatgctccctgatgccctaaaggatattatgtattaatatagttgtgtttttttttgtttgtttttgtttttgtttttgttttttgagacagagtcttgctctcttgctcaggctagagggyagtggcacaatctcggctaactgcaacctccatctcccaggttcaagcaattctcctgcctcagccttcggagtagctgggactgcaggtgcatgccaccatgcccagctaatttttgtatatttagtaggacagggtttcaccatgttggccaggctggtcttaaactcctaacctcaggtgatcctccctcctcagcctcccaaaatgctgggattacaggtgctagtattgatttttaaagacatgagccactgtgctctgcctcggtatttgttatataatttttctttatggtctttctctcccatagagcgataaatcattcatgacaaaatactttcaataaatgttaactaaataaatgaatgaataagtaaatatagatgtaaagaatgtaatactctggctga

SEQ ID NO: 484796 - DNA, 578 bp, Homo sapiens
gccatattgatgttctctttcttacagtcagagttctagttaacatgctccctgatgccctaaaggatattatgtattaatatagttgtgtttttttttgtttgtttttgtttttgtttttgttttttgagacagagtcttgctctcttgctcaggctagagggtagtggcacaatctcggctaactgcaacctccatctcccaggttcaagcaattctcctgcctcagccttcggagtagctgggactgcaggtgcatgccaccatgcccagctaatttttgtatatttagtaggacagggtttcaccatgttggccaggctggtcttaaactcctaacctcaggtgatcctccctcctcagcctcccaaaatgctgggattacaggtgctagtattgatttttaaagacatgagccactgtgctctgcctcggtatttgttatataatttttctttatggtctttctctcccatagagcgataaatcattcatgacaaaatactttcaataaatgttaactaaataaatgaatgaataagtaaatatagwtgtaaagaatgtaatactctggctga

SEQ ID NO: 484797 - DNA, 563 bp, Homo sapiens
atagaagacatggtccacctcacaaggaatcaaataatgcaaatcactatgtgtttaatgatttatagattttagcatttccactgacaattagcaaagaagaaaaaggctaattataactartataggcatggacataggaaaatgggcactttctaaaactgctgaaacaagtatacatattagtaaagtatttatagatagtaattttccaaaatgaataaaaagcaataaaaaatcttttaatctaataatctagattctcagaatttacgctgagatgataggtacatttacaaaggtaatttacatttatacttaagaatatttagcataaaattctttattatagccaaaggaaaatacgaaatatgaaaacataaatgaagaataggagattagttacatgaatgttgatgggtctctgtacagttagggcatgcatgggctttatgagtcaaagagcctgattcatttcatgactctgaagctttctagtattattttcttgtataaattgcttaagcactctaactctgtttctgaccctttaaagtggaatt

SEQ ID NO: 484798 - DNA, 624 bp, Homo sapiens
ttcttcctgctggagtctcagcaaacaaaggatcaattacaccgtcccaaggctgccaagtctctctagcatctctgaaaggaagggagctggcatattagagaagagattagtgtaacctatcccattagctccacatggacttctgacagtcctaaagttggatgttatagacctcagtcacccactgtgcaaagatagctcatgaagaagcagagaagtctttcttatcttttgttgytggaaaataatgtagggcttgtttttcaaatccttgtgcagtataatgatggtagctaacattattgaaagtgtactgtgtaccaggtacttctctatgtaatatatgtgtgtatgtatacatatacatatttatgtatacttaatcaatgacatttctatgaggggttattattaccatgcccattttataagatgaggaatctaaggcccataggggttaagtgacatgaccacatgacacaacaagtagtagaggagctggttgcgattaagatccagtttatctaactccagggttctggagtctgcactgccatgaaatttgctgtcaacttggcaatgttccccagcagcctcacaagaccacacttccctacttta

SEQ ID NO: 484799 - DNA, 420 bp, Homo sapiens
tgttccccttcctgtgtccatgtgttctcattgtaatatgacttttatataggcaggctcaggctcttccaccttgattctgtggaagtgatttgctgaagaagtgttctcaggagaaaacctgtgatacagtgagggcacagaataaggcaggcaaagaggccaagcaaagatgtgatttggctgaaatcgaggttcaacacatgctcacaaggaactttgtagcatcaatggcaccacagtagtttcacctcaaggcaaaaggatggggcttttatccaaacatccagacattggctacagacttcctttcctcccatttctgaatayggtggccctgttgtagaaaaagtgccttgctgggcattgtagcagccatagatgggtgcatgtgcagtaaatgagatttgtgtgaggcag

SEQ ID NO: 484800 - DNA, 455 bp, Homo sapiens
acctaccactctgacctgcagcccttctatctcacttaaatgaaaacaaaaagagtcaacagggatcaactgcagccaagaagcatgtgggggaagaagttatatcaaggagaaacaattgcgaagggttcaactgtaacatctaagcccactaaaagactgagatttattaagaacattatagagtactacctcttcccccaccttaccatcacatcaacagaactccagtayaaaaacagtggattacagatgaaatatctgtatgacacagattcattcgaagttttggtattagtcaggattctctagagggacagaactaataggataggtgtatatataaagggaagtttattaaggagtattggctcacacaatcataaggtgaagtcccacaataggccatctgcaagctgaggagcaaggattcccaaaaccccaaaagtagggaa

SEQ ID NO: 484801 - DNA, 599 bp, Homo sapiens
gaagcttttctctgttttcttactaggaatgtatagttttactagcaaataagtgtgactattggtgattttttaaaaagcaaacaacaaattcttctttgctgacacaagaaaagtgattcatttcaattagtaaatcatttttatgattctgatatcaatatcagggcacaagggttaacatacatctcagaaactaaatttaagctcacattttcagagagcatttttttttttttggtggaggagagtattgagtataacatagccaaatcaattattattaagcctaatattgatacatgattaatattgacaaacattttgacaccactctacatagtgacatcactctactaaaattattcgcaaatcatgtccaacagttgtaaattaattccctgtaaacactaagcctgcaatctcagtatataaacamtagatcaagatgggatctattaattgggacaaatctttggaaggtagtcttatttccttcatgaaatcacttttctgggaaaaaggaatcctaattttttattcaatatagaaatagaaaataaagtgaggcacccataccttcttaaatagtgtgtgta

SEQ ID NO: 484802 - DNA, 572 bp, Homo sapiens
atgtgcagacatgtgtgagggacatttcggctgtttcactgctcaccataagtgacttttatggtttatgtcctgggaaatagctgggaaacagctattctacagcaccatgcaagtatagactccagaacccaactttaatctatataataaaaaacacttctggggtttgaattgagtccttttttgactgctgtttcagatgtaagctctttaaattccggaaacgtttttattttggaaatgatcttgattcagaattgctcagattctgggtatgtctggtaaatggtctactggctttaagttagaaagtctgagacgctataaagagagacttagacatggtacaatgacatcttaggwctaaaataaattggattggggcctaaagaaggtagttaatcagcttaaaaaaacagctaatgtcaaagacatttaataattttcaaattgctttttcaaatagtgacagatgttatggacatcttgctcatgaattgattatatatttgctgtggacagacattcatatatttggagactggattgagaactttaaataaacacaa

SEQ ID NO: 484803 - DNA, 635 bp, Homo sapiens
gcggaaactgaagactgtgttatttcatggagaactgtcctcgaagttggaggtgcaacaagcctctagtgtaagcctcatgcgagtaaggtcgtgtctgattgtcctatccatgtaccagtgtctaraacaatgcttggcacctacaccaagcactgaataaatgttcatttagcttatggtgtgaggcaatgaatacatctttctaaagactgtaggcagaccgagcaactgagaaaatgtcaagggccaccactgaaagctttacaagtaagagcctgttaggatggcgagggtctgaggaaatttggagaaaaaaccctcagcacaatctttaataagcgtctgcgtcatcccgatgaacgactgttgtggtttggatgcttatggctttgatctacctttcagtcaacatatatgagcagtttggggggataatagaatgagaattcccaaaatattgttggaggagaagggagcaataggtgttggcagggaaattccagcccaagtatataaataaccaaagggaattttttcatcaaattgtgggaagcggatgaaccaacctctctgggcctgttttcctatccgtattgggggcaaggtgagagaagccgtaagatgttccctgg

SEQ ID NO: 484804 - DNA, 635 bp, Homo sapiens
gcggaaactgaagactgtgttatttcatggagaactgtcctcgaagttggaggtgcaacaagcctctagtgtaagcctcatgcgagtaaggtcgtgtctgattgtcctatccatgtaccagtgtctagaacaatgcttggcacctacaccaagcactgaataaatgttcatttagcttatggtgtgaggcaatgaatacatctttctaaagactgtaggcagaccgagcaactgagaaaatgtcaagggccaccactgaaagctttacaagtaagagcctgttaggatggcgagggtctgaggaaatttggagaaaaaaccctcagcacaatctttaataagcrtctgcgtcatcccgatgaacgactgttgtggtttggatgcttatggctttgatctacctttcagtcaacatatatgagcagtttggggggataatagaatgagaattcccaaaatattgttggaggagaagggagcaataggtgttggcagggaaattccagcccaagtatataaataaccaaagggaattttttcatcaaattgtgggaagcggatgaaccaacctctctgggcctgttttcctatccgtattgggggcaaggtgagagaagccgtaagatgttccctgg

SEQ ID NO: 484805 - DNA, 440 bp, Homo sapiens
tgccctctccatggcctgtgtcttcctttcctgatgcctcagatttcccccattctctggcactctttccatcctcctggcctcactctgcacctcccctgaggtgcaggactgccctgccccagcccccagcttcctcactcccaaagcmttgtgccactgaagcacgagctccagagtgcacctggatggcagcttctctcctggccaacaaacgcctggtgctggctgccctcccagcatctcccctcaactcctcagctccaccccagggccttaacacacacatgcatagcacacacacatacaaacatatgcacacacagacatgcacacaaatgtacatacggacttacacagacacacacaaatgtgcacacattcgtgcatacacagatgtgttcatgcaaacacacacgtgcacgctcacgggcacgtac

SEQ ID NO: 484806 - DNA, 332 bp, Homo sapiens
tatgaaatacatccatggcctaacgacttctcaccactactaccactcatgctgacagcattctcacctaagtcactaccttttttygctggattagagtagcctcccaatttatttgctcacataacctatttattctacacagtgcaccagatacacccctttgaaatgcaaacacaatcatattattctctggtgaaattatctcatatattcctatcgcatttaaaattaattcagaatcatcccatgattatcaaaaccctacatgctcttccacaacatggtttacttccaagatatctcttcaacatttttttcactgtactgaa

SEQ ID NO: 484807 - DNA, 497 bp, Homo sapiens
ttttaatgtttacttttaaaatttaatattagcattattataatattatataacaayattgtaatagaagttttaagggaaagagaataaaataaatctaaaccaaccccctcatacaaacagctaattaaaatgtgtgatgggcctagtactgcaaagccccaggttctgtttcatgaccttcaacaaactgatgaacttgtttgctcatttgcaaactaagtgacctatccctacttcttcctgatcttcctgcagaaagtaagacttactgagacacaaggtaagaagccatctgagctcaacagaaagctggatcacccgcccttttgaaccgctttttgaaagcaaatacactgagcccagaagaaactcaccctttcctaagaggatggagatgtttgaagtgtcaaagtcaaaggcctctgtttgtttgaacatgctggaaaaagctaggcatgaggaggtggtttcagagacacaatattgttcacaca

SEQ ID NO: 484808 - DNA, 497 bp, Homo sapiens
ttttaatgtttacttttaaaatttaatattagcattattataatattatataacaatattrtaatagaagttttaagggaaagagaataaaataaatctaaaccaaccccctcatacaaacagctaattaaaatgtgtgatgggcctagtactgcaaagccccaggttctgtttcatgaccttcaacaaactgatgaacttgtttgctcatttgcaaactaagtgacctatccctacttcttcctgatcttcctgcagaaagtaagacttactgagacacaaggtaagaagccatctgagctcaacagaaagctggatcacccgcccttttgaaccgctttttgaaagcaaatacactgagcccagaagaaactcaccctttcctaagaggatggagatgtttgaagtgtcaaagtcaaaggcctctgtttgtttgaacatgctggaaaaagctaggcatgaggaggtggtttcagagacacaatattgttcacaca

SEQ ID NO: 484809 - DNA, 623 bp, Homo sapiens
tgagagatttgagctctcgtgttgcctgtttgcttttgtgtcttttgtcccttatgtcccagtctactcaaggwtacccacagtcacctagataccatttctactctgtgcttttagtgtcctgcttgggaaatggggtgatcactcatcttcagaatgacctcaagaaatgctttggcatgagagatcagggcctgaagacattacgcccccagccaaatcattatccaaaagggtaaaagatggaaatttgccaagacaaagatcacagtggtagtttaagaaatgaaagcttagatttgattgtctgttttaagggatgttgttttgagtttattttcttagtattaggataggtcattcaaagagattggaacaaccatggaagaacattcagattattataggactgtgtttcagactgggagagcagagggccgttatcctcttcctgaccccaccctgaactcccctgaactcccacccttgtcccgagtatgcctgtccctgacaagagactttggtcagggaccaaagtgagctttgttagtgagcattcacagagggtaggagctgagtccacgaagttcacatcatgccaaggaatggatttcctcccaggg

SEQ ID NO: 484810 - DNA, 623 bp, Homo sapiens
tgagagatttgagctctcgtgttgcctgtttgcttttgtgtcttttgtcccttatgtcccagtctactcaaggttacccacagtcacctagataccatttctactctgtgcttttagtgtcctgcttgggaaatggggtgatcactcatcttcagaatgacctcaagaaatgctttggcatgagagatcagggcctgaagacattacgcccccasccaaatcattatccaaaagggtaaaagatggaaatttgccaagacaaagatcacagtggtagtttaagaaatgaaagcttagatttgattgtctgttttaagggatgttgttttgagtttattttcttagtattaggataggtcattcaaagagattggaacaaccatggaagaacattcagattattataggactgtgtttcagactgggagagcagagggccgttatcctcttcctgaccccaccctgaactcccctgaactcccacccttgtcccgagtatgcctgtccctgacaagagactttggtcagggaccaaagtgagctttgttagtgagcattcacagagggtaggagctgagtccacgaagttcacatcatgccaaggaatggatttcctcccaggg

SEQ ID NO: 484811 - DNA, 623 bp, Homo sapiens
tgagagatttgagctctcgtgttgcctgtttgcttttgtgtcttttgtcccttatgtcccagtctactcaaggttacccacagtcacctagataccatttctactctgtgcttttagtgtcctgcttgggaaatggggtgatcactcatcttcagaatgacctcaagaaatgctttggcatgagagatcagggcctgaagacattacgcccccagccaaatcattatccaaaagggtaaaagatggaaatttgccaagacaaagatcacagtggtagtttaagaaatgaaagcttagatttgattgtctgttttaagggatgttgttttgagtttattttcttagtattaggataggtcattcaaagagattggaacaaccatggaagaacattcagattattataggactgtgtttcagactgggagagcagagggccrttatcctcttcctgaccccaccctgaactcccctgaactcccacccttgtcccgagtatgcctgtccctgacaagagactttggtcagggaccaaagtgagctttgttagtgagcattcacagagggtaggagctgagtccacgaagttcacatcatgccaaggaatggatttcctcccaggg

SEQ ID NO: 484812 - DNA, 271 bp, Homo sapiens
cccacctgcaccatgcttcctgcggagactgcctgtcttcctaatacactgtcttctgaccagtcttccagacaaatcactggttgctatatatatatattttttaatagctaatatcttacactgatatatttatattatatataaataattttgtgctttatgtttatgctatatatacagatgtagttagytatttatgttatatataatataaacatgatgtatattcttatatttctctggggactcactgtcttcttaatacact

SEQ ID NO: 484813 - DNA, 666 bp, Homo sapiens
ggctttgatggccttcagcttattctccgtgtacttggcttggcgctgaaaaggaaacagaagttcacttttaccttttttttttaaggggggcttgttctctaaaagataaaagtacagtgtattcaagaactacaattgtgttgctactccctatgcgcatctgccttaaattgggttctaattctgtttaatgagattcaagggcacaatgtagatcaattcaggaaaggttaatgaggctccctacttaagatgygtgccccactttgattctatcttcaaatatcattcttcattcttgcaatgccactctgaaggaggtaccactactcttgcccctgaacacctgatacctgaaaccaaatcctgggtttacagtcacccccaacccctccaaagcaataggatattgagctctatttggaaaatggattgggaaaggtgactgctgtttcttggttttctgctagaggctagaaacttggaacccacgtgcccagttcttccaatacctagtattcctgccagggcacagagcaaggcctcattttcagtcattaggcactaaaagaacccagagcttcctcgtctgctcttcccagtgactgttgggaaattcctatcagccatgccttaccgaatgttgcttcccagcatctacag

SEQ ID NO: 484814 - DNA, 666 bp, Homo sapiens
ggctttgatggccttcagcttattctccgtgtacttggcttggcgctgaaaaggaaacagaagttcacttttaccttttttttttaaggggggcttgttctctaaaagataaaagtacagtgtattcaagaactacaattgtgttgctactccctatgcgcatctgccttaaattgggttctaattctgtttaatgagattcaagggcacaatgtagatcaattcaggaaaggttaatgaggctccctacttaagatgtgtgccccactttgattctatcttcaaatatcattcttcattcttgcaatgccactctgaaggaggtaccactactcttgcccctgaacacctgatacctgaaaccaaatcctgggtttacagtcacccccaacccctccaaagcaataggatattgagctctatttggaaaatggattgggaaaggtgactgctgtttcttggttttctgctagaggctagaaacttggawcccacgtgcccagttcttccaatacctagtattcctgccagggcacagagcaaggcctcattttcagtcattaggcactaaaagaacccagagcttcctcgtctgctcttcccagtgactgttgggaaattcctatcagccatgccttaccgaatgttgcttcccagcatctacag

SEQ ID NO: 484815 - DNA, 666 bp, Homo sapiens
ggctttgatggccttcagcttattctccgtgtacttggcttggcgctgaaaaggaaacagaagttcacttttaccttttttttttaaggggggcttgttctctaaaagataaaagtacagtgtattcaagaactacaattgtgttgctactccctatgcgcatctgccttaaattgggttctaattctgtttaatgagattcaagggcacaatgtagatcaattcaggaaaggttaatgaggctccctacttaagatgtgtgccccactttgattctatcttcaaatatcattcttcattcttgcaatgccactctgaaggaggtaccactactcttgcccctgaacacctgatacctgaaaccaaatcctgggtttacagtcacccccaacccctccaaagcaataggatattgagctctatttggaaaatggattgggaaaggtgactgctgtttcttggttttctgctagaggctagaaacttggaacccacgtgcccagttcttccaatacctagtattcctgccagggcacagagcaaggcctcattttcagtcattaggcactaaaagaacccagagcttcctcgtctgctcttcccagtgactrttgggaaattcctatcagccatgccttaccgaatgttgcttcccagcatctacag

SEQ ID NO: 484816 - DNA, 365 bp, Homo sapiens
ctgtgaagtgggaacaatatctgtcttgtagggttgtgggtaatagtaataatgtttgtaaaacaccaattacagtgcctgacacagtaggtgtccactcaataaatggtaatggagagggaaagaaagggaaagsagaatctaggatcaggaatatcacatcccgtcatgatgtttgcaaaggggaaagtcaggcatgatgagtagacagaagtaaacccagtttgttgtcatgggtatgtgaaggtgtggcgagagtgtcatttaaaatagggagcaaggccaggcaaaggccacaatcaggcagccgaatcaggcagtgatgaatcaggcagtgatgtgagggtccggcacaaccgaggcag

SEQ ID NO: 484817 - DNA, 365 bp, Homo sapiens
ctgtgaagtgggaacaatatctgtcttgtagggttgtgggtaatagtaataatgtttgtaaaacaccaattacagtgcctgacacagtaggtgtccactcaataaatggtaatggagagggaaagaaagggaaagcagaatctaggatcaggaatatcacatccygtcatgatgtttgcaaaggggaaagtcaggcatgatgagtagacagaagtaaacccagtttgttgtcatgggtatgtgaaggtgtggcgagagtgtcatttaaaatagggagcaaggccaggcaaaggccacaatcaggcagccgaatcaggcagtgatgaatcaggcagtgatgtgagggtccggcacaaccgaggcag

SEQ ID NO: 484818 - DNA, 587 bp, Homo sapiens
ctgtgaagtgggaacaatatctgtcttgtagggttgtgggtaatagtaataatgtttgtaaaacaccaattacagtgcctgacacagtaggtgtccactcaataaatggtaatggagagggaaagaaagggaaagcagaatctaggatcaggaatatcacatcccgtcatgatgtttgcaaaggggaaagtcaggcatgatgagtagacagaagtaaacccagtttgttgtcatgggtatgtgaaggtgtggcgagagtgtcatttaaaatagggagcaaggccaggcaaaggccacaatcaggcagccgaatcaggcagtgatgaatcaggcagtgatgtgagggtccggcacaaccgaggcagcagcccgggaagggagggcatttggatcacactccctggagggagcttgggtggagagtrccccagtgtcagccttcacacattttatatcttttttttttttcttgaagagtatgtttacaacatggatagaaatctaaggctggcatgtgtttaaaacaattagttaaaacccagtttcccaagagctaataactggccaattaggatggtatgaagatt

SEQ ID NO: 484819 - DNA, 587 bp, Homo sapiens
ctgtgaagtgggaacaatatctgtcttgtagggttgtgggtaatagtaataatgtttgtaaaacaccaattacagtgcctgacacagtaggtgtccactcaataaatggtaatggagagggaaagaaagggaaagcagaatctaggatcaggaatatcacatcccgtcatgatgtttgcaaaggggaaagtcaggcatgatgagtagacagaagtaaacccagtttgttgtcatgggtatgtgaaggtgtggcgagagtgtcatttaaaatagggagcaaggccaggcaaaggccacaatcaggcagccgaatcaggcagtgatgaatcaggcagtgatgtgagggtccggcacaaccgaggcagcagcccgggaagggagggcatttggatcacactccctggagggagcttgggtggagagtgccccagtgtcagccttcacacattttatatcttttttttttttcttgaagagtatgtttacaacmtggatagaaatctaaggctggcatgtgtttaaaacaattagttaaaacccagtttcccaagagctaataactggccaattaggatggtatgaagatt

SEQ ID NO: 484820 - DNA, 651 bp, Homo sapiens
agcctgggatattggcatcctgatcttaacattattcattacttgctttaagacatgggatgaatcctgttgcagtccattgccatctgtgtcatgtacagccttctgcctccttcctagtggttctgaagccaaatgtgtgcataaggcattgaggataagtgaaaagaagttatttttgttgatgccattacattgaccaaggactagcctccgacttctttttatagtatagtgcaagatttaaacttcagactgtaggaatccacgtgaggcatctgccacactggggaaaccttgacttcaggccaaaaagacgttctgagctcatttgatggcatctargaacggtaggctcactggaatgtaattttcctcccccatactcttctggctctctcaacccaggagcagatggatgaatgaagaacagggcattgtcctcatgcatagctggagtgttgtaagtgccgtgtacatgtatggaaggtctgtgacaccatgtgcacccaagtcggacatgagggaacttggctgtttcagtaagaaatgtcattaagggcagttatttttctcttttgtgtgaacttgaagtgggtgttgtgaaacacccatttttcctttccaggccttgtggagtctctgggtgaa

SEQ ID NO: 484821 - DNA, 651 bp, Homo sapiens
agcctgggatattggcatcctgatcttaacattattcattacttgctttaagacatgggatgaatcctgttgcagtccattgccatctgtgtcatgtacagccttctgcctccttcctagtggttctgaagccaaatgtgtgcataaggcattgaggataagtgaaaagaagttatttttgttgatgccattacattgaccaaggactagcctccgacttctttttatagtatagtgcaagatttaaacttcagactgtaggaatccacgtgaggcatctgccacactggggaaaccttgacttcaggccaaaaagacgttctgagctcatttgatggcatctaggaacggtaggctcactggaatrtaattttcctcccccatactcttctggctctctcaacccaggagcagatggatgaatgaagaacagggcattgtcctcatgcatagctggagtgttgtaagtgccgtgtacatgtatggaaggtctgtgacaccatgtgcacccaagtcggacatgagggaacttggctgtttcagtaagaaatgtcattaagggcagttatttttctcttttgtgtgaacttgaagtgggtgttgtgaaacacccatttttcctttccaggccttgtggagtctctgggtgaa

SEQ ID NO: 484822 - DNA, 251 bp, Homo sapiens
ccccatactcttctggctctctcaacccaggagcagatggatgaatgaagaacagggcattgtcctcatgcatagctggagtgttgtaagtgccgtgtacatgtatggaaggtctktgacaccatgtgcacccaagtcggacatgagggaacttggctgtttcagtaagaaatgtcattaagggcagttatttttctcttttgtgtgaacttgaagtgggtgttgtgaaacacccatttttcctttccagg

SEQ ID NO: 484823 - DNA, 251 bp, Homo sapiens
ccccatactcttctggctctctcaacccaggagcagatggatgaatgaagaacagggcattgtcctcatgcatagctggagtgttgtaagtgccgtgtacatgtatggaaggtctgtgacaccatgtgcacccaagtcggacatgagggaacttggctgtttcagtaagaaatgtcattaaggrcagttatttttctcttttgtgtgaacttgaagtgggtgttgtgaaacacccatttttcctttccagg

SEQ ID NO: 484824 - DNA, 590 bp, Homo sapiens
cctgttggcactgaacccagagcccaacccaactgatgttctcactgagcttcttgtcagatgccaggaaagaggaggcacatcatatgccttttcttccccaatagtagctgcttccagtgtgatcatgatgagaggaaaaggctgtggggagagttaatttgatgcttgcttgtgcaatgaaatggcaatcaggcagatggccttactctatgcatagattcttctttgaggtttcttcttaggacccggacctcagagctgcttaagcaatagagargatgatggatggccaaggaattgggatctctgggtcttttgggagggatggggaatattatcacagagttacagaatgccattgctgaagagggccttagggattacatttagtccaaggattttcagacttttctctaacagaagaattctttcttcaaaccaaaccttacatagaatccctaaatattaaatagaaaaaagagcagggttggcttggttgaaggaggaatagaagactccaagtcctagtagttgggttgtccttttactcacttctcaagggcagcttcagtgccagctctggtcta

SEQ ID NO: 484825 - DNA, 219 bp, Homo sapiens
gtgtctcattggttttgattgggtaaagtgcttatgcctgggtccatgcaaagcacgtggcctgagttgtggagtgggaggttcccctcrccgagggcagttagaccaaagctaccaaaaaaaggaggagtggacgccggggaccaaaaaacagcaacatgtgtgctcctcaggaatgatgcttcccttaagattagcatccagactctagaaatcccc

SEQ ID NO: 484826 - DNA, 415 bp, Homo sapiens
gctgagtccactcacgtggagtctcatgcccatgaaagtgccattcaccactggtcaggctcatgaggccgcatgagagggggggtcactggggaggagatatcggggtaacagagatggtggttgaatttttgtataataggcagtgcaagtgtttaccgtttgggaggggaaaggtttgttattattagcaatgctacacttgaatattatactaaaatccactttctctataacctgggagttgctcttttgttctttcttttcccatcttaattaaaatgagatgcagactctcacggtccacagtcgattaagaaatcttgcacggccatcaggttatgtcttggagagcagagtttcagtaccatcagcctggcaaggagcygggcctgctcctcagagctcccgggac

SEQ ID NO: 484827 - DNA, 539 bp, Homo sapiens
ctcctacttcctgagtcctgggcacccagctcccctatcccagccatccccatctctgcatctgcacccaggaacattcctgggactctgggtggagagtggcttgggcaggtatttggagaatggggtttaagggctgctccccaacttaccgaccacctccccagccatgaagacaaagcamacggcacaggcagcatatagctgcctccgtgcatgcagcctctcaggggtaaggcccggcggcggaagggggtccctgtggcagtggtggaagggcatctccacaggtttggactcctcagggaggggctctgagggctctgtgaagagactgaggcaagcaacatggttcaacctgggcctggcccacaggctggcctgctcactccacgtccttagtccccagtgctggcctcatcagaccatctccttccccaggcctggtcgtatctgggagctgcatcggcagagggccacatgagagaccggggctaaatgaacaggtcagagcccagcctcccttttccttccataca

SEQ ID NO: 484828 - DNA, 458 bp, Homo sapiens
cttggcagcactcttccctttctgcagggctgcagcagctccctctcatccctggctggagggatagggaaccgggtgcgggtrggagcaaacctgcagttcccccgacgtcctcacaccttctacccgacttggacctttgggcaacttaagaattcttcagaccctttctcagagtcgtcctgctgtttgggacagtacatttgacgttttccctttattttctgagcacctaccagtagcttgcttagctgcatggtgaggggatgggataacaaaggtatctaggattctatccttggccctgggaggtcatgcctcgcagtgttctgggaagacccccaccactttgggagtttcagggagagacgaggcaggactgggggtgcccagagctgctccatggccagtagccgaggtgagccacgggtttccatccccaaccccagctctcagcc

SEQ ID NO: 484829 - DNA, 562 bp, Homo sapiens
tcccacccactcagggtcacagcctactaattcctcaaacttctctccctggactaggagaaaggctaaagaatgtcagtaaataaaagagctttcatccaatcccaaggcatatrttatgcccaaaaaagacaaattgtgtctggggtagagaaaaaaggcctaaagaaattgcttcttggccttttgcctaagatcaagtggagaagacttgtaggagaaaaagaagaccagtgctcacaagtggggcaagcctggcttggagagtaggagtcctggacaactgtggagctgggtcagaggcttcccggagccttgtgattatgactttgtcagtgctctaaaatttccctggagattgattccctgggtgcccaaaataggtccctggcattcaggtcctttctgcccagctcaccttctcccaatttcctaacaaatttgagtccttggagtggctccagggatgtgttcacggaccagaatcccacatttcctcgggggcatgctcataggtaggtccaggccttggcacaacagtcatttctagcctcttgagctt

SEQ ID NO: 484830 - DNA, 509 bp, Homo sapiens
gtcagcctcaggcaggttccggcaaatgaagggggctcacatgtagggccgagtgtgtggggcagttgtgtgggcactaagagggtggtcccaagtgtccagctcaggaagatmcttgagaaagctggttcctccctcccccaacagatgggagccaggctgtcaccatggggcacagggccaggtggagtattaccaatggtggggttttgcaggagcggctgcaggagctggggcagcacttgctgttgccaagacagtcattgtaggtgaggcaggttttgacgcagggcacctcctcggaggagctggcctcggggcacacggcctgctctgcacacaggatgggcaggtgagtgggggtccaggccccatccccaggctcctcaagggaaagcaaggtaggggcaatgaggaacgcagccgttaacagcttaacatgctgtttcttagaaggccaaaaaaatctaccaggaatgtgacagccttgacaaaagcatgggaagtca

SEQ ID NO: 484831 - DNA, 531 bp, Homo sapiens
cagccctgcttttctgccatccctggactccccaccacccacccccaggagtgagtctcctctgtttctctcttccccattcctgtcgccaaaccaccaggacctgtggtgccttgggttccaccagaagcagagatcaggcaggaggactctcctgggagtgtcccctagagaggttacctggcgaaatgaatgctggggccacagcaagggtcactttcagggcaagcagggccagggccaggctgaagagacagtgtatggtggcgggtggcaggcaggcggcaggtggtggcctgaggacatgggttacatttaaaggacctgggtgggaggagggcctcggggcggggggcagggggcaggctggcatggccccaactggactgaggcacttcctccttgaatgcctcsagaggccaggcccagtgctggggaaatggctgagaggtctggggcggctgctataatcagggtcatgtttcaaaaaaaaaagtccttagttaggttgaccagtttttccccattttg

SEQ ID NO: 484832 - DNA, 504 bp, Homo sapiens
gggtcaggattttctccaaaactctgagtaaagacagggatggaggaggccatgctattccacaggtgtgtcctggtcttgtggtgactgccacaggccctgggtacatgacctgccttcagcccttgcaatcagggtcacggcctctgatcacgtgaaggtctcatgcttgtcatcagggtcacaaccctggtgcaggtcctcagcccttgtcatcagagtcaggactcctgggtgaatgtcctgtccttgtcattggggtcatgacccttcggtgaaggtctcactctcattataggggtcccgaccctgggtgcaggtcctgccctcagccctctgccctcatcatggtctgtctgctctgacacccttcctacatctcctgtctcaccaagtcatgtccctgcatacagtkgctacacctcctgcctctagctcctgcttagaaagttctctcctcccatctttcaaagctctactgccacctcctactccagggctgca

SEQ ID NO: 484833 - DNA, 646 bp, Homo sapiens
cagactgggggcagagaggtcagggtcatttcagatttgtctgcacagggtgcagaatgcatggtcttaatggtcatggattatattgccaagaggtgctgagggaagagagagactgccaagggccagtcttggagaaagcctgtgttcttagggcaagggagggagagaaagacactgagaggagtgactgaagaataccaggaaggagaaagtatggggggtggggtggagggagtagggagatgggggaggggaggtaagggggccgcaagtgccaaatgctgccaaagttggagaaaatgaggtctggcagtgttcacaggggttgggaaccaggagcgtactttggagctttcagtggcgccttttcaggaaatatcaagactagagggaaaggttaagatgaaaggtggygagtagcgggaaagatggttggagggtagatgctccaagagttggtttgtaaggcaaacgtggcagaattggctttggaaacagaaccccatataccatccctggagtggagggagggtgaagatgaggcgtgtaaagatgaaacgggggagcagagagcacatcaacttttacccagtacaggaggccacggggccatccacagaaagtgatagggacaggaatgcag

SEQ ID NO: 484834 - DNA, 513 bp, Homo sapiens
tcagaggcaccccttcctggaatctccttcatcacccttctttgaagaccggtcctctgtgtccctggagaggggtcaccgaggcgttgctgctgcctcagggacagaggcgtagtctcatcgacaatgataccgttatttcagtgtctgtccagcagggggagccaggtgcccgggaatggcttcccttggctccttctcaacccccaccctcctgaagtctagccccagagcaagcagaaccagatcccaaacctcaccaggttctgtgctcaggcccttgcctggacacgtggactccgggcagaagcattacttccagggagagtgaaggcccagcggccatgtgttcccctgatctggtagaaacaccaggatgttatttcttcctcttagaagaggccacttgagtgtcaagaaaatgttctcttacaactrtttaagaataagaggaatcacagaataaatatcatgataatggtgaatcagggcttgatcaggagagagactaca

SEQ ID NO: 484835 - DNA, 602 bp, Homo sapiens
aggagctggatgtggagagcagctaggcgaaccttcagagtccaaggcaggggcagctttagggtgaaggtgcacaggccgccttagtcctcgtgtgactccacgtggtccctggggcttgcaccccttggtcacttatgccagggctgtcttttcacctgcaggcaggtgcagttgagcagggtggcagagggaggccttgggaaagtcgctttcttttgggcctccatcgtcccatctctaaactgagggaggtggtgaaggaggcatgatgtttttcaggcccttcccaggatcaatgccgacctgtactccagaatctgttgcagagcccaggcttgacatggagcttggaagtgcccactgggagagaaggaaaggaaggtggggatcggggaccagggctaagtggggccactccagccaggagccctcagggcaaggaggtgagccttggatgcagccctgcttggcagaccaagggtgggaatyggagtgagggtgtcagtgtgaggcaatggtgacatgccacctggagacagctctgtgggcaggtggcctggctttgaaccttgactcccctgccttgtctaagtgaggaa

SEQ ID NO: 484836 - DNA, 474 bp, Homo sapiens
ctggagctgggtggacattgtcatgtgtctttcttacagcaccagtcatggctgggtctgtcctcagtggtcagaggacttagaggaattgggttccaatggtttatatcaggtgtaattgtggacaacacctcatagtgaagggaggkccccttgttctagaagcttcccaagcttttcatctccttacctccttggaaattgctcatggcctcacagtcctctgccccaccccactccacctctggctttgcagtcttgtgccaccccctggtggctgctgccagaccctaaatgtgctggcctcatgcttttgcatgttagcaccccagcccctgtcttctgtagagacactgaccatggccctgccccaggaagcctccccggccctggccattctagtggcccagcagatgggggctccttgaggctgtcacatctgcagccccactctgtgggggaattgcttgctga

SEQ ID NO: 484837 - DNA, 474 bp, Homo sapiens
ctggagctgggtggacattgtcatgtgtctttcttacagcaccagtcatggctgggtctgtcctcagtggtcagaggacttagaggaattgggttccaatggtttatatcaggtgtaattgtggacaacacctcatagtgaagggagggccccttgttctagaagcttcccaagcttttcatctccttacctccttggaaattgctcatggcctcacagtcctctgccccaccccactccacctctggctttgcagtcttgtgccaccccctggtggctgctgccagaccctaaatgtgctggcctcatgcttttgcatgttagcaccccagcccctgtcttctgtagagacactgaccatggccctgccccaggaagcctccccggccctggccattctagtggcccagcagatgggggctycttgaggctgtcacatctgcagccccactctgtgggggaattgcttgctga

SEQ ID NO: 484838 - DNA, 502 bp, Homo sapiens
ccccactctgtgggggaattgcttgctgaaccaagtggaatggaattctgagtctgctgggaaggggtgctgggattcaggaaggggttttgcaggctcctcctggtcctcagtgagcctggacacaggcctggaatggacccactggtgggggtggagtcagggaagaggaggtcatagcttcgtagcttctggtcttgctcctctctgtaaccygctaaagccttggtaaagagactaaatagagatgtccagccgtggattgggaggacaggagtggaggcaacccgatgggcatttaggagccagtgagtgagtgggcaagagccactgactgagtgcccttggtgaagtcagacctgatgctggaaaaggggagctgggaacagccaggttgacattgcggagccctcccacgacccggccggcagcaccagctcccaagagagtggcaagagtagctgagaagcagtgaggtgtccagagccctcctccaccccag

SEQ ID NO: 484839 - DNA, 523 bp, Homo sapiens
gggtccttgaggactctgacttccatctgaagagtggttgtgcggaattaagaaggaaatttcctgaccctstctggcaggtttctgaaggcctgagtacagcgtgctctaaaacaggcttcaagtccacgccgagactcagccccgaggatgtggccagtgatgctcactcagggtgctcctgtccttactcactgggggaggcatttattgatgaaatagatttgaatttttcaactgatgggattttgttcacttttaagaccccagtgggttggaaaggctttaagagcccatggaatttcttctgatatatataaagtgaaaaagtagaatataaaacaatgtagaggaactgcttccgaaatgacatgagaacttcatggaccaaacaaccataactagtgcaaatcataaaaaaaccccagacaaccgtttaaagtctctggaaattgtcttaaggctacacagcaaatgaaacatttattaaagaaaatgtgtcaaatctgggtaagaacaggag

SEQ ID NO: 484840 - DNA, 523 bp, Homo sapiens
gggtccttgaggactctgacttccatctgaagagtggttgtgcggaattaagaaggaaatttcctgaccctctctggcaggtttctgaaggcctgagtacagcgtgctctaaaacaggcttcaagtccacgccgagactcagccccgaggatgtggccagtgatgctcactcagggtgctcctgtccttactcactgggggaggcatttattgatgaaatagatttgaatttttcaactgatgggattttgttcacttttaagamcccagtgggttggaaaggctttaagagcccatggaatttcttctgatatatataaagtgaaaaagtagaatataaaacaatgtagaggaactgcttccgaaatgacatgagaacttcatggaccaaacaaccataactagtgcaaatcataaaaaaaccccagacaaccgtttaaagtctctggaaattgtcttaaggctacacagcaaatgaaacatttattaaagaaaatgtgtcaaatctgggtaagaacaggag

SEQ ID NO: 484841 - DNA, 523 bp, Homo sapiens
gggtccttgaggactctgacttccatctgaagagtggttgtgcggaattaagaaggaaatttcctgaccctctctggcaggtttctgaaggcctgagtacagcgtgctctaaaacaggcttcaagtccacgccgagactcagccccgaggatgtggccagtgatgctcactcagggtgctcctgtccttactcactgggggaggcatttattgatgaaatagatttgaatttttcaactgatgggattttgttcacttttaagaccccagtgggttggaaaggctttaagagcccatggaatttcttctgatatatataaagtgaaaaagtagaatataaarcaatgtagaggaactgcttccgaaatgacatgagaacttcatggaccaaacaaccataactagtgcaaatcataaaaaaaccccagacaaccgtttaaagtctctggaaattgtcttaaggctacacagcaaatgaaacatttattaaagaaaatgtgtcaaatctgggtaagaacaggag

SEQ ID NO: 484842 - DNA, 499 bp, Homo sapiens
cttttcttgctgggcttctagaatgttccattcctccatatgcagactggaaaatcccccttcctacgctgagaaaactgatcaactcagaggacagagctgtggatgctgccctctggggctcccctgggaggttgtggggcaggatgtgattgtcccatccatggcacctcagtgcccaggccccgccctctcctggggagcttccagccagtgttctaatgttctccccttaaatattcacattcagccaagaatcggctgacttcaaggagagcctccaaactgaacaacagagactgaagcagacaaagcagacagcagtagcagcactagaagggctattctaggcggggcaggagcagacgtcacatccaaatgagcaggatgcctgtgaacaggcgttcagaggacaagaaagagatcataawaatgaaatgccagggagagcaaaaacatccagttgaagggttgaatgtgaacgctctcccttttgtgg

SEQ ID NO: 484843 - DNA, 609 bp, Homo sapiens
tgctccctggacatggccaccagatgtcttgggggggcacctgaaatcctctgtcctgaggggaacacgtgtgtctcctcactacctgtcccctggtcacctcagtttacggcatccccatcctcaccacggggcaccccagcctcaagtttacacatgggtggctgtccatggtcctgccttgcactcccctttctgtctgatttgcaactctccccattgttgaagcctctgtactgtgtggccttctccatgcctgtgggcaggggtgacaaggagcagagccacctcccaccttgccatttcatggcctagggtcctagaggactccctgctttcccagctagggggaccgtgggctgggaggctgggartctgcatggggttgaggcaggtggatggaggaggcaggaagggtgtctgaggaggaaggaaagtgtctgggaaaagctaaatgaggaaaattgagctggggaaagaggccaggagggtagtggaggcctgggcatcagtgaagagtcacctgatcctcagggcggggccaagagcagctcctgtcacagcatcctgtaggccaggcctcactcattactggggctgggctcctca

SEQ ID NO: 484844 - DNA, 418 bp, Homo sapiens
ataataactgagaaatttccagaatgtatgaaagatgccttcccatagactcaagagaccagtaaattccaagtagaagaactgaaaatggagcccagcttgaggaacccatggctcagaaggtggggtccagtcccacccgccccacagcccggcatgctgagtctgagacgcatgtggagctcccggcagtgatgctagggtacrgtctgcagctcagagggtgacacatttggggtagctggcattcagagggctactgagatgtggcaggggtgaggtcccctgtggaggtacagatgagagtgaggtgggcatgggatcaagccctgtagggttctggcatttagaggtagaagagaggaggacagggtggcaggtggaggaggcccaggggggatggatccctggaacccag

SEQ ID NO: 484845 - DNA, 569 bp, Homo sapiens
tcacttaaaaaatgaaacacgggtataaatcttacaaaacatgaataagatttgtatgctgaaaactatagaacactgatgaaagaaatcaaagatctgaataagtggagagacacactgaattcatggattggaagactcaacctarttagtatgttacttgtccctaagttgatataaatggaccaactccttgaaaagcacaaactactactacaagtcatccaatatgaaataatttgaatagcttgtaactattaaaagtgaattctacaattcctatcaaaatttcagcaagaattttttgtagatataaacaagactattcttaaagtgcagtggcacgatcttaaatttcaagctattcttgaaatttaaatggagaggcaaaataagtagaatagctaataataattttgaaaaagaagaaaatgagaagagtcagcctgtctgatttcaagatagatcatactgctatcacaatcaagactgtggtatctgcagagggactgacacagagatcaggggagcaaaatgaactagaaacagatccacacatatatgcccag

SEQ ID NO: 484846 - DNA, 569 bp, Homo sapiens
tcacttaaaaaatgaaacacgggtataaatcttacaaaacatgaataagatttgtatgctgaaaactatagaacactgatgaaagaaatcaaagatctgaataagtggagagacacactgaattcatggattggaagactcaacctaattagtatgttacttgtccctaagttgatataaatggaccaactccttgaaaagcacaaactactactacaagtcatccaatatgaaataatttgaatagcttgtaactattaaaagtgaattctacaattcctatcaaaatttcagcaagaattttttgtagatataaacaagactattcttaaagtgcagtggcacgatcttaaatttcaagctattcttgaaatttwaatggagaggcaaaataagtagaatagctaataataattttgaaaaagaagaaaatgagaagagtcagcctgtctgatttcaagatagatcatactgctatcacaatcaagactgtggtatctgcagagggactgacacagagatcaggggagcaaaatgaactagaaacagatccacacatatatgcccag

SEQ ID NO: 484847 - DNA, 569 bp, Homo sapiens
tcacttaaaaaatgaaacacgggtataaatcttacaaaacatgaataagatttgtatgctgaaaactatagaacactgatgaaagaaatcaaagatctgaataagtggagagacacactgaattcatggattggaagactcaacctaattagtatgttacttgtccctaagttgatataaatggaccaactccttgaaaagcacaaactactactacaagtcatccaatatgaaataatttgaatagcttgtaactattaaaagtgaattctacaattcctatcaaaatttcagcaagaattttttgtagatataaacaagactattcttaaagtgcagtggcacgatcttaaatttcaagctattcttgaaatttaaatggagaggcaaaataagtagaatagctaawaataattttgaaaaagaagaaaatgagaagagtcagcctgtctgatttcaagatagatcatactgctatcacaatcaagactgtggtatctgcagagggactgacacagagatcaggggagcaaaatgaactagaaacagatccacacatatatgcccag

SEQ ID NO: 484848 - DNA, 569 bp, Homo sapiens
tcacttaaaaaatgaaacacgggtataaatcttacaaaacatgaataagatttgtatgctgaaaactatagaacactgatgaaagaaatcaaagatctgaataagtggagagacacactgaattcatggattggaagactcaacctaattagtatgttacttgtccctaagttgatataaatggaccaactccttgaaaagcacaaactactactacaagtcatccaatatgaaataatttgaatagcttgtaactattaaaagtgaattctacaattcctatcaaaatttcagcaagaattttttgtagatataaacaagactattcttaaagtgcagtggcacgatcttaaatttcaagctattcttgaaatttaaatggagaggcaaaataagtagaatagctaataataattttgaaaaagaagaaaatgagaagagtcagcctgyctgatttcaagatagatcatactgctatcacaatcaagactgtggtatctgcagagggactgacacagagatcaggggagcaaaatgaactagaaacagatccacacatatatgcccag

SEQ ID NO: 484849 - DNA, 503 bp, Homo sapiens
ggcttcatgtattatctgactcccatatgttcctactctgcagaggacctttttgatagtttgggtccctaagtatgtgcattgtctcagaccctctatttcaaaaacctctgaagacttgcagttcctatggtacttttacccaggtgaatgaagtccctttgggaagagctggggaaatcactgtggtgtgtacttgccttggtgttgcaggtcgactcccacgcaggcttggtctctccttcagtcagtgtttctgagtctgagagctgctccagatctagaaacggagtcagggattgatactttgcattgtagaagctcaccttagccttctgcttattccgttttgattttcttgtttatatatagtaagcagcacccttcttggcttcstatctgtcctgcccatggaaactccagcattctgtgagccgtctccatagatccctgcatggatcccaggctcccctggctactattttgactttgctgcctattac

SEQ ID NO: 484850 - DNA, 472 bp, Homo sapiens
gtgcagcctcttgggcttcaagctgctcatctgtgaatgggccctacccygcccacctcttaagctgaataagcaggcttggttgcctttttgggttcacccacggggtgagatgctgggaaggttagaggggaggctggagcagctaggatccacagtaaactccctccctgggctcctgggagaggcccggggccacgggcagggcatgtgtctatacctgctggctcagttccacctgatcccctctctagcgtgggttggggattctccctgtgcagtgaccacctgcccaagaggtactcacgtccactatcaggaagcctgcagccactatgtgtcgccgggccagaacaaagcgacccagcaagtccttgcttcggctgttgaagttggggaactcccaccgcaagaacgctagcctggaaggaagaagaggtggctgacatgcttccactctcccagcccctcg

SEQ ID NO: 484851 - DNA, 606 bp, Homo sapiens
atgtggagcagcttctggaaggtgttctgatccttctgagacttgccccctaggagacaaggagaaagaagagggaggtgggcctacggccagagatggggagaccctgatgagagggcagtgcacccctacacccagtcccagcccagttttctgggtcaggaggcagcagagttacggtctgctggccacctacagggagaggatggagagcgagggggagggagagccctggcctccatctgccccaaattctcacctggcactaggcagacaagaccaggcagtttcccagttccagtagtactaggggcagggggctcacctagaaattggatgtgaaattcagggtggaggacggcttgcagctctgcttcccgtgcctgctgcagcacacacagggcccacaccaggtccacctgcagggctggctccaggcctggcagctctgaccccagcttctcatgtacctgggcaaggatagagtgtggtggagaaagcaggctctccttaggggctgcaaayagccatgggtgagacacaatccatgatgtggtcttggcctggttgggatgaggccagaggaggctactaggtaacaagagg

SEQ ID NO: 484852 - DNA, 535 bp, Homo sapiens
cggccaagctggaagctcgcaccaaccccagcccacacactacaggcaggaggcgagcagcctgcttcgcccacgccccaagaacgcgcgccgccattggcgggcgacgggaggaagcgcggcggtgattggcgagacggctcgcgcgggttccattagccgccgcgctgagcgagaggaggtagaaacgcastttaaaaggcgctggggcgggagccgaggctcccggcccgcttctgttttcgttttctccacccttccccttagacgccgataagggacaggtcgtactgcttttgtgcgccgtttcctctccctcccccagcttgagaagcagctttcgtctctggggtcgatcgcctacgaacgcgccgaattccacgccagtgtgaggacccttggctgggcctttcttcctcccgggacactgaagctccaagagtagccgcagccttgccttccccaaacgctagccctgaaggggaagaaaagaagcgaggcttgtctgcaggcactcatattccttgatttgatt

SEQ ID NO: 484853 - DNA, 603 bp, Homo sapiens
ggatttttgctgggcaggttgtgttgttgctgagatttctctctttttttttttttyccacagagaaataggaacacacaatgctcctaacacaacactaagaatctgtctcaacaagcccctccatgagtttacagtaaatattgcaaaaaacccaccaagtttttaattatgcatggccttccggcctgcagggagtgaccggagggagctggctcctctggagacttccctgagagcagtgaagaggacgggacacttgtaggccctcaaagagcctggaatctaagccatttctcgattcaggacagacagagagtacttattaataacaaaatatttattttgagttattactcaataataaaaattaactgggtggaagatattttgaattgtcaaattgcagtttcctttgctctgcctcttggtgcagatggtggccttgctcttcaaccacgtggtcatctaagagatggtcagtcatggactttgtgacacaatggcagcatggtcctccctacagcatcctgacagccctatgctgggaggtgtgctcaccagccctggcctttctactcgatgaagggcccagtgacttca

SEQ ID NO: 484854 - DNA, 603 bp, Homo sapiens
ggatttttgctgggcaggttgtgttgttgctgagatttctctcttttttttttttttccacagagaaataggaacacacaatgctcctaacacaacactaagaatctgtctcaacaagcccctccatgagtttacagtaaatattgcaaaaaacccaccaagtttttaattatgcatggccttccggcctgcagggagtgaccggagggagctggctcctctggagacttccctgagagcagtgaagaggacgggacacttgtaggccctcaaagagcctggaatctaagccatttctcgattcaggacwgacagagagtacttattaataacaaaatatttattttgagttattactcaataataaaaattaactgggtggaagatattttgaattgtcaaattgcagtttcctttgctctgcctcttggtgcagatggtggccttgctcttcaaccacgtggtcatctaagagatggtcagtcatggactttgtgacacaatggcagcatggtcctccctacagcatcctgacagccctatgctgggaggtgtgctcaccagccctggcctttctactcgatgaagggcccagtgacttca

SEQ ID NO: 484855 - DNA, 617 bp, Homo sapiens
caaaagtggtttcaggtgtgttagctctctgacaccttgcagcagccctgagaggcaggtctggccacctctgttttacagcagaagctatgcaggtggggtaatggagagagcattgtgctgtaagctcagagtttgtcctgttgattgtgtcactgatttatggcgtgaccttggcccgaccttgacctgggtcaaagtgctccccccartttctccattgccccatttgcaagacataaggaagaatcccttgtccttctaatctgatgggcaggaaaaaaaaaatgagagtgtggagggtactgcgcagggtgtctgggaattataaggtggtatttgtcagacctgccttgggaaaccttgaaaaattgaatggaaaccactgggctcattcatctccttttaacagccccatgtcatccagcctggtcttttccattcctgctctgtccaatcctgacaacataatttagttccagagaacttgaatagaacacagtggactgatatttccacatgctctggccttgattaatactgtcagggcagccgctggcgaggatgaggagccagggaggataatgctctgccgtgctccacctccagtgctcacc

SEQ ID NO: 484856 - DNA, 556 bp, Homo sapiens
ctgacaacctcctaagagctgggtgcaaaggcctaagtgagatgagggagaagttgagctggtctggaggcttctctctcaaaccccatggggaccaataaggggtctggaccaccctctgttgcacgtatgtggctctggggtgcagcagcctctcaatgtgtgctctaagctggagtctgagcttataaaggaccctagagtkcaggtaacgccagcagagctgccctcgtttgaaagatgagcaatctgaggctcggagaggcacaagcctggggaatgttggcctggtaggctctggctgggcttgaaatagtctgtaatctggttggaaaatcattcctgtatctactatttccccatgatggtggatccccactgatgctgtgcattcattcatggaggtctagttcagagccagacccaggctcagggctgggggctgggggatgatgcagaacccctttttgtgccaaaggagcttccactctcaagttgggggaggactcctaacaaaatctgggtggtgacagggttgtgccataggatggacaag

SEQ ID NO: 484857 - DNA, 622 bp, Homo sapiens
gccgtgcagggaatgtgaactgaaaaccagctggagcagaagatcctgggggctggccatgtcctgaccactttctgcaacctcagctccccattctgcagcctgctccctgtcctccggcccctctcattctcacctccatgcctttgctctgctacctatctggttttctgttgtctcctcactgcccagcagcgaactgggcaccaaacaggtgccaaacaggtgtttttaaaatgtgttggattccacgggaagccaggaagcacgggagccccagagatccatcaggaacactcgctgcagtgccaggcagggctccccacctatcagccaggcatacgagctgatctgacaaatgcagcctgggccctggrgtagcgtgtgaggagggctgctgacagctctgagccccgccagggctgaacacatgctattctacagccactgagtatttccgcatggctctggtatgagagtgacagccctggagttcagctattcccaggagggctgggagcagagaggatgccaacagggaacccccgggagaatcccttgccatagtctgtatagatctacagccttcctgcctttcttccacaaacagtgcctgcctgcc

SEQ ID NO: 484858 - DNA, 372 bp, Homo sapiens
ccttttatagtgccgctttcaccttggtgtgtgaacttgccgctgacttcccaaatgagttctgagaaccgatttcctgtgctttgtgctctgtgatggttcagsccactcatcacacctctcatggagatctctggcactttggtgggccctacttagaaaccatcttcctccttgatccttcactaacaagttctataatcttaacctcccagggtctcagttatactacctgcaagatgggcagaagaattccagcctagatccccacacaaatgtaggaaatccaaagacaataatatataagggcttggagaaaagaataaaactcagactgcagtgaggtgaataattcagtgcatcctccttatg

SEQ ID NO: 484859 - DNA, 533 bp, Homo sapiens
tccttatgcagctggagttaattccaaggaagcactttgcaaattctcaggtactatgcatgttctttctttctttctttttcttttcttctctctctctctctttctctttctttctttcttccttcctttctttctatttttgagatcacgtttctgtcttgtcacccatgctggagtgcaatggcacgatctcagctcactgccacctccgcctcccaggttcaagtaattctcctgtctcagcccctggagtagttgagattacaggtgcctgccaccatgcccagctaatttttgtatytttattagagacagggtttcaccttgttgaccaggctggtctcaaactcctgaccttaggtgatccgcccacctcagcctcccaaagtgctgggattacaggcatgagccaccacgcccggccacatgtgctttttaacatttttattatttcatttttggagtcattattatttttgttacaccacacaaattgcaataacattaagagattgagatgatgatggtat

SEQ ID NO: 484860 - DNA, 609 bp, Homo sapiens
ctggccaaggaggccagaggccgaggctccacagggctctgctcagcacccacgtgcatctgtcctgactccagtaagctgctcatgctgggtcccagggccaaaggttacagaygctttgtaagtttgcaagagaatctaccaaaaggaaagaagggctgtggggacaggaggcttagggcatcacaaaatcagaaaggatcccagatgaaccaaaacattcaggtcccaggaaggggaggcagcctcctccttctgtctctgaccacgcagcagaaacaaagcttttggacaaatgcatgagacggcataagggcaggatcaacttgtccatctctctgccaactaaagcaccacagggccatttgggaccttttgcctgccccttccagccacatgtatccttcacagtcactacatattcctcccagttcactgtctccctgcagaagcttgaaagtccacagagaacaagaagagctgggagccaagagtccttcacagcctcaatctgttctcctctggcctaaagaagctctctttcctagtccttttcttatcttcaaaatgaaattccagcagtttttgtctcagctaccccaaaatgcc

SEQ ID NO: 484861 - DNA, 501 bp, Homo sapiens
gggagcacttctgaatgagcaacccccatcagtgtccactcccacgtgtgtatttgtatgcccatcatgcaccatatggtgctcatattacatacgcaataaagtgcacacagatgtaatcattttaaagagtgataaaygtaaatagaaatagatgtcttaacattttcttcccctattccaaaggatagttttgtgcatcccactttggaggctgctggtctagaattcactgttcccgtttctaatttctgatcattagaatttggcaaccaccccctgcccctgcaggctgaccgagcgtgtctgaagagttgctgtgctctgtggttcgaggaaaagccgtttcctttctgttagcaagcccctagagaacacaggctgaccctccaagacttgcccagcacaagctctgtaagtaaggatggctcagccaaagcttcttgactgtgggggtcttttctccaaaagagaataagaagcatctcagagcccatagag

SEQ ID NO: 484862 - DNA, 602 bp, Homo sapiens
gtgtcgattcttatgccatcctctttgaaaagaactcagagtgcttttgaaaacccacattttgcaattgytgctttatagagtgtcagtgtttgtctaagttaattctcaggtagtgacgatcaaagatgtaacagttcatccagggtttacctagttaattccagcacagaaccagaggcccccaaatacaaacaagatttctggcctctctagcactaacctctccagatgccttccatgaggcatatgtgtgtgctagaggcatggaggagctaagtttgggtctctatactgttcccttctcatctgtttaacctccaaagtattgtaccatgttctctgtgtccagtggaaaatgatgtttttacattgcatcatctgtcattcttaaccccagagtggggctggagtgttggaacacttcagcacaggactctgtttaaagctgtgagaagctctttttgtttttctaagtcggctgaactagtaaaacagttttacaactgtgttttcaagttctgttcagaaaggcaagcttgaaaaaataggtgatgctgaagtgtcattttagtaaattttttttccctgttagaagagag

SEQ ID NO: 484863 - DNA, 602 bp, Homo sapiens
gtgtcgattcttatgccatcctctttgaaaagaactcagagtgcttttgaaaacccacattttgcaattgttgctttatagagtgtcartgtttgtctaagttaattctcaggtagtgacgatcaaagatgtaacagttcatccagggtttacctagttaattccagcacagaaccagaggcccccaaatacaaacaagatttctggcctctctagcactaacctctccagatgccttccatgaggcatatgtgtgtgctagaggcatggaggagctaagtttgggtctctatactgttcccttctcatctgtttaacctccaaagtattgtaccatgttctctgtgtccagtggaaaatgatgtttttacattgcatcatctgtcattcttaaccccagagtggggctggagtgttggaacacttcagcacaggactctgtttaaagctgtgagaagctctttttgtttttctaagtcggctgaactagtaaaacagttttacaactgtgttttcaagttctgttcagaaaggcaagcttgaaaaaataggtgatgctgaagtgtcattttagtaaattttttttccctgttagaagagag

SEQ ID NO: 484864 - DNA, 602 bp, Homo sapiens
gtgtcgattcttatgccatcctctttgaaaagaactcagagtgcttttgaaaacccacattttgcaattgttgctttatagagtgtcagtgtttgtctaagttaattctcaggtagtgacgatcaaagatgtaacagttcatccagggtttacctagttaattccagcacagaaccagaggcccccaaatacaaacaagatttctggcctctctagcactaacctctccagatgccttccatgaggcatatgtgtgtgctagaggcatggaggagctaagtttgggtctctrtactgttcccttctcatctgtttaacctccaaagtattgtaccatgttctctgtgtccagtggaaaatgatgtttttacattgcatcatctgtcattcttaaccccagagtggggctggagtgttggaacacttcagcacaggactctgtttaaagctgtgagaagctctttttgtttttctaagtcggctgaactagtaaaacagttttacaactgtgttttcaagttctgttcagaaaggcaagcttgaaaaaataggtgatgctgaagtgtcattttagtaaattttttttccctgttagaagagag

SEQ ID NO: 484865 - DNA, 649 bp, Homo sapiens
ttcctacacacaggtgccacaggggaagatggcacaggaaaggagtgtggacctggagaatcaagtaaggagcaggcagcaactgaggcagggccatatgcaactgtggccaggggtcacatatcatactgagcagagttcaccttgcccgagaaccacaaacccaggacaaatagaagggaaacaaaataaaggaaagggagccagcgtgtctcgttcagtgttgggtaagtagtatgaatttggtttgttttcctggctgtctttaragaacgctgggcggtgctagcctgtatttctgatgagaggaaggggatttaacctgtggttcaagtgcacttatttggatagctcagagtcttcatatggtgttgttgtgcaaagagcactggactagaagttgggagacctggattacaggaatgactggtgttagctgagtgccccactgtgtatcaggtattttgtgcacattttcagtaattctccaaacaaccctgtgaagtagagggcactgtgactctactttttcaaggtcaaggtcacagagttggtcaatgcaaggctgggattggaatgagacttcaaaggccaagtcttttccagtagaccccgctactgcactggcctatgctgagtctctccacat

SEQ ID NO: 484866 - DNA, 550 bp, Homo sapiens
tcctacacacaggtgccacaggggaagatggcacaggaaaggagtgtggacctggagaatcaagtaaggagcaggcagcaactgaggcagggccatatgcaactgtggccaggggtcacatatcatactgagcagagttcaccttgcccgagaaccacaaacccaggacaaatagaagggaaacaaaataaaggaaagggagccagcgtgtctcgttcagtgttgggtaagtagtatgaatttggtttgttttcctggctgtctttaaagaacgctgggcggtgctagcctgtatttctgatgagaggaaggggatttaacctgtggttcaagtgcacttatttggatagctcaragtcttcatatggtgttgttgtgcaaagagcactggactagaagttgggagacctggattacaggaatgactggtgttagctgagtgccccactgtgtatcaggtattttgtgcacattttcagtaattctccaaacaaccctgtgaagtagagggcactgtgactctactttttcaaggtcaaggtcacagagt

SEQ ID NO: 484867 - DNA, 557 bp, Homo sapiens
atagagtttcggtccccaagctcaattctgcctcacctccatgctccattatctgggtatccccaggccactcacttatcccacccatgtctattctcttacctgtaaaactagaattgcaggtattttagtggatacgttgttgggagatgactcataggttttgatcccatctccatctctgcattatcttggacaagcaacctgacttaggtgcttgcttgtctttaaaatgcagaaygttagtacctatcatgctagctcattgggaagttgggaatggcaaataagagaatggccttgcaggctcttgagggaacagaaaagagaaaagtgggttcctcagagacatatgctcttacctagggtgggggagctggtttatgaatggtgtaagtctcagagtctccagcttcttccctagggtcctcccggaccaaccagcctgtattggagtgtgttcagcctcttgggtagatgtaggaccgtgggtggtgacatgaaggagacaggttactgctcagcaggaggggggacctatgtacggagcctcctag

SEQ ID NO: 484868 - DNA, 652 bp, Homo sapiens
ttttcaagtttgtgcagaccccatgtgagcagccagccctgggttggcatggattggagaggcagagaaggcattcacttggctctgatttttcatcctgtggcctcagagcttcagaatacagagtccctacccctggtgtctccttcctctccatccaccatgacaagctgtgtccacattctctttttggctctttcctaaggtatcgggcacaggactatgtctgcccaagaataaaaattataccccttatatttccaaaaggagaggcatataatttatgactaaaactggggtactctgactgaaaatatctactgcttagccgtttctatgtcgattagagaaggtgtttatagctcagaactagaggagaagaaaccatttctttgtcactgagaaactccttgccagggtctctcagtgagaaacagsacatgtggagcccaagatagggcaaagccaagtctccttatcttatttagtgacatttttttaagagtaaaaaataatcacatgctttttgccaaatccagccctaaggcatggatccaacaaaacatcacattaattagataatctaatttccaaaaacagaccccagcgcagacacccactgtctagcagtgatgacaaagggatcagacag

SEQ ID NO: 484869 - DNA, 483 bp, Homo sapiens
cttatgctccaacctaagcctactgaattggaaactctgggctggggtrgtttcttattttaataagccttcctggtgactctgctgtacactaaagtttgagacccattcctctaaattctgccgtctctcctcactgcatcacttttcagtggggctgcccttggacactggcagatattttgggttaaagaagaaagttatttggtcaaaatgagtgtgggcagcattgtattggtctatgttgaacaggttccttgactgaaggctatctctgagcttttgctatgctgtatgcagtgagcattgaacatttgttagaagaggaatgatggcatttccagatttcactgcaaagagaagtgtcccttttgtatggagtttcccatcagactggtgttccgtgaatttacactgggaaacatggctctagtccacatatcaaggcattcagtgaatttttatgaaccgccttgtgagaac

SEQ ID NO: 484870 - DNA, 483 bp, Homo sapiens
cttatgctccaacctaagcctactgaattggaaactctgggctggggtggtttcttattttaataagccttcctggtgactctgmtgtacactaaagtttgagacccattcctctaaattctgccgtctctcctcactgcatcacttttcagtggggctgcccttggacactggcagatattttgggttaaagaagaaagttatttggtcaaaatgagtgtgggcagcattgtattggtctatgttgaacaggttccttgactgaaggctatctctgagcttttgctatgctgtatgcagtgagcattgaacatttgttagaagaggaatgatggcatttccagatttcactgcaaagagaagtgtcccttttgtatggagtttcccatcagactggtgttccgtgaatttacactgggaaacatggctctagtccacatatcaaggcattcagtgaatttttatgaaccgccttgtgagaac

SEQ ID NO: 484871 - DNA, 625 bp, Homo sapiens
taaggcatgtaaattcttatgctccaacctaagcctactgaattggaaactctgggctggggtggtttcttattttaataagccttcctggtgactctgctgyacactaaagtttgagacccattcctctaaattctgccgtctctcctcactgcatcacttttcagtggggctgcccttggacactggcagatattttgggttaaagaagaaagttatttggtcaaaatgagtgtgggcagcattgtattggtctatgttgaacaggttccttgactgaaggctatctctgagcttttgctatgctgtatgcagtgagcattgaacatttgttagaagaggaatgatggcatttccagatttcactgcaaagagaagtgtcccttttgtatggagtttcccatcagactggtgttccgtgaatttacactgggaaacatggctctagtccacatatcaaggcattcagtgaatttttatgaaccgccttgtgagaacaagacactgtgctggagagatacatctgtgaacaagacgtggcttccgtctctaggaaactgatagtctagtgcaggagctggcacaccacaggctgtgggccaagtctggcctgccatctgttttt

SEQ ID NO: 484872 - DNA, 512 bp, Homo sapiens
ggatcacgaggttaggagattgagactatcctggccaacatggtgaaaccccatctctaaaatataaaaaattagccgggtgtggtggtgcacacctgtagtcccagctactcgggaggttgaggcacgggaatcacttggacccgggaggcagaggttgcagtgagccaagatcgtgccactgcactccagcctggcgacagagcaagactctatctytgaaaaaaaaaaaggctcacagcaaagggtgtggaggttgggatgctcagcttcggggcaggagaagcatacagcaagcctctcacacctgcaggactccaggctcccagagccacagctgcactctacctctctcctttcctttccccttctgagcaccttcgggttactgggataaagtagtgcttaatgagaggccaaagggactttgcctccttgaggctttttgattgctttgcacaaaactcatagaatcaccttatgttccttcacttaatcagtcacttatgagc

SEQ ID NO: 484873 - DNA, 642 bp, Homo sapiens
tctttcactgatggccagggccctgcgtaccccaattcacttcaggcccttccaaggcaggtacaaatcatgaatcacattcccctctctatgactttgtttataggcagagctctaaagctgggataacagcaaactgcatcaacaagttctctggggcctctagcccattgatcctatgacttgttgtgattgcccctgacctcttcactttcttcttcagtttggtgctttggccactgggaccaatgacttccactgaagttttctggttctcagtcctgctttccagggctgtgacacagggtgatttgcagactgatttctgtcctgtgccagaagatacttaataaatgctggcaatgacgatgggtccctgaagagcagtttgcccaatttattttttaaagactttaaaaaaatagtatagacagaaaagtctataaaatgaaaaattacaaaatagcaaattattatagaaaatttgtgtcactaccactgagttcaaaaaataaaatactgwcggtatccccagaagcttccctgaccatcccttctccttggctggcgtctcacctttgacgtctcaagttcaagaaatctgagtaacaactctttctgcctagcttctagtaagaaaaa

SEQ ID NO: 484874 - DNA, 490 bp, Homo sapiens
atctttagaagtttcgcaggctgaaaaatcaatttgcccgcctggcacctgggtctggggcctccccgctaacatcagtggcaggcgaaatgtggcctcccctctgcctgccctgatgcgtcagaccttactcagggtcccgagggcctggcagtgccgcccracagactcctgtgagctgctgcacccacaggtgtgctggtctgcccctcagagatagccaggcctcaccagaagatgcgggcaaacaccacgccctagaaaatactggcaagggggaagcgaatcactttgcatcccggctgcctgactggcacattccccaggtggtcatctggcacctaatccatgtgtggtcacagcaaactggcttgcccaggtggtacaagttcagcctcttcctccaagcagggaccagaggtaagagaacagcacacaactccacgccttaataaaaaggcccaggaggcagattcccaatgcagtgaca

SEQ ID NO: 484875 - DNA, 558 bp, Homo sapiens
gacatgggcgtgttattaccagctccatggttaatgagcattgcatccactgggagcagccaggctggggatgctaagacctgctgggtggttctgctgagttggggctcatggggcaagaaggccagtttctgccagcccctcccagcagcagtgagacaaggacacagacactgaagggcccgtgttctcagcctctccccctccractcctgcccatcttcctggtcacatctcctcccaccgtctgccttgcttgctgagtccatgcatttgttcatttccccattcaacaaggaggtatcaagcaccactatttcccaggcacattcctagggtgtagaactgaaaaacacaggtaaagtactgcctccatgcaacagacattgtagttgaggaaacaggcgataagccaaactgataagagaaatataaggtgtgttaagacaaatataagatggtgacaaatgccccagagaaaataataaaatagggaagggaggcaggaagaggggccgttaatcagggtagccaaggaaactctccagcagccagcct

SEQ ID NO: 484876 - DNA, 597 bp, Homo sapiens
gagggagctcttggtcacctatgctttggggactccagcggggaggaaatgagtcaattaggaggacatgaagttggctgcctcctcactttgccatcaaagacaataggtctatgttctgatccctgcctcagacaaaatggagaaaacccaaagatagtgggaagccgcctgcactgtatgaatgcacgcttggagaagactgtctccctgctgcccagcacccactgtccacgcatggttactattagaaagttaatcatggaaaatgctgaggtctctttccccagccctgcacctctcagctccacactacaatttcatcttccatatagtgttaccagacagtgccattggctccgtccactcccttgtcccaggcctttatgacctttccattcaagccacacaccaygtctgctccacagagctgtaagacacactggcttcagcccgcctggcctgggccagcacgctgacattttccatgagtccacatcagccagtgaaatgctcagaggggattaaggcaaccttctccatcacccccgagttgctttaggaaagagaataacagcactgacccctccattggca

SEQ ID NO: 484877 - DNA, 633 bp, Homo sapiens
cttttcagttgccaagtgcttatcttcccaatagggagtgaaaaacccaagccaattctaatgccagggaagcagtagtgacctttgtctgagtgggatacccccaggataactcagtttctcgaggagttaatcaagatatcacttacrcttatgtttacggacagctgttttgaagataccattaactattctttcagagtcattttaagtcattaagagtaacttaaacactaacttcttcaaatacattaatacaaactcctttttagctaatgatagagaaaataaagccaatgttcaacaactaatttcaatataatacagatgctccttgacttatgatggggttatgtcccaataaacccattttaagttgaaactgctgtaagtaaaaatgcatttaatatacgtaacctactgaacatcacatcttagcctagcctaccttaaacatgttctgaacacttacattcgcctacagttggccaaaatcatctaacacaaagcccattttataataaagtattgaatatctcatgtaatttattgaatactatactgaaagtgaaaaacaggacggttgtatgggtactcaaagtatggtttctactgaacgtgcactgctttttt

SEQ ID NO: 484878 - DNA, 633 bp, Homo sapiens
cttttcagttgccaagtgcttatcttcccaatagggagtgaaaaacccaagccaattctaatgccagggaagcagtagtgacctttgtctgagtgggatacccccaggataactcagtttctcgaggagttaatcaagatatcacttacgcttatgtttacggacagctgttttgaagataccattaactattctttcagagtcattttaagtcattaagagtaacttaaacactaacttcttcaaatacattaatacaaactcctttttagctaatgatagagaaaataaagccaatgttcaacaactaatttcaatataatacagatgctccttgacttatgatggggttatgtcccaataaacccattttaagttgaaactgctgtaagtaaaaatgcatttaatatacrtaacctactgaacatcacatcttagcctagcctaccttaaacatgttctgaacacttacattcgcctacagttggccaaaatcatctaacacaaagcccattttataataaagtattgaatatctcatgtaatttattgaatactatactgaaagtgaaaaacaggacggttgtatgggtactcaaagtatggtttctactgaacgtgcactgctttttt

SEQ ID NO: 484879 - DNA, 599 bp, Homo sapiens
ctttttctttctctcctttgtcttatcttctccgtctcttttagaaacagaaagtgttattgtcaracaagatctcacatgacccccaatacatgaaatacaccaggaatttccctagatgaagcaggagcccacttggatagatttcttcctctcctgaggcactcccctagaatcccaggactctgatacacacagactgaaaaatcactggactagacgatctcaaaggtcatttccaaagcaaagattcaaaagaattatcagatatcaaagacagacactcaactggcagttacaacaatctaggtatgaagccctacataacaaagctctcctcaaattaagcatgaaatacaactgccaggattacaaaattccaaggaccctgagctaagaggatgctttttaagaggtgaactttgaaaacctgtcagaatgtgaggtattgattctacagggttggctgtaacagctactctctctctgttcaattctgctgacactatcaaatcatttaaggaaaaaaaaaattccctaacatttcaccaaaaccaagatggctgccttaaattagcctacgttcccttttccaacca

SEQ ID NO: 484880 - DNA, 563 bp, Homo sapiens
gtcacaagctatgctaaggattacaaaatctgtcactgtttgattcaaactgcctttgttctgcctctgtaagcctccttgcctgtaccacgagttttgtgccatttaaattagccaacmccctttcagaagtgtgtataaaagtcaagccctgtctttgtttgggacctagcctttggatgtgaatctgttgggccagtggccacttaaataaaatcctcctgttccatccattggtctctctggtcctctgattcctgcaacaaggcaaaggctagaaagcaagcctgctctgtgggctcataaatactagccctggaaattgagaccagtcctagaagaaaaaggtaaccttatatgccagtctcctcttgactgattctctacagttgggaatgtattgcaaaataaatattctttttagtatatcttaactgtatgatcacaacttctcaaagaggagcctatttccccctacattcacaggggacaaataaataatcttttaaggttgaagcagcaacacctgaaactttgacactgtgaaggcagacagctataaa

SEQ ID NO: 484881 - DNA, 391 bp, Homo sapiens
ccatgtcatctttttttcatttttcttttttgagatggcgtttcactcttgttgcccaggctggagtgcaatggtgcgatctcagctcttcgcaacctctgcctcccgggttcaagcaattctcctgcctcagcctccagagtagctgggactataggygccaggtgcgtgccaccacacccagctaatttttgtatttttagtagagatggggtttcaccatgttggccaggctggtctcaacctcctgacctcgtgatctgcccacctcggcctcccaaagtgctgggattgcaggtgtgagccactgcgcccggccatcatcctcttaaatatgtatgaatctatggcccctaagcctttccttctctaagcaatgtcattaccttca

SEQ ID NO: 484882 - DNA, 479 bp, Homo sapiens
aggtgagttttcatgcaaggcttgcttacaaagggtgtgtaaggtgagctacttaggatgtccatccaaaggtaatgcatgcctggyttctgttgacttttgatgattttctaaaaacaatctgttaaaaagacaccagaagtttatttgatatgaatttccccttccccactcagtctattgaaagccaatctctggaagataggatctttttcctttctttaaatagcatgcatgtaaaaaacacctccttgccctagcactaggcttccagaagtaataggtagcaacatgttgcattcaaatgtagaatttcctttctctctttttgaaattagaatacacttttcacttttactcttttggaagatccctttccttccatctgttatttgctgcatgtagcttaaatttaaatataatcttgatttattctttattaatttattgaattaatacatctatatgcaaggtactgc

SEQ ID NO: 484883 - DNA, 571 bp, Homo sapiens
taaacttagttttgtctgactgcctattgttgctttaaaagactgcatttatacattgatactgtgatacacctgaacaattctcacagaacttatcagtcactagatcttttgtctgtcagtctacctacctacctacttatsaattatctatccttttatcttcaactccataatacccagtactgtactatgtaagaagtagatttttttttttttttgagacagagtcttgctctgttgcccaggctggagtgcagtggcacaatctcggctcactgcaacctctgccttctgggttcaagcaattctcctgcctcagcctcccaagtagctgggattacaggtgcctgccaccatgcctggctaatttttgtatttttactagagacagggtttcaccatgttggccaggttggtcttgaacttctgaccttgtgatccacctgcctcgtcacaggccaccacacccagctatttttatttgtactttgtagagacaaggtcttgctatttcccaggccatcacatttttaaatgattggaaaatgtgaaaagaagaatgatattt

SEQ ID NO: 484884 - DNA, 614 bp, Homo sapiens
tgacataaaaaaaatgatgttttagaaagtgctttgaaatttccaggagtgcaatggaagggaataatcrtaattaaaaagttgtctggagaactacactccagtgaaggaagtaatgttcctacgtgccaagcctgtccgtatatttccctgctctcagttgtaggtttctgaatcccctgtggcaaagggcaagggaggtgaaattgttcagagtttcaggcagtcttctcacctaaagtgagtagtattgcaatgtctcttggaatcatggctctgaagatgaggagagaagcgggatgggcagtttgtgtggtgaggaggctggctgcaggtaggctgggagggaatgtcacacatagttttctttctcctttaagccgaatgaggtatgctggtcaaaggaacttggggaaggaggatggtgaggggaatgaagttcttcttcctattgattgttttgttgcaccagaggctgtttgtccaaggccactggccaagagcattattttcgtggctaaagtgaggttgggcaggtttcccatccctttcactagttttgaacaagacaacccagaaagcgcagcaaggctctgggaatatgatgtgggttg

SEQ ID NO: 484885 - DNA, 614 bp, Homo sapiens
tgacataaaaaaaatgatgttttagaaagtgctttgaaatttccaggagtgcaatggaagggaataatcataattaaaaagttgtctggagaactacactccagtgaaggaagtaatgttcctacgtgccaagcctgtccgtatatttccctgctctcagttgtaggtttctgaatcccctgtggcaaagggcaagggaggtgaaattgttcagagtttcaggcagtcttctcacctaaagtgagtagtattgcaatgtctcttggaatcatggctctgaagatgaggagagragcgggatgggcagtttgtgtggtgaggaggctggctgcaggtaggctgggagggaatgtcacacatagttttctttctcctttaagccgaatgaggtatgctggtcaaaggaacttggggaaggaggatggtgaggggaatgaagttcttcttcctattgattgttttgttgcaccagaggctgtttgtccaaggccactggccaagagcattattttcgtggctaaagtgaggttgggcaggtttcccatccctttcactagttttgaacaagacaacccagaaagcgcagcaaggctctgggaatatgatgtgggttg

SEQ ID NO: 484886 - DNA, 654 bp, Homo sapiens
aacattcctaacataacctaattgcaaggagcagaaaccgaatgcaaactggctcaattttaaataaaaaaggaggggaaggaagactggttcatgtaataaaatccagaggaatgactagactggccccaggggctcaggaagtcatcagagaatgtgctccattctctgcaggttccgtggctctgcctgcctctgagttttggctttatcctcagggtctcccttccatcaagatcccaacacyggctatggcaattctagagatttcattttcactccataccccacagaacaagagagggagcaggggaggggctctctcgttcttccttagaggagtcctgagtttcactgtgattggaccagcctgggtcaagtgcccatctctcaaccaatcacagaccaaaggagatacgctgattggcacatgtctggactcccaacctccccacgaacaccaggcgacaggggtgatttgttggcatactctcatctcagactgaaggtggggttgtcccactctgaccgcatgagagaggggaggcttccgaaaagaaatttgaggtactcttagcagaatggaggggaaatacatgttggacggcaaaccacaggtgtccacctccagcatatgtcccttgctgatcaagt

SEQ ID NO: 484887 - DNA, 544 bp, Homo sapiens
tttttttgagacagagtctcactgtgttgtccaggctagagtgcagtggtacaatcacagctcactgaagcctccatctcccaggctcaagtgaacctcccacctcagcctcctaagtagctgggactacaggcacatgccaccacgcttgactaatatttgattttttgtagagacagggcctcactatgttgcctaggctggtcttgaactcctggacacaagtgatcctccaccttggcctcctgatgtgttgggattacaaagtcttttctagtcccatagtcagggagtcgagcctagccagccccctttcctcaatgggccttgagtcctcctcagtccccactgcaccctctggctgtggttccttagtacgattcaccccgacgcttttttcctttcttactctggtgataattttgtgatctttttttccagtgtgtctctatgcatggagtaagaaasaaaccatcctacaatagcaccaaatccagcatggatgggtaagaagactgaccaccaggtgttctggagtagccag

SEQ ID NO: 484888 - DNA, 480 bp, Homo sapiens
gcaaatgcgctggtctaaaggggctgagatttatttactcacatgtctagtaccttggtgcggatggatagatggctagcctcaactgggtctgctgatgagaatgtatatatgtaccttttctagcatgacagtttgagggagtgggccttctgacatggtcaccagcttccccttgagaaacmattctaagagagcagagtgtaaactgcaaggcttccacgacagccacaaaaggtccatatcctactggacaaggaagtcactaaggtgagctcagatttgagaggaagagttagattccatttcacaatgagaagagaaaccaagaagcccctgaccacatttaatctaatatattcattcaaaataagaaaaaaactgatgagcatttttagcaattttccaatctcagtgtttccattttaactttattctttattaatagggttgaaattatattaaatatttattgatcat

SEQ ID NO: 484889 - DNA, 642 bp, Homo sapiens
ctgttgcacgtgattgcctcaaatgtctctgagtttctttcaccctcaaacatttgccttactagggccagtcctcaaaactgtattaattctcaaccttctagaaactgagatttgctggtgaacggcagcaagggtaagtaagtaaaagcccctacaaagttcatggagcaaagttgatcctgcaataactcaatattctctctcctcttttcctccccaccrcccatctttcacacatgcacaccccttagggaaatgttttgtggagaaggaaaatataagtacagacatacttcattttattgtgcttcaccttattaagcttcattgtgtgtgttctgactgccccaccaactggcagttcccctgtctctttccctctcctctgcctccctattctctgagataccacagtattaaaattaggccaatgaataaccctacaatggcctgtaagtgcttaagtgaaaagaagagttgcatatctctcacttaattccagcaatttgggagaccgaggtgggcagatcacccaaggtcaggagtttgagaccagcctggccaacatggcaaaaccccattgctactaaaatacaaaaattaggtgggcatggtgctgagtacctgtaatcccagata

SEQ ID NO: 484890 - DNA, 587 bp, Homo sapiens
ccctacatcagactctgtatcagaagccatttgacaacacctctgacaggtgttcaaattctagtagaattcagagaaatatctgtctgccaaggcagctctatttattgccatcagttatcattaagtcctttctagtaatgagcaaaaatgtaatggtaaaatcagctagagcttagagatttgagtcctccttcttcacctggtcacatgtgagtcaactggcagtcctcattattcatctttccactaaattttaccatttatctttataatttttcagatattatcctgcattgttcagcaatctcatcttcaagtgtttgtttctctttccatccactcttccaaaaactctgtcccatcatcttggggaacattgaaagtcactgctggatatttgacatctggtgacagctttatcttctgtatgggtgaaayttggatttcaacattgatatcttttattcttgactcaccgttccatctactccacttgtacatgataatgtggcttcaatccctgctataaacatggcttaggatgctgcttctgcatattttgccccttcttgctccatagccac

SEQ ID NO: 484891 - DNA, 587 bp, Homo sapiens
ccctacatcagactctgtatcagaagccatttgacaacacctctgacaggtgttcaaattctagtagaattcagagaaatatctgtctgccaaggcagctctatttattgccatcagttatcattaagtcctttctagtaatgagcaaaaatgtaatggtaaaatcagctagagcttagagatttgagtcctccttcttcacctggtcacatgtgagtcaactggcagtcctcattattcatctttccactaaattttaccatttatctttataatttttcagatattatcctgcattgttcagcaatctcatcttcaagtgtttgtttctctttccatccactcttccaaaaactctgtcccatcatcttggggaacattgaaagtcactgctggatatttgacatctggtgacagctttatcttctgtatgggtgaaatttggatttcaacattgatatcttttattcttgactcaccgttccatctactccacttgtacatgataatgtggcttcaatccctgctataaacatggcttaggatgctrcttctgcatattttgccccttcttgctccatagccac

SEQ ID NO: 484892 - DNA, 601 bp, Homo sapiens
cgagtagtgccttgcacctataatcctagctactccagaggctcaaactggaagattccttgaggctaggagttggagaccggcctgagcaacatagcaagacctgtctctaaaaaaaagaggaagacacttgtttaagtagcaggaaaaaggggccattaaaagattatgcaacatagctttttcttatttatgcaaactgtctactgatctgatggcttttatttgctatttaatgttgtactcattggagcagggaaacacttgcagggcaaacacagagccatatgagtgtccctgattcagagcagaagataatgtctgcccccatcccccactgccaaattccccttcccaccagttgctggactgaagcaacctgccctcaattggggtcagagaagtcaatctacccttcccatgagcctgccacccaaactggtggaaggtcaaccccscaaagcattggaactctgcacctgacatgcctggattagaggtgggtgagaagctctctcccactgagtctctcacctgccttggcacttccagcctgaggtgcattcctaactgcaacttgacctgagcttgtgatcaaatc

SEQ ID NO: 484893 - DNA, 581 bp, Homo sapiens
tatcacctcattccaaacaaaactggtaccctgacagcaagcaagaaaggaatgattattggctagccatgcaattgtatcttcacattagagtagttgtaaaagcccttacgaacttaattggcaggagaaaaaggagaaagtaaggaaatggttgagtgacaaattgctttcccgggcagaggttttcagctatmacattaatgctgacttcaggagtgcagagctgggtgcatctaccccagagagtgagttctgagagccttctaccttcaactgcatgctcttcatgttgaattaaaagtattttttgagcatgaagaacatgagcctcaaacataacatttcctacgattttttttttttttttttgtatttttagtagagacgaggtttcaccgtgttagccaggatggtcttgatctcttgacctggtgatccacctgcctcggcctcccaaagtgctgggattacaggcgtaagccaccgcgcccagccatacgatttttttaaagtcaggctttcacatactttctaattctcccatctcacttttttttttcaagtaatttggttgggtg

SEQ ID NO: 484894 - DNA, 581 bp, Homo sapiens
tatcacctcattccaaacaaaactggtaccctgacagcaagcaagaaaggaatgattattggctagccatgcaattgtatcttcacattagagtagttgtaaaagcccttacgaacttaattggcaggagaaaaaggagaaagtaaggaaatggttgagtgacaaattgctttcccgggcagaggttttcagctataacattaatgctgacttcaggagtgcagagctgggtgcatctaccccagagagtgagttctgagagccttctaccttcaactgcatgctcttcatgttgaattaaaagtattttttgagcatgaagaacatgagcctcaaacataacatttcctacgattttttttttttttttttgtatttttagtagagacgaggtttcaccgtgttagccaggatggtcttgatctcttgayctggtgatccacctgcctcggcctcccaaagtgctgggattacaggcgtaagccaccgcgcccagccatacgatttttttaaagtcaggctttcacatactttctaattctcccatctcacttttttttttcaagtaatttggttgggtg

SEQ ID NO: 484895 - DNA, 635 bp, Homo sapiens
agactgggcccctaatccaatgtcaccgctatcttataaaaagggaaaatttggatacacacacacacatacacacacgaagaaagccatatgaagatgaaggcagaaatctacaagccaaggaactccaaagattgccaamaaatcatcagaagctaagagaaaggcatggaacagattctcccttatatccatcagaaggaaggagtcaaccctgtcaacagcttgatcttggacctctggtctcgagaaatggaagacaatgaattctgttgttctaagccacctggtttgtagtactttgttatagcagctctagaaaaccagtacagtaattaatcataattaagcttcttgcatcagaaagaaataacgtttgacttctcccaagcattgtttttcagcatcaaacacaaagtaaatgtgattgtgctttctgaaacaaaccactcatctcatttctaccactctccttaccatcaatacattataattctttgaaaactagttaattttggttatcagttatatatgcttaatattaatgtttcatattgcagaaataccataatgtgacactgatattgagtatacataagtaatcaaggaaaaattagcattcaataattacaaga

SEQ ID NO: 484896 - DNA, 638 bp, Homo sapiens
tcaagagcagagaaacattattttaattaaaagaagaaaagaaattttaaaagagaggtgatagcacatattattcgttaagaatttaattgggaaaacttccgaagagcatttctacttattcatatcaaaatagccatagtcctacccaaatatccacacatatttgtattttcagtgcgtgatacacaaatagcctaagcagttctagttctaaaacatatttatcaggaatatttcatagcaaattcccacgctggagcccggataaaaactcaagaggctgctgcccattttagaattaaccatgtgggaagctgcaggatgattaagtgaacatagamtgtcaatgagcttttgaaaggcagaaacttttttttattcatctttggaaacccagcacctattagagtgcttggttcatagtcactactgaataagtggtgtatagccataggtcactatctgagctgggagcaaatcacagactgaaattcaaattatgtcagtagcttctgtgaacttctatgagtcacttcctgcccgtttggtcacctaggaaagaggctgtctgttgggatgtgtaacgtatccgatgtacattgaagtcctcatttaaaagtgccaaattactatta

SEQ ID NO: 484897 - DNA, 531 bp, Homo sapiens
tgataaaactgcccttctctaattttactcactttcagtcatccgaaacaaagcttttatgaattgtgtatacgtttttttggctataaaacttagtatatggacttcacaaatttcaattttaacaaaataatagttttgctattaaaaacattcaaacactacacacagcgataaacttttgtcaaaccctcagaggacggcaagcataaaatatgtacttggatcccgtagaaaagttacttaactttgatttttagaagtagctcatttaattttggaaagaaaagatcggtgctactttatttcctttggaataaaagtgaatggcaatgcaaatccatccttaatcaataacttccaagttggctgtgactaatccaggaaaatggaattggattaaaaataagagcaagaacaaaatattgttgagataaaattttagtagatttgccgaaacttaagaacagaattaacatgaccatttcattattcttaaatactragaaagaagggctgctttgtggggga

SEQ ID NO: 484898 - DNA, 633 bp, Homo sapiens
gcaaaagttctctagctaggaaaaaaagatggcaaaattctctggccaagaaacaaacctccaactatgctttggtcttgttgctaaattttttaagtattgaaatgctgtcttgtctttccttttagttttttaattcttgttttggtgttggtagttttgtctaaatttaattcaattcaacaagtatttactaagccctatgtgttttttaggattttggacaggttctgggagtaaaagaaagaaaaaaatgtagatactaatgccaagaagccataatctgggaggggaagcacagtgtaataattacagcagaatgtggcagatacaggagaaatcaagtgaaaagagtgactgtctgaggggattaggaaaggcttttcagaagagttgacrcctaaacagtgttcaataatgagttgttaaccaggctcccaaggggagcaaggctgtttacaaatcctcaaggcctctgtttagactactccccataccctaactctaactaaccaatgcacagattttataaaatgcactcagggaatccatatctacatatctacatacaattatttgttttgctttaagttttaaaggaattgtataatttttcttttgagatattagtta

SEQ ID NO: 484899 - DNA, 556 bp, Homo sapiens
ctgcgattcacttccaagcttcagaccctgcagtgtcaccaagacaactgcattgtttcagatgctgcttcttagggggcccgaattggcccagagcatgaactagattcccttagtactaaatagtcctgcgagcaccatggggactttctgtaaaaagcagtattattgtcagtccttakggtctacaaaatgctcagttataattttacagtattatggatagaagtgttttaggttttgaagactaaccaggagataacacataaagtaggatcttagtgtaaagcttcttaaaatgtatttccatgtgataaaagaccagataaatgtgttgattcactttgtcctgaaaagaaaaacatcagtaaaaattaattcttgttactcctgtgttcaagttaataaaaacattgcagtactttgaagcacgtgagaacgtactggttttaaaacaatgatgacctctacaaaatagcctacattgccaaggtgttggttagaggcagtgtagagtgaactagatccgtctatatagttatgaaaagctttggtg

SEQ ID NO: 484900 - DNA, 487 bp, Homo sapiens
ctgcagtgtcaccaagacaactgcattgtttcagatgctgcttcttagggggcccgaattggcccagagcatgaactagattcccttagtactaaatagtcctgcgagcaccatggggactttctgtaaaaagcagtattattgtcagtccttagggtctacaaaatgctcagttataattttacagtattatggatagaagtgttttaggttttgaagactaaccaggagataacacataaagtaggatcttagtgtaaagcttcttaaaatgtatttccatgtgataaaagaccagataaatgtgttgattcactttgtcctraaaagaaaaacatcagtaaaaattaattcttgttactcctgtgttcaagttaataaaaacattgcagtactttgaagcacgtgagaacgtactggttttaaaacaatgatgacctctacaaaatagcctacattgccaaggtgttggttagaggcagtgtag

SEQ ID NO: 484901 - DNA, 499 bp, Homo sapiens
tggtgctagctttggtataacaatcatgtgggcagttattttgcatttttaatattttgttcccagatgtgtagtataaagtagcagaactggaaattagtgaccatggaatagtaaagagggaaagacattcatttatcatttatttcatgctcyacaattggttgatacagaaacttggatccagagccattcttaggctctttacagagtaagaaagagtctgactccacttttgacgtttcatcactgagagtggtcaagctccaccccttgcccttcctctcttgccccatatctggccaagtccataaaatagcccatgtgttcccccacttgacacctgtgggtgatttcaaaccatgcaaaccctgcccctgcaaaagaaccttaaccccactccgtaagcacaacacaaatcaaagccccttggctgtcctctactcaacccacttcagatcaggttgggagtgtgccctgctctctccagaaaacccca

SEQ ID NO: 484902 - DNA, 642 bp, Homo sapiens
accagtggtgcttcaaacctagctttttctcagaaaaactaggcagcttaaaagtgatactgaccaatgggtaccaaactaaatcactcaaatcagaatagctattggtatggccagaatggatttttgtcaaagcttcttgttatttctagtgtgcaaccagcactgcaaactcctgacctaaccwacttgtgttttctctttccccttatgtgctatcccatctgccaccagatagctcttggtaagatgttacctggtgtgttagtccgttttcatgctgctgataaagacatactggagactagcaagaaaatgaggcttaactggacttacagtttcacatggctggggaggtctcagaatcagggcaggaggtgaaatgcacttcttatatggtggtggcaagagaaaaatgaggaagatgcaagagcagaaacccttgataaaaccatcagatcttgtgagacttattcactaccatgagaacagtatgggggaaactgcccccatgattcaaattatctcccacagggtccctcccacaacatgtgggaattatgggagtacaattcaaggtgagatttgggtggggacacagccaaaccatatcacctggttatctgaattctgatcaagggc

SEQ ID NO: 484903 - DNA, 632 bp, Homo sapiens
aatagccgacaattgtccttgatcaggtcaaatgctgtttttaaatgcctgacagtttttaagtctttaatggaaatcaatggcccaacttcctgaaatgtattaattacatttatctttctaggcartttttagtaaggaccaggacttaaaaataacttccaaacattctctggctaaagtctatttttttcttaataaattcacagtgggcatttactattctggtatcttccccacaatatccaaactttgttcactaattccttttccttttctctctacatccatataccactttatctttcaagcatcagcgtaaatcccatttcctacattcagtgaccctgcctccaactcacactgatctcatatacttcaatgtgatattttatatggaagtcattgttttttgcataagattgcaaagtgatttggaaaaaaaaaccaaaaaccttggtaagcaaccattcaacaaatactgcatttttgtttttcatttctcattttgtatccctttttatactgattctcggcaggagtatccaagagtggaaacatgcaaggtttcagaatcttttgcaacttaattaggctctccgtggaatattctgaatccctggaccattgga

SEQ ID NO: 484904 - DNA, 632 bp, Homo sapiens
aatagccgacaattgtccttgatcaggtcaaatgctgtttttaaatgcctgacagtttttaagtctttaatggaaatcaatggcccaacttcctgaaatgtattaattacatttatctttctaggcagtttttartaaggaccaggacttaaaaataacttccaaacattctctggctaaagtctatttttttcttaataaattcacagtgggcatttactattctggtatcttccccacaatatccaaactttgttcactaattccttttccttttctctctacatccatataccactttatctttcaagcatcagcgtaaatcccatttcctacattcagtgaccctgcctccaactcacactgatctcatatacttcaatgtgatattttatatggaagtcattgttttttgcataagattgcaaagtgatttggaaaaaaaaaccaaaaaccttggtaagcaaccattcaacaaatactgcatttttgtttttcatttctcattttgtatccctttttatactgattctcggcaggagtatccaagagtggaaacatgcaaggtttcagaatcttttgcaacttaattaggctctccgtggaatattctgaatccctggaccattgga

SEQ ID NO: 484905 - DNA, 632 bp, Homo sapiens
aatagccgacaattgtccttgatcaggtcaaatgctgtttttaaatgcctgacagtttttaagtctttaatggaaatcaatggcccaacttcctgaaatgtattaattacatttatctttctaggcagtttttagtaaggaccaggacttaaaaataacttccaaacattctctggctaaagtctatttttttcttaataaattcacagtgggcatttactattctggtatcttccccacaatatccaaactttgttcactaattccttttccttttctctctacrtccatataccactttatctttcaagcatcagcgtaaatcccatttcctacattcagtgaccctgcctccaactcacactgatctcatatacttcaatgtgatattttatatggaagtcattgttttttgcataagattgcaaagtgatttggaaaaaaaaaccaaaaaccttggtaagcaaccattcaacaaatactgcatttttgtttttcatttctcattttgtatccctttttatactgattctcggcaggagtatccaagagtggaaacatgcaaggtttcagaatcttttgcaacttaattaggctctccgtggaatattctgaatccctggaccattgga

SEQ ID NO: 484906 - DNA, 632 bp, Homo sapiens
aatagccgacaattgtccttgatcaggtcaaatgctgtttttaaatgcctgacagtttttaagtctttaatggaaatcaatggcccaacttcctgaaatgtattaattacatttatctttctaggcagtttttagtaaggaccaggacttaaaaataacttccaaacattctctggctaaagtctatttttttcttaataaattcacagtgggcatttactattctggtatcttccccacaatatccaaactttgttcactaattccttttccttttctctctacatccatataccactttatctttcaagcatcagcrtaaatcccatttcctacattcagtgaccctgcctccaactcacactgatctcatatacttcaatgtgatattttatatggaagtcattgttttttgcataagattgcaaagtgatttggaaaaaaaaaccaaaaaccttggtaagcaaccattcaacaaatactgcatttttgtttttcatttctcattttgtatccctttttatactgattctcggcaggagtatccaagagtggaaacatgcaaggtttcagaatcttttgcaacttaattaggctctccgtggaatattctgaatccctggaccattgga

SEQ ID NO: 484907 - DNA, 594 bp, Homo sapiens
tggcatcagttaatgaggactttatgcacttcagaataataacagtagaactagctggcaagtctgaacttagargaaaaatctatagttttcttttataaaataaaatctggcctattatttcagcaaaagtaacaataacaggatcctgaagataccaccttcagcaatcaaattcattctatgggcataacggctgaaatctatttttccttctgattgcttattagtttagtactggaatatgcacttttacctattattttacctaaatttgaatacagtagagggaagtctccttgatagtagagaaactcattccacaaaaataatttcctaaagccatttattctgaaaagagtaacttaaaatacacacatacacacacatactctgccttatttatttcaccctgtaattatatttttagatgatttcttgtgtattttctcactttaaaatgaaaattaaaggtctgatgacttgggtggatttaatttgcccagggagtggaactcccaccccagttctgcaatagtgaatttgttactatgtcattactcaatctatagaattataggatgctagtgtcac

SEQ ID NO: 484908 - DNA, 609 bp, Homo sapiens
gtaaaattctgtctaaaaagaaatctgctttttgtgggkgcatgtgtgcatgcttgtatgtgtgtgtttgcatgtactaaacatttattgaattcgctgatctacaaaatgtatgaccaacttccatccagaaattttaataagattgcaccataccaaaagccagagaatcaggagatagattacagactatgctgtaattcaactacagaatacagaagtagaggggattaataaaggctaaagttggatgggtgtggtggctcatgactgtaatcccagcactttgggaggccaaggctggtggatcacctgaggtcaggagttcaagaccagcctggccaacatggcgaaaatccatctctactaaaaatacaaaaaaattagccgggcctggtggtgggtgcctgtaatcccagctacttgggaggctgaggcaggagaatagcttgaacctgggaggcggaggttgcagtgagccgagatcatgccattgcactccagcctggatgacaagagataaacttcatctcaaaaaataaataaataaataaataaaggctaaagttccacatttgcaatgagttgctacaaccagcaaaaaaatta

SEQ ID NO: 484909 - DNA, 642 bp, Homo sapiens
ggtgatcttacagaggctttaacttattccaatttccaaagacacacagatataagtgcatttaacctggttcacagataatgatccactgaagcttgatattccttagtacacatcaaataggtcagccaacattctctggctatgccttatctgaattgtataaaacatctttagtgagcaaactttyttcttctatcattttcatttattttccaggtcaaattatggtctataaaatgatgagaactgagaggttaatttttgagggattaattaaaggaagaaattagaaatatattttaaaagtgtgtaatagcagataaatattaagaattaaacaataaaatatacatttctatgactaattttattatagccataggccttattttaaattgcttttcaatttaaatgaaaatgcttccaatcataaattttcccctttgctagttatttgttaaacaactaaatgaaattttagttacattctacaaaagcttaatcaacactacagttgtaaatcaccaggctgaagctaggacattagtatttcaaagcctcttctattactgtatttataactttatttctgaaatatatatacagatttcattacattgccagttatttatatttgtt

SEQ ID NO: 484910 - DNA, 627 bp, Homo sapiens
tattcatagtctcccatatattttgcattcctgagggtgtttttgaggatgcgtgtgtgtactaaattgaatacrtttaaaaatttttagaagtatttcaatatactatttcttatccactgtctatagccttaagtgtatcttttcaagataaacagcactttctatttgcaagagaagatttatcaaagtaaaagtgataggtcaaaacatgtgtgaacttgaagtgaaggataatggtgtttttgacccagaaccatgctgaagtgcaatgagaactggttatgaattatcactatggcataagtccttaaaccatgacctgttggcccaccgagtgctatcaagtgaaccgtagcagcaaggtaatttcctaccagggtgtaagtcacatattaaaaaggtccaaggcattctctctacaactgtactgtagcaatttgaaagctctgtagcagatagaacatattaagaaatataaaaagtgcttaaaaagtctcccaaggaaatattaaactaaaaaaatggtaaattgcaacttaaatttctttagggattttatattttgcttattttttttcatatctcatgaatgttgcttcagaatttgtttaaatttttcttctt

SEQ ID NO: 484911 - DNA, 375 bp, Homo sapiens
tttcccaagcacacggaggcttgcaagctcttaattagagggaaagctgctgcaaacaccccaaaggtcactgaaggtatgaggatgggagtagtaatgcagccatcattgctgggagctgttgccaatggagcaactgcctaagagacctgccagaaggagataaaaggggtatggaggggccagtgtattggggcttccctatatgagggtaattggaaagagtaggcttgaggttctgagaaggaacagtgatgaatgctggcactatctcattcagaaagacttttgatgcttattgacatttaggctatgcttcttgacatttaggagcaaagtaaaacttgtgrgttttcaatattctcaagagagaca

SEQ ID NO: 484912 - DNA, 590 bp, Homo sapiens
tcctagagactgctgataacagtgctaaatatattttaattagttccattcattagcttcaataactgaatatattaactagatctcacatgtatattaatcccataacttattaatgttcagaataaaattcaattgtcacatttttaaatacatggcttgattggctgaatgaaatagaagtgctatttaaagatgttaarcacaaattgtgactgttgaatgttgcccttttttttcaaataaatactaaaaacactttttacaaacacttacatacaaagagacatgacttcaaaacaatttaactgtgatttagtagtgggtaggaaaaaaagctctcattacaggcagtataaaaaattttcaagagtcttaggaataaaatggcctccttaaagtaacttgtataaaatttgatctactgataaaattgaattctgcatttcttcatctttagatactcagcattaagtgaaaactcatttatagagtgatttatagtatgacaaagtatgagttgaatttttaatagacctagcatgtacttcctatcttaagtattttgtctgcttcctggtgactgacca

SEQ ID NO: 484913 - DNA, 626 bp, Homo sapiens
gctgtatttctggccgttgttcctctcaatgatagtgtagcagactagctgatatttattcgtgacagcagcaaataagttaaccactgagggcaggcaaatattcagaggatttagctgcctagtcactatcccttaaaaatgtaggcactgaagacatctcaaaccttctttcaggtttacgcttaaaagttgcttgtgtctaaaaacaaaggtgtggaacacagcttggaaggctgagtaaaatgtttgatggagagcaatatcacaaaaagccttcattctcagatcctggttagtaaggtatttgtgtggccagttaaccgaaagacctaggcatgattttatagttgtaatgagaggaatgaatttagcttttgccaaagagcttccaatataatttccagcagctcacctgatgatgacaggattatttggatcctgcatttttttttcccagagacgttccaaaaatgcttctgagagtcgcaattttaagccacagaggtaaaacataaaaaactgtacrtgacaggaggcaggggtttgtcaaatatgtttatcagtttgtgatatattataaatcctttattttgttgttatcaaccttaccatgtattttacat

SEQ ID NO: 484914 - DNA, 556 bp, Homo sapiens
gctcagatttggagccattatgtagaaaaaccatgttttttgtttttgtttttgagatggagtctcactctgttgtcaggctggagtgcagtggtgcagtcttggctcactgcaacctctgactccctggttcaagtgattctcctgcctcagcctcccaagtagctgggattacagcccgccatcacgcccggctacgtttcgtatttttagtagagagggggtttcaccatgttggccaggatggtctcatctcctgacctcatgatccgccctcctcggcctcccaaagtgctgggattacaagcgtgagcaccgcgcccggccaaaacaatgtttttttaaaggttgggattttactcagagagttcacaatgtgagaatgcacaagagaaatgaggccatcggaggaacagcagattcacacctcccatttcgtggtcagtttagagcacatagccatgaagtgaaatggcagaaaaaaaamcttcagtaatttttcctttctctctatgatttattcaggagcaagcccacactgtgaatttgtgtgtta

SEQ ID NO: 484915 - DNA, 480 bp, Homo sapiens
ccacaatccacaccacatggggcagagctgttgatctgaggtcagtgcaccctcagaatcataagaaataataactccttggctgggtgcagtggctcacgcctgtaatcccagcactttaggaggccaaggcgggtcaatcacctgaggtcaggaggttgagaccagcctggccaacatggtgaaaccrcatctctactaaaaatacaaaaattagccacgcgtagtgagggttacctgtaatcccagctacttgggaggccgaagcaagagaatcatttgaaccaggaggcagaggttgcaatgagcagagatcacaccactgccctccagcctgggcaacaagagggaaattctggctcaaaaaagagaggagcagagaggaggggagaggagagagccatgttacctgactcgggttccagggcttaacttttcccctcggcataatgagtttgaaaggtcctgaactttcttttt

SEQ ID NO: 484916 - DNA, 480 bp, Homo sapiens
ccacaatccacaccacatggggcagagctgttgatctgaggtcagtgcaccctcagaatcataagaaataataactccttggctgggtgcagtggctcacgcctgtaatcccagcactttaggaggccaaggcgggtcaatcacctgaggtcaggaggttgagaccagcctggccaacatggtgaaaccgcatctctactaaaaatacaaaaattagccacgygtagtgagggttacctgtaatcccagctacttgggaggccgaagcaagagaatcatttgaaccaggaggcagaggttgcaatgagcagagatcacaccactgccctccagcctgggcaacaagagggaaattctggctcaaaaaagagaggagcagagaggaggggagaggagagagccatgttacctgactcgggttccagggcttaacttttcccctcggcataatgagtttgaaaggtcctgaactttcttttt

SEQ ID NO: 484917 - DNA, 480 bp, Homo sapiens
ccacaatccacaccacatggggcagagctgttgatctgaggtcagtgcaccctcagaatcataagaaataataactccttggctgggtgcagtggctcacgcctgtaatcccagcactttaggaggccaaggcgggtcaatcacctgaggtcaggaggttgagaccagcctggccaacatggtgaaaccgcatctctactaaaaatacaaaaattagccacgcgtagtgagggttacctgtaatcccagctacttgggaggccgaagcaagagaatcatttgaaccaggaggcagaggttgcaatgagcagagatcacaccactgccctccagcctgggcaacaagagsgaaattctggctcaaaaaagagaggagcagagaggaggggagaggagagagccatgttacctgactcgggttccagggcttaacttttcccctcggcataatgagtttgaaaggtcctgaactttcttttt

SEQ ID NO: 484918 - DNA, 585 bp, Homo sapiens
ctgctgatctgacaagaggcggagcttaggccataatgctcacccacccgttgctcacctcctgctgttcggtctagttcctgagcagcacaggccagtactggttcaccacccggggtttggggacccctgctttattggacataattattaggtcgtgttctttttggtggtgtttgtacagctctattgaggtataatccacatgccataaaattcaccccatttgtaaatgtatgattcgtggctttcaattacacttaaaaagttgtaaraccatcattacaattcagatttagtatatttccatcatcccccaaaaatcccctcgagttcctttgcagttcaaagccacccccaatttcaggcaactactggtctgatttctgtctttttctactttccttttctggacatttaatgtatatggagtcatagcatatgtagtctttggcatctggggtagcaagtacgaattttagtctaccacctcagatgcacataaaaatattacatatcttttcttttcttttccttccttccttccttccctccttcctttctctctctccttccttccttccc

SEQ ID NO: 484919 - DNA, 585 bp, Homo sapiens
ctgctgatctgacaagaggcggagcttaggccataatgctcacccacccgttgctcacctcctgctgttcggtctagttcctgagcagcacaggccagtactggttcaccacccggggtttggggacccctgctttattggacataattattaggtcgtgttctttttggtggtgtttgtacagctctattgaggtataatccacatgccataaaattcaccccatttgtaaatgtatgattcgtggctttcaattacacttaaaaagttgtaaaaccatcattacaattcaratttagtatatttccatcatcccccaaaaatcccctcgagttcctttgcagttcaaagccacccccaatttcaggcaactactggtctgatttctgtctttttctactttccttttctggacatttaatgtatatggagtcatagcatatgtagtctttggcatctggggtagcaagtacgaattttagtctaccacctcagatgcacataaaaatattacatatcttttcttttcttttccttccttccttccttccctccttcctttctctctctccttccttccttccc

SEQ ID NO: 484920 - DNA, 585 bp, Homo sapiens
ctgctgatctgacaagaggcggagcttaggccataatgctcacccacccgttgctcacctcctgctgttcggtctagttcctgagcagcacaggccagtactggttcaccacccggggtttggggacccctgctttattggacataattattaggtcgtgttctttttggtggtgtttgtacagctctattgaggtataatccacatgccataaaattcaccccatttgtaaatgtatgattcgtggctttcaattacacttaaaaagttgtaaaaccatcattacaattcagatttagtatatttccatcatcccccaaaaatcccctcgagttcctttgcagttcaaagccacccccaatttcaggcaactactggtctgatttctgtctttttctactttccttttctggacatttaatgtatatggagtcatagcatatgtagtctttggcatctggggtagcaagtacgaatwttagtctaccacctcagatgcacataaaaatattacatatcttttcttttcttttccttccttccttccttccctccttcctttctctctctccttccttccttccc

SEQ ID NO: 484921 - DNA, 636 bp, Homo sapiens
gcaaagccaggagtctcgtccatgccaaactcacgccgctctagtcactaggtagggttttctggctggttccattctaggtttaaattagtgttgtgggctcagatcctccttcacaagctcttcccaagmccctgacccggctccttgctctaacaaatgtcctctgtgtagggtctttgacgcctctgcccatttcacaacactgagcgaggaggtgctcagtcctccctccacccagacacccccactgccctcccatggaaacaaaccaagattcatttggagttttgaagaggcaggaaccttccagagttctgctcagccctaactccacctgctggccattcattccaccttagaaaggagtaagaacaagatcagtttcggcagcctcttaagaggaaacaaatccactaactcaactcacccctggctgtttgtcaatgagaggaaggatgggcaaatcaatgctgaaccacccctgctccggttccaggacttgcaagcctccctttgtgcaggtggccaaggctgcagcagggactctggacagaaagtggcccacctgctgagaattaggtgggctggtcctgctaacagtcatttttctgttgccagcaccctgtgtcacat

SEQ ID NO: 484922 - DNA, 622 bp, Homo sapiens
gcaaagccaggagtctcgtccatgccaaactcacgccgctctagtcactaggtagggttttctggctggttccattctaggtttaaattagtgttgtgggctcagatcctccttcacaagctcttcccaagcccctgacccggctccttgctctaacaaatgtcytctgtgtagggtctttgacgcctctgcccatttcacaacactgagcgaggaggtgctcagtcctccctccacccagacacccccactgccctcccatggaaacaaaccaagattcatttggagttttgaagaggcaggaaccttccagagttctgctcagccctaactccacctgctggccattcattccaccttagaaaggagtaagaacaagatcagtttcggcagcctcttaagaggaaacaaatccactaactcaactcacccctggctgtttgtcaatgagaggaaggatgggcaaatcaatgctgaaccacccctgctccggttccaggacttgcaagcctccctttgtgcaggtggccaaggctgcagcagggactctggacagaaagtggcccacctgctgagaattaggtgggctggtcctgctaacagtcatttttctgttgccagc

SEQ ID NO: 484923 - DNA, 636 bp, Homo sapiens
ctttggaaggcagcctgctcatgtcacatgacaagctccaaagccttgccctttctaccatctcctcctgccccaggggctatgagaagtctggagaaccttgggaaggagaggtgggttggggatgcttcctggaggagactgtacctgggcagcaccttggactaggcagtggctagctggcttggtggggagatggcttttcagacagagagaggagtttgtataaagatcccrggaactgaatgccagtcctctcttgggcaccatgcttggctgttctgactgctttctctgaagtcttttcctggctcatcctctcctcccaggtggttaacttccattctgcttcctctcccacagattctctctccctacatgacctcatccatgcccttggcttcagctaccatctctctgccaatgacatgaacatctctctcccataagaaccgtacatcccactgcttacttgaccccttcagttcagtgtcttaaagggacttgaaatgccaacatgccccaaagagaatgtccattccagggctcttgtctctgggcctggtaacagccttcagcctgcagcctgtacccagggcagagtcagcctgacacctcctcctccctcacctccgc

SEQ ID NO: 484924 - DNA, 328 bp, Homo sapiens
aggggtgtctgcccctgtcctgtgtcacccttccctgtcttctgtctggttgcctccttcagggcactgctgagcgggctgctgccagcatcagcctaacggagacacagcaccggccgtggaaaattctttatctkaatcctacctcactactgaagagcctgaggcaaatccttgaccccttggatgctctcgtctgtgagggcagcaatgagaattcctgctctcccggccgctgggcagatgtgccctcgcagatgagtgggtgtctgaactgggggcactgaggaccacacagctcccaggcagggcggcggtgtgagaggcc

SEQ ID NO: 484925 - DNA, 589 bp, Homo sapiens
cccgccccacaggattctcagggcactccagcttctgccaggtctgccctccctacacggaagcagaagaaacagatgcagagaagaacagaaggaagaccacgtgccctgaagttacagagggaggagcttccagtttggactttccagttccccatcttgagctagcatgaataggcttctgctgcttccaaccagatgatgccagactcacagcttggacttgatttgatttgaaccaattcaaaatgtagccaccacccaccttaatatccctaccctagaccggcctctcactcccaattaccctgttcctgtcaccatcaccagcatttggagttacattttcctcacatccttgttccmgttctctgtgaggcacctcttaccttcccatccccctccccgacagttcccactgtcccactccataccttcttcagcccaagctctcatctcagcaccagcttcctttccacatctgactccagggtctctcttctccatcccattcagcagatcaccaccactacatcatttattttcttttttatttttaaaaattataaacgacaaccaaccaacccta

SEQ ID NO: 484926 - DNA, 468 bp, Homo sapiens
ttttggccaacagagatggctgcttttagatattgtcttgacagtgactgactcaattagcaggtgtgtaagggcttttgataacctatacttctactctttctctggctccaggaaaaaggtgaggtagcttgcaaataactggatttttccaaacagctagcaccagacagggaggggaaagagctgacagctgagagttgagcaccaagcttcagaaactgacaattccataaagtccatggccaagttcatatgatgaaataaatctgtcacatttttaaatttgcrtgactattgttatgctatgtggcagttaggcataaaagaaacagccagaatctatattttttgtattgatccaaaccaaatatttagggtttttcttctcattttgatatttttctgcaaatgataactataaagagtatcaatatcaatgtcatctacctccatgtgcaatttgat

SEQ ID NO: 484927 - DNA, 590 bp, Homo sapiens
aagcataagcctattttatcagaggagaaataggggctcagagaggcaaagccactagtgccagggatgatctaggatccagaagtcctgtctgtcttgccaaccttccccaaacctgccctggcagcttgtcttttcttcctctgcttcttgtatagaagcttccttgtcatccccacttaaagaaatgtgcccaccccagccccaggttcaggcatgaagcgaggtgcctggcactctgtcaacacaaacaaggctccccaacgtcttgccccttctctatacaaygcccaactgcactttcatgtgtttttgatgtttatgttgccctggtctttgttatttcttgctcagtgtgctgggatgcttgacattccagggtctgtaccctggtgcccagcgcgctgagatgttctgaacacagtaggggaggccaccatctgggatggggcagagcgagggcaagggctgagcgttgggtgtgttgggggaggggtacaattcgtgttctgcacgcacctgatccacagagctctgctcccgtgcccaccgccactgggctctagccctgtctgaaccgagctcaccag

SEQ ID NO: 484928 - DNA, 590 bp, Homo sapiens
aagcataagcctattttatcagaggagaaataggggctcagagaggcaaagccactagtgccagggatgatctaggatccagaagtcctgtctgtcttgccaaccttccccaaacctgccctggcagcttgtcttttcttcctctgcttcttgtatagaagcttccttgtcatccccacttaaagaaatgtgcccaccccagccccaggttcaggcatgaagcgaggtgcctggcactctgtcaacacaaacaaggctccccaacgtcttgccccttctctatacaacgcccaactgcactttcatgtgtttttgatgtttatgttgccctggtctttgttatttcttgctcagtgtgctgggatgcttgacattccagggtctgtaccctggtgcccagcgcgctgagatgttctgaacacagtaggggaggccaccatctgggatggggcrgagcgagggcaagggctgagcgttgggtgtgttgggggaggggtacaattcgtgttctgcacgcacctgatccacagagctctgctcccgtgcccaccgccactgggctctagccctgtctgaaccgagctcaccag

SEQ ID NO: 484929 - DNA, 454 bp, Homo sapiens
gtttcctggcaaccccaagaaaaaccatactgggtctggtctaacccctattcttgggtgcctggcctcagaaaatcttccctgatttcccattatgagctgaggatggttccagagggcaataggagtatctctcatctttgtaccaccagggctttggggttaacctccatttgttaattccacacctctgygaccccaactgtagcctcaactggataaaaaactcctggccagatcctaacagccccactggtccatgtgccaggggtcataggatcagcatctctaggctgccttcacctgaggatgctggtgacagctcctccagaggggaacttccttgggtcttcttctgtgtgcctggtattgacaagcaccaagtagagcccaggaaggaggcccagactctccatacatggacaatttcatgccttgggttttcccatctggg

SEQ ID NO: 484930 - DNA, 525 bp, Homo sapiens
aataatgtcactccagcctgagtgacagggcaagagactctatctcaaaaaaaagaaaaaaaaaaaaagaaaaaaagaaagaaagaataaagaaaagaaaagaaatgaaaaagaaaccctgtagactgtaaatttcattagygtagggacggtgtccactctggtcactgctgtatcccaaatacctagcatcaagcctggcacaaacttaataagtctttattatgtgcaataaatcttttctacattgaaagttccatgaggacagagtatgcctgtcttggtcactgctatatcctcaagatccagtatagggcctgggtatagaagttcttccaaaatatttgtcgaatgaatgaagaagctccagtagcagtggtgcagttccaagattcaccaggaggtggcacttggtccctggctgtctgcagctcacaaggcaatgaatggccaacctgatcagcctgactagaagccattagccagaatggaccagggtggaggaagagaataaacaagatgacc

SEQ ID NO: 484931 - DNA, 622 bp, Homo sapiens
catggagtggctgactggagtgtcagggaacccactctttatcaaagctgcagaagacaatgtgggggaggagcctgaccagtgtgtcatgtgatgtgtgcacctgtgtacagcaggtggcacccagcccatgtcttcacatgcctgttcacatccaccagctttgttgtagtgacaattcgctttatttcatgacttctaatagtgcaccctccagcccccacgctccacttccccaccttcccccgcacctcacctgcacctaaatgcctgcagtacaagctcctccctgctccagcccaagctatgtctctrggttcccctacaccaaagctgcagtgctacccctgggccagtgccaacagtaaaaagcccttgtccttgggcagtgctacatctgcacaccaccctcacctccaggcccccctcctgccacctcccctctgcttccccacatgctgcccacagagccccaggggccccaggtcacaggtcccctctactcagctcttcagctacagttgccccactcctttgcacttaacaggaaccttccagtactagaaagcatctgttcatttcttcaacgtgatattaagtaattgggttgctctcccagcag

SEQ ID NO: 484932 - DNA, 546 bp, Homo sapiens
tttttgtattttataatccattgtggaatgagaatgatagagttacatggagtaattaaaattcccatcacctaaaaccaggattaaagctacaatctcctaattggtttattcatctttaatttctggaaaacaccaattcaatttacaatctgaaattagagcattttctccctaaaatacatatttatgtataattctaacatagtttttaaaaattacctcctaatacataaaacctaaacatcttagcctggcattgaaacattccacaaagtgactttgacctgtttcttcagttgtatgatttctgtttgatattgcaactacagccaagtcagcttttccatatcaggcaaaatgtaaggcasacaatagatacaaggacgaaaaggacttatgtgggcaaaatccttgggaaatgcaccatgactgacagttctcttgagttttcataccactgatatatggaaggctttgattcttcttgttttagacaccatttggggccaaacatgtacaatggggacacttttttccaaatag

SEQ ID NO: 484933 - DNA, 639 bp, Homo sapiens
gcccgccaccacgcctggctaatttttgtattttttagtagagactaggtttcgccatgttggctagcctggtctcctgacctcaggtaatcctcccgccacggcctcccaaacggctgggattacaggggcgagccaccacgccccgccaaaaatattctttatatatctttatcaataccagcagaaagcctcattgattagtagcttctgacttttgttctgagtttgctgaagctagatgccattccagataagaaccaaaaataaataaataaataaataaaaagaaaaacagcagaaagttttcttttaacatttgaattttgtttattttagggggaattttttaatatggtgacattaaattgcctatggttgagagaaaaaaattcaaagcttttaattattaaaatcgctgtcttcatggataattaagttaaactacctaatatgaaatcatgagaattcaaaggtgtatatttawaaaacagggcttttaaaaaatgtagaaaactttagagctactctgtgtctgatcttatgaatggctgaaataattaaccatataattctataaccctaattaaccatgagttatagaaaatcaataaaagctcaccttcccaaactatttta

SEQ ID NO: 484934 - DNA, 262 bp, Homo sapiens
acatagtctcttctttccgggtgagcaaagagatgcaatatgagagggagaacaatgtcattccaggcatgactatggcaagctggggcacaggyagtgctaggagctcagagaggaagccaaggggatgaggagagtgggcctgcactgggccttgggaagcagggcagactgactggtggcaagggcaaggggattgattcaaggagggagaccccaggcagccagaatcccccattgactgagggtgctatctctagaa

SEQ ID NO: 484935 - DNA, 342 bp, Homo sapiens
tttgtccttcctggtccacctcctcaccctttcccaactagaaagtatataaccgttctctcctctggagacatcgctgtgcccagtccagaagcgacggagacccaaggaacgttgtggyagaaggagatcatctcaagtgcagtgcccttccgtcctgttctgaaagcctcccagcaataactaactaggtggggcttctcctctgtgccttcacagcccccgggccttcctttgtcctagcaggcatcacacgggagtctacttgctgatccctctgccgctgtttcagactgtgagctgctcaggggccttgctgaaagttgattggatatggatgaa

SEQ ID NO: 484936 - DNA, 651 bp, Homo sapiens
ggataagcttcaaagagaggaaactgcttgtaaagatcctgaaaaggggagaaatacgcatctgttgagggactgaaagccagaaattaaggggagaatgatcttcttaagctgacactggtgaggccacagtaatgagggtctggtgagtcttcttaagtattctggtccttttcatttcttgagaatgattcttgctctgtcaccaggctgggcttgaactcctgggctcaagtaatccaccagccttggcctcctgaagtgctgggattacaggcatgagccactgtgccaagtattctggtctttgtcttaagagtaatgggaactcatatatggattttaaaggagaatgatctgatgacatgtatactgatctcttactgcaaaaaacaaatattacttaaatgttytgttttgttaattatctcagcccagaaaaaagtcccttatacctagacttgagctcactgtataatttttgtatccctaaataaaaattcatttacctcactagccctagataagatatttcaaaggaataaaaataaataaggttattgtaaaacaacaaacagaaagcccaaagaagtatctagtaacaggagtaaacaacgcagtaattttcaaagtgcatgcagtattcatttg

SEQ ID NO: 484937 - DNA, 579 bp, Homo sapiens
attatctgggtgaggaaataatctgtactccaaacctccatgacacacaatytacctatataacaaacgtggccatgtgcccctgaacctaaaagtaaagtaaaaacaagaaaaaaccccaattttaaagccatcataacttcactgttctcaatatttattttctgttataattagctttagtgctaagacactgtaaggtactgttcactagaaatgagcagtggttaagtgtgtttcttgagctggcagtaactattctagtctatctctttagactctagccaaggttgagacaaaaggttaaaacaaaaagagaaagataataaaaaggatgatgcacattctctcttcatcatgcctcgtaattacgccattactgaacaaattatagttgcagcaattaaaacatgcattttaatttaagagcacaaaaacaagaagaaacaatgttgaggtggcttgctctcaggatttaagtgcttcctacattactaagaaaagcaatttttccatttctcagaaatataaaaacctaggatatataatgagttctgccattattattctctttcaagg

SEQ ID NO: 484938 - DNA, 579 bp, Homo sapiens
attatctgggtgaggaaataatctgtactccaaacctccatgacacacaatctacctatataacaaacgtggccatgtgcccctgaacctaaaagtaaagtaaaaacaagaaaaaaccccaattttaaagccatcataacttcactgttctcaatatttattttctgtyataattagctttagtgctaagacactgtaaggtactgttcactagaaatgagcagtggttaagtgtgtttcttgagctggcagtaactattctagtctatctctttagactctagccaaggttgagacaaaaggttaaaacaaaaagagaaagataataaaaaggatgatgcacattctctcttcatcatgcctcgtaattacgccattactgaacaaattatagttgcagcaattaaaacatgcattttaatttaagagcacaaaaacaagaagaaacaatgttgaggtggcttgctctcaggatttaagtgcttcctacattactaagaaaagcaatttttccatttctcagaaatataaaaacctaggatatataatgagttctgccattattattctctttcaagg

SEQ ID NO: 484939 - DNA, 623 bp, Homo sapiens
tttaaatttgccatgttttcttcatgtcccctgtccttcttagtctcctgttcckcctttattgtcctcttttgcaataaaaaattttaatctatcatttaaatccttgattgatttttattatatttatcgaatgactttcttagcagtagttcaagggatcataaaatgtatcttaatttagcacagtctacctcagtttaatactaatctaattacaataaaatatagaagattttctccaatataactccattccctcccttatcctttatgctattgttgtgatatattaatatatctacatacattttaaagttaacaaaagtgaacaaaaacgtattgctttatacaatgttatgtttttatttttattcatcattatctttattttaaaggtagaaaaaccataagttgaatggtaataaaaaacaaaaataaaagtaggaaaactgaggcatttcatgaaaagtgaaatccattgtacaatgcataatacagtcaaagatcttgaaattaaattggtgtcttaactattatttcttacctttaaccaataaacattatttttctttaaaggagataaaaagattattcattaaatatagtgaaaataaacatca

SEQ ID NO: 484940 - DNA, 611 bp, Homo sapiens
tgcactttgcctctttgtaggcactgttgcccaaggcaattacatgagcacaatttcttgagaatcctttgctgctttgcattcttcaagcatgcccttgcctttgcattgtacgttttctttgccgtgtacttaaatgtagggttttaggattaagcaaggatgaaaggcttacttaaccttaaaccctctatttccaattttctacccaatacattttgccatgtatttccaaagtcacctctacagatgagccagccttttgccaagtccacattcaatacccattattcgacctgaaagctacggtaggtgcttctttgctgtgtgctgacagatggacccctggtactcagkagtggggccacattgcacacaagctccattcctaggccagggccagtatcataaatatccacaacaaaagaaccagggtctcctcagtgcagcatacctcttatctttatcactacagagtccagaactattgtacttggcagcagaatgtgaacgcaaggagaaattattgatttagaaactcctaaaacagtatttacaaatctataacgtcaaaacagctagatctttcaggaaagatgtagggagaactt

SEQ ID NO: 484941 - DNA, 679 bp, Homo sapiens
aaaggcatatgggtgatagctggcagatagttttagttttattaattgcaaaaaaaaaaaaaaggtaccaaaccctaactaatacatagtaaagataatctggaatcatagaatattaagaatggaagggatttgaagtctttcagtctttttctttctagtcctcaactacaatcccactttaaggcaactccactcttaaaggcaaaagatcacttctcccctaatggcttgatgaacagatcgcctccatttgaatgaactgtctcatacttaataaccatcactccagccaccatctttcctttcgctaacaaaggagtcaaaagggacacccatattttcacctgcacaggggttggtgcccctaacccctgcattgttcaagggttgactgtattttatagtgtatctcaaattgcagtctttaaaagaagattccaggkgtccatagattcacagatccttgatggcccctgaaaccaaaactcaaagaaacactggcctaatcaaagggttacctcttggtttcccatctgtacatacaaatactatttccttgactttgtctacgccaggaactttcaccagcattctactttagctccttatgaccatctcttaggtaatggtaccaacagtggtctgttaggaaccaggtcgcacagcaggaggtgag

SEQ ID NO: 484942 - DNA, 590 bp, Homo sapiens
gaaaaactttcaagtttgtagattcaagaagctcattgaaccccaagcagaacaaataccaagtaaaccacatctgtagtgtctttgtaaattttctaaaaagcaaggatgagagaaaaatcttaaaaacaatttttaaaaatcaatacattataaacagcaaattacaatacaaatgaccactgacttctcatcaaaagtatttgttatttaagtgtttcaaagtcagtgtcttagctgtaattcaactttagtgtaccaccagccaaaaaaaaaaaaaaaatgcagttggacatgtgtccatgatgccaagccctttacataattattgggaattttttatttggtcacatccttcaaaatagatcaaagagcaagttactccayagtaaactgacaaaaacctagttgcttaagaaaataaaactgtgccttcaatatataaataagtattagcaccaggttgtcatatcagcccttgaaaggccagggtagaaaggattggtagcagacagtttggaaaaaagatagctgattaaattggattatcatcctgatgtccccttcttctaatctttagccagtgcttt

SEQ ID NO: 484943 - DNA, 527 bp, Homo sapiens
tgctgccttcctttgagattggtgcatggacggaagacgatgtggtaagctctttgtattcatgccttatttgacttgagcaggtatttcataaatttttccctaagtttttaggggaagagattgggccttaggaaagtctaactaggagaggttkacaaattcttttctcactctgtctcccaggctggagtgcagtggtgcgatctcagctcactgcaacctccacctcctgaggttcaagcgattctcctgcctcagcctcctgagtagctaagactataggttcccaccagcatgcctggctaatttttgtatttttagtagagatggcgtttcaccatgttggccaggctggtctcgaactcctgacctcaagtgacgtgcccgcctcagcctcccaaagtgctgggattataggtgtgagccactgtgcctggcctttttttctgtttttaatgcaataatgattgaaaataaagcctcaagagtaaagcaagtatctctgcaaatcttctaagtgggtt

SEQ ID NO: 484944 - DNA, 433 bp, Homo sapiens
atatatatttactaaatagaattgtatatctttatatagttcacattttcattttattcatattggctctgttagtttttgattgattcattcatttattctctcagcacatatttattataaatacragaaatagcgtggtggcgttatagtcattagagctgttcattgagtttttctagtactctgcccttctgggcacatatattgactatatttcctggcctgccttttgcttaagaggaaacccatgatacttcttcccttaagtagccagtttttgtgatatgatcattttctggaaagatcacttaactgcctttctgagaccttcaacagttctattttccttttgccagaccactggcaaagattgaaacagtagctgctccttcagcttagttccaaaatgagaagacacagagcatcccca

SEQ ID NO: 484945 - DNA, 570 bp, Homo sapiens
caattcaaatgcaaaatatttaccttatatttatataaatgttaaatattcatttaaacaaaaactgcaataacagtactgaaagaatgaggggcaaaccaaagtgtctgaggacagttttggaggagcataatagccagtacagaatgtctaaaatggggcccggcgcggtggctcacgcctgtaatcccrgcactttgggaggctgaggcgggcggatcatgaggtcaggagatcgagactatcctggctaacacggtgaaaccccgtctctactaaaaacactaaaaaattagccgggtgttgtggcgggtgcctgtagtcccagctacaggctggggcaggagaatggtgtgaacccgggagcagagttgcagtgagcccagaatcggccaatgcactccaacctggacgaaagaacgagaatccgtctcaaaaaaaaaaaaaaaaaaggggaaagaaaagaaaagaaaatggctaaaacgggagaaagggaattaaaaataacaaaagtatatatgtgtgttactcagaagtatgaagtatagatgtaaagggcagaaaaaacaa

SEQ ID NO: 484946 - DNA, 570 bp, Homo sapiens
caattcaaatgcaaaatatttaccttatatttatataaatgttaaatattcatttaaacaaaaactgcaataacagtactgaaagaatgaggggcaaaccaaagtgtctgaggacagttttggaggagcataatagccagtacagaatgtctaaaatggggcccggcgcggtggctcacgcctgtaatcccggcactttgggaggctgaggcgggcggatcatgaggtcaggagatcgagactatcctggctaacacggtgaaaccccgtctctactaaaaayactaaaaaattagccgggtgttgtggcgggtgcctgtagtcccagctacaggctggggcaggagaatggtgtgaacccgggagcagagttgcagtgagcccagaatcggccaatgcactccaacctggacgaaagaacgagaatccgtctcaaaaaaaaaaaaaaaaaaggggaaagaaaagaaaagaaaatggctaaaacgggagaaagggaattaaaaataacaaaagtatatatgtgtgttactcagaagtatgaagtatagatgtaaagggcagaaaaaacaa

SEQ ID NO: 484947 - DNA, 570 bp, Homo sapiens
caattcaaatgcaaaatatttaccttatatttatataaatgttaaatattcatttaaacaaaaactgcaataacagtactgaaagaatgaggggcaaaccaaagtgtctgaggacagttttggaggagcataatagccagtacagaatgtctaaaatggggcccggcgcggtggctcacgcctgtaatcccggcactttgggaggctgaggcgggcggatcatgaggtcaggagatcgagactatcctggctaacacggtgaaaccccgtctctactaaaaacrctaaaaaattagccgggtgttgtggcgggtgcctgtagtcccagctacaggctggggcaggagaatggtgtgaacccgggagcagagttgcagtgagcccagaatcggccaatgcactccaacctggacgaaagaacgagaatccgtctcaaaaaaaaaaaaaaaaaaggggaaagaaaagaaaagaaaatggctaaaacgggagaaagggaattaaaaataacaaaagtatatatgtgtgttactcagaagtatgaagtatagatgtaaagggcagaaaaaacaa

SEQ ID NO: 484948 - DNA, 520 bp, Homo sapiens
ctgctgcactcctgcctgagcaagagagacagatactgcctaaaaaaaaaaaaaaaaaagcctgcctccctcttaatttcctgctttaatccactcccagtcaggaaatcagaatcaccaagcttcttatccctaggatagagccttasagcatcacatattgtgtcaattaaagatcttttatacaagctattctcctgccttacaattacagtttaattttttattcattgctattttccatctgattaaggtatcagatatctaaccaaaaacaaattaagatataggcatggtcctcttttacttcaacagaagacaatttttagaaaaagtgttttaagccaaacaatttcttgcccttggtataaagcagcagcatgcagaaaacactaattacggtttcaatctcaatggaatctaggctggtccttagcatcagtctgagtgataaatcccttattccagaatacacttaggaagaactactaaggatatatttttacctatttcaaataag

SEQ ID NO: 484949 - DNA, 520 bp, Homo sapiens
ctgctgcactcctgcctgagcaagagagacagatactgcctaaaaaaaaaaaaaaaaaagcctgcctccctcttaatttcctgctttaatccactcccagtcaggaaatcagaatcaccaagcttcttatccctaggatagagccttagagcatcacatattgtgtyaattaaagatcttttatacaagctattctcctgccttacaattacagtttaattttttattcattgctattttccatctgattaaggtatcagatatctaaccaaaaacaaattaagatataggcatggtcctcttttacttcaacagaagacaatttttagaaaaagtgttttaagccaaacaatttcttgcccttggtataaagcagcagcatgcagaaaacactaattacggtttcaatctcaatggaatctaggctggtccttagcatcagtctgagtgataaatcccttattccagaatacacttaggaagaactactaaggatatatttttacctatttcaaataag

SEQ ID NO: 484950 - DNA, 520 bp, Homo sapiens
ctgctgcactcctgcctgagcaagagagacagatactgcctaaaaaaaaaaaaaaaaaagcctgcctccctcttaatttcctgctttaatccactcccagtcaggaaatcagaatcaccaagcttcttatccctaggatagagccttagagcatcacatattgtgtcaattaaagatcttttatacaagctattctcctgccttacaattacagtttaatttyttattcattgctattttccatctgattaaggtatcagatatctaaccaaaaacaaattaagatataggcatggtcctcttttacttcaacagaagacaatttttagaaaaagtgttttaagccaaacaatttcttgcccttggtataaagcagcagcatgcagaaaacactaattacggtttcaatctcaatggaatctaggctggtccttagcatcagtctgagtgataaatcccttattccagaatacacttaggaagaactactaaggatatatttttacctatttcaaataag

SEQ ID NO: 484951 - DNA, 686 bp, Homo sapiens
ttacggtttcaatctcaatggaatctaggctggtccttagcatcagtctgagtgataaatcccttattccagaatacacttaggaagaactactaaggatatatttttacctatttcaaakaagaaaatgagaaaaggcattgattttaaaaaaagaatacatgttacagtttgtacttactttttagcaagatcatattctttagcttcataatacagctttgcaaaatagaatcctctcgttgacttctaaaaaaaattaaaagttgttttacatttcatacagaaatattttccaacattttttcaaaagtagtaaaaatctgccctaagtttatgttcaaatatgccattttcattcacttaaaaattttttttaaagcctgacaaatgcataattccatgttttataatttcctatcacaaaacaaaaaatagagctgggtgcagcggctcatgcctgtaatcccagcactttgggaggccgaagtgggcggatcacctgaggtcaggagtttgagaccagcctggcgttataacatggtgaaactccgtctctacaaaaatagaaaaattagccaggcatgatggcgggtgcctgtaatcccagctactcgggaggctaaggcacgagaatcagttgaacccaggaggtggaggttgcagtgagccagaggttgcagtca

SEQ ID NO: 484952 - DNA, 579 bp, Homo sapiens
gactctgtctcaaaaaataaaagaatatatataaataggtttttgcacattgcttttagtaccctgggagaaagcccaaacttgtgctgctgtaaccattaaagctgtatactatttgctgtggcattatttgacatcaagttacaaactctttgctttgaaggaagagttctgtaaattattgttacactcagtaaacctcgttatttaggagggcaaagagcacctactcagccagattctacacaaagattaccatcccttgtagcgaagcaacatgggttccagttgttcctgacctattcttactaagatcaacactggccacaactagactagacgttaaaggaagatgagaccaatagaaacaagtgcctagcaatttctaacgttttactgtggttgaagtgcagattacacccatcacaagctacacctggattttcctctgaaataaaaaagaacacagtgtcctaggcaatgttccatgtgcaactgagaagactgtgtgctctattgttgctgggtgractgttctataggtgtctgtaaggtgtatgtgagtgggcatgaacatgc

SEQ ID NO: 484953 - DNA, 450 bp, Homo sapiens
tgcatacgatgtaactaatcatatttaaatatatttcactttctctttgacttkagaccttttgaagtctgtataaacttgttttgaaatatagtctccacttacaaatgtcataacaaaatacttttttgcatgataaaaaattgattacaaaaggcatattctttcatggtttctgcaatgagaggaagtgtaatgattattttaatatttctattaaatatgtttaactgtatatttttatggcagctcttttatgttacacactgtctctttggggttgttaattggtttctgaaagggaacttcaaactcctttactactggccttccatggttggtccctattaggttgttgtgagaacgtcgaccaactctttgatacccgccacgtagaccgtagtacctgccatgtctgacaccctgcatccagctaaaaccagaaacagc

SEQ ID NO: 484954 - DNA, 450 bp, Homo sapiens
tgcatacgatgtaactaatcatatttaaatatatttcactttctctttgacttgagaccttttgaagtctgtataaacttgttttgaaatatagtctccacttacaaatgtcataacaaaatacttttttgcatgataaaaaattgattacaaaaggcatattctttcatggtttctgcaatgagaggaagtgtaatgattattttaatatttctattaaatatgtttaactgtatatttttatggcagctcttttatgttacacactgtctctttggggttgttaattggtttctgaaagggaacttcaaactcctttactactggccttccatggttggtccctattaggttgttgwgagaacgtcgaccaactctttgatacccgccacgtagaccgtagtacctgccatgtctgacaccctgcatccagctaaaaccagaaacagc

SEQ ID NO: 484955 - DNA, 569 bp, Homo sapiens
taaaaacactgctgtggggatataaagatgaagaagatacgcatctgtcttaaagaactgagagcatagtgaggaagatagaagatatatacttaccttatattaggctcttggaatttgtggattttttcccccatttttggcttgggatgaatcctaaaggtctgttgcgtattacctgtgattttgctaagatacaaactttaaggtagttagatggccattgaatcaagcagtgaactgaagaaacataatgctttctataaggagcagttctgatataaaattggatgaattttgtaaagagcaagatgtaatattaatcaaagttattataagctttggtgtatagttaggctgttggccaaagctcacattgctcttttattccatagcccactttttttgtgggagttaggctttcagtccttaaagtgactttctacttttttccttttctcttttccttctacccttgcagggctctcataagtgcctttgcgtggtgtcacagttagataaaaattgcctgtatttttttttatrtctttgatctgggcatcccgagg

SEQ ID NO: 484956 - DNA, 451 bp, Homo sapiens
ttttgggttggagggttaggtctgcartaatcatattatttcccctttgggtatacaaatgagacaacgtgagcaaatacaatctgtatttttaaagtgatggaaataacttaaatttttttttcagggcacatgttgctaaacttaagtcgtggcaagcaagattttttaaaagtggttgttgaaacttttgccaacaaaagcgggcagtctgcattatatgatgctctgttttctagtcagtcacctaaggatacatcttttcttggtagcgatgatattggaaacattgatgtacaagaaccagagcttgaagatttggctagatacgatgttggtaagttatatgtttcagaggaaatggtctccgtcttaattcttataaattgcccataatcttattacccagaaataacgacttaatattttcctgtattccttttgtgtgtgg

SEQ ID NO: 484957 - DNA, 451 bp, Homo sapiens
ttttgggttggagggttaggtctgcaataatcatrttatttcccctttgggtatacaaatgagacaacgtgagcaaatacaatctgtatttttaaagtgatggaaataacttaaatttttttttcagggcacatgttgctaaacttaagtcgtggcaagcaagattttttaaaagtggttgttgaaacttttgccaacaaaagcgggcagtctgcattatatgatgctctgttttctagtcagtcacctaaggatacatcttttcttggtagcgatgatattggaaacattgatgtacaagaaccagagcttgaagatttggctagatacgatgttggtaagttatatgtttcagaggaaatggtctccgtcttaattcttataaattgcccataatcttattacccagaaataacgacttaatattttcctgtattccttttgtgtgtgg

SEQ ID NO: 484958 - DNA, 451 bp, Homo sapiens
ttttgggttggagggttaggtctgcaataatcatattatttcccctttgggtatacaaatgagacaacgtgagcaaatacaatctgtawttttaaagtgatggaaataacttaaatttttttttcagggcacatgttgctaaacttaagtcgtggcaagcaagattttttaaaagtggttgttgaaacttttgccaacaaaagcgggcagtctgcattatatgatgctctgttttctagtcagtcacctaaggatacatcttttcttggtagcgatgatattggaaacattgatgtacaagaaccagagcttgaagatttggctagatacgatgttggtaagttatatgtttcagaggaaatggtctccgtcttaattcttataaattgcccataatcttattacccagaaataacgacttaatattttcctgtattccttttgtgtgtgg

SEQ ID NO: 484959 - DNA, 451 bp, Homo sapiens
ttttgggttggagggttaggtctgcaataatcatattatttcccctttgggtatacaaatgagacaacgtgagcaaatacaatctgtatttttaaagtgatggaaataacttaaatttttttttcagggcacatgttgctaaacttaagtcgtggcaagcaagattttttaaaagtggttgttgaaacttttgccaacaaaagcgggcagtctgcattatatgatgctctgttttctagtcagtcacctaaggatacatcttttcttggtagcgatgatattggaaacattgatgtacaagaaccagagcttgaagatttgrctagatacgatgttggtaagttatatgtttcagaggaaatggtctccgtcttaattcttataaattgcccataatcttattacccagaaataacgacttaatattttcctgtattccttttgtgtgtgg

SEQ ID NO: 484960 - DNA, 608 bp, Homo sapiens
gactacacgtgcgtaccaccacccctggctaatatctgtattttttgtagagacagggtttcaccctgttgcacaggctggtcttcatctcctaaactcaagcaatctgccagcttcagcctcgtaaagtgctgggattatgggtatgagtcaccatgcccagccctcaactgtaccttaaggagaaaaaaaaaaattatttgaaattatgtggtgatacagcaatacagactagattagaattctgaaaaagaaactcatttaaaattttaaaactaggcggggcatggtagcccaagcctgtaatcccagcattttggaargcagaggcgggcagatcacttgaggtcaggagtttaagaccaacctggtcagtatgatgaaagcccatctctactaaaaatacaaaaattagccaggcatggtggcacatgcctgtaatcgcagctacgtgggaggctgcggtaggagaattgcttgaacccaggaggcagaggttgcagtgagtggagatcgcaccactgcactccagcccgggcaacagagcgagactttgtcttgggaaaaaaataaataaataaaacgtaaaacccattaatctatgaagt

SEQ ID NO: 484961 - DNA, 608 bp, Homo sapiens
gactacacgtgcgtaccaccacccctggctaatatctgtattttttgtagagacagggtttcaccctgttgcacaggctggtcttcatctcctaaactcaagcaatctgccagcttcagcctcgtaaagtgctgggattatgggtatgagtcaccatgcccagccctcaactgtaccttaaggagaaaaaaaaaaattatttgaaattatgtggtgatacagcaatacagactagattagaattctgaaaaagaaactcatttaaaattttaaaactaggcggggcatggtagcccaagcctgtaatcccagcattttggaaggcagaggcgggcagatcacttgaggtcaggagtttaagaccaacctggtcagtatgatgaaagcccatctctactaaaaatacaaaaattagccaggcatggtggcacatgcctgtaatcgcagctacgtgggaggctgmggtaggagaattgcttgaacccaggaggcagaggttgcagtgagtggagatcgcaccactgcactccagcccgggcaacagagcgagactttgtcttgggaaaaaaataaataaataaaacgtaaaacccattaatctatgaagt

SEQ ID NO: 484962 - DNA, 608 bp, Homo sapiens
gactacacgtgcgtaccaccacccctggctaatatctgtattttttgtagagacagggtttcaccctgttgcacaggctggtcttcatctcctaaactcaagcaatctgccagcttcagcctcgtaaagtgctgggattatgggtatgagtcaccatgcccagccctcaactgtaccttaaggagaaaaaaaaaaattatttgaaattatgtggtgatacagcaatacagactagattagaattctgaaaaagaaactcatttaaaattttaaaactaggcggggcatggtagcccaagcctgtaatcccagcattttggaaggcagaggcgggcagatcacttgaggtcaggagtttaagaccaacctggtcagtatgatgaaagcccatctctactaaaaatacaaaaattagccaggcatggtggcacatgcctgtaatcgcagctacgtgggaggctgcggtaggagaattgcttgaacccaggaggcagaggttgcagtgagtggagatcgcaccactgcactccagcscgggcaacagagcgagactttgtcttgggaaaaaaataaataaataaaacgtaaaacccattaatctatgaagt

SEQ ID NO: 484963 - DNA, 553 bp, Homo sapiens
gtgaaatatgagtatgtgattcaatcactcaaaacctatcagcactaaggcaatataaacataaaaggcttttgaaagtgtttgtagatatatataatatgtccaccwagaacaacttaaaattaagactttaactttctgctgttttcctaaccaatcaactataattaggtgaaaaaactgagttatgaaaagcaattagtagttttgcaactactgatcttctaagtatttattcttgtttcttgagataaaagaaatatactaaagaaagtaaagttcatttgttgactacagaaattccttaatatgcatacctggtctcacttacttaaggtataagactgaggtcagcaggaaaaggaaaatcaacagcaaaagggcaaagatcagatggattccatatctaaggattgttatttcatagttcccatggagatgaataaagaaaagcatgagaagtatgagtgatgcaaagccattggccatccagattagactggtcactactaagacaaaaataaattcctttaagttttataaggcgactaga

SEQ ID NO: 484964 - DNA, 606 bp, Homo sapiens
atacattaacaatctggatttccagcccggcgcggtgtctcacgcctgtaatccctgcactttgggaggccgaggtaggtggatcaagaggtcaggagattgagaccatcctggccaacatggtgaaaccccgtctctacyaaaatgcaaaaaatcagctgggcgtggtggcacgtgcctgtaatcccagctacttgggaggctgagacaggggaatcgtttgaactcgagaggcggagattgcagtgagccgagatcatgccactgcactccagcctggtgacagagtgagactctgtctcaccaaaaaaaaagaaaaaaaaaatctggatttccattttcccttgaaaattataataatctaataacacaggtcctgcattcccacatgacaactggctagagctgagtagtgacctcctccagacattttccactttttatcttgtccatttatttaggtaacctgcctggtagtcctctataaacatcacagtttataatccttgcaccattctatgctttaatacaacagtgtattattatttaagtactaatacaagttatatgtataaatatgaataggattttttttttcaatgacta

SEQ ID NO: 484965 - DNA, 464 bp, Homo sapiens
taaaaatgaaactatttttgagcactaaaacaagaggaatcggtttggtcccaagtttatctcattaggaactaaaaaatttgtttaatggaggtccacattttccatttctgcaattgtattaaatacatttaatagaacacactgcatcctttaaagcaaggcttatcaaactagggttcatatgccctctgtaattacaggtgtagttctgtatttccatgtatgtttctgaaaaagatatggattcaaagcattcatcttattctcaaaaagttttgtgactcacaggttaagaacctstactgtaaagctccaaaaaatggggttttagtgcattagtacaattcctatctttgaaggaaataaatatttggttgcccttttgatgttctcattttcatactgtagttgagcagctctataaccagtttaaccggtaacctgaaagacactgttgtacc

SEQ ID NO: 484966 - DNA, 676 bp, Homo sapiens
ccaagctggaatggagaagggtagagaagcatcaagaagactatttgatttatctgagtaatttacttgaggaaaaaatgagggtatggggatcaagttgagagtaaagcagtagaagacagtgctctgagcaaatggatatggaatataaaggaaaagaagttatcctaagacttaggtgaccttgtattcttgtttgcatacgatggttctgattatacctaatctcttgtagtagttattaccaaagctccattttactctctaaacagcctgtttggactatacattacaggttgagtattccttatccacaatgctttggagcagaagtgtttcagattttggattgttttggattttggaatatcggcatatacataatgagatatcttggggacagggcccaagtctaaacatgaaattcatttatgtttcatatacatcatacacacacagcctaaagataattttatatagtatctttaataattttgtgcatgaaataaagttttgattgcattttaattgcaacctgtcaggaagtcaggtatggaattttccgcttgtggcacaacactggtgctaaaaaagtttctaattttagaacattttctattttgggtttcygattagggatgctcaacctgtatattaattgctttaccattaacat

SEQ ID NO: 484967 - DNA, 597 bp, Homo sapiens
tggacttcatggaaccccactggttaccaatgtcactctggggtgcagtgcccagccctgcgtggtctggccatgacagcacccagtccgggaaggtgcagaagtgagggygcccagtgcttcttattgctcaaacaagccaagcccggagaagccaaggacagagaaaaagggctgcagtgagaacaaaggcggaccacggccatctctggaatgtgtctcagctgccgccctgctggtcctcagactatgggctggcttcatgaatatctgcacatgggcagaaagctcctgatatcctcaaggatgcaggaagctcagctgattaaatgccagtgcggtccaggctcagagttgactctactgaggtggggctcagggtcctgcagtggagagagagagcccccatcagcctggggagtgtagggctctcttctgagtccaggagatggagtggccactctgccctgggcctggtgggcaggaggctctcaatgagcatttcttgaatcagtgagttaggaaaataaggcatagaacgggcaggactggatacgtgaatgagctgaaatggtaggtgtgggctatcccttgggg

SEQ ID NO: 484968 - DNA, 572 bp, Homo sapiens
agctgtgggagaagccacttctaaactcacacattggccgtggtcgggcctcagaaaatctacttccaaggtcacttatgcagcatataaggactgacccatgacattgaagttaacttgttccagaataagcagtgacagagagagagagagggagagagaacctcaagacagaagctacagtccttttaatagtccaaaaacagaagtaaccatacataatttctgctgtattttattcatttgatttatttctctcccccataaagaatgtattcactccataccaagattctccaaaattttatctcattattacaccaactcaaagtctaagagcttattatatatattaggtccaggtgtggatgaggctcctcaggtgtagtttcttaattacagcttcttgagtacagtttttctcaatctgtagaacggtgaaaccaaagatacaagttatctgatcccaacatccaacattacaatggttggacaggcccaggataacatctataggyattcctgttcagaaagtgtagatggtggggagaatgggaggcacagaggggcca

SEQ ID NO: 484969 - DNA, 654 bp, Homo sapiens
gtgcacgggccgcgctgcctcctgctccagcacatacagcaccttaacacaaggtatctgctaccagacaaatgtggttctctcagcgtgctgacagatgcacgcacatgcatgcacacacaaacacacagagacgtttagggactgcaacattcactcataagtgcaagaaagagatcactccrcatgtgacattgctttcttttaattggagtgaggacaaaacctgatcccgttcagagatgaacagaatcatctaggtcgttaagaacagtcttatctttctggttaaccaggtcctaaattcaagggatttccacgtgttctttaaaaccacctgaaactgtcctgcgcaggctcacactgcggctctgtaccaagggcttggccccgcctgcagccagagggcatctcactggatgtcatcatcatcaaaaagatcttcaaaatctagggaaataagcaaaaccacgtagttacacctacaagggtaagggctgaagaaatcacttcagaatgaattatatagtagtccaaaatacagagataatcgtcaatgatccaatgaaataaaagacttttcccgtaacagactttcagtttcagccaaccagggctcgtacatgtagtccaaggggagagtgttggctagag

SEQ ID NO: 484970 - DNA, 539 bp, Homo sapiens
taagaatgctgcctcaggggcatggccaggcaccctgggaaagcctgcaccccaactcagcagcttggctgctcccctcaggcaatggctgcctgacagtaagcctgatgaagcagcagggactcaggatggcagggggtctctggtaarttagaaaccgatgtggcaagctcaggtcctagctgttaactagtaacaagagctttctgtagagaaaagcaccatggattaaaccaggatgaaaaatgccacctcactctctggagtaagaaacctatcttatttacttattatttgaacccttagtaaaggttaatatcatctataggaataaggcctgaagaaatcagaagagaatgagaaatattccctctagcaggtctgaagatgttacagaaaatttgcttttcactgttcatttggtttacccatgtttttggtaactagcactgaagcccttaaatcaagaggaaaacacatcctgcgtcctgatttcagagctgggcaagagctggagtatggctgtccctctgcaaagg

SEQ ID NO: 484971 - DNA, 539 bp, Homo sapiens
taagaatgctgcctcaggggcatggccaggcaccctgggaaagcctgcaccccaactcagcagcttggctgctcccctcaggcaatggctgcctgacagtaagcctgatgaagcagcagggactcaggatggcagggggtctctggtaaattagaaaccgatgtggcaagctcasgtcctagctgttaactagtaacaagagctttctgtagagaaaagcaccatggattaaaccaggatgaaaaatgccacctcactctctggagtaagaaacctatcttatttacttattatttgaacccttagtaaaggttaatatcatctataggaataaggcctgaagaaatcagaagagaatgagaaatattccctctagcaggtctgaagatgttacagaaaatttgcttttcactgttcatttggtttacccatgtttttggtaactagcactgaagcccttaaatcaagaggaaaacacatcctgcgtcctgatttcagagctgggcaagagctggagtatggctgtccctctgcaaagg

SEQ ID NO: 484972 - DNA, 646 bp, Homo sapiens
accacgcccagctagtttttgtatttttagtagagatggggtttcatcatgttggccagaatcatctcaatctcttgacctcatgatctgcccgcctcggcttcccaagtgctggaattacaggtgtgagccaccacgcccggccagggtcgtttatttttatgtgawgttcctggcaggtggtgcagcactggtgcatgatggtaactcacattccttctgcctttttgctccaccaatgttgaacttgaagtcctggctccacatggtgacatctgcctaataaatagcaggctaaaggaagagaaaaatgagagggcagcagacatatcgtgctgtgtctttggaaggttctgggacgctgttgtgtgacactttggctatactactttaactgcaacttggttacatgaccacagtgttttgcaggaggatgaaagctcctgtctttattctgggtgaatatgcaacagctatcaacaaggattctattacaacatcacacaaggaaatcagtgttaaaggacagccattaatctcttctacagagtctatcttgccctactgtcgcttttgatcaggaggaaagtatttcccagatgatttccaaatgatgaatcacaactgcatcaaatatggatactgc

SEQ ID NO: 484973 - DNA, 638 bp, Homo sapiens
gggctttttatgtggaaaacagatttactaactacccaacaaattactgtacgccttaatgatgactgcgatgctgaaactagagtcacrattgaggtaatctttataattacataagtgccactggattcttttgcaattttaacaactttatttgaatttaaaatacaagccatattgctagttgtaaagagcaacaaagttattaaacattgtatggaaaattaaactgccgaaactttgactattctttgtaagaatttaaaaccttagagagagtctcaagcctagaagcacagatctaaattaataatttctatactgttttatttggcacttcactatgacaagaataaagaactccttcagctccaccttcatgaaagatgtgtgattaatctaagattgataattataccctcttccatcaagtgaaaggacctgagatgttgaattagaaatcaagattataaatacaacttgagataaataattggcaactataattcctttctttattgacttttcttttgattatgtcagtcatgagcacttaatacttagaaaccctttatatgtcctttgctcatttgaaacttggaacacgcttttacactgaagtaatattgtaagagcag

SEQ ID NO: 484974 - DNA, 522 bp, Homo sapiens
gtctggcactctctagtgagatgaacccggtaccttagatggaaatgcagaaatcacccgtcttctgcgtcgctcaggctgggagctgtagaccggagctgttcctattcggccatcttggctcctccccccgccataaataattttgatttttttctttacagtttatttgattcgggctagttacttactcttctttggtccaaaatctcctatgacttgggtattaacttctcttctaatatttttctaacggaatataaaatttcctagacaaagatccacaayggctggagtctttcttttaactgttcattttatttaaagtgaaagtttgccaccaggtggcagtaaattacttataattttgtcctagtttataaactaagaagccaaaattttttctgtattattttccctgatgttcaattttaaggtgtttttatttctaatgaaaacggcagtaaagttgaattgactaaatctcttatagttttggaaatagaattaacctatctttat

SEQ ID NO: 484975 - DNA, 480 bp, Homo sapiens
atgcaaacagtgttactttctagtatacatagagatggctgttgaaagggaaatatacatcttttccatctacattcaaaggaactttagtattccaatctcattttaaaatcacaatgtggaaaatattaagttgaaataagttaatttctttattaagagagccatttaaaaattgcttttattaaataaaaatgtcaaaaacaaaacatctgaaaagtaatttcttagtcttctgcaaaacatttggtatcrttgggtttatttttccacattcaaatactccaattttatagtaaaaagagcctattgcaattatatagtacaattctcttattttgctggtgtgaaaacaatgcattaaaggtttctattaatttttttcctgataaataaaatttatgtttctactttttgagctagctaaatactagtacattaatgtgtttgtggtagatagctgaggttttgaaatcccag

SEQ ID NO: 484976 - DNA, 596 bp, Homo sapiens
  misc_feature (1)...(596): n = A,T,C or G
gcagtaaactttagtttgaaagcactttacacctgttgagttagcattaaaagattagttcagtttgttgcattccatgatttggcagaaatagaattttttaggcmtgtggctactttgggagaaactggttgtagagaaataatggtgatattcaaatccagaggaccaggcccaagagaaatccttgtaggtcctgtgacttgacatcctaactcaagagcagccagctctattggttgttcgaattaaatgaaaataaagttcttaaagcttaagtgtttcaaaagtacattctaaagagttttgttgatttgtttatcgcatttatgaaacatgcaagttagttaagtcatttatgacttactaagagaccctgacatttcagagggtctttatgtgcaagagtgagtttaggtgcggganctatggtntgggaatcaaattaaattaaggcccggaataagacaacgagcgaaacacattacatagaaacacctgtctttccatactagctcaggagtgctctcctgggggacaccagtttcttcggagtccttatagaagtgtccgttttgactcatggcacctccagc

SEQ ID NO: 484977 - DNA, 655 bp, Homo sapiens
ggggcattttcacatggaggaatctgcaacacacatggaaataggtgaagcttgtcactatagcaatggtgtactcaacattttctctccaggacaagttaatctttgaaaaatttatgmagcaggaaaaagctcagaaatgacagggaatatgtatggaggagaaggaaaaaaatatcattgctgcaaatatttattcagcacctttgtcacagcagtcagtgcactaagggctggtaattttttaaatgattgatgtaaaatccatgtccttaagtaacctacttaaaagacaaacataaaagccaaaaataaaacctgtgtaataggatagatattgcaagtattatgagaagcaaggagattggtcagctagctttatcaagaaaatagacatgatgtcaaaagctgttatttggatcgatcttgagaggtaagtagaaacattccaggtggtaaaggaaggcaataacatttgacctagaagtagaaagtatgtgaaatttgtcattgcctatttctaggatatctatggctgcctaaaccatcatgagtacattgtaattactgctattgaaacttatagatgagaatcatgcatttgcttttttgctgaccagctaaccagtgacatggaaatcattattacacttct

SEQ ID NO: 484978 - DNA, 655 bp, Homo sapiens
ggggcattttcacatggaggaatctgcaacacacatggaaataggtgaagcttgtcactatagcaatggtgtactcaacattttctctccaggacaagttaatctttgaaaaatttatgaagcaggaaaaagctcagaaatgacagggaatatrtatggaggagaaggaaaaaaatatcattgctgcaaatatttattcagcacctttgtcacagcagtcagtgcactaagggctggtaattttttaaatgattgatgtaaaatccatgtccttaagtaacctacttaaaagacaaacataaaagccaaaaataaaacctgtgtaataggatagatattgcaagtattatgagaagcaaggagattggtcagctagctttatcaagaaaatagacatgatgtcaaaagctgttatttggatcgatcttgagaggtaagtagaaacattccaggtggtaaaggaaggcaataacatttgacctagaagtagaaagtatgtgaaatttgtcattgcctatttctaggatatctatggctgcctaaaccatcatgagtacattgtaattactgctattgaaacttatagatgagaatcatgcatttgcttttttgctgaccagctaaccagtgacatggaaatcattattacacttct

SEQ ID NO: 484979 - DNA, 574 bp, Homo sapiens
caactggtctctaggctagaaaggcccttagagatcatgcaattcaacatcctcatttgcagaaggtgagacagtctcaaagaggaggcatgaccagcacaaggtcacaaggtgggtcaaaggcagagctggggactcccacccaactcagtgctscccccacctcagggcacacacctgcccccgtggagacatgtgaatgaccctgcctttgattcaaggtactagagtaaggggaagggaatgaaaactggggcaagtgtttcaagtgagtccttgagaggaagctgtccctaccctggcacaatgctcagtccttcctcacacctggtagcagcccccaaaatgatatgtccgcattctaatagctggaccaggggataatacttaatatagcaaaagatgggattaagtttatggtcttgagaggaggaggaggagctcattctggattatcatggggggtcctaaatgcactcacaggtgtccttcctgaacagcagtaagagtcttgggacaagggaggcagagaatgaagtggtggagccatcagccaaggaatgcctggagccac

SEQ ID NO: 484980 - DNA, 540 bp, Homo sapiens
cagctgggacccacagcactgggaggagaaatgtccacgcattcctttttcccacccagggtccttatggaacayaagtttggtggtttggtgggaagatcacagacttcaaaaccaaaccaactcaggttcaaatccaattcggtcgtttactgtaaactcttaatactgttgagtttctttatcttacagtgggaatgtaggggttgagagtgagaaacgttcagagccagcaaagtgactggcacataaaaggttctcagtggtagtcaagataactattatctgtctataaactaatgtgtggtgtgtatttgtgtgtgtgtgggtttgtgtgtgtgtctaagtgtcttagtccatttgggctgctttaacaaaatatcatagactgggtggcttataaacaacagaaatttattctcacagctctcaagactgggaagtccaaaatcaaggcagagttggtgtctggtgagggtctactttctctctcacaggcagtgccttcttgctgtgtcctcacatggtgggaggggtgaa

SEQ ID NO: 484981 - DNA, 393 bp, Homo sapiens
ggactgggaggcatggaaggggtcgagacgggctcccgcggcaggggrttaggcagggagggcctaggagtcagaggtgaggccacggagctgggcgtggtcgggaccgcgtaaccaggtcgggagcggggtgcggggtggccttcgaggggctcgggctcaaggggctgagagaagggggcggggccggggctggcggggccggggctggcggggcccgtagtccgcgcagagcccctcacctctctccgggccggtgatcccgctccctctcccgctagcgaggccgcaccttgggccccggcacccggccctccacccgggcccccaaaaacacccgagcgccgcggtgccgggaccccgctctgccaggaaacaagaagtctctcgcct

SEQ ID NO: 484982 - DNA, 559 bp, Homo sapiens
tcggggatgaaagcttagacccacaaccctcatcccagggtggccaggaatgggagcgaggggcaggacagtgtgggagactggatagagatggcttgtccctggggcccgggaatggggctgctggggatcctgccggagccctgggcaaaggtctcacctgcatgcctcatggcagtgctcctgggcccaggccagggcctcaagcaagaggtgccacagtggcagcagcacattctggtggaaaagcaggggcagctctctcagatagcggagtagctgattcacggaatcggggagctggatctgtagctggaccatggagaatggatggggtcagagtatccagggaactgcatcctggccctaaagactcaggccacacagtgctgctcctttcccrgaattctgctcctgggaaaaccagccccttatttgactccctgtctctgacttaccctctgagagagactggtgagactgtcaccaaaccacgcaaggtgagaggcacagtgggcagaaaggaagctgactgtggcattggtgtgagcccaggcca

SEQ ID NO: 484983 - DNA, 623 bp, Homo sapiens
tcagaggagagcagccctaccgatgctgtgatgctggacttctggcctccagaccagtgagagaatgacctttgtwgttttcagccacccagtttgtggtcatttgtcacagtaggcacaggaaactaatccagtgtgccaaaatcaaggtgttggcaaggctgtgtttcttctggagcctccaggagaaaatccgcgtctttgcctcctccatcctctaaaggctgcccacattcactggctcctggcagcgcatcactctgcttccatcatcactgttctctgactgacccttctgcttccccttataaggaccctggtgattacactgggcccactcagataatccaggataatcttcccatcacagaaaccttaatcacatctgcaaagtcccttttgccatttaagatgacatatttatatgttccagggattaggacacggacatctttgagaacctaccatagtctgtaagcctaaatggtatgggtatgttcaaattagatgctactccctgaatcttgagaaaagcagtatcaaaggaaacacttctttatacagaagtggtatccatggaatgtattacctgcacaggttctctcaggcagaaaacatggaaa

SEQ ID NO: 484984 - DNA, 549 bp, Homo sapiens
agcatttctctcttaatctttaccctccatatttatttacataatgtaaatatgtaaatattgtaagagctgctgccgcctggcacccaccaaggctatgggacagaatacaatgaccatccccatgccgtggtgcgtactgccctccacagaggccaccttygcccacgcccctatcgatggcactccactcgcattggctaagccctgcaccccccaactctgtttaggttgtgaacataacgggatgggagtgggagttttccagtggttggcaaccagaactgaaagctaaggacatggatgagacaagcaccttattatctaagacagccatcttcggtggggccagtcgcttccctccactgctcctgcaccatcttagaagaggcgaatccccatcccccaggtctagaaagcgggaccctcggagggagactgaggggttggcaggatggagagtcctggcattccctcccctcctctttcctgagttgagtggggcttccataccctctcctcaccagtccaccctgaagacaaggaggg

SEQ ID NO: 484985 - DNA, 549 bp, Homo sapiens
agcatttctctcttaatctttaccctccatatttatttacataatgtaaatatgtaaatattgtaagagctgctgccgcctggcacccaccaaggctatgggacagaatacaatgaccatccccatgccgtggtgcgtactgccctccacagaggccaccttcgcccacgcccctatcgatggcactccactcgcattggctaagccctgcaccccccaactctgtttaggttgtgaacataacgggatgggagtgggagttttccagtggttggcaaccagaactgaaagctaaggacatggatgagacaagcaccttattatctaagasagccatcttcggtggggccagtcgcttccctccactgctcctgcaccatcttagaagaggcgaatccccatcccccaggtctagaaagcgggaccctcggagggagactgaggggttggcaggatggagagtcctggcattccctcccctcctctttcctgagttgagtggggcttccataccctctcctcaccagtccaccctgaagacaaggaggg

SEQ ID NO: 484986 - DNA, 630 bp, Homo sapiens
aatccagttttcttttctaccttaacgcattgcttaactaacttttggatttttgaaatgtattttgctgagtttttttggtcagcaaacagtgcctgtttgagttttctttttctgcctcctgtgcatatgccacctgaacgtctgagcagatgacagtgccgaaccggtcctcctgcctccyctaatatgtgattagggacccactcgagcatttctaagaggtacttagggatagttaatttaaacttttgaagaatggagaatttcaattcaggttgtgaacaaccctagggaatacacttaatgagaatacaatgaaaaactcacacagaaaatagagcaaggttatgaaaatctcccaatgattaagatgaaaaaaattaaaaatattattattctatccaaaacttttttttttaaacttctcattgaagtcaattaggtccaaatgctcaagagagtgattgagtaaaagaagtctgacttgatggtacatgtggatggatgaaatggacaatgaagtttccatatgttgcttttatgcagtaattagaaactgtcacacacggtttcattttttcatttccttgggcttatttgcatgttggaacttcctttggaacagga

SEQ ID NO: 484987 - DNA, 609 bp, Homo sapiens
cgttaaatattgggcttcagtcttactgatatctacaagaactttctaaaggacaagtaagccagstgttgctatttatgagacttcgataaaacaatcaagaaagaaaatatgaacctgaacagtttaatattacccataaatattctgctaatttacctcagctaatgagagcttccaaaatagttcctaaatcttttgctgaacatctgtgctcaatgtgggtagttatactaccaaataatctcagtttttgctaatttattgccatgagttaaggtgctaaaattacagaacataattagttatatgaaaatatattacgttttatttattatggtcttttttggtaaaactcaataagtattagtttaaaaaatcttttagataaaaatatcacagaaatccttatagatgaggataacatgaattacttgcttaactgatggcatctcaagttggcatagctaattttgattctctttaggtgaagatattctttggcattcatcatcttttctcccttctagctcagtttggtctgctcctttattttccaaaactgagccaggaggatcatccacagcagggaatgggcctatatatcaa

SEQ ID NO: 484988 - DNA, 636 bp, Homo sapiens
tgtgtgaatgggctgacttcttgactgcaaccacaaaaagcacctggagctacaaccattcagctaagccactcccaaagttctgaaacaaactatgtgacataatacatgtttattgttgtttgaagctgctaagtttgggagtaatttgttacccagcagtggataactaataatggataagcaataccatgaccgaaactgggaaacaaggatagggaatcccatttacctttgctcatagggagctttgttattttctcctcccttccccgaaatgtctgttacatagggatgaactaagatctaacaaaaaatatacctcttgcttctgctttttgctgaacctgtgtgtggtacctcctatctggcacagtgttcaccatcacttattccttttgacaataagagtgttacaggcatttgatgaaggcaaaacctctggagctaaaggaaatctagtatatttcaagagcagtttggtcctatagatgagtctggagtcctgaattccaaatgttaaatgacttgctatttctcttgttccctttstgtttttttttttttttttttttttttcaatcccaaagcagatgtcgtctctcagctctgccctgatgtgcaattttatagttt

SEQ ID NO: 484989 - DNA, 486 bp, Homo sapiens
ctctccccagtggtggacaagggcaactccaccttgctcagccagcttttatccccagattcttcctccttcagagtgccttgctgatttctgctgttgtcaggatcctggactttggagacgatggttccactttttcatactctcgcctcacaagggagaaaaagcactctttccttttacttagatgtcrtagctcaactgaggcagattggttatggtgttgaagtaaggttctgtttaaattttttttctaaggctcagggcgagtaacagggaaatctatacagaggaaaccctggaaccagacatttcaagttctaagtcacggcagcctcactttctttccagttcccctcctgggagtacatcccaaaagcaagtgactaggtatgaaaagttatccagcaagactccaagatgtacataaggaagagatgtcctttcctgactctgccttctgagtgttgagcctctgcttcatcc

SEQ ID NO: 484990 - DNA, 481 bp, Homo sapiens
caacaaggtttgtcattgcaggaagtctccaaggacccccatgaaacacctgcatttcctgtcatgattttgaggctgaaatcatcttcctcctcccagaacacctaggtgttctagtctgaagccatcctcactctcaactcccctccttcgagccctcaccctgtgcctgaattcttccttctttgctgggacagatggacaggaggaagacaggaagtggggaaccccttcaacaactcctrtggcagaggggagccataggagatgggccgggaaatgtaaagaccagcccacgcaggaaaaaaagagaactttttagcacagtgtcatctgaaaatgcaagagaagagaggctcttggtggcaacagaggagtgtgacttccagcctcagggctagcacctgacccctgctctccgtccacatctgaaaaataccactggccctgagaatccattgcaactgaggttctgcacccc

SEQ ID NO: 484991 - DNA, 481 bp, Homo sapiens
caacaaggtttgtcattgcaggaagtctccaaggacccccatgaaacacctgcatttcctgtcatgattttgaggctgaaatcatcttcctcctcccagaacacctaggtgttctagtctgaagccatcctcactctcaactcccctccttcgagccctcaccctgtgcctgaattcttccttctttgctgggacagatggacaggaggaagacaggaagtggggaaccccttcaacaactcctatggcagaggggagccataggagatgggccrggaaatgtaaagaccagcccacgcaggaaaaaaagagaactttttagcacagtgtcatctgaaaatgcaagagaagagaggctcttggtggcaacagaggagtgtgacttccagcctcagggctagcacctgacccctgctctccgtccacatctgaaaaataccactggccctgagaatccattgcaactgaggttctgcacccc

SEQ ID NO: 484992 - DNA, 570 bp, Homo sapiens
atagctaatacatgcggggcttaattatctaggtgatgggttgataggtgyggcaaaccaccatggcacacatttacctatgcatgttctgcacatgtatcccagaatttaaaataagacaataaataaataaataaataacatacataaaagaaacagtcaaaaatagtcttttcctaaataaaaaaatcagtggttaatccacatggaacattgaaccaaacaattgattgttttcatgtttgagatactatgcaggaaagaagcactgaggaaccagaggtttcatggaatggcactattaagcttactagctgggagatgccttgctattacacttattagctgggagatgccttcaactttccagaataatccagggaataaaaaagattttaaaataaatttagagaaatggtacaacttcattaacttttggaaacctcactgtaaaaatggaacagaaacactttcttgagggttgctgtgaaagttttgggcccagcttttgaactcagaccagggcttcaagggcagctcaatggctcactgcctgcctgacactgggtc

SEQ ID NO: 484993 - DNA, 388 bp, Homo sapiens
gagcaaagaatgtggtactgtatatttttataagataaagttaggacattttgaaaaaccatttcagacggttgttcgtttattttgtgagtaggttttagttcagaattagtaagataagcaaagcaatataaagaatatcttacaatttatatgagtatctagatatatttctgcttttaaaaattatttttgtggaaactttatttttaaactaattgtggttcgattttaaaagtttgatcttgataggatacatctttttgaaaaattcacaaaaggttttttccttcttgctgaatcacatccacagttgaagagtacttcttttaaaatgscttaatattgctagaaatgttaatctaatgctaagtgaatatgtaaggca

SEQ ID NO: 484994 - DNA, 434 bp, Homo sapiens
aagattacagttcctattaagacagatacgtgtatccactggatacaatttaaaacaggagaaaaggtacatagaactcctttctgaagactttggaaagtaaatggaatcaggaggattacagggggaaaaaagagatctcaaagtatcactgaagtggtgataagtatcacatttgtcctccagtttttcccagcctggactcaaaagcattctaaaacctagaagtgtgcactcagtacacacataaaaactctaagcccascatgcaggctcctaacactctgtgagaagggaactctagtctctgaccagagaagcatggctccaagagtggcaagagggaggtatcctcattgcttttttcctttccgttatctaaccacttggccaccaagggatgggcaattataggaattgggcagcagagtggg

SEQ ID NO: 484995 - DNA, 519 bp, Homo sapiens
tcagagtggtcaagaaaatgggaatttrtaattaaccaggcctatactgtgcagcttataggaaaggaggaggatcctataattaattgtcccaccagaatcacaaatctaaagtatgagagatttaatacttcaaccagggtgtgcagtgctagacaccctaaacccacatcttccaagaggaaaggcttctacaataattggaatataggattataaagaagaaatgaaaggcccacattccctcagaaaaccctgccccaaaaatgtacagaagagaaacacctctgggccaagagctaaatggtgtttttgcttttcatccagaaagagccaagataatgcaaagggaatattattctttcctaactgatgcaaacttctggggagaaaaacatacaagtgcaaacgttatgttcaaatctacatatgcgtaatacattcatgagcaccagtgtatcattgtgatttggcacttaatatttaacgaatctaatatttttgtttctatgaatactt

SEQ ID NO: 484996 - DNA, 642 bp, Homo sapiens
cttatttttgtttcatgggtctaatttctaattagaggattttattttgtgttctatagcttaacttatctttgttttggttggagtcatttaaaaaacttgtctctattctgaaataactgcacagtcttcatcctygttcatttaagtcgaagtgcgaggcaatgaaaaatcgtgcatgtgaacaagatctgtcaggtagatggatttgcgtctgggagattgaggacatcctaagtgccagaatgcagagatgtttccagtggggctatcaatttgtttcaaggaggaccctttgatgcttagactggggagtaaggtggggtaggccagggagatgtctggtttctagtgtgctgagagagtgcagtgggacagggcagcccatgtccacaccttcatttcactgccttcattattctgtttctgagtgctgaaacctatcagagtctggcaaggtagatgggcgtatcgcctcccataaggactctaggccatggttcctctgatctacttcatctgttttcatccatcttctagtcatttgttgaatttctattcagtgacagcccttcttttactttctttatcgttgtgcattaaatccttttaaattgtcttgctgtcattttaaagagaacc

SEQ ID NO: 484997 - DNA, 410 bp, Homo sapiens
tgttatttacatttaaatgtggcctctgtgtgatgtcagggacacggtgccctaggctactgaggggaaattagggtgacctggtgacaatttacagcagattgcaccatttctcatacactttataacaagagtttgaatgaggaaggaatgcatcaggctaaaagcctgggaatcattcctccagtttccagttttcatgacatgctatgtgaagagcctggtaatttcacaggagaggatcctgattccatttagtcccaatcccttttgccagacagaacatgctggaaacagcgtgacaaagaaggttataatacacattttcagagtttctagactgaacagtgggagcttcaggaggtggtccctgggataaartgagttatggagagaggggacatttgttc

SEQ ID NO: 484998 - DNA, 374 bp, Homo sapiens
gagcacacgcccccccattaagtgatttcctcctgtacactggccacccagggcatgaatttaaaatgtatgcctccrcaaaagtaccactgtaccacaccatgaacatggctgacgctgagattgttgactgctcaaatgccagggattccctggtcttggccttcccatgctgtgctctccgcccagggttgcctttcttctccttgattatggaactattgcctcataaaccctcaggacccaccttgggtcaccccattaggcccctttgtggtattctcattataccatgtgtctcctgtctgacatgtatatcatgtggcagtttttatttacttgttgctttcctttccattggatggcgatagcaa

SEQ ID NO: 484999 - DNA, 517 bp, Homo sapiens
tgaatggccagtgcttttttttttttttttttttaatctctcttcttacacatcacttttgtttttatattattgttattcatatatatgtcttgtcacccccctattgagttggatgctctttgaatgttttttatttcatgggttctcaataaatatttgtgccacaaatgacttaatattacttgttactatgaaatttgtgcctctatatatgttgggtgacaattagaaaactaatgataattattgcatcaaaaataatttgagagcacaaatcttatagcattgtcatgtaagatgggtacatatagatttttgttattcttcatttgttgggcatgtagaataaatccacaataaattcaatagaagtaaagcttatttctgcatgtayatctagataaacataaaatattgattctctgttttggaaaaaaggaaaagataatgactaaaatttctttgtggtctctatgatggtttaatcacatgtctctcaaaaatctaattttct

SEQ ID NO: 485000 - DNA, 638 bp, Homo sapiens
cttgaaaaatgccaccttcctttaaagtaccattaagtaaaatgaacataaggaatgttaatcggattgtctcaggatcaatgcactgatattgatgtgttaaatattgtggttattagctgaaagtatttattaaccctaataagccagcaactctatggaactttctatttaacttttctcataagctactttgggggtaaacaaatcccaattggaagtaaggactgcaaatcaacccagccaagtgtaatgattagcaatggaaatatcccattgtggaattctagttccatatgctcgtgaaaaaaagattacagataattataattaggaactcagtgtgtgggagtgaaagtaatgattactgaaagccactgatcatggtgggagtaggggtgtgttataaagatgtgaacattttatctaaarcgtgcactctgttaattagtaactttcaatacatttatatcttaccgatacaatttctattgtttcttgaacactaggaaatgcttgaggtgtgaatattgttttccagtgtgatttgtactacctacacattataaagggatgttaaccgttcgaatcctctttaacggcccccagcagtgaaggagggtgggcagggagaggaa

SEQ ID NO: 485001 - DNA, 574 bp, Homo sapiens
tgctgagaaaaaaaaaagagtccatttcagagtgggtagttagtaccattgatttgtttctgtaaacagaagaagcttccactgtgctgtacctcactgcaatcatttgctcattagaactcattaagaagggacaatctaaataaaagtgattatctcaagctcttcttctgtatagtttccatccagttagggtttttctgcaagaatgattcttattatacacatccaatggattatttcaaatacaacttccatttacacaaagattgactgagcccctactctgggctatgcattgtacragtgatttgttctttaaaaaatcattaatcccaacactaatgttgtccggaataaattttaatgtatgaatgtttgtagctaattaaatcagtaaataagaacaaagatcatcaaatttaataattagagcaaaatgtataaagaatgtttctaaataaacaataaaaacagctttaaataacattaaagatgttcatgagccaagcccacaagggagcataaaaggctgatgaggcctattaaacagaagtactacgtcctttgtagt

SEQ ID NO: 485002 - DNA, 399 bp, Homo sapiens
aaaattaacatattatcagaacctgtatgtaagtttactgaattactgttaaatggaaagtgatttatgatcacctatattagcagggagataaaggctaaagaaatgcaraacaatttatagaaacaattaatgtttatattcttgattataagatatgctgatatttatagttaaacaaaagcatctatcatttctatattttttaaatctaatttttttttttgagacagggtctcaagtctgtcccccaggctggagtgcagtgccatcatagctcactgcaacctcaaattcctgggattaagcaatccttccacaggttgagcttcttgagtaactaggactgcaggcacacattactatgcctggctaatttcttaaacattttttgtagag

SEQ ID NO: 485003 - DNA, 586 bp, Homo sapiens
tattgacttaggggatccaaggagaccaaaacagacacggtctatgctgcctactttggtggggacagcaggttagatacagtggtcagtgcaaagtgacgaggtctctgatagcagragtagcaggtattagagcggcacatgtaggagtggaggggtggggacgagggggctaggaagggtacctaggagaagtgactttaggtgctggcagaaagagtaggaatgagctaggtgaagaggctctggaaggaatgattccagccagtggggagactgtgcttgggcccagaggtagagggtattgtgaacacatgttctgttgactgcaactggcaggagatggacctggagggggtagtcagggacccaaccaggcagcctgtttccaaggagcttagactgaatcctgtgggcaatgcgaggcctctggcaggtttaagcagcggagtttacaactcttggaatcacttccgtacagtgatgcaagtggcttgagaaatcatttgataaagttgaaatcagatgataaagttgaggcccagggaggtaaatacagtcacgcctcttactacaattgttacca

SEQ ID NO: 485004 - DNA, 586 bp, Homo sapiens
tattgacttaggggatccaaggagaccaaaacagacacggtctatgctgcctactttggtggggacagcaggttagatacagtggtcagtgcaaagtgacgaggtctctgatagcaggagtagcaggtattagagcggcacatgtaggagtggaggggtggggacgagggggctaggaagggtacctaggagaagtgactttaggtgctggcagaaagagtaggaatgagctaggtgaagaggctctggaaggaatgattccagccagtggggagactgtgcttgggcccagaggtagagggtattgtgaacacatgttctgttgactgcaaytggcaggagatggacctggagggggtagtcagggacccaaccaggcagcctgtttccaaggagcttagactgaatcctgtgggcaatgcgaggcctctggcaggtttaagcagcggagtttacaactcttggaatcacttccgtacagtgatgcaagtggcttgagaaatcatttgataaagttgaaatcagatgataaagttgaggcccagggaggtaaatacagtcacgcctcttactacaattgttacca

SEQ ID NO: 485005 - DNA, 546 bp, Homo sapiens
tccctctgtcacccaggctggagtgcagtggcttaattactgcagcctcaatctcctgggctcaagtgaccctcccacctcagcctcctgaatagctgggaccacaggtgcaagccacagtgctcagctaattaaaaaaaatttttttttcagagatggggtctcactatgttgtccaggctggtctcaaactcctaggctcaagcagtcctcccgtttcagcctcaaaaagtgctgggattacaggtgtgagccatcgcactccacyttctctatagttactgagtttgcgtgttacactgagtttacatcttacatttctagccatatcagaaacgacctctgcacctctctttcccaatttgagatttctaatagaaagaatcttgttcacccagcttgggactcattgagttatgaccagtgggatagattttagaagataaacatgtctatagggacttaccgtgtgaattagtgggggagccgcttaccaggcagaggggtctgctgtaaagtgatactgtgactttaaattgaaagtaa

SEQ ID NO: 485006 - DNA, 420 bp, Homo sapiens
catctttcccacctccctgaccttcatcacactatttcatctacctgcaaaggctcctgcccatgtctgcccattaaaattctcatckttgaagactcatcccaaatagcccttttccatgaagcatccactggtccccaccaatcagatatgagctcttctttccttgcatcttcaaaaaaaccttgtttgttcttttcccaagacatgcatctcaatctgccttaaataataggctatggtgtgtcccccctgcttacaagaactccacgaaaaatgtgagctgtgtttcagttacctctgcatctgtcacagcaccatatccttttggtgaagtatagtagacacaggccatcagatcaaatgggagaggggaatatgagggagttactgttcttttactaaaccatcacatccaga

SEQ ID NO: 485007 - DNA, 589 bp, Homo sapiens
tctaaagtgcctttctaatccctatatcaggcaaggccttatttctgtgtgctgtcagcatactttctacttgccctagcaaaacaattttaattatttatctgcattccttcttgtcctgtaaggtctggaaacaagaaccacatttgtcatcttgtatgagtgagtgaatgagagaacaaaaaactgttgttttggtgtgtattgttgctgtcgttcgtttgttcatttcttcatcagttcctacagcgagtgttgatttggacacatgctttatgctggccgctatgctaagcatgagaacataacacagaatgagacagatgtgggccttgctcctttagagtttagggtggaggagacaaagaaatacatgattgataggatactcataagttccataaagataataaaatagaaacatttagaataaatagatagggggtaatagtaaatagaatggycagggaaggccaatttgaggaggtaaatttgaagtacagctttgaataatgagaggaagccagtcatacaaggattagagggaagatgactcccggaacatgaagtggttgctgtggccttaaaa

SEQ ID NO: 485008 - DNA, 652 bp, Homo sapiens
tgataggagaacagagagaaggccagcatggttagtgaagtgagataggaaaggagtggtgtgaggtcatggaagactttgtgctccaggaacaaaagtttggattttactctaagttgggcttatttctagttcaagatacatgctgtacttgcactctaatgaagccaagatgtcccaggaaaatagccacttgagtttcaaaggggcgtaggtagacttgagccaagacacccttgatccagtagaaaatcatgtaacactgttgcgatcagtggcaagaatatgtactgattacatgataggatatattttcttaaagctgctaaggagtgttttctatgtcacagaccataaacttatatacaagtacagtactgaccataatgattgctatctcttgccactgcccaaataatagacattttataactacattatataactgtggrtacagaattttattacttacaaaagagtatcatcagagaaggtttaatcttgatacacagtataagatccccagcatatgatgctgtgcagattatgttgacaagctgtgtttttaatcatcttccatttgactgcacttctgtgaaaaatgaatcaataatgcagaaatcacaggttgttgggaggctcaggcaagaca

SEQ ID NO: 485009 - DNA, 536 bp, Homo sapiens
gagaaatagggcaaatgcttataaagctgtcgtgtatcctgaatatctaggggacatatattaatatttttatttctttaagccagctttcctttgtgtttgactctaagtctgtcctgaatgcttcttgcacagctacagtttctcagacctgaagggatgggtaggtcttgtggaggctggagagggtctttgtgatgaatctgaagtcagactgttgggatttgaatttctcctccctggattggcaaatgtggttaatagggctttgactcaattttctcatctgcaaagttcggatacagattatctttcttttttaaaaaattttattattattatactttaagttttagggtacatgtgcacaacatgcaggtttgttacatatgtatacatatgccatgttggtgtgctgcacccattcactcgtcatttagcattttaagattaagtgcaatgagatcagcaacgtgcttagtcagtgcctggaaccttctktgttcttatttcatggaaattgcacatgttacagt

SEQ ID NO: 485010 - DNA, 486 bp, Homo sapiens
taagtagcagtttaatacagccaatgtttaattcattcatcatctaagacttctcttctacttttcctttataaacaatagtttggatgttgtctgccatattaatatctttacctagaaatatcagaaatttaatagtgttacaaatcaagtgttatttgtattcaaatacacagctcttaggaaatgagatcaataaacaaagaaatacattcttttctagtatttttagacagctagcctaaaaataaatgtgatagaaaatattctgattcattattgccatgaacaaatcagaagtatatcagtattttatgctactatcacattctagagcttcttaaactttttttctaatgtattgcctctgatgttttatgaaaatctcmtattagactgtgatgtttgtgttttctattgcttaaaggtgttatattaccttaactcaatcacttcatctaaccatgagtggggctcctgctggcc

SEQ ID NO: 485011 - DNA, 486 bp, Homo sapiens
ctgtttagttttttgggctcttcctttcttgtgtcagttttggaagtttgtatttttcaagatatttgcccattttaagtaattcagcatgtggcaaattacaaacctctggccaaatctggcccagtgtctattgtctgtggctattttcacatcacgatggcagagtggagtggctgtgacagagactgcatggcctacaaatccaaaaatatttactatctgttccttttcagraaaagggccacacttggcctatgcttttcaatttactgatgtaagttggtcatgctatttcagtattatcctcagaacatctggaagatctgcccagatgtcctactttcatttctggggttcgtaatttattttttttctcttttttttcttaattgggttttctaggtgtttatcaattttatttctgttttcaaagaactaatctttgacgttattggttttctctatagcttgttttatatttca

SEQ ID NO: 485012 - DNA, 486 bp, Homo sapiens
ctgtttagttttttgggctcttcctttcttgtgtcagttttggaagtttgtatttttcaagatatttgcccattttaagtaattcagcatgtggcaaattacaaacctctggccaaatctggcccagtgtctattgtctgtggctattttcacatcacgatggcagagtggagtggctgtgacagagactgcatggcctacaaatccaaaaatatttactatctgttccttttcaggaaaagggccacacttggcctatgcttttcaatttactgatgtaagttggtcatgctatttcagtattatcctcagaacatctggaagatctgcccagatgtcctactttcatttctggggttygtaatttattttttttctcttttttttcttaattgggttttctaggtgtttatcaattttatttctgttttcaaagaactaatctttgacgttattggttttctctatagcttgttttatatttca

SEQ ID NO: 485013 - DNA, 635 bp, Homo sapiens
tcctcccagggcatctcggatggctgtgctagccttgcctgacgtgtgtcctctatccctgacttcacatggccaatcagaggccaggagagaaccgcagctgcctcctccctggtcccttgctcccagtctctccctcttcagtctgtcctgcatgtggggcagataaacccctgcagtctgaccaggttactcctctgctcaagaagattstgtagctcctcagggcctttaggacaaaatctagtgtctcagcccagcactccagagttagaggcacctccttcctgtcctttcttcctccttttctcaagcctccacagcccccatgggaccatgctgctcgtgggcctagatgttacacctccctagacacatgcaagggtgtttctagggtacctccttctctgtccagccttctgcacccaagaggccagacctgtctggaccctcagtccctgagagcagccctggctgcctgctaccacctctcctgcctgagcccctagctcacctgggcctgctccaccccacctccacaggctgcctgcccacctctgccctccaggtcactcgccttcccctgcagagtttggagtagatgcagggaaggaccaaagcaggcttcacccaac

SEQ ID NO: 485014 - DNA, 537 bp, Homo sapiens
tttcctatttgatgtttgcttatttctcacctaccctagagctttcacagggtgttacgggagggcgagctgtattcttctgctatctggtagagagtgataactgctaaccttgccaatgaggcaaaaatagccaaatccagggcatctcttaatttccctggagggctccaaaagtggcaagacacacgactgctcagtgctcagcaagtagaaaggcctggacagtctttcgggaagactaaaaatcagaacaaaaactccgtggggatctttggagcaatggtagcccatgattttcaacacaatcctaagaactcaatcaggtggggaaaaaatgccagacctacacttatcttttctgctatatctgcaggctccatgcacagttgttcttcagaattactgttgaacacaatagaactctayagccagcagtgtggcacttaagaggaaaaataagcaaatcatctgaacaattgtgactaaagtatcatatttgatttaaatgtaccattttgagaaaataaatgtttt

SEQ ID NO: 485015 - DNA, 591 bp, Homo sapiens
tcattcaatacaacaaattctgttgaaagctttatgatgagaaaataatttagggatgccttacaggggataaaaggatgaataatattttctgacatttattgagtgtgccgtgcagtgttgtaacactttatgttagttcatctagtctttctgtccacatgawgaagtagtactattatcagcccattttgcaagtgggaaaactgaggatcagagggcttatgtaaattccctaagaacacaagtagttagtgaaagaccctggattttagctaaggaagcctaataccagagctgtttcttctaatctctgccttaacattttttttaatttattttatttattttattttttatttttcttttttttttaaatttatttttttattattatactttaagttttagggtacatgtgcacatgatcttagaattatacaaattgggattactttatctaatgtttccgaataagcatctattgattaatgtgtgctgagtttaactgaattgaagtggttttacttatatttattatatagataatgaaacaaaatcatatttaaaaagaatgcctctatacaatct

SEQ ID NO: 485016 - DNA, 476 bp, Homo sapiens
ttgtccctgtagctcactttctcatcttctgcaaacattttctcacttcaccttttcagtaagtccttccttgactgtccttaaaaaataaaaacaaaaacataaacaaactaaaaccaaaaccaaaacaataacaaaaaactataactgtcatcccccaaattattttatcaccttgattggtctccaaattcatactctaaatttactygtatgttctatttgttgtctgtatccctctactagaatttagcctccaggagggcagggacatttgtctttttaagcaatttgtgtccccaatgtctagaacaaagtctggctaatagtggaccctcagtgaacattgaataaacagatattttatctatctgactacattaaaggactctggaagagaagaaaaacattttatatattctttgtgtgctacacagtatgttaatgagagatgaatttgggcccatcataaatgc

SEQ ID NO: 485017 - DNA, 476 bp, Homo sapiens
ttgtccctgtagctcactttctcatcttctgcaaacattttctcacttcaccttttcagtaagtccttccttgactgtccttaaaaaataaaaacaaaaacataaacaaactaaaaccaaaaccaaaacaataacaaaaaactataactgtcatcccccaaattattttatcaccttgattggtctccaaattcatactctaaatttactcgtatgttctatttgttgtctgtatccctctactagaatttagcctccaggagggcagggacatttgtctttttaagcamtttgtgtccccaatgtctagaacaaagtctggctaatagtggaccctcagtgaacattgaataaacagatattttatctatctgactacattaaaggactctggaagagaagaaaaacattttatatattctttgtgtgctacacagtatgttaatgagagatgaatttgggcccatcataaatgc

SEQ ID NO: 485018 - DNA, 476 bp, Homo sapiens
ttgtccctgtagctcactttctcatcttctgcaaacattttctcacttcaccttttcagtaagtccttccttgactgtccttaaaaaataaaaacaaaaacataaacaaactaaaaccaaaaccaaaacaataacaaaaaactataactgtcatcccccaaattattttatcaccttgattggtctccaaattcatactctaaatttactcgtatgttctatttgttgtctgtatccctctactagaatttagcctccaggagggcagggacatttgtctttttaagcaatttgtgtccccaatgtctagaacaaagtctggctaatagtggacmctcagtgaacattgaataaacagatattttatctatctgactacattaaaggactctggaagagaagaaaaacattttatatattctttgtgtgctacacagtatgttaatgagagatgaatttgggcccatcataaatgc

SEQ ID NO: 485019 - DNA, 476 bp, Homo sapiens
ttgtccctgtagctcactttctcatcttctgcaaacattttctcacttcaccttttcagtaagtccttccttgactgtccttaaaaaataaaaacaaaaacataaacaaactaaaaccaaaaccaaaacaataacaaaaaactataactgtcatcccccaaattattttatcaccttgattggtctccaaattcatactctaaatttactcgtatgttctatttgttgtctgtatccctctactagaatttagcctccaggagggcagggacatttgtctttttaagcaatttgtgtccccaatgtctagaacaaagtctggctaatagtggaccctcagtraacattgaataaacagatattttatctatctgactacattaaaggactctggaagagaagaaaaacattttatatattctttgtgtgctacacagtatgttaatgagagatgaatttgggcccatcataaatgc

SEQ ID NO: 485020 - DNA, 605 bp, Homo sapiens
accagtattttaaattacaacatgtgtttaagatgaaacttatttttataaacagtgggcataaacccatattttaaatagcctcactgataattataaatttttttttgaattttttttagagtttatttgtttaccatttttttttacctggmtcatgtagggctcatattaggcagagtgtggtatttctttttcttgtttcccactttcgtttgtacaattattattttcttccatggtgttttatcagtaatcttctgaatccaattgcctattttcattagagctagtttaatcaaaaataagtattgtaaattcacctaactaggcacaatcacggtacactgatgacaaatgcattcactaccccatttcctgctgttgtgccttctcttcccatagaatgccttataaacatgaccttaatttacttatttacattcttactcttaataatgtctatatcgttccatattataaagcttcatttatttttatatttaaagtgatatataaaaatcgagattctaatattttcttcctgcacccaaatggatacacacactttactttgtaagccgctgtcctaagctgattaccct

SEQ ID NO: 485021 - DNA, 198 bp, Homo sapiens
cataactggtaaaattattttttgcttttaaactacctctaaactcctgggatcacagtcttacatattggcataataaaaggagattgaagtctgctcatatctgattatgttaaatgaaaatattgcataaragattacagttaaactttacaagggatgtttgtgatattcagtgtgagaagatcattttatgct

SEQ ID NO: 485022 - DNA, 653 bp, Homo sapiens
gagaaaataaacagagtgacataaatttgctatacttcttatagttactataatcagttaaaaaacaacttctaggcaaataaaatatataataaaatgtaaattaaaatgtaaataaaatgcaacaaattcgtgggtggaagacatgaacatgacttttttctattttaaaaaccatttgatgtattctaaaaaaagaaaaagaaaagaaaaacagaagagaaccaactaaaagagcttcccagatgtccaatagatgctgcccgaagtaaaacgcatactctaatatttgttattcaaatttgcatgtaagggtttttaacctccctttattttatayttgtacagggtaacgtattgtaactgaaacactcctcctaatttattctggctgtgaaaagcctatggaaacattcacttccataggagtaatatgtatctaaacagtatatttagggaaagcactaatagaacacaaacaactaattactgatgcttttaaggaggaaccgcaacaataattgtgcactgtcttagataaaattaatatagaatttaatatttgtagaccacaaaaaagccctaatcgtggaccgcagattagaaagaacaggctttagcacactgtgtatctttgtagtattcagactcag

SEQ ID NO: 485023 - DNA, 596 bp, Homo sapiens
gctcaggatgtgaagaggtgtggattttggcaagaatgagaagagggagaagagatgcgtaaagtgggcaaaagagacagcaaacttttgtggcctgttgaatctggacaatggcttaaatgactgctcaaaggccggttcaagctacatgctaagagtagtgactggcggctgggtgcggtggctcacgcctgtaatcccagcactttgggaggctgaggctggcggatcacgaggtcaggagatcgagaccatcctggctaacacggtgaaaccccgtctctactaaaaatacaaaaaattagccagatgcggtggcgggtgcctgtagtcccagctactttgggaggctgaggcagaagaatggtgtgaacccgggaggcggagcttgcagtgagccgagatagtgccactgcactctggcctgggcaaaagagagagrctccatctcaaaaaaaaagagtagtgactggcttttcccagggtcacctgccacctcagaggtcacctttctgacttaagctttgctttgacttgacaaaggactaagacatcagctccaacttggcctcacctgtgtaacaacaacctgagaa

SEQ ID NO: 485024 - DNA, 588 bp, Homo sapiens
ctttagaacagttctccatgaggtatggtcacagatcagcaggagacttggctgcaggagacttggccacgaggggatggcatagacctagagccaatcttgcagtggcattggtgtggcatgtactgctgggagtaggagttgtacttgaaaacattcacaagcaggggaaggraaaggatgtaaacattagagcagaattacctccctttacctaattgggtattcttggaaagctttgtaaatctgactcctaggattcaaggtgctttattttcttcttaattaaccttcaaggatgcgcctgtatatctccccaaaacaccatggtgggacaaatgccagcctgaaggtagcaagcagccagtgtgtaagtaaagaccccaggaaactgcccttaaaggaaccatttggtccacttattgagaaaaagtaaagaatgttttggtgacatcattcccatgcaggcaggagatgagagcctatgcacagctagggctgggatcaacaggctggcctcaggttaaagggagtcagtcagggcaggatttaacatctggagatctagcacggagtgaacacacaggg

SEQ ID NO: 485025 - DNA, 629 bp, Homo sapiens
tcacaaagatttaaaaaaatgcagtccaaaaaggtaggaatgaaaggcttcagcttggccttcagtgagctgcacttggagtattgtcatgatgctctcagttgctctattttaacataggctaaacaggtagaacagaaaggtccagagaaataaatcaaaaactaatgaggttcctgatggtccattttataagaaaagatggagaatatgaagatttgaatctgaaaaacataacaytaagcagatatcaaaccttccattcccccacccccaaactgacaaaatgtgccaagggctaaacatgaatttgttaccaacactagaaactggaactaagaggacagggtcttcaaactcaagagagaatttcttttaacttgagataaaagtattcacagaacaagtaatcagccatggaagttgttatatccagagcagcagtataggctaaaaatatggaaaggtcaagaagggtttagctcaatttatagatacaggatctgtaacctgttattaaggaaatgagagtgtctggtgctgaggcttgacaaccaagcacacaggcaggcattccaatgacatgtctcctggtgccatcaccagagacaggctcctgggcagatggg

SEQ ID NO: 485026 - DNA, 585 bp, Homo sapiens
tcattctaagcactttatacgtaatgaataagtaaccagaagctttgtcacttatgtgtataaaatcctttatagtacaacctatggctaatattgatgccataaatttgttgtcctagcaatatagggcatctaacttctatttagaaaagatgatttatttatttttttatttctaaatcatgtgatgattagagcattttcagggagaaaggtgtttaatcagtatttttttttatttcttttccattcaagtgtttcattaacatcttcaacactcattatcttttccacaaattttttattatgctgtactttgaaataatgaaataagtatacctacgctttaaaatgaggatgcatttagtatcaaaaatatagtcttatactggagaatgtttcccagtaggaaaagcacatkgcttgggctttttatgaaaaccacatttgtggtgctcacttcggcagcacatatactaacattggaacgacacagagaagattagcatggcccctgtgcaaggatgacacgcaaattcatgaagcgttccatatttttaattgaccacatagttgaaagtaaag

SEQ ID NO: 485027 - DNA, 585 bp, Homo sapiens
tcattctaagcactttatacgtaatgaataagtaaccagaagctttgtcacttatgtgtataaaatcctttatagtacaacctatggctaatattgatgccataaatttgttgtcctagcaatatagggcatctaacttctatttagaaaagatgatttatttatttttttatttctaaatcatgtgatgattagagcattttcagggagaaaggtgtttaatcagtatttttttttatttcttttccattcaagtgtttcattaacatcttcaacactcattatcttttccacaaattttttattatgctgtactttgaaataatgaaataagtatacctacgctttaaaatgaggatgcatttagtatcaaaaatatagtcttatactggagaatgtttcccagtaggaaaagcacatggcttgggctttttatgaaaaccwcatttgtggtgctcacttcggcagcacatatactaacattggaacgacacagagaagattagcatggcccctgtgcaaggatgacacgcaaattcatgaagcgttccatatttttaattgaccacatagttgaaagtaaag

SEQ ID NO: 485028 - DNA, 506 bp, Homo sapiens
tcatttctgtatcttggatattctgtctgtaaagttgggacattgatttctaaagactctgggcattatgtatgttaactgaggcttgtggggagacccgagatgttgagaggagagcgggaaagacagaagaagccttacagtgtttatcctcttagcctagtacatacttattttaaacatttcctaatatttgaaaaaaatctctgaaattatttttcaagattaatatttattccagtaactgaatgtttcttttccaatgaaatattctgaaaataattcagaaaggaaatattcagtaaagaaatatgttgtctgtaaatctaaagaacatatgtgaaaattctatatgcaaaattacatgaatgagactttctggtatattattactatgagaagtactagacagtatgtttaattttaattttcaaagttcttacagattaagtatygatggcaacaaaagtatcctaaagaatgtttgcttttagtataatctgcag

SEQ ID NO: 485029 - DNA, 437 bp, Homo sapiens
tgttcctgctttggcccccctacaaaccctactggatgcacagcaagggagcctggtgagacagtcctctggtgtcagcctcctggggcctgaagggtggagaaaggatggggagaggggtcaggatatggtccttcctgtctctcctgtccacgcccactgaccactggcaggaggcctttcacttctcctctgcaggaggatgattctaggagcagccagatcctgggggcttggcctgmtttggaggaatcaatccctccctctcctctcctttctccctccttccttcatgctctttttttctcttgcccttcatttagactccacattttacaggcgttacttgtccctctgactctgggcacccaggcactgcttctctcgtctcctccttctcagcctttctttcccatcttccggttcactgaaagaac

SEQ ID NO: 485030 - DNA, 437 bp, Homo sapiens
tgttcctgctttggcccccctacaaaccctactggatgcacagcaagggagcctggtgagacagtcctctggtgtcagcctcctggggcctgaagggtggagaaaggatggggagaggggtcaggatatggtccttcctgtctctcctgtccacgcccactgaccactggcaggaggcctttcacttctcctctgcaggaggatgattctaggagcagccagatcctgggggcttggcctgatttggaggaatcaatccctccctctcctctcctttctccctccttccttcatgctcttyttttctcttgcccttcatttagactccacattttacaggcgttacttgtccctctgactctgggcacccaggcactgcttctctcgtctcctccttctcagcctttctttcccatcttccggttcactgaaagaac

SEQ ID NO: 485031 - DNA, 537 bp, Homo sapiens
accttctaactagggaaaagcctgccatgcttcacaaaaacaagaattaagctgctgcctaaaatttatgtttcactttggcttttaatctgggaacaacctggaacttgaggattgatcaaggacagcaaactaaggcattctctagaacaacactgtccaattgaaatacaatgccaactacaaatgtgaaccacatatgtaattttacattttctcataagcaattttatttatgtatttatttatttatttatttatttatttatttatttatttatttattaagacagagtctcgctttgttgcccaggctggagtgcaatggcgcgatctcggctcactgcaaactytgcctctcaggttcaagtgattctcccacctcagcctcccgagtagctgggattgcaggcacccgccatcatgcccagctaatttttgtatttttgtggagatggggtttcaccatgttggccaggttggtcttgaactcctgacctcaggtgatccacccacctcggcctcccaaagtgctgg

SEQ ID NO: 485032 - DNA, 544 bp, Homo sapiens
aaactatcctttgcccagagattaagagtggcaggaaacttcatcacccaaacattgtgggaaacccctcagatctgaagagcatatcttgaagttcagcctgaacccacacatgtggctcgctcctgctccccacagttacacaatcagcctgcctgactgcccacgaggctggaagcaccggaagagcaaactgtactccttctgcagcctggctgtgacatcacaccagttctgaggatacatgcaggggatgccaggggcagctcctgggcaggagggccctgggaccgctgcctgcctcacaaattttatatgccatctaagacctgtccccaaggccttacagtcaattaggggacacatcacaccctggtggtggagagttcagtcatacaacaggcagcagagatggggtataggccatccagggagttaaccacacaggaaaggctagaggaggaatcttgtagagaaagtgaactctcccaggaatatamaagtgggcggtctggtggatctctgaagccaatacatccgttct

SEQ ID NO: 485033 - DNA, 310 bp, Homo sapiens
ctgagccttacattgcaggacagggtcccaccaggatggtctgagggtagaaccaggatgtcaatctgggctggttgcagatctggctgctctggggcagaggaatacagatgaagtgttccaggcctgccaggctctgaaagccctacaggaacgacccacctgggaacccctattagcgaccgcctctctcaatcaggtctgcccagggaaaraaagacactgaagaccattcagatccccagaaatgtcaacactccttgaaagaggtctccactggcccggaaatctccaggctgcctgcacttgt

SEQ ID NO: 485034 - DNA, 310 bp, Homo sapiens
ctgagccttacattgcaggacagggtcccaccaggatggtctgagggtagaaccaggatgtcaatctgggctggttgcagatctggctgctctggggcagaggaatacagatgaagtgttccaggcctgccaggctctgaaagccctacaggaacgacccacctgggaacccctattagcgaccgcctctctcaatcaggtctgcccagggaaaaaaagacactgaagaccattcagawccccagaaatgtcaacactccttgaaagaggtctccactggcccggaaatctccaggctgcctgcacttgt

SEQ ID NO: 485035 - DNA, 458 bp, Homo sapiens
tcattgcctgaggcctgcagctcacctggactcagtcccctgctggctgggggttgtattccctgtgctgggagggaaggargacactgtcagatcccatccatcaggataggcactgcaggcacaagtggcccagggctctgcctccagcccatgcgctaagagaggaaaggcggcttcttttcccctgttccacaggcttgcaacggccacagcccaatgccagcctctctccccatccctatcacacccctggcaacccattgccaagctcaaacttccaagcctacattggcaggctaagcatatcaaaactgccatcctaatttggttgttggcgccacaataataataacagtttgtatgtattgactctaccaggtggggcagtggaccaggtgtacaaaggtggagatgcatccatgaacagacacaggctcgcccctgtggcgttattg

SEQ ID NO: 485036 - DNA, 458 bp, Homo sapiens
tcattgcctgaggcctgcagctcacctggactcagtcccctgctggctgggggttgtattccctgtgctgggagggaaggaggacactgtcagatcccatccatcargataggcactgcaggcacaagtggcccagggctctgcctccagcccatgcgctaagagaggaaaggcggcttcttttcccctgttccacaggcttgcaacggccacagcccaatgccagcctctctccccatccctatcacacccctggcaacccattgccaagctcaaacttccaagcctacattggcaggctaagcatatcaaaactgccatcctaatttggttgttggcgccacaataataataacagtttgtatgtattgactctaccaggtggggcagtggaccaggtgtacaaaggtggagatgcatccatgaacagacacaggctcgcccctgtggcgttattg

SEQ ID NO: 485037 - DNA, 458 bp, Homo sapiens
tcattgcctgaggcctgcagctcacctggactcagtcccctgctggctgggggttgtattccctgtgctgggagggaaggaggacactgtcagatcccatccatcaggataggcactgcargcacaagtggcccagggctctgcctccagcccatgcgctaagagaggaaaggcggcttcttttcccctgttccacaggcttgcaacggccacagcccaatgccagcctctctccccatccctatcacacccctggcaacccattgccaagctcaaacttccaagcctacattggcaggctaagcatatcaaaactgccatcctaatttggttgttggcgccacaataataataacagtttgtatgtattgactctaccaggtggggcagtggaccaggtgtacaaaggtggagatgcatccatgaacagacacaggctcgcccctgtggcgttattg

SEQ ID NO: 485038 - DNA, 458 bp, Homo sapiens
tcattgcctgaggcctgcagctcacctggactcagtcccctgctggctgggggttgtattccctgtgctgggagggaaggaggacactgtcagatcccatccatcaggataggcactgcaggcacaagtggcccagggctctgcctccagcccatgcgctaagagaggaaaggcggcttcttttcccctgttccacargcttgcaacggccacagcccaatgccagcctctctccccatccctatcacacccctggcaacccattgccaagctcaaacttccaagcctacattggcaggctaagcatatcaaaactgccatcctaatttggttgttggcgccacaataataataacagtttgtatgtattgactctaccaggtggggcagtggaccaggtgtacaaaggtggagatgcatccatgaacagacacaggctcgcccctgtggcgttattg

SEQ ID NO: 485039 - DNA, 599 bp, Homo sapiens
ctgtgtgtttaccagatccaatgtacattaactcaaatcaaaatatttccacttaagttaaaatcgagtttgtccggacttcagcaatgctcacgggaattaactctagcccagctctctgggaggacaggcttgatcccctccatctggtgccgggggggtggaacaaaatgcttcctgcttctctggaccataaactggaggattagaagggcctcagagggacttatttggtctacccgtctgcttccaaaactctagattccctctaagccattccacaaaagagggtccctgtcttctgttcccggaaatcacctaggagagtscatctgtggtcattcattcctgcatgacatggtgttcaaccaaggactgttctctaaccagccacttgcagagcacctactacacacaaggctctgtggagattcaaagaattaaaaagcagtccccgccttttaagaacatattatctggcggtggagaggccctcatccatgctcagatggtcggtcaacaaatatttcttgacagcccagttgctcctattctgtgctaggcacagacagtgatgaacatttccagcaaagtccatt

SEQ ID NO: 485040 - DNA, 651 bp, Homo sapiens
ggagatcatgcctatactactttgctgaccacacaggtttttatcaactatttgcaaatgaagaaagagtaggaaggaggaaagggaagacagaattcattccagtctttatggaccaaccagattctcccatggacccttctgaaacaaaacgtagaagccatctcatccttactgaacattgcgatattgttgaacatggtacagacataggcttatgggctcaaaagtttccctgctagttaggcaaaacaactaataagatagcttaagggaggctcttcttgttactactacttcccaattccttcttgcctgtaattctagtagttaatttagaatactatgtagtagttcttccactccataaccattagtgctaaaatcaaattataccaaaagttctagtttctgtggcaattataagattacatagtgcaatcatgcttagatgcctttcttgaaagcatctttaccaagccatctatatttctcctgaaagtctacagcttcaaacttattccaagtrtgaccagccctatttaggagttttcttgtatggacataatgtaaacattctaaattttcatccatttatcttttttctcatattctgaagcgacacagaatatgtttaatcctttttttttt

SEQ ID NO: 485041 - DNA, 656 bp, Homo sapiens
catttaggtatcaggcactttccatagcactaattattctgcatttcatcttatctccccagataaattataagcaaatggacttgaaggcccagcggttccttcctagaccaggtgcctcctagttctggatgagtatctttgtctctcttaagtggctttgcccccattccctccagccccacccaaagtagtcaggacatccaattaacctttgacttgggcttgtttsaaggtgttgtggggaggaagcctgagaaagggatagtgaagactttgtgaacctcattgagataaatagctgacagataacttttaacccagattagcagactctggcaatatctataatgaaggctgagtctcagctcatttgagttgtaaacatcacagccattgctgaatcaagtacaagatgattcaactctcagattttgatgcaaaattcttctctcttccctgtgcctttaacatagtcccatttgatttaatggtcctgactctgagcagtgctgaggattaaacgtgggtgatttcagttcaaggaaaatacctttgttatcttattttgaccttaaatactacagcgttctctattggctcctcaatccattaagttttacatggtagaactattgtttgtttcaggatttatt

SEQ ID NO: 485042 - DNA, 583 bp, Homo sapiens
attcataccagtcacagatccaaaatctccccttgacttggttctctgtctcttaactcctggaagagaggcttataattgcagctctgcagaaagattgagtttccactaataacttgttaagcacttactaagtactaagccacaatactaggcactttgaaacagacactatctcatttgttctgtgttgataattattatttctgttatttatatgragaaactgaagttcagagaatttacgccatttgccccaagtcccacagttaccaagccacaaagctggagttctagtttaattttctgaatctaaatccagggttctttatgctactgtacagtacttcttggtggctctattacaccaatgctttattctaattagtcaattgcatgaggttaatgataagaatttcttattgttgctaatagtttccattgcactatgtgcactatatgcaccaagttttatactgtgtggacttatttcagttggttctcccaagacatgtaggagacaggtattatctacattttggggatgagaaaaccgatgtatggaaagtaacacatctaaact

SEQ ID NO: 485043 - DNA, 666 bp, Homo sapiens
gtcaaaatcactgacgctggccttatgaaagctaattttcagaagcccaatccgggtactatgagtgaaaggttttgagtatacacattgacttatttgtgaaagttgattgtaggaaggaagttgtagtgatgaggaatgtatacgtacagataagtgtgtgtgcacttgaacacatctgtaattgagaatttttttttttttgaccaatgtagtagtgctcagggaaagttaggaccaaataattttagatggtgatttacatcagtgcagtatacwcttgatatatttattctatcatggagatttggctaacaaatttaatagggacaataaactgttttctacccttttacatgaaaaaagggacagagacacaagtctatgaactatgagtatttgcctttcagtaagtacttttttatctcatcaaaatggccccaatgtcaaggagaatgattcagcacaaacaattcaccatttcatctctttcattccacagaatccttcttaaagagagtgagtagatttatctcttgttattatctccagcaagtatctgaaacagcaatgaccaatgggcagatgtatgtactggggtccaatttatgtatccactttcagtttcaatcttttttttttttaatgtagccttctatctttatt

SEQ ID NO: 485044 - DNA, 577 bp, Homo sapiens
tttttcttcagccattcattcatgcctccacctttaccaaaaagcataagccaaatggtcctcttcatttagttaatagcaaagtaattttgctgaaaaccacattttaaaatatgaaatcaaacaccacagtgcaaagytcacagaatgctgttcctgatagtttttactctgtgctcaaatctggggtggggagagtagagaaatcaggcacactagttttaaccaactactgcatttttctaacccagaaccaaaatttatgaataccttcagagattgtgcttggagggcagacccttctaatggtttgttagcttaacagtaaaccactgaagctactaatttgcctgtaaacaccggatcccactggaattgccctacacagtacagttcaaagggcctggtaattgccctgttcttctatatggaactatttcaacccctgctgagactgagaagattaagaatgtaaagggaagtaaagcatcattttgtgtaaacttggctcaagacctacaaattatctgtggttgctaattgaactctttatttccgctcactgaagctcttcagt

SEQ ID NO: 485045 - DNA, 581 bp, Homo sapiens
tgctaatagaaaataaaaatatataggggcattaaaaaaaaaaaagagagagaggcttataggcacttcctagcacaaccacatcatccataggactctaaaatacagagtgtaactgctctatgtggaaatatgaaatgggaaacaaaagagtgaaagctcagatatttccttctaaccacagatattttgaactaaccagatcatcactgtgtaggaactaacatcctccagaactaccactagtaggagttatgtagcgtaacgtagactgtgggaataaagccatcgctctggaagttggcttgtcttttgggtactttggtcttataaaatytaggtcagtctatgttttattttatgcctttctagtgtatttccagctttcctattccaaagcctaaaaataattctccatttcagtttctttcatcaacgacttttcacactttgatgcatagactaataatgatggctggatctcaccgttttttacccatgttacaattcatttcaattttcttctggccatactgacccttgttaatttctgaattctcatccatcattttttgagtttc

SEQ ID NO: 485046 - DNA, 649 bp, Homo sapiens
ctgtgcacatctggaatccagaacctctccctccctcctcctgaccctcagcccagcccagcccgccctgtcctcctcctcctggcaaagcctgacctccycaagtaaacatttgattatttgaagtcagagactccctcacaggagaaggagagagggtagagctagtgttgagcaagcacccatcctgggccagacactttgccaagcaatttgtgtttggtcacttcattgtatccagtgagctggatgacattattctcattttacagttaaggaaactgatattcagacaggttgagtaggtagtccaaagtcgtacaactaacaagtagcagagccaagatagaaaccactggattctttctgactcctaaaactcttcctgctacagtttctttacacttttgtgtagggccctgtatttatggagctactggggaggggtaagagttgaggtggagaggctgaaggaggagaagatatgtgttgtattggaaagagcagtagactaagagtcagaagttcttggctgaagtcttggctacaccattttgatagcttgtgactttggacaagtctcttttaactcctccatgagccacacagacactctatgttgtaaatgggattgtagcacctgcctagt

SEQ ID NO: 485047 - DNA, 649 bp, Homo sapiens
ctgtgcacatctggaatccagaacctctccctccctcctcctgaccctcagcccagcccagcccgccctgtcctcctcctcctggcaaagcctgacctcctcaagtaaacatttgattatttgaagtcagagactccctcacaggagaaggagagagggtagagctartgttgagcaagcacccatcctgggccagacactttgccaagcaatttgtgtttggtcacttcattgtatccagtgagctggatgacattattctcattttacagttaaggaaactgatattcagacaggttgagtaggtagtccaaagtcgtacaactaacaagtagcagagccaagatagaaaccactggattctttctgactcctaaaactcttcctgctacagtttctttacacttttgtgtagggccctgtatttatggagctactggggaggggtaagagttgaggtggagaggctgaaggaggagaagatatgtgttgtattggaaagagcagtagactaagagtcagaagttcttggctgaagtcttggctacaccattttgatagcttgtgactttggacaagtctcttttaactcctccatgagccacacagacactctatgttgtaaatgggattgtagcacctgcctagt

SEQ ID NO: 485048 - DNA, 608 bp, Homo sapiens
gggccgctgagcgctccacctggggaacctggggtaagtgtggactttgccgggtgggctcaggagagcctatcaggtcagcatgtcctgtgctgggcatatgacaggcagcttggcactggctcctcccaagcccttggaggtgatggggatgattagccacctttattttttatttatttttttgagacagagttcggcactgtcgcccaggtggtagtgcagtggtgcgactcagcccactgcaacctccacctcccaggctcaagccatcctcccacctcagcctcccaagtagctgagactatrggtgtgtaccactatgcctggctaactttgtgtgtttttggtatagagacagggttctgccatgttgctcaggctagtgtctccaatgcctgggttcaagcgatctgtccgcctcagcctcccgaggtgctgggattacaagagtgactcacctaacccggcctagcctctttttttttttttttttttgagacagagtctcattctgttgcccaagctggagtgcagtggcgcgatctcggctcactgcaacctctgccgtctgggttcaagcaattctcctgcttcagcctcccgac

SEQ ID NO: 485049 - DNA, 382 bp, Homo sapiens
gctgagactagcctgtcaatggtgggcagtgattttgcaatatttatgtttgaatcttctaataaattatctcccagtttgcacagatattgcttgaggaagtacaaacacaaattctattatgaaaagttttatgaacttttctttacaccacagccagcatagtgagtagcaaagtagcaaaagtgtgaattgttaactttgaagttccagttttctcagaaaggtgactttttgcctctagggactttattcactcaggatgtttcaggtatatggaagggaatcatgtaggtgtgtgtgtgtgtgtgtgtgtgtgtacatgcatctacacatatccatgtttgtgtgkgcatgtgtatgtgagatagtaggtaagtca

SEQ ID NO: 485050 - DNA, 505 bp, Homo sapiens
tcagatccagtcctgggaaggggcagcgttggctctcgttcaggaggagaaagaaagggaagggcaccacggacagtccctactggcctgagcccccaggaagaaggtctaatttgcggctgcccctctccttcggtgtcattagggccccggaatccgcttgctaccgcgagggtcccagctgctccgaatcggggaccgaccsgtgacgctagctgcaggcagagagggcaggctgtgcgggcggaagggaggtggtgtcttgtcggatcttactgggacccagttcctgagctcccgtggcaggcgcctcactcctgctactacctgctcggggccagtggatggcagtgtacgcgctttttgcacggctcccggttcctgggaccgagccctgggagctctgactttgaattcagcagggaagcttcggggctgggcattcccagggaagctgttcgagtaattcataaagtggagctttcctcccgcgggaaacttctga

SEQ ID NO: 485051 - DNA, 545 bp, Homo sapiens
caatgtttgggggaaagatccaccaagtgtttaatttaatcaggcttaaaaactaatactccacctcactacgtaggaccccttcttgaactcatcctcatttgacaaactatatattttacttccatggccttcctggtgtgtgtttctgtgtgttctcttattataagaacatcagtcatattggatttaggcttcaccctaatccagtatgaccttgtcctaactaacttcaactgcaaagaccctrtatgcaaaggaaggacacattttgaggttctcggtgaacatatattttggagacactattcaacccattacagatgcatagataggtcagtcttttccctagctggatttcttaccccatgaagtatattctgttcctgaggctttactaaatctgctttagtgcaagcacaatctgtaatgtttattattctcatggacagacgatcatcatgcaggttgggagattatgttctgctaatgagcgctttctacctgggtgtggaacacatgggatgactcaccttgggactgct

SEQ ID NO: 485052 - DNA, 545 bp, Homo sapiens
caatgtttgggggaaagatccaccaagtgtttaatttaatcaggcttaaaaactaatactccacctcactacgtaggaccccttcttgaactcatcctcatttgacaaactatatattttacttccatggccttcctggtgtgtgtttctgtgtgttctcttattataagaacatcagtcatattggatttaggcttcaccctaatccagtatgaccttgtcctaactaacttcaactgcaaagaccctatatgcaaaggaaggacacatkttgaggttctcggtgaacatatattttggagacactattcaacccattacagatgcatagataggtcagtcttttccctagctggatttcttaccccatgaagtatattctgttcctgaggctttactaaatctgctttagtgcaagcacaatctgtaatgtttattattctcatggacagacgatcatcatgcaggttgggagattatgttctgctaatgagcgctttctacctgggtgtggaacacatgggatgactcaccttgggactgct

SEQ ID NO: 485053 - DNA, 587 bp, Homo sapiens
gcaacatttgttctaacccctcctatgccaccatgtgacagggagcaagttatcacagagttccttcaactgtgaaatgaagacattgtactaaatgattcatttatttatcaacaacttattgagtttccattctgttccaggtaccctgtggagggtttaggctgtaacaatatggtctctaccagctccaaagcttaattattttcttaacaaattgcatgaagtgtaaatggaacaggctagcctttacactaacacttcctttcatgtagaaacaattaaaaaatagaaaatcctgtgatggactctttgtaggaatttagatttccagaaaatttacaaaattgtacaaaatcaaatgacaaatgccaactaaaacactttccagaagttgtagaaaaagataaaatgcaaattcatttttaagtacaaaagcactttgcaattaactggagracattttattcctaattctcctcctctcacctctacctaagcagctaatcattacatttattgaacttctgaaatttgtaaaacactctgttgaatgctataggaaatacacagaaatggaaaacaca

SEQ ID NO: 485054 - DNA, 647 bp, Homo sapiens
tatttgtctgtaaaatgagaataacataaatagcctacctcgtatgtttatgtaatgattaaacgaatagaaaaagaacttgaaattgcttccagcccataagaatcatctaaatatcagcaattagttatcactgcgctacctcccatgttgctaataccatgtgacagtcctaggcaaattatgggtataaatgagaaacaaaatctgccttacagggagtgaagagtgggactagcagctatgataccttacatacctttatgaaatgctttagaccaagtgtgagaagcagaaaggcaagagtaaatgacttttgttccagcaactctgtttagatcaagtccacacaacctaaaaacaatactgtatttgaatgagagtcaatgtattggactcagtaacatcttcattaaaaaatcctgaagataacctaggaaatgccattttggacattggccttggtaaagaattttcactaggtcccaaaaagcaattgaaacaaaaacaaaaattgacaagtgggacctaattatactaaagagcttctgcatggtcaaagaaactrtcgacagagtaagcagataacctagagaatgggagaaaatacaaactgtgactccaacaaaggtctaatatccagaatc

SEQ ID NO: 485055 - DNA, 495 bp, Homo sapiens
ggcctgtttgtttcttattcaaataataaatcataaaaagacaagataaattatagtatcaatttgacatctgataattccaaggaattgttattartatttctaggtagaataatgctattatgactatgtaaaaaattccatataattttcagatttatagtatgtgctttaaaatcagagagaacaaattttatggatgaaggaaaaatggtaatatattgataattatgaaatcggctagaggtgttagtggatatgtgagagtttatgaaaccatgctatttttgtgtatattaacattttaataaaatttctcaaagtagaatgcatgaaataacttagtatgctcatagtcactttagtaataatggaagaatgggataatgagtgaattgaaataattgatatgattttgttagtaactttctaggttgtctgaaatcttttttgacctggaaaagagtgcctttacttttgctcagtgtttattat

SEQ ID NO: 485056 - DNA, 442 bp, Homo sapiens
acttttatgggtttttttaaccaaggggtggaatattcacgaargttcctggaaaaaggtagaggtgtcttggaattgtggtgccacccatttttacaccaaatatgggtgtgcctggaactgtcatggtgctagtgaatgtgtgatttaatatgttaatgagcatataatgacgtcctagatgaaacctacgtcaaatccatgccatgttgggtccagtcagtcttagccagcttgggccataccctggtttttcagggtctcatcagctcctagcttctatgactatttcaacagtttcctttcactagttacttgaaactgctgcctggaattttctattctcctgcaaccaacttatattattcctatctcattatcacttaaacttatcttatatatgctttgtatcttattgggatttatttcgtgtgggggaaag

SEQ ID NO: 485057 - DNA, 442 bp, Homo sapiens
acttttatgggtttttttaaccaaggggtggaatattcacgaaagttcctggaaaaaggtagaggtgtcttggaattgtggtgccacccatttttacaccaaatatgggtgtgcctggaactgtcatggtgctagtgaatgtgtgatttaatatgttaatgagcatataatgacgtcctagatgaaacctasgtcaaatccatgccatgttgggtccagtcagtcttagccagcttgggccataccctggtttttcagggtctcatcagctcctagcttctatgactatttcaacagtttcctttcactagttacttgaaactgctgcctggaattttctattctcctgcaaccaacttatattattcctatctcattatcacttaaacttatcttatatatgctttgtatcttattgggatttatttcgtgtgggggaaag

SEQ ID NO: 485058 - DNA, 588 bp, Homo sapiens
ttacatttttgtttcctatttctcgcaaggtaaataatttttcaatctgataaaattatactcaattcaaaagtatacatttatatkaaaataaatagggtttgtgtttctttaaggtaaaatgttcatgattataatcaagatatttttgctttacagaatgttgtctaaactctagatttttttttcttaatgcaaataggctattttccttcatgagctatgtagatatttttgctaacccatctggtttagaagccacagcttgaattttaatgaggcaatattatttactgtacttgttcatgcagatttttcagtgtttgcactgtgttggtaatcctctctgtgaatgggtcaaattacctctgcctttcttgggaacttggaaataagttttggtgctggatcagacagtgaagttcagggttgtgagagcttagtatttacaaatccaaagtgatccaccctagattttaaaccaggagtcagatttgtttgctcactgtgttacttcctgtaggtatagtcagatgaccttccactgaagctctgttattttttttcaggctcttgggacatcgttac

SEQ ID NO: 485059 - DNA, 588 bp, Homo sapiens
ttacatttttgtttcctatttctcgcaaggtaaataatttttcaatctgataaaattatactcaattcaaaagtatacatttatattaaaataaatagggtttgtgtttctttaaggtaaaatgttcatgattataatcaagatatttttgctttacagaatgttgtctaaactctagatttttttttcttaatgcaaataggctattttccttcatgagctatgtagatatttttgctaacccatctggtttagaagccacagcttgaattttaatgaggcaatattatttactgtacttgttcatgcaratttttcagtgtttgcactgtgttggtaatcctctctgtgaatgggtcaaattacctctgcctttcttgggaacttggaaataagttttggtgctggatcagacagtgaagttcagggttgtgagagcttagtatttacaaatccaaagtgatccaccctagattttaaaccaggagtcagatttgtttgctcactgtgttacttcctgtaggtatagtcagatgaccttccactgaagctctgttattttttttcaggctcttgggacatcgttac

SEQ ID NO: 485060 - DNA, 656 bp, Homo sapiens
atttaacattaagttgttttgtataatgtctgttccctgtaattttcaaggtacactttctgctgacatatatgtactgctttagttactattaataagttttaagtctgatgactcattagaacccatttcctctcctacccctgctatacaatgagcaaatcaggagggaagatgatttgttctgactgatgtaaatcaggtatagaaaggatggtaaatgaatatataatttgtttagattattctgcctaaatgatttgttcttactgttgtaaatcaggtatagaaaggatggtaaatgaatatataatttgtttagattattcttcctaaayacattatgtaatttagatatgataaccaactagcccattcaatataagggactaaatggaatggacacagtcatgaggttccagttgtgcctggctatctctgtgaatttggcgaagtatgtcactgtattactcaatgaaatgcaaaagtatttacttaatacaactgaacaatagcatttagaaaattttctggttaatagtaggatacttagctattcaaaatctttatgatgtttcatgtttgttgcatgtttgttgttaagtagtaaaaggctaaatacgcaggctgcagatacgagtgttaaggatgtttgt

SEQ ID NO: 485061 - DNA, 499 bp, Homo sapiens
ctaaatagctcaacattgtctgtttctttatatcttgggccaataccttagtccaggccagggccatctcttatctaaattattgcaacgtcttccccaaacagtttccctccctcagtagttatctcacattgcagtcaacaggactttttcaagayataaaacccatcacatattttcctgcttagaactcttcaaggactcctaatgaccttagataatggccagcttccttaacttggcttccaagactggccataacctggccacatcctactgcttaccctcagatttcaacacagtttttcttacatcttttttctacagccattgtaaacttctttcagaatctctatgcacctctctcttgcctcaggacctttgcacgtgaagctgttgcttttgcctagaacagtcttaatccctcacccactacacttttatgtctagctccttgtcatccttcaggcattaactgaaagtggaaaccttttctgag

SEQ ID NO: 485062 - DNA, 515 bp, Homo sapiens
ttaaggactctgcgcaaaggaagagaagaatgattagaccttgcttttttcttttttttctctcgtgtactcttgtattcttttctttaaagaaagctgtggttaagggaaataattggctaagggaaaaaaatggaaagaaagtccttcatttgcacagcttgccttggccatataaaagacacacaccctgaagcagaagtgctgctgaaacaggcagggggaatggaaagggttattgggagatggcttagtttggtttccccaggaagcagatttttaataatgaatttgggtaggcgaatggggatgtgattattttgggggacatgcagaatgtctcccagagttgtatctgggggttaggaggtgggtatttatccatcagttaccactcagcrttggctgaggactgtcctcaggggctttactcctctgctgcctggctgcatctgtggactgcaagtccctgtggcaggggagggggcctggaggctgaaagacagaacatgccc

SEQ ID NO: 485063 - DNA, 662 bp, Homo sapiens
ggtctgggaccacattttgagaaccactcttccaggtactcaacacaggcgatcatggtgggagtggacatttcccattccagccacaaggagtatttttgcatacttattccagtagagactgcaggttgtcaccaaatatctactatctctttcttctttaccaacagaacaccaattttattaacaatatatccagccttaaaaacactacattttccagacttctttcagctagaagggtccatgtgacacagtttttatgaataaaatgtaagtacatgtcaccaagtgggacttctagaaagtccgttaaaaaagcttgcttgactattgctttgctgctgtctttcaccaacaaattttccaccacaaatggctcaattcctttcccttcttcttcttttttttttccccaagtcaggtcagacaggtaatgtgccaatgtcgtaacaaggttcagagggtggcacatctcacacacgcacatgaacacccaattatcacgctcatgagctayaacaggatcgcccttcccttcttctttagtgggatatggacatgatgccttctagaaggggttcttccatcttgagacaacagttgacaagcaagtgccaaggacgcttgagaggacagaggtgcctgggtcccttgtggca

SEQ ID NO: 485064 - DNA, 589 bp, Homo sapiens
tagccctgggtgctgcactatctctaaatgatttctataaaccctgccctcactttcacaagtcacccctttgttaaattctcctcaaattacccatttgagagtgcctgccacctcctgttgtgaccttggctggtacacaagcaatgtctctttgaatgttctcctgagggacctgggaytggggaccccccgactaataacgacctactctccctgtgctaacttcaatttagcaaaacttccctccccttccctcactcacacagggatgaaaagataaaataatttatttgacctcaatttacacttttggaaactccaatgttcatatccaggctagttgtagcatttgatgtatgcaatagcttaaatacccaaaggaatatacaaaataaattgtacacatagattcttttagattttatttgaagctttttttatggtttgccaagtattttaaaggctgattctttcattaggagaatgcctgtcattgaataaacattatctattattcaacaatataaactaagctcctactatgtgtcaggcccttggtcagacccagtgtatacccaggtgcaca

SEQ ID NO: 485065 - DNA, 589 bp, Homo sapiens
tagccctgggtgctgcactatctctaaatgatttctataaaccctgccctcactttcacaagtcacccctttgttaaattctcctcaaattacccatttgagagtgcctgccacctcctgttgtgaccttggctggtacacaagcaatgtctctttgaatgttctcctgagggacctgggattggggaccccccgactaataacgacctactctccctgtgctaacttcaatttagcaaaactyccctccccttccctcactcacacagggatgaaaagataaaataatttatttgacctcaatttacacttttggaaactccaatgttcatatccaggctagttgtagcatttgatgtatgcaatagcttaaatacccaaaggaatatacaaaataaattgtacacatagattcttttagattttatttgaagctttttttatggtttgccaagtattttaaaggctgattctttcattaggagaatgcctgtcattgaataaacattatctattattcaacaatataaactaagctcctactatgtgtcaggcccttggtcagacccagtgtatacccaggtgcaca

SEQ ID NO: 485066 - DNA, 589 bp, Homo sapiens
tagccctgggtgctgcactatctctaaatgatttctataaaccctgccctcactttcacaagtcacccctttgttaaattctcctcaaattacccatttgagagtgcctgccacctcctgttgtgaccttggctggtacacaagcaatgtctctttgaatgttctcctgagggacctgggattggggaccccccgactaataacgacctactctccctgtgctaacttcaatttagcaaaacttccctccccttccctcactcacacagggatgaaaagataaaataatttatttgacctcaatttacamttttggaaactccaatgttcatatccaggctagttgtagcatttgatgtatgcaatagcttaaatacccaaaggaatatacaaaataaattgtacacatagattcttttagattttatttgaagctttttttatggtttgccaagtattttaaaggctgattctttcattaggagaatgcctgtcattgaataaacattatctattattcaacaatataaactaagctcctactatgtgtcaggcccttggtcagacccagtgtatacccaggtgcaca

SEQ ID NO: 485067 - DNA, 589 bp, Homo sapiens
tagccctgggtgctgcactatctctaaatgatttctataaaccctgccctcactttcacaagtcacccctttgttaaattctcctcaaattacccatttgagagtgcctgccacctcctgttgtgaccttggctggtacacaagcaatgtctctttgaatgttctcctgagggacctgggattggggaccccccgactaataacgacctactctccctgtgctaacttcaatttagcaaaacttccctccccttccctcactcacacagggatgaaaagataaaataatttatttgacctcaatttacacttttggraactccaatgttcatatccaggctagttgtagcatttgatgtatgcaatagcttaaatacccaaaggaatatacaaaataaattgtacacatagattcttttagattttatttgaagctttttttatggtttgccaagtattttaaaggctgattctttcattaggagaatgcctgtcattgaataaacattatctattattcaacaatataaactaagctcctactatgtgtcaggcccttggtcagacccagtgtatacccaggtgcaca

SEQ ID NO: 485068 - DNA, 382 bp, Homo sapiens
ggagccagaaagagtcacctccctgggaaacttgatagatgaaaaatgacccaaagatgtccccggctaagtattcagcttgattggcacaaggtactgaaaacctctccatgtttacaataatttacttaagatttctgctaaaaytccctgccatttccccagcagaggatggggtctgggttttatatgttgctattttttacccccatgcttttctttgaatataaattatcaattatttgtaataacacaaatatacaattgtggtttaaaaatgcacagttgattttcagttgacttttgaatatagttttgtatttacatatgaaaatgtgtttcatgctttgagaattcatgtttagcaaaataatgaagcccc

SEQ ID NO: 485069 - DNA, 669 bp, Homo sapiens
tgtagcaggcaaggattaaagcaggaggtaaaatttcagatagaactttccaggggctgagcattcacattttttcctcttttcccctttggaaattaaactgctgatctttctaagcagtcttctcaagggtttctctattgagaacaatccctgagattttgttaagataaatataggcactgacatccttctccagcaaaatcctaaatcctaaaatgtattttctccttgtgtgagaatttaaaatatgtaaattgtgtctatatacatatttaacgcattttccaaattctgtttgctattcagagtgtaggatattttggacccactttgaagggaatgtacgctgatgttttacagtatctcctgcagtgtagctactgttaagtggcagtgataaataataaccactggctctgattgcttagagaatttccaagtgataattygggatgtaattaaggaaaagaaaccaatgttttctttcaccactttcataaaataatttcccagtgaggcatcagagcttctgtgggtaatgttacctggtagagcaaaattaactctccaaacacacagaactttggataggaaaagtcaaccagtccattggattttgttgttattgttgctaaatgaactatgttgaccccatgttcctatgtt

SEQ ID NO: 485070 - DNA, 603 bp, Homo sapiens
ctaaggaaaaatgttttgttccttcctttggactatgtgtttgctgtttgctttatcactamtcatccgttttatttgcaaacaaatggtctttcagatgtccctgcactttcagatgttatagacgtagttaagggcaccactattaatttaaataagcaagcttgagcactttctctaactctctggccattaatatccctgtttaaaaaaggaagagaatggactgaatggcatgcaaataagcaaagtatagcatgtaagtgctctgaagagaaccaagaaggaaccagaatagagtaataaagaaaggtaactgccatcctacgttacatgacggagggagatggcagggaaggaggtgacatttaaactgaaagcaaagggggagaaatcagatatgggggttatgcattctaggcagaggcaacacgtgtgaagggagcaatcagcgggctctggagttactgcagggctatgccacgtgactggataaaggaggaaatgtaaggtggtgctgcagactctcctgcaagcctggtgcggcagcagggggagctggggcctgagtaccctctgcatgcagggatatacccacagctg

SEQ ID NO: 485071 - DNA, 603 bp, Homo sapiens
ctaaggaaaaatgttttgttccttcctttggactatgtgtttgctgtttgctttatcactactcatccgttttatttgcaaacaaatggtctttcagatgtccctgcactttcagatgttatagacgtagttaagggcaccactattaatttaaataagcaagcttgagcactttctctaactctctggccattaatatccctgtttaaaaaaggaagagaatggactgaatggcatgcaaataagcaaartatagcatgtaagtgctctgaagagaaccaagaaggaaccagaatagagtaataaagaaaggtaactgccatcctacgttacatgacggagggagatggcagggaaggaggtgacatttaaactgaaagcaaagggggagaaatcagatatgggggttatgcattctaggcagaggcaacacgtgtgaagggagcaatcagcgggctctggagttactgcagggctatgccacgtgactggataaaggaggaaatgtaaggtggtgctgcagactctcctgcaagcctggtgcggcagcagggggagctggggcctgagtaccctctgcatgcagggatatacccacagctg

SEQ ID NO: 485072 - DNA, 603 bp, Homo sapiens
ctaaggaaaaatgttttgttccttcctttggactatgtgtttgctgtttgctttatcactactcatccgttttatttgcaaacaaatggtctttcagatgtccctgcactttcagatgttatagacgtagttaagggcaccactattaatttaaataagcaagcttgagcactttctctaactctctggccattaatatccctgtttaaaaaaggaagagaatggactgaatggcatgcaaataagcaaagtatagcatgtaagtgctctgaagagaaccaagaaggaaccagaatagagtaataaagaaaggtaactgccatcctackttacatgacggagggagatggcagggaaggaggtgacatttaaactgaaagcaaagggggagaaatcagatatgggggttatgcattctaggcagaggcaacacgtgtgaagggagcaatcagcgggctctggagttactgcagggctatgccacgtgactggataaaggaggaaatgtaaggtggtgctgcagactctcctgcaagcctggtgcggcagcagggggagctggggcctgagtaccctctgcatgcagggatatacccacagctg

SEQ ID NO: 485073 - DNA, 564 bp, Homo sapiens
caatataaagtctaaaagagccgttgtatctgttcattacaatttgtttaaattttaatcaaacaaagtaatatttatgctaccattttaatacagctcagcgttattctcagttctgctggggatttctggcagaatgagacgtcttgttcttgagctttgtgacatgtccaaaatcaatttttggaattattttttataaatcactgcagcccagtgattacaatcaatgtactgtgtttatcaatgttcagccaacccagatacttcaagagctaccttcctcaagtgtttcacttaggaagagttacagtcttgtgtcctgtaggctatttaaaaatatttgattccttgaaggacccagatatttgttacggatttagagaagtgtatttttcactttctggaagagatccagaaagckatctattttttgtttttttctcattttcatgctcatgtcattatggtctagccattctgaacacttggtgcgttccttaactctttattcaaggtttattgtgtgaccttttttttttctgttaaagatgttttttatga

SEQ ID NO: 485074 - DNA, 564 bp, Homo sapiens
caatataaagtctaaaagagccgttgtatctgttcattacaatttgtttaaattttaatcaaacaaagtaatatttatgctaccattttaatacagctcagcgttattctcagttctgctggggatttctggcagaatgagacgtcttgttcttgagctttgtgacatgtccaaaatcaatttttggaattattttttataaatcactgcagcccagtgattacaatcaatgtactgtgtttatcaatgttcagccaacccagatacttcaagagctaccttcctcaagtgtttcacttaggaagagttacagtcttgtgtcctgtaggctatttaaaaatatttgattccttgaaggacccagatatttgttacggatttagagaagtgtatttttcactttctggaagagatccagaaagctatctattttttgtttttttctcattttcatgctcatgtcattatggtctagccattctgaacacttkgtgcgttccttaactctttattcaaggtttattgtgtgaccttttttttttctgttaaagatgttttttatga

SEQ ID NO: 485075 - DNA, 552 bp, Homo sapiens
ctggcaactgcatcaaggaaggtttccatggttgctcaggttaccccttttccattcttgcattactaggtggaagctctgtccrttgattgcacatgttttgtccaagcaggcctgggggaagctacttgcctgaggggtcagtgaaggtttgttcctgcatagatgggctcattgtaatcacattaactctcagcacttcttgggtgtttctcttgctctttttgatggagctaatgcccattatacagagatgtgagactcaatagggtgttttacatcagtgtttcatattttgcaagacagcaaaaatagagaagaatgaaggccttgaacatagtgacagatcctcttgggatgaaccaatacaaaattcattattttccccacctattgttctagtatttattctaggcatgggaatatgtatgtatgtatgtatgtatgtatgtatgtatgtatgtatgtatgtatctagctagctagctagctagctatcttgttcaactaatgctttctaggaaaccattgttgaaatctagggaaaaaatg

SEQ ID NO: 485076 - DNA, 422 bp, Homo sapiens
tgtgagggcagaacctgtatctttgaagagctcagtaattgtccttctctgtatgtcagatccaacagtgggaactgcagccactcaactacaatatttaaatacaataggaacaataggatcctgaggtggcagaggccaagcagyggcactcatccatgaggtcttaactcaggcatggtgtagagttggtgctctgtacatatgtggcgaatgaagaaatgaaaaactcagggaaatatctaccagcaaccattatgcttgaaacgaaataatttccattgtaacttccccctgtgtttgtggatgggtgctatgaagtaaagcttagcataacccaacaacctagggcttttcttttcctttttaaaatgtaatccatttcgtgaaatattcaagtccatagtgaacaaagaggagct

SEQ ID NO: 485077 - DNA, 422 bp, Homo sapiens
tgtgagggcagaacctgtatctttgaagagctcagtaattgtccttctctgtatgtcagatccaacagtgggaactgcagccactcaactacaatatttaaatacaataggaacaataggatcctgaggtggcagaggccaagcagtggcactcatccatgaggtcttaactcaggcatggtgtagagttggtgctctgtacatatgtggcgaatgaagaaatgaaaaactcagggaaatatctaccagcaaccattatgcttgaaacgaaataatttccattgtaacttcccccygtgtttgtggatgggtgctatgaagtaaagcttagcataacccaacaacctagggcttttcttttcctttttaaaatgtaatccatttcgtgaaatattcaagtccatagtgaacaaagaggagct

SEQ ID NO: 485078 - DNA, 605 bp, Homo sapiens
tctttgttatgactttctctgaccaaactctccctctgctaaaccatgtttttctacaatatgtcttcttacactttaagcatgagaatgacagcatcggtttcctgaggagtcgaatgtrcagaagtgactatgctagtactgaccgccttatgggtcataaacagcctattttgactgcaaaacaaaatagctttaatttaaaatctattatgcgctcgttcctcattgcttcttcagctcatattgggagctcagtgcatggttattgaatgattattgaataaatgattggatgagtaaattaatgatgtctataaataaggggcagccacagagtagaagttcaataaaatattaacttcatcctactggaagaacattttgtaaatcaaggaatttccactaagtaaagattctgtgtaccacttataaatttatgaaatttctctatcttggcttaaacctaaaacctctttgggaagctaactgaactgtgtttctatagtactgcaaaattgtatctttattggctgaaaggtaaagtataacagaaaaatgtgagaggatacaaaaaatgcatgctttgtgttcttccattctcc

SEQ ID NO: 485079 - DNA, 606 bp, Homo sapiens
actattccagatagaatacttatcaccatataggtgactttaccctctcttcttacgttatggttgtcacatgtatttcacctgcatgcattgaaaaccccatcagacaatattatcttcttctggacaaagtttagacttttggtattatcacgcatgactcaggttctgcttgtttttttttctcaaactattgttctctctctttcttccaatcaggtagtttaaattgttctaccttcagtgggtaattagcgatattatgaaatcattttctgagacaaattgtacttgcagaggagttacatataaatcatgtgcataattttarcattattgtgttagtctgttttcatgctgctgataaagacacacctgagactgggaagaaaaagaggtttaattggacttacagtttcacatggctgaggaggcctcagaatcatggccgaaggcaaaaggcacttcttacatggtgacagcaagagaaaatgaggaagaagcaaaagcggaaacccctgataaacccattaaatctcatgagacttattcactaccatgagaataacaagggaaacactggtccccatgattgaattacctcca

SEQ ID NO: 485080 - DNA, 606 bp, Homo sapiens
actattccagatagaatacttatcaccatataggtgactttaccctctcttcttacgttatggttgtcacatgtatttcacctgcatgcattgaaaaccccatcagacaatattatcttcttctggacaaagtttagacttttggtattatcacgcatgactcaggttctgcttgtttttttttctcaaactattgttctctctctttcttccaatcaggtagtttaaattgttctaccttcagtgggtaattagcgatattatgaaatcattttctgagacaaattgtacttgcagaggagttacatataaatcatgtgcataattttaacattattgtrttagtctgttttcatgctgctgataaagacacacctgagactgggaagaaaaagaggtttaattggacttacagtttcacatggctgaggaggcctcagaatcatggccgaaggcaaaaggcacttcttacatggtgacagcaagagaaaatgaggaagaagcaaaagcggaaacccctgataaacccattaaatctcatgagacttattcactaccatgagaataacaagggaaacactggtccccatgattgaattacctcca

SEQ ID NO: 485081 - DNA, 446 bp, Homo sapiens
gaaggctgctgaaaggtgagatggcattgattgacaccggggaatctccctttatggaaagcttacaaaattatttatgaagtgggtgggaagggttgttgctgttaagcatgttctgggtggtcctctggatgcacatgtgctactgatgtacatgccagtacatacatcacatgtcacatcagcatcttaagtctccactcaagggtgtgttttttactgttatagtgagcaacaggtcaacccaaggacatcaatcatgggtttctgtacttttgtgaayttggagatttccccttctgctcttctacctccttgctgcagcatgctctaacgacgatcccacgatgtggtttgtgcactgttgggcagcttttcctctccatctatttggcaagtttgttcccctttaagggaggttatgcccatcctatctaatccacctc

SEQ ID NO: 485082 - DNA, 587 bp, Homo sapiens
aggagcacccgagtgggtgtgcatgcacataatgggcccagctgctgtggctgcagcctgtgaatgccttccaagaggccagatgcctggacacatctctcagcagctacttttcctttaagggggatgmtaactccctggcgcttatccctagtacctctgacaaggaaaggaaatccatcctgccctgaacagcagggtgagcaccttcacctgattcagtctcatgcatctcagcaagggagatgctagtatctaattgtcttagtttcctagggctgccataacacaatagtgtaaactaggtgacctaaaacaacaggcatttattttctcacagttctggaggtgagaagctggaggttgaggggttggcagggccatgttttctcaagtctttaggggaggatgtgttctgtgcctttctcttaaaggctactgtgttgccatcaatgcttggctttccttatctcacagctgttaatttcagtctctaactttgttgtctcatggtattctctcctagggttgtcgttgcattatcttcttgtaaggacaattgtcatattgaactaagggatcgccct

SEQ ID NO: 485083 - DNA, 605 bp, Homo sapiens
gtgtgtgcttctgctagccttttactgtccagttgtagagagtaggcccagtgaactcagtcaggtgtttataagattgagcaattgagcagttgctgtatcctgaagactgtatctggtgctttactcttgtataattcttgagacaggaatacctgggtgttggcatcaaggggctgttgaggccatctttatttctccataacacccagcacaagacatttacatgtatgggttgggtagggtaggagttcatagctgtccatagagcagggcagggacatttctgagaaggtcagagaggtttgatgaggtgattttcctgagctgggccttgggagtggagagatagagggagaacaggtgcatggacacagaggccagaagggcatcagacaaaggacccctggggctgtgggaaagyccccgagccattgggaaatagaggagcttagccttgctaagaggagagaattcagagagccatgaggtgattgaggtttcaaagaccaaataaacaaaggaagacagcatcttggggagtgggcaagaccatgcctcacctggcaggtgaggtcagaggatacctgacctacgaagatcca

SEQ ID NO: 485084 - DNA, 605 bp, Homo sapiens
gtgtgtgcttctgctagccttttactgtccagttgtagagagtaggcccagtgaactcagtcaggtgtttataagattgagcaattgagcagttgctgtatcctgaagactgtatctggtgctttactcttgtataattcttgagacaggaatacctgggtgttggcatcaaggggctgttgaggccatctttatttctccataacacccagcacaagacatttacatgtatgggttgggtagggtaggagttcatagctgtccatagagcagggcagggacatttctgagaaggtcagagaggtttgatgaggtgattttcctgagctgggccttgggagtggagagatagagggagaacaggtgcatggacacagaggccagaagggcatcagacaaaggacccctggggctgtgggaaagcccccgagccattgggaaatagaggagcttagccttgctaagaggagagaattcagagagccatgaggtgatkgaggtttcaaagaccaaataaacaaaggaagacagcatcttggggagtgggcaagaccatgcctcacctggcaggtgaggtcagaggatacctgacctacgaagatcca

SEQ ID NO: 485085 - DNA, 596 bp, Homo sapiens
ctttatgccagtttcttattttcacccatcatgacttaaagcttttttttgttttagcattttaatgtttaaataaatgtaaataatttagttacaaggtctttatggtagtgccgccattgtttttaagaagacaaattttaatccaaggttaaaaacttcacatttgcttatctctttttcctcttaagaactaagagtccagagattagagtaaaatcaccttttcctcatagttttttctttcaacgtgttagaaattcctgtttgaaaaggaaagccagttcctccccctttttakgtttgaggggatgatggtaaaatcacattattcagtcagtttccacatgtgatttgttgcctatattttttaatccagggattaaattgttgccaccaccagcatcaaatcattggggggcaggggtggggaaggtgcgagacagttggttatagacatccaaatatgacgacagaaaaatctccacagcaatatggcagtggagcatttgctgacttcagagtgccagatcaaccccaatatttttttcagggatgctaaacctcttgtaactgctaaattggatttgttactg

SEQ ID NO: 485086 - DNA, 564 bp, Homo sapiens
tggtgagcagcatgtgttggctccaaggaagtcaccattatggctttctcctggttcctgccctgattgacgtgtatgaaatcttttttttttttttttttttttttggagacagggtctcgcctgtcgcccaggctaaagtgcagtggcgcaatcttggctcactgcaacctctgcctcctggattcaagcaattctctgcctcagcctcctgagtagctgggactacaggcacccactaccatgcccggctaatttttgtatttttagtagacacggggtttcaccatcttggccaggctgttgttgaactcctgacctcaagtgatccaccctcggcctctgaaattgctgggattacaggcatgagccactgygccgggcctagaatttttatatgaggaagtggtgtccttattttctccagttgcagctctctctgcagggaaagagacatttggaatgttgtggacttgagaactctgaatgctttcaaagcactatcgtgtgtgtgtgcgcacacgcacacacagtagctagaagtgttagtctagcacaggagtt

SEQ ID NO: 485087 - DNA, 564 bp, Homo sapiens
tggtgagcagcatgtgttggctccaaggaagtcaccattatggctttctcctggttcctgccctgattgacgtgtatgaaatcttttttttttttttttttttttttggagacagggtctcgcctgtcgcccaggctaaagtgcagtggcgcaatcttggctcactgcaacctctgcctcctggattcaagcaattctctgcctcagcctcctgagtagctgggactacaggcacccactaccatgcccggctaatttttgtatttttagtagacacggggtttcaccatcttggccaggctgttgttgaactcctgacctcaagtgatccaccctcggcctctgaaattgctgggattacaggcatgagccactgtgccgggcctagaatttttatatgaggaagtggtgtccttattttctccagttgcagctctctctgcagggaaagagacatttggaatgttgtggacttgagaactctgaatgctttcaaagcactatcgtgtgtgtgygcgcacacgcacacacagtagctagaagtgttagtctagcacaggagtt

SEQ ID NO: 485088 - DNA, 627 bp, Homo sapiens
actctgaatgctttcaaagcactatcgtgtgtgtgtgcgcacacgcacacacagtagctagaagtgttagtctagcacaggagttaattgagttaatgtgtagggaattcagtaataacaacagagcgtcctctttcatttcccagatccaaagctctgtgacatgcattaacaatatacctccatgtagtttgtgtctcagtctgtgtacacgtgtgtgatggctaaatgggaactgcacagccagtggatttgtgaacttgagcacytgcacctggctaagggtttattaagtgtggaaaccgtactgttgttgtaaaacagttttcatctcaagaaccacctgccccttttagcggtggccttttgcacgtgtcttgcactagccaagacaagtctatccaagagggagcttgtggagtaggttggtgtttgaatctttcccagtactcccaaatgcacatagaattggtcgcctctctgggtgtcccagggggctgtgccccgctcatgttcagagtttgctcagcataccacacaggaaagaggccggcttgccaggtcctgcggagcgcctttccaagcctgtgaaaggcacgaatcatccagcagccgagcatgcttaca

SEQ ID NO: 485089 - DNA, 599 bp, Homo sapiens
gtgtgtgtgcgcacacgcacacacagtagctagaagtgttagtctagcacaggagttaattgagttaatgtgtagggaattcagtaataacaacagagcgtcctctttcatttcccagatccaaagctctgtgacatgcattaacaatatacctccatgtagtttgtgtctcagtctgtgtacacgtgtgtgatggctaaatgggaactgcacagccagtggatttgtgaacttgagcacttgcacctggctaagggtttattaagtgtggaaaccgtactgtygttgtaaaacagttttcatctcaagaaccacctgccccttttagcggtggccttttgcacgtgtcttgcactagccaagacaagtctatccaagagggagcttgtggagtaggttggtgtttgaatctttcccagtactcccaaatgcacatagaattggtcgcctctctgggtgtcccagggggctgtgccccgctcatgttcagagtttgctcagcataccacacaggaaagaggccggcttgccaggtcctgcggagcgcctttccaagcctgtgaaaggcacgaatcatccagcagccgagcatgcttaca

SEQ ID NO: 485090 - DNA, 610 bp, Homo sapiens
tgcacagcttaaacacctgcccaaaggatttttaaaggcttaaaatagattcactcatagcatttaaatagagggcatcttgcttgttggtttaaactgcttaagcggttgttgacttgtggaaccttctatccacacaagggtttgctggataatttcactctgagatatctttacaaagcaacattcagggcccgagccacataagtagtttgggctctgcctttttttttttagaagtcaaacttctgtgtggtgaatgagcttgcagataaagctgtgttgactgtatrtattccttctgtctgtagaaaatattgtgggtactgagaataaggccctgagttagcatgtctgacttccgtttgtccagttcattcttacctattctgcctataaacaagttgaggtgtttcttagaaaatttgtttttctcaattaaatgctgaatgttatgctctctgtcagtggtggattgaagtaggatactaaatctgaaattgatgaagatcacaagaattaaaaacagggaagattgagctaattttgaagtaagaagggctttaagctttccaggttcattctgttagggaacaaaacagccacatgt

SEQ ID NO: 485091 - DNA, 493 bp, Homo sapiens
accttgatgctgtgccaatggggaaagaaacatcctccttgcagcacttcttttcagggcctcggacttgtggwcagcacctcccaaccatgtccaagagagagctggacacaggctacaccccatcctctctcctccaccttggctggtgactcaaggtgtaggaggagaggacacaccccagctaaatccaaacacaaccaggagatcccagatgaacttgcagttcagcacgccaccccctggcaccactgccacccctgcagacgggcaggaaagctgacaaggactaagtacccactgtgagccaagtgtgtcatggttagcatctcaatgaatccttatacagccctgcaaagaaggtgcacactgaagtttggagaaattaagtagctcacacagtcacacagctcttatctcaaagagaagcctctgggctcctcatatttccagaaatggaaagcacagttcttggctttgatgttacactgct

SEQ ID NO: 485092 - DNA, 514 bp, Homo sapiens
ctgagctggccccaaacctttctcattcatcaggtgtgtgaacactggcccagacaccacctttcccaggraacaggacctttttatggtttcaaggttttgtgcatgaaaagtttttcatagaacaacaataacaaccccaagccaatgatacgtaagtgaactaacaagtgcagagctgccagataaaacggggaacccagttaactcacatctcaaatgaacagcaaatactttttcagtacatatgaacatatataccaaatactgtataggacatgtacaccaaaaaagtattcactgtttatttgaaatgcaaatttaactgggcaacctgataaatctgacaactctacttatcaagaaacctttaccacagagaataaaaactgagacttaccctcaaattctcattgctgtaaaaggcatcatatgtccaagacactttaggtagggaaaatgaagttgcaggaaacacttggagcataatccctttttagtaaaaacaagtgat

SEQ ID NO: 485093 - DNA, 575 bp, Homo sapiens
tgataacattatcatgtgacaactccatagaacacygtgttctcccgcatcttagaggaaccgcttacaaactacacatttgccttgggttacaggggtcagaaagagatgagcaagtaaaaatgtttaaggctgcatagtgaatacaacactgctatgttagatagaagttatttctgttctaactatttctagatgaaaaagaaatatgaatgaagttttcttagtggctcattctctatgaggcaataaagatacgccacataatcactttcttaatcctctaatgagtagtttgactagccttaccactgtaactatgcctctgatcatttttctttctaatccatcctctacacagctacctaaaacacagttctcagttataagaccttccaaggctcctactgcccacatctaaaggaataaactgctttagtatggtgttcagtgttgtccccaccatctggcccctaactatttttcatgacacaccaccaccacgaccaccaccacaattcattttaccaccatcaaaatacctaccaagcttccagttccctgaacccaccctg

SEQ ID NO: 485094 - DNA, 575 bp, Homo sapiens
tgataacattatcatgtgacaactccatagaacactgtgttctcccrcatcttagaggaaccgcttacaaactacacatttgccttgggttacaggggtcagaaagagatgagcaagtaaaaatgtttaaggctgcatagtgaatacaacactgctatgttagatagaagttatttctgttctaactatttctagatgaaaaagaaatatgaatgaagttttcttagtggctcattctctatgaggcaataaagatacgccacataatcactttcttaatcctctaatgagtagtttgactagccttaccactgtaactatgcctctgatcatttttctttctaatccatcctctacacagctacctaaaacacagttctcagttataagaccttccaaggctcctactgcccacatctaaaggaataaactgctttagtatggtgttcagtgttgtccccaccatctggcccctaactatttttcatgacacaccaccaccacgaccaccaccacaattcattttaccaccatcaaaatacctaccaagcttccagttccctgaacccaccctg

SEQ ID NO: 485095 - DNA, 438 bp, Homo sapiens
ggggtgcctggaccacatagaggaggtctggttctggactggttggtttgcatatgaaaagcaggctcctggactatcctctgttagacagaatcatgttcctactctaagaattggctagacccagaaaggccagtcttttcccagcaagaaaggctttttaaaaaaaatcagaacataataatatacagaacatatayatgaaaatacaccttagctcccatgtaaacacaccagagcatctcataatgacaggacttcaaagagaaactaccaaggctgctatccttcagcaatcaccattagcttccatttaagtgaagctatgttgggatggtttctagtgacagaaccgtgctccctgaagaggccatgcacaggtttacacaaagagcatggattctggagtctagcagatgtggcatttactagcaatat

SEQ ID NO: 485096 - DNA, 504 bp, Homo sapiens
tgtagaatattccattgaatgaaaaatgccacgatctatccaccctattacttagggacatttgcgaggcttccaaatggacctattaagaagagtgctactatgaacgttcttgaatatgcttttgagggacatatggatgtgtttctgttggacgttcctaggagtgtaattactcggtcatagagtctacgtgcattttatccttcatttagataagaggtagggagaaacagtctgagaaaattctctatttaattattastgtaaatttaagagattagattttaaaaggcttcccaactaacagtaaataaccaatttgccattacaactgctttgtaattacccttgaacatggaaaataattatgtagctatccaaccatatcacagatgctcttcaggaattttctaggaggaagtattgatgtaaaatataattatcaagatatatatataattatcaagatatatataattttatatatatataattatctgt

SEQ ID NO: 485097 - DNA, 614 bp, Homo sapiens
ctttttaagatgtgcctttttgtctgtttgtatgctgtgggtggtgggtcactcatataagcaacaaatacagacaaggattagtctgggactaaacaaacccagttctcttctagtctttggtttttcatattcacattcatattcactttccttcttattcaagtttctactcatagtttactccagctaaaatcacagccacaagagaacgaaygagctgctgtggccacggaagccggacaatgacaagaagctaacagtacgaaggcagacaccccctaaaggtagtcagtgaaaaaaatgactcaatctcctccaagttatataaccttctggggaaagaacaatgcccaaaagtataaacaaaaaccttctagccctatcccaccaggaaactgagaagtctcagacaacctgacttcagaaaaccatgataggaaaaaatatccccagaagctaagcagagaatgtattaccaaaataccacgtgaaataaaaaccactcatacaagacatgggttcttctaagcaggtcctatttacgacttcaacttgctctaataccaggaactgaaattatttctacatactttctacagtaaatggaaaac

SEQ ID NO: 485098 - DNA, 566 bp, Homo sapiens
taagtctcctctgtaaaatggggacaatgaaacctaccccgaggactggttgtgccagttagatgaggtaacttgaattggttcctgagacagtacctgacacataagctctcagcacatagtgaccagtgtcattcttattggcattgcttttattatttatttttattatttttgctatattcataaaatgtatttgaaaagcaaaaatgaaatactttttaagraagtacagtgacttgagtgagaccatacagtttatgttagctaatgatttccaaggccatccaagttcaagttttgagtgtgcaagccagcatcttttgaataccttgagagagggagcagacaagaaagagtttggctcagagaaggtaggcggtgggaacccagagtcctggtgagtgtgcctttacacccgacatctccctccagatggcttttcagccaggttgataattagcatcaacagatgcaagccgagagtctcctgggctgcatgtctccagcatggatatgtatggagagaagcatgcagcatgtggaagcccgagctcagttgggtt

SEQ ID NO: 485099 - DNA, 564 bp, Homo sapiens
aatgcaaattaaaaccccagtgagttaccacttcataccctcaggtgactatggtcagaaagacaataacaagtgttggtgaggggggtgaaaaatgggaagmcttatgcattgctgatggtaatgtaaaatggtgcagcctctttggaaagcagcctggcagttcctcaaaatgttaaacgtagagcaattctatttctaggtatttacccaagagaaatgaaaacatatgtccacgcaaagacttgtatgcacatattcacattagcattatttttatatgtgcatctgaatgccctcatctccgttatggattggatgttaggacaccctatagaggagatttccagggatagctactcttgtgtttgtcttcttatatggggttcatgcataggaaatgccaagcttttggcctctctcatttataacttccagataacagcctaagtttggtctatgtttaaggaaattcaggagtcttttgcagggcttctgtagaaacctttatcaagtaaaagtatctggtgtttcccaggctttgctctcctgcattccttgtag

SEQ ID NO: 485100 - DNA, 401 bp, Homo sapiens
ctgctggctggagggccgtgttcattaatgcatgagctcttggaagaacagctttggggaaaggatggcctgatttcctgatcccagcttacaggattgaaacctattgatttaaaacaaatattagcttatattatagcttgttgaaacttgcattgcgtacacagtgattagaattttgggtttagtatagctgttgctaatccragtgagatccaagatttcatttcctatcaagtgaaatcttctgttattgaattgcattaaatatagaaagaatccaggcatctttacttatcgaacacatttgcaaagctaactgagaactcatgtggcatgaggctttagaggcaacaacaggccagctcaagttttattttatatttttagcttccataatc

SEQ ID NO: 485101 - DNA, 579 bp, Homo sapiens
gagagtggggaatgatcagggaatagcgacacagggaagtggaggggtgggctcaacggaggsggctgtttgcctgagtgatcttaggaaatagtgttggggaataggagtggggtcagaagatacagactttgaatgtcaggcagaagaacttagaaacaatgctgaagaaaatgaacacagagagagaaactgaaccaagtggccagtttgctaatatttgtcttctaaagcctctccggtggcactggcatttgcaatatcaaaacagaaatgtaaactcagagagaaagaagaacgtgtgaaaacaaatgcacgtgatttatcagaagaaggttgctgattttctggctaaacttacattgtcacctgcagatagaaattctctgcagtattgctgctaaggcaagggctgtgagaggagtgtggttccaagggctgacggagtcttctcccgctacgcctgcctcatttgccgagcaccacaggttattagttttttgttttgctcatgtggccccaagagcctccttgggtcctgggtaagatcattattcaggctggaaagcctttgcccca

SEQ ID NO: 485102 - DNA, 550 bp, Homo sapiens
acacagggaagtggaggggtgggctcaacggaggcggctgtttgcctgagtgatcttaggaaatagtgttggggaataggagtggggtcagaagatacagactttgaatgtcaggcagaagaacttagaaacaatgctgaagaaaatgaacacagagagagaaactgaaccaagtggccagtttgctaatattygtcttctaaagcctctccggtggcactggcatttgcaatatcaaaacagaaatgtaaactcagagagaaagaagaacgtgtgaaaacaaatgcacgtgatttatcagaagaaggttgctgattttctggctaaacttacattgtcacctgcagatagaaattctctgcagtattgctgctaaggcaagggctgtgagaggagtgtggttccaagggctgacggagtcttctcccgctacgcctgcctcatttgccgagcaccacaggttattagttttttgttttgctcatgtggccccaagagcctccttgggtcctgggtaagatcattattcaggctggaaagcctttgcccc

SEQ ID NO: 485103 - DNA, 550 bp, Homo sapiens
acacagggaagtggaggggtgggctcaacggaggcggctgtttgcctgagtgatcttaggaaatagtgttggggaataggagtggggtcagaagatacagactttgaatgtcaggcagaagaacttagaaacaatgctgaagaaaatgaacacagagagagaaactgaaccaagtggccagtttgctaatatttgtcttctaaagcctctccggtggcactggcatttgcaatatcaaaacagaaatgtaaactcagagagaaagaagaacrtgtgaaaacaaatgcacgtgatttatcagaagaaggttgctgattttctggctaaacttacattgtcacctgcagatagaaattctctgcagtattgctgctaaggcaagggctgtgagaggagtgtggttccaagggctgacggagtcttctcccgctacgcctgcctcatttgccgagcaccacaggttattagttttttgttttgctcatgtggccccaagagcctccttgggtcctgggtaagatcattattcaggctggaaagcctttgcccc

SEQ ID NO: 485104 - DNA, 579 bp, Homo sapiens
gagagtggggaatgatcagggaatagcgacacagggaagtggaggggtgggctcaacggaggcggctgtttgcctgagtgatcttaggaaatagtgttggggaataggagtggggtcagaagatacagactttgaatgtcaggcagaagaacttagaaacaatgctgaagaaaatgaacacagagagagaaactgaaccaagtggccagtttgctaatatttgtcttctaaagcctctccggtggcactggcatttgcaatatcaaaacagaaatgtaaactcagagagaaagaagaacgtgtgaaaacaaatgcacgtgatttatcagaagaaggttgctgattttctggctaaacttacattgtcacctgcagatagaaattctctgcagtattgctgctaaggcaagggctgtgagaggagtgtggttccaagggctgacggagtcttctcccgctackcctgcctcatttgccgagcaccacaggttattagttttttgttttgctcatgtggccccaagagcctccttgggtcctgggtaagatcattattcaggctggaaagcctttgcccca

SEQ ID NO: 485105 - DNA, 551 bp, Homo sapiens
gttcagctttgtgtccccacccaaatctcatcttgaactgtcatccccagaatccccacagtccccacatgtcaaggcagggaccaggtggaggtgattgaatcatggggttggtttcccccatgctgttctcctgatagtgagttctcatgagatctgatgattttacaaggggctcttcccccttcactcagcacttctccttcctgctgccttgtgaagaaggcaccttgcttcccctttcccttccgccatgattgtaagtgtcctgaggcttccccagccatgatgaactgtgaggcaattaaacctttttcctttataaattacccagtctcaggcagtcctcatagcagtatgaaaacagacaaataccacacccttggacaaactgcttttctttytctgtgcctcagttttcttctctgtaaaagttgggtcagcagttctcaaatcgagctccattcatgtgcccaaggggactctgctttcccccgctgtagcccccaacccctggtcacacctcttggtcacactccccagtcacagcc

SEQ ID NO: 485106 - DNA, 579 bp, Homo sapiens
aactaatctatatcatgtagaacaatttgtgttaaaagtaccatgcaactttaatatcaaatctttatagtctacttgattgattttcagttgagagatgcaaaattctgaataaaaatgtatgtatatagaatataatacaatattaaagacatacactagggcctgttgcagcttatttcaagagtcaaaaggaggtttattttcaggagatctgttgatgtagtgcacacattaataagagaaaaaaatcaaawaaccataccattatatgctaaaactgcacttggtagaatatagcaggcagtcctaaaacacctctctgtgtattaggaatacaagaaggtaagacagatagggcagaaaatactgtcagaacaaacaatatcatctaagcagcaaaacactcgaaaagtgtcaattaaaatctggaattagatggatcattttgtgattaatattattatacaagaagttttaaaaatagtagtaagacaataaagtgaatcaaaccaaattaatatgaggcaaaagacattacactctctatctttgctgattttataatggctgatgggg

SEQ ID NO: 485107 - DNA, 469 bp, Homo sapiens
tgcgtgaacgacctgcagggatgtaggatcagtgccacattcccctgtgacgttaggagaaggcactccagtccscaaagattgatctcacatgctacctgaccatataacctcagtagcaaatcctaggtgctaatatgtattaatatgtaagagcatattttactttcaggtgtattagtctgctaaggctctcataatcaaatacacagtgggcggcttaaacaactgatatttatttcctcacagttctagaggctggaagtcccagagcaaggtgtggctgggctggtttctcctgaggcctctctcctgggtgtgcatatggccgccctctctcagtatcctcacgtgggcctcctggtgcccaaccctggcgtctcctcctcttctgaatagtacagcagctccattggatcagggctccaattagggggtcaacatatgaatttcacgccagatgcggtgg

SEQ ID NO: 485108 - DNA, 469 bp, Homo sapiens
tgcgtgaacgacctgcagggatgtaggatcagtgccacattcccctgtgacgttaggagaaggcactccagtccgcaaagattgatctcacatgctacctgaccatataacctcagtagcaaatcctaggtgctaatatgtattaatatgtaagagcatattttactttcaggtgtattagtctgctaaggctctcataatcaaatacacagtgggcggcttaaacaactgatatttatttcctcacagttctagaggctggaagtcccagagcaaggtgtggcwgggctggtttctcctgaggcctctctcctgggtgtgcatatggccgccctctctcagtatcctcacgtgggcctcctggtgcccaaccctggcgtctcctcctcttctgaatagtacagcagctccattggatcagggctccaattagggggtcaacatatgaatttcacgccagatgcggtgg

SEQ ID NO: 485109 - DNA, 577 bp, Homo sapiens
gttggattttccattcctgtgatatcgcccttggacttggtctctctcagacatctcagaaattgagctgtcatagttaattagagaaagaaagacataagtttggatgtttatgataaaatactcagacatctctaggagacctggcctcagcattatattttcctgtcctgtctgcagatggcccgatgttcaggttgttaattcattgtgtgctgttgctgaagtcctgagatgcctgattgctttattggtgccacgcagagaagtttagcacggaggctttcagaggctgaagagggtaggtgccctggcaccacctttcacttcagaccaaggttgctctccctctctctcatgctttaatttattaatgggctttgtaggttccgccgtgcttcctggtgttttcaatttcagggtaatcctcgtttggaggtaaacagacaaggcctgcttgggccaatccccctaagatgggcttgwggagctgtgaaggctgttggtggggacattgggcttgctgaacagactgaaaggtattttcgtgtaggtgggaacagcttagcaccagcgt

SEQ ID NO: 485110 - DNA, 569 bp, Homo sapiens
tctgatttcccacggcggagagcaggcttgcgtggaggcggatgcgtgagggaaggaaagtggctccccagcctccagccatcatgcagtgctgctcggtgttctcacaggcgcggcccttgtacctctgcacgtgcctttgaaattcagatactttaacattctcacagaatagacagtgcatattgacagaaactcagctattactgcaccggaaaccatccattcagccaaaagttactatgcagggttatagttaggtatacyagtgatctggcttggaaaaattcaaaggccagaaccaagccagattccactccggatgaaactacttggttcatatcacgacaggcgtcaggaagtcgccttcctcttctcaaacaccccgctgacttgactgaacttcagattatgtaaaatgcctttggattttccagttaatgcatgtgtagtgagacacataacggatccgtgttctattactacactagggtgtaagcctttccggggttactggcacagccacatgacagagctggaggctctaaaacagtcccctctgaaggcgc

SEQ ID NO: 485111 - DNA, 512 bp, Homo sapiens
agacattaaattctccaccccagccaggagctctaatccgcccctcctcctcccaggctttctgcagctccacttcatctcctgagatgttttctcagtgccgcatttttaaagcaaggaacatccttcttattttaatctcccttcctcccacttctttacttgcactgtttggataaataacttcaacttggagagaatgataaacatggatcaraaacaacaaaagaagcaaatgacttcctacctacaatgcggcataacagaactaatcatctccagacatccacctgatttataggtgcaaaaaatgcccgtctcaggatgtgtttaattccagaacgtgtactgggaacactgaatttaaagtaattaaataggtgtctagtttttttaataatgccatttgaaatgcagccacccctgtgggccgtgggggcggggctgaatgaacagtggtgtgatctggagggaacatggtgagttttcaaaatcacatctcgtgtgattgt

SEQ ID NO: 485112 - DNA, 512 bp, Homo sapiens
agacattaaattctccaccccagccaggagctctaatccgcccctcctcctcccaggctttctgcagctccacttcatctcctgagatgttttctcagtgccgcatttttaaagcaaggaacatccttcttattttaatctcccttcctcccacttctttacttgcactgtttggataaataacttcaacttggagagaatgataaacatggatcagaaacaacaaaagaagcaaatgacttcctacctacaatgcggcataacagaactaatcatctccagacatccacctgatttataggtgcaaaaaatgcccgtctcaggatgtgtttaattccagaacstgtactgggaacactgaatttaaagtaattaaataggtgtctagtttttttaataatgccatttgaaatgcagccacccctgtgggccgtgggggcggggctgaatgaacagtggtgtgatctggagggaacatggtgagttttcaaaatcacatctcgtgtgattgt

SEQ ID NO: 485113 - DNA, 512 bp, Homo sapiens
agacattaaattctccaccccagccaggagctctaatccgcccctcctcctcccaggctttctgcagctccacttcatctcctgagatgttttctcagtgccgcatttttaaagcaaggaacatccttcttattttaatctcccttcctcccacttctttacttgcactgtttggataaataacttcaacttggagagaatgataaacatggatcagaaacaacaaaagaagcaaatgacttcctacctacaatgcggcataacagaactaatcatctccagacatccacctgatttataggtgcaaaaaatgcccgtctcaggatgtgtttaattccagaacgtgtactgggaacactgaatttaaagtaattaaataggtgtctagtttttttaataatgccatttgaaatgcagccacscctgtgggccgtgggggcggggctgaatgaacagtggtgtgatctggagggaacatggtgagttttcaaaatcacatctcgtgtgattgt

SEQ ID NO: 485114 - DNA, 478 bp, Homo sapiens
gggggagcaagatcggaactgcgtgtgcatggggttaagagggccatttaagtgccaggggtcttgctgtgtgtgttttcagtcctctgagcaatggagcacccgcagttatgttgcaggcatccccatgctgatatcactttggccttcatataactgaggccaacccccaacccctgcaacctttatttctattgcctcatcttttgcatactcaacttcccctccaggtctcctctgtagcaaaatcactcttctagatttatcttgtagcccacagcttggccgctcgtgtccttctctgttctcttttatgggtacactcgtctgtagactcaaatgcttaaaacattaaaaaaaaattgatatcacagcattgttaccttccagagaccacatttcaagccccagtgctggtgtgttgtagtaggaatgtctagactggtgcagaactgaragggttgatctcattctaggt

SEQ ID NO: 485115 - DNA, 416 bp, Homo sapiens
cagggccatccggcaggccgggctggggacccaggagggagccccgcgagcaaggatgggtcccgaagtccsgggcttagcctacccgagggtggcggacgcctgcaccgcgcgggagcgcagggtcgagcgctgggtcacccaggcgcgccgaagcgggttgagtaaagcagcaggcgaggctgcaggggtggaggaagggaaaggagagaaagggagcccgggcaggggtcgcgttacctctctggggactgctgccgcgagagctgggtggcggcagccagcagcaggcagagtggcgcccaggcgttcgcgcccctcatggcagcgtagacgctcggggtttgcaccccacggcgcgcgcgccggcacacacgcccctccgcacccaccgcgctcacaccgccgctcacact

SEQ ID NO: 485116 - DNA, 569 bp, Homo sapiens
ctctgcgcagcactctttatttcgagaatgctttcttgagcagcgagttgttgactttgtatgctttggatttatcagacatgtgtcaagttgtcaacctcctaccgtctgcatttgtgtccaccttgcaaacagcagggaaaaatacttttttttttccacgaacgttcacttcttggcagttctgaaacaaatttttgaacagttgctgttcctattgatagcaatagtttgatgtttcaaaaaaaaccagggttttattttcccctaaatttttgacatgttctgtcatatcatatcacatcagaccctgatgcatcaaaaacaaaaaaaagggagggcgcagcctgctctgctcacatagatcatgagccttcacaggacacccacccatctgttcgccactttcgtccttttgttctgtctcgaatgctggtattcctcaatcaaatgtattcttgcttctyctaagccgctgcagtctctccggcaaggcttcctaatctttgtgagaaatagttccaaggaatttggagactattcgcctttccctactggtgaggggctgg

SEQ ID NO: 485117 - DNA, 479 bp, Homo sapiens
ctggagcccgtctcagtgcctctgccttaggctgtaaagcaaactccaggaaaggtgcccgtgggggtggaagtgacggcagggtttgctctggaagtggggggacaggagccgacccactgccagttgtgttctgtgcaatcctttgcccacgattaacccttcccacgcccttcatccctcccagtttgtccccctggtgtctccacagtcccaaaggcagtagccgctcctctgcagggagaccccgccttggggggacacccgggcggccagcccctctgcgacggcagtcctccccacctcgggatgggcgcgccctggggggctctgcaaggggaaaatgcaacccccyctctccccgccccaggcggtggtttgccgcttcctgggaagaggtggagagatggagcaggacgcacaccggagcagcctggggagcgcgcacacgcgctggaccgggttagcagaggccaagt

SEQ ID NO: 485118 - DNA, 479 bp, Homo sapiens
ctggagcccgtctcagtgcctctgccttaggctgtaaagcaaactccaggaaaggtgcccgtgggggtggaagtgacggcagggtttgctctggaagtggggggacaggagccgacccactgccagttgtgttctgtgcaatcctttgcccacgattaacccttcccacgcccttcatccctcccagtttgtccccctggtgtctccacagtcccaaaggcagtagccgctcctctgcagggagaccccgccttggggggacacccgggcggccagcccctctgcgacggcagtcctccccacctcgggatgggcgcgccctggggggctctgcaaggggaaaatgcaaccccctctctccccgccccaggckgtggtttgccgcttcctgggaagaggtggagagatggagcaggacgcacaccggagcagcctggggagcgcgcacacgcgctggaccgggttagcagaggccaagt

SEQ ID NO: 485119 - DNA, 675 bp, Homo sapiens
tgctgtgtccacagccaatgcaaacattttcaaggatccctacacactcccctttaagccattccagaccagccccccacccccgcctccacacaatcctacccatggttcaatcattcttcccaaaaggtttccaaaagttttatatcgtgatcagcattcttccatactacagtcttgttaggaaggctaataggaatctcgaaaatggacaaattaaatgctgcatcaagctacttaggaaggtacattttgtccttcagtccgtgcaagggactttacggtactttctagtacacaatttacaacatagttacagtcagaacttactcctccctttcgatattattattcaacttgacacatgcagcaccgtaaacatttcgatgggactttgcaggcctctgcagagggcatagaggagcgccttgccagtcaagtcgggcagccagggacccacggagcaaagacctaagcgggcatggctccgataaagagtgaggtccgtttcctccctgttgcttcgccagttactaaagatgagtgaggcggaaacacgacggtggggagcgcggggaatggaaaagccagaaggtctcgcaacaacccggtrtcacctgaatgtctgcaaaacgtgccggcaaaggcagccatgcccccaccccgaccctggcc

SEQ ID NO: 485120 - DNA, 595 bp, Homo sapiens
gtctgcgtgtgaaagaaataacactttacccttgtcactttgttagttcttagctatagcctcaaaatgagtgttggtgtgctaatcgataactagtgtattagcaattttgcacattgatttatgaaggggaacagctcctcctgtacagttattagctgctgattaaatgtgcctatgcccagctaagggtggatatatgttccctgagaggccaggtctagaacaatcttctacgagactatggttcaaaacactttcatcattgtaagtcgttaactagacaagccccacttagccaagggcaggagccacacctgcacctgtacactgtgggggccgggctggggggagccgttccaccctagcagcctgcacccacrtcagttcttattgttttcttggttcctctcggaaaagcctataaaaagtaaatggtaaattactccgggacaaggctcaagttcacaatggacaaagaacagcaagtgttttattggaactttcttagggatgaggcggagcctcccagaccctacctgaccacaagagagtagtcagtcaatactctttgctgggagggctgtttcctggt

SEQ ID NO: 485121 - DNA, 594 bp, Homo sapiens
tgtcttgtgtttttaaaggaaaaaagtcaagaatcaattacattattgtagatttttaccatttttattttctctgcaaaatataaggcaggatttcctcactcttgtgatcgtggcgcattctgcaggaaaatagccaagtagaatccctccaagctcctgggcacaggctgctcccaggctctgcctcccagcagagcccgcgttagccatctacatactgaatcggatgtgcacttccaaatttgagatgtaggcatttctgcctcaacttgctagctgcgattttaaaaggtgtgttctagtatatggtaaatataggtcaagtacttacatgcttataaattccagtttaaagcaggcacgaaggcrtggatctataggagcgagtgatgggcacaggctgactcgagttttagaaaatttggttataaaaaatatcctcagtttttagttaaaagtaaagtgcatcttcagcaagatcatatgatgaaataaattaaatcagcagtgaaggtcagtatacattctgacttgggaatgtgaacttttcagaaacctgtatttattacattttactatttttaaaagcca

SEQ ID NO: 485122 - DNA, 600 bp, Homo sapiens
gtacgacataccaatgaatgctgaactgaagtgaaggctcttttcaaagtggttaatatgccttattggcaagtcatccctggtgcctgtgtcattgttatagctggctttaaaatatatggatttaaagcacaagtattgtgactaatatttatttcaagtacagaatgtgtcacagcagtagggcatcctattattaatgcagtaaactgtgtaatactctataagagcctgccctgcttcagttcttagctacatgaaaataacagtaaaacatgtctgttttctcctgccttgctttattgttacctgggaaggtcctggcatcgagaaaagccagatccgggcaaataatatgaccataaacaacacctcakcattactgtgctgtgcacaaatctccttgaactgcctccaaactttgagaatatatacatatgtatatagattaatatatatgtatatattttaaaattcttaaattgagggaagctgctataactctagaaagtaatgggaaataaatattctaagtcagccaggaagtgattcagattgttagtgcttggtgcattgtctgtatatgaaacactaatattc

SEQ ID NO: 485123 - DNA, 655 bp, Homo sapiens
ctgccctacccgacagttctgcctgagatgccagctcccacatgctgcctccaaaccccacccctggaagtccaattacctttattgcttcataagtaatttttactgttgatctgattgattctgtaatctgcattcaaataaaatccatacactgcagttgattaatatgtcccttaaatatcttttaatctctaaattgtcttctccccctgcacctctttgttttctttgtgatgtgtttgatgaggaagctgggtagtctgtcctagagttcagtgctgtctgggctttgctgatggcagcccmctggtgtcctctgacatgtgacattgtcccctgtatttcctgttgttgggtagttatatttagcatctgggtaagatggaagcctttttttatgcctatggaagtgagtatttagtctttctttttccctttgcacataaaaatatgtacttgcttcttcaacagactttcaagtaattgtccttatttcagatctcttttcacccccacctccaggggttgcaggagctgccagctcctgagctttggtgggaggctctggccacacatcagcctcctctgggctgttccacgctcctggctcacttcagcgcttttgggtctgctaagacgattgctgttgttc

SEQ ID NO: 485124 - DNA, 653 bp, Homo sapiens
caaatttaagatggaagacaagaggctgtttctcctcacttttaggggtcaggccttacctatattcagtgggaaaaagggcctcctccccttccttccccttctcacctctcttatgtctgcccagcaaggccagaggaagcctccaagccggggccagggggacactgggcatatccaacaagtttacaaactttttaaggcaggattttatttacgtattcctttttaaaagctgtattgaggcataaatgaaacaggaaaacaactgcacgtatttaatgtgtgcttggtaagtctggacagattcggacctccatgacaccatcaccagtctcggtaactgacacacccacagccccgggttccctggaamtttccttcctctttctcgctctctctttttttctggtggtaagaacacttcacatgagatcaaccctctccgtgtatgttgaagcacctgatacccgattttatcagcctctggtaggcccgcaagcagacttcattttctgaaatatgtttttgcaataatttgattaatattagtagagaatagaagactctgtagggtttatggagggaaataaatcttccagctcgcatcttccagctatttggttaccctgaggaggcagccccttagaatc

SEQ ID NO: 485125 - DNA, 653 bp, Homo sapiens
caaatttaagatggaagacaagaggctgtttctcctcacttttaggggtcaggccttacctatattcagtgggaaaaagggcctcctccccttccttccccttctcacctctcttatgtctgcccagcaaggccagaggaagcctccaagccggggccagggggacactgggcatatccaacaagtttacaaactttttaaggcaggattttatttacgtattcctttttaaaagctgtattgaggcataaatgaaacaggaaaacaactgcacgtatttaatgtgtgcttggtaagtctggacagattcggacctccatgacaccatcaccagtctcggtaactgacacacccacagccccgggttccctggaactttccttcctctttctcgctctctctttttttctrgtggtaagaacacttcacatgagatcaaccctctccgtgtatgttgaagcacctgatacccgattttatcagcctctggtaggcccgcaagcagacttcattttctgaaatatgtttttgcaataatttgattaatattagtagagaatagaagactctgtagggtttatggagggaaataaatcttccagctcgcatcttccagctatttggttaccctgaggaggcagccccttagaatc

SEQ ID NO: 485126 - DNA, 664 bp, Homo sapiens
tgtttgagtctttgcttgtcttaacttaaatcttgacttagttcacccttctttcttttagctccaccagcctcagtcaatgagkttggttggtgaacacaggctcacaaaatgagggtcccgcatgtggcaggtggtgggctaggagcccaatatcatttacggtgatgatgacagacatgttctctggcctcctgcagcttccagtgaactcattgtttgtgttcaatttccaggtacctagaagcaaagacatagttttcctcctgaaatctcatccatgcatacgttcattcattgaaccaacatttgctgctagatgtttggtattttcataaatattataaaacaacatgaagactacagttacaggttaaattctgcaaattgactaaacatagagtcatgggggctgtagtggggatcacacgagaggccaggacaccaggagctttcaagctctaggaaaggtttcctaagggagatgattgtcacatattttggttacaattcttttcattaaaatgagtctagattgaattcattgcaaaatcagctttaatatcaatatttcatgaaatgagcttcataccccaaatgacactcctctcacttccggggaggggtgctgcgagctgctgcaggctgggtagtgccacctcag

SEQ ID NO: 485127 - DNA, 601 bp, Homo sapiens
ttaaattttataaaatgaaaaggatttaatatgttttatactctgtttcaccttttaaaattattagtttggtgtccagtaaaaatacagcactgaaaaattcctttattctctacctaaggtacagcctgacatattcttcacatattttccataacaattttcctatgtgctgcaattcttatttctatgtaagtggacagaaaaggtacctgagatgcatgctttattatgttgtcwttacccttcaattcatttgagaatgtgcataatcatcatttaggataaaataagtttaaaggtttaaacactattacctacaatgtaaactggtaaatgtgttagtccattctcatgctgctaataaagactggataattgataaagaaaaagtttaattgactcacagttccacgtagctggggaggcctcacaatcataactgaaggcaaaaggaaaggcacatcttacatggtggtagacaagagattgagagccaatcaaaagaggaaactccttatcacaagttcacatcagatctcatgaaaccaattcactaccacaagaacagtatgggagaaactgcagccatgattcaaat

SEQ ID NO: 485128 - DNA, 601 bp, Homo sapiens
ttaaattttataaaatgaaaaggatttaatatgttttatactctgtttcaccttttaaaattattagtttggtgtccagtaaaaatacagcactgaaaaattcctttattctctacctaaggtacagcctgacatattcttcacatattttccataacaattttcctatgtgctgcaattcttatttctatgtaagtggacagaaaaggtacctgagatgcatgctttattatgttgtcattacccttcaattcatttgagaatgtgcataatcatcatttaggataaaataagtttaaaggtttaaacactattacctacaatgtaaactggtaaatgtgttagtccattctcatgctgctaataaagactggataattgataaagaaaaagtttaattgactcacagttccacgtagctggggaggcctcacaatcatractgaaggcaaaaggaaaggcacatcttacatggtggtagacaagagattgagagccaatcaaaagaggaaactccttatcacaagttcacatcagatctcatgaaaccaattcactaccacaagaacagtatgggagaaactgcagccatgattcaaat

SEQ ID NO: 485129 - DNA, 601 bp, Homo sapiens
ttaaattttataaaatgaaaaggatttaatatgttttatactctgtttcaccttttaaaattattagtttggtgtccagtaaaaatacagcactgaaaaattcctttattctctacctaaggtacagcctgacatattcttcacatattttccataacaattttcctatgtgctgcaattcttatttctatgtaagtggacagaaaaggtacctgagatgcatgctttattatgttgtcattacccttcaattcatttgagaatgtgcataatcatcatttaggataaaataagtttaaaggtttaaacactattacctacaatgtaaactggtaaatgtgttagtccattctcatgctgctaataaagactggataattgataaagaaaaagtttaattgactcacagttccacgtagctggggaggcctcacaatcataactgaaggcaaaaggaaaggcacatcttacatggtggtagacaagagattgagagccaatcaaaagaggaaactccttatcacaagttcacatcagatctcatgaaaccaattcactaccacaagaacagtrtgggagaaactgcagccatgattcaaat

SEQ ID NO: 485130 - DNA, 582 bp, Homo sapiens
actaacaaaactgctaactttggggaaggaaaatgctagagtcaccttaagcctcatgcttttatcagacagacacattaatctgggtctgtgtacaaaaattgcttcccacacactctctggagtctcagaggaccagggaaggaatctggcaggagacaagcaaaaggcgatacacagtccacaaagtggcacaggggttcttccggccctgaggcctgttgacatcacattcatcatccctacatgccagggctctggcgggctatggagaatcctctgcgagagggaggatgtttgcacgaataactttccttttgaacyctttcgacattaggaccttatgccaggctgcctcatttaccaaacacttaaaagatcaggactgaagccgtagaaggggcttcactgggaagatgtgtcagccacaccgtgcagctatgttgcagtgtagttgcatgagctgtcccagataccaagtatggaagttaaaaaaattaataaataaaaataaatgaacaaatcaaaaggagtaggtgtggtggggagggaggaagagcaagcacatggatcatgcacttt

SEQ ID NO: 485131 - DNA, 608 bp, Homo sapiens
cacttaacatcaggcatggcaacacagaacctcatgattaagagcatagacaggagacgggagacgagagtccacattgcaactactatttcctaatgaccttggacatccatgtctcagtctcctcatgtgaaaatggggataaaagcagtatatacctaggggattcacttctggcatgatggaatgaggtggttggccgggcttggtggctcacgcctataatcctagcactttgggaggccgaggtgtgcagactgcttgagcccaggagttcaagaccagcctgggcaacacaggaagatcctgtytttgcaaaaaaaaaaaaaaaaaaaaccccacaaaaaaattagaaaattagccaggcatggtgacgaatacctatagtcccagctactaaagaggctgaggtgggaggatcacccaagcctggaaaggaaggtcaaggctgcagcgacctgtgactgcaccactgcactccagcctgggcaacagagtgagaccctgtctcaaaaaaaaaaaaaaccatttatgaaaactatattttaaaaaaaggaatgaggaggccaataaatctccttccccaaaagtaactatgaagctggact

SEQ ID NO: 485132 - DNA, 608 bp, Homo sapiens
cacttaacatcaggcatggcaacacagaacctcatgattaagagcatagacaggagacgggagacgagagtccacattgcaactactatttcctaatgaccttggacatccatgtctcagtctcctcatgtgaaaatggggataaaagcagtatatacctaggggattcacttctggcatgatggaatgaggtggttggccgggcttggtggctcacgcctataatcctagcactttgggaggccgaggtgtgcagactgcttgagcccaggagttcaagaccagcctgggcaacacaggaagatcctgtttytgcaaaaaaaaaaaaaaaaaaaaccccacaaaaaaattagaaaattagccaggcatggtgacgaatacctatagtcccagctactaaagaggctgaggtgggaggatcacccaagcctggaaaggaaggtcaaggctgcagcgacctgtgactgcaccactgcactccagcctgggcaacagagtgagaccctgtctcaaaaaaaaaaaaaaccatttatgaaaactatattttaaaaaaaggaatgaggaggccaataaatctccttccccaaaagtaactatgaagctggact

SEQ ID NO: 485133 - DNA, 605 bp, Homo sapiens
ctgtgtgagttgcaaaggacccaggttcagggatctagcttaaatttgagaggcttatcttcactaacgtctcatggtgatgagcattactattcatcacattttgcagaaatctgttcaatcttccctctttaaggaaatctattttcattttagtacgatccatgctaccccagcttcccttcttggtcttgagcattgctgacttcaagtttttttctctttataaaatacagtattctaaaatttgtcctacttacagtggtgtgatttagaatcacttaattacaaaaaccttaatctttcttgttttctctcctctctcattgctatcatttgttgttatttcaaaacaattacacttgaatattttttcttttatattatgtcaccatttcttcataccctcatgtagttctcacaagcttttcrtagtaaggtttcaatttttgggtttgctctcagagttctagggaatgcttcatgccctctcctgaccttcctcaaggacaaaattggtcttctcattctctctcttgctgtagaatcctgcatgcaaaacttttcttttagtaaagaaattcagtgtaatggattagattcaa

SEQ ID NO: 485134 - DNA, 577 bp, Homo sapiens
aaaagagttgagtccttaatgcgtatttattggttatttatttagttttttagatgggggtcaggaggaaagtgttattttaattttctagttaagaaaactaacattgatttgctgaaggagacagcactacactagaatgtaggaaaaacttattctctagtacttttcacctggctctctgaattgtgcaaaacaagtgtgatgatgtgaccaaggggccatctatagaggtgagaagatggtgatggggcactctcatgtggtcttcacacagggacatagcttgggtgtctyccgcattttggaactaaagcctataactaagagagctctgctctgagactcccgttgagatacttcacagtgataatgcccccagagatggtggtgctctgttggcaaatgtggtcctggagaggcttggcagtcaaggggctgcaagaagaaaaaagatagcgagagattctcttcacttttttgtcacttccttgccccaccagatagttatctggtaacttgctcatcctgtgcctcctcccctaaaacaccagttcttaaaggaatcgggcttttc

SEQ ID NO: 485135 - DNA, 478 bp, Homo sapiens
ttcagttggcatttcatgaagagaggtggcctttcagtttgaactgatgaagatgcttcatcaaagggaactctgtatttcaccaaggagggccttctaatccagttaattaattgtgtttcctctaaggagtaagtgaagcctggatccaagagttctttctttctttctttattttttgagacagagtctcacctgtgtcacccaggatagagtgcagtgtcctgatcatggctcactgcagccttgatctattaggctcaaacaatcctcctgcctcagcctcccaagtggctgggaccacaggtatgcatcaccatgcttggctaattttttattttttgtagagatagggtcttgctatattgctcaggccggtctcaaactcctggcttcaagtgatccacctaacttggtcccgcaaagtgctggrattataggtgtgagccactgcacccagccccaagcattctttaca

SEQ ID NO: 485136 - DNA, 411 bp, Homo sapiens
aagtataagaaaatcttctatacaaattacacatacaagcacattttatttatcactagcaaatgaaaactttaaaaagtatctgtaaggtgtttttcaaagacctgaaaaattaggatattgttagaaatataagaggtagtaggagaaaaaaaaccacccgttctctctgggtcctgcttccctgctggctgctgtcacagaacaatcctyccctcgagtgccaaagttcttaaaaacatattctttctcaaggcctgcatttcctcctcccattacccactataatctggcatctgtccccacattctaacgacgccacttctgcagtgtcatcagtgacctcctacttgtcaaattcagtggacatttaaaaaatcctcacttatcctctgtggcattgagtcctgt

SEQ ID NO: 485137 - DNA, 585 bp, Homo sapiens
ggctgcttgatgaaaatatgtaaaggggaagtaaataatgttagtacttagagcagtattatcaaagggtgaacgatgtgtctcttttttcagtgcctgccattttttattagtgrctccttaacaatctggcaggatatatagccaagttacatgtttggctattgatgtccacaaggtagaaaggggatcctgggagagagtttgatttctaaaatctctcatgtaactaaggctgcagataaaaataggataggaataagaataaccttatgccagattctcattctttaaactgtgtcagactttggaaacatattgctcccattattaagaaaaaatagaggcaaaaagacattattgtgagtttcaaaggtaggaactaggaaagatatttaaccacaagactgacataaaacaagtctgcatttgattcttggctgaggggagtgaggaacaggcagactcatggagatactgaaatcaaagactgaaaagtaatcactctttccactgttaaagggtaaaatgtctgaataattaacactggtacagaaaagcttgcagggagatttgaggcttgtt

SEQ ID NO: 485138 - DNA, 609 bp, Homo sapiens
aaaataattgaagttcacttttactgagctgttcagttccattctgatttttattacaatgtcaacaagagtttaatttgttttaaagtttgggttcttaaatctgagtgatatacggtagtttacagcccgctggcagcagctactgtggaaaagggaaagtacataacagggatcctccgcctgacgcggcgactgcggctgcggggagcccggccagagcgacggcccccagcttcccgcgggacggtggccacgtgacggacgtgtttccctccacagccagctcctccgaaagctcccaaaacctaacttctcacgtaaaagcactgcggatgcgaatgcgctcactaacgtttactatttcagagggcgagggagaaggtttttctttactgactcgtgaggcttcttgcaacacatcacgggtgggggtgcagaascccggtgtcctttctagggctccgggggacgtgcgtcaggaacccacacatttgtcccctggcccagggctcgtctgtgcgcctgctgagacactgccagggaggacatctgggcccatcggtgccagctgaacagacactgggctgaactgcaaacccatccact

SEQ ID NO: 485139 - DNA, 609 bp, Homo sapiens
aaaataattgaagttcacttttactgagctgttcagttccattctgatttttattacaatgtcaacaagagtttaatttgttttaaagtttgggttcttaaatctgagtgatatacggtagtttacagcccgctggcagcagctactgtggaaaagggaaagtacataacagggatcctccgcctgacgcggcgactgcggctgcggggagcccggccagagcgacggcccccagcttcccgcgggacggtggccacgtgacggacgtgtttccctccacagccagctcctccgaaagctcccaaaacctaacttctcacgtaaaagcactgcggatgcgaatgcgctcactaacgtttactatttcagagggcgagggagaaggtttttctttactgactcgtgaggcttcttgcaacacatcacgggtgggggtgcagaacccyggtgtcctttctagggctccgggggacgtgcgtcaggaacccacacatttgtcccctggcccagggctcgtctgtgcgcctgctgagacactgccagggaggacatctgggcccatcggtgccagctgaacagacactgggctgaactgcaaacccatccact

SEQ ID NO: 485140 - DNA, 664 bp, Homo sapiens
aggtcagacagtaggagtttgtctagacgctctattttggactcggcgctgacccgaggtgtttctgtagcaacctttacaacactgctattctggcaatattggagaaaacatgatccctcccatcatcaggtagggcccgctctgaaaatcctcgccccatcgctgggtttgctgaggcgcctccaactccatttaggacgaggaagcccgacggggaggcccctgggagggaccggctgcttgggcggaggccaggcctcgggaagcttgtccaaggctcacagggaaaagcgccaagaaatggaagtggctcatttttcctctgggcctgaggggaaggttttgattttacagccgcccctagtcatttctcacaggtttgaagcagacctttccagggacgggggagggagaagggagatggggaaggatggggagacgccgtgaggaggcagccacctccggggatccccggaagcctggacgtgctctgcccggtggttctgtccccagggaacacgtggtcatgtctggaggcatctgtggctgtcacagtcatggtatggggtgctcctggcatagaggggtggggctgcttccttttgcctgtccctgctgccctccccrccctccatgtctccctgccacctgccctgccctc

SEQ ID NO: 485141 - DNA, 664 bp, Homo sapiens
aggtcagacagtaggagtttgtctagacgctctattttggactcggcgctgacccgaggtgtttctgtagcaacctttacaacactgctattctggcaatattggagaaaacatgatccctcccatcatcaggtagggcccgctctgaaaatcctcgccccatcgctgggtttgctgaggcgcctccaactccatttaggacgaggaagcccgacggggaggcccctgggagggaccggctgcttgggcggaggccaggcctcgggaagcttgtccaaggctcacagggaaaagcgccaagaaatggaagtggctcatttttcctctgggcctgaggggaaggttttgattttacagccgcccctagtcatttctcacaggtttgaagcagacctttccagggacgggggagggagaagggagatggggaaggatggggagacgccgtgaggaggcagccacctccggggatccccggaagcctggacgtgctctgcccggtggttctgtccccagggaacacgtggtcatgtctggaggcatctgtggctgtcacagtcatggtatggggtgctcctggcatagaggggtggggctgcttccttttgcctgtccctgctgccctccccgccctscatgtctccctgccacctgccctgccctc

SEQ ID NO: 485142 - DNA, 483 bp, Homo sapiens
cccaccttgtttgcccgccctcctcagggaccacggtctctcggtgcctggtgtctgatgcctaacacakgtttcagatattttgtccattttttaacttgttttcatggaagagtaaatctggtccctgttagtccttcttggctgaaagcgtaagttctgatgctgatgtctcagagcttccttggccaaatttgagtcagtgcagtagtcaatcttccattgtccctgcattttacaccatacaacaataatgctattcaaataaaaactgcgtgtctagccaagagagaggcttgtgatcaccagctctgcctcggggcctcctgtaactttaatcggaagggaaagcatcagaggttgaaaaacagctttggctgccaaatgtgcctttacctggaggaaaaacaaaagaatcctggggaagacagaggaggttttcacagtttttaaaacagcaatagggaaacaaaaatgtatcca

SEQ ID NO: 485143 - DNA, 483 bp, Homo sapiens
cccaccttgtttgcccgccctcctcagggaccacggtctctcggtgcctggtgtctgatgcctaacacatgtttcagatattytgtccattttttaacttgttttcatggaagagtaaatctggtccctgttagtccttcttggctgaaagcgtaagttctgatgctgatgtctcagagcttccttggccaaatttgagtcagtgcagtagtcaatcttccattgtccctgcattttacaccatacaacaataatgctattcaaataaaaactgcgtgtctagccaagagagaggcttgtgatcaccagctctgcctcggggcctcctgtaactttaatcggaagggaaagcatcagaggttgaaaaacagctttggctgccaaatgtgcctttacctggaggaaaaacaaaagaatcctggggaagacagaggaggttttcacagtttttaaaacagcaatagggaaacaaaaatgtatcca

SEQ ID NO: 485144 - DNA, 483 bp, Homo sapiens
cccaccttgtttgcccgccctcctcagggaccacggtctctcggtgcctggtgtctgatgcctaacacatgtttcagatattttgtccattttttaacttgttttcatggaagagtaaatctggtccctgttagtccttcttggctgaaagcgtaagttctgatgctgatgtctcagagcttccttggccaaatttgagtcagtgcagtagtcaatcttccattgtccctgcattttacaccatacaacaataatgctattcaaataaaaactgcgtgtctagccaagagagaggcttgtgatcaccagctctgcctcrgggcctcctgtaactttaatcggaagggaaagcatcagaggttgaaaaacagctttggctgccaaatgtgcctttacctggaggaaaaacaaaagaatcctggggaagacagaggaggttttcacagtttttaaaacagcaatagggaaacaaaaatgtatcca

SEQ ID NO: 485145 - DNA, 601 bp, Homo sapiens
ggtgactgcggcaactttctgctgccacccacaggaacaagcatctctcctcccatccccagcccttctgccttcacctgtagaaggaggcgctgcaggtgtgtgctccttctcagtttgcaaactgagcaaatgataagacttctaggatacaatgtcatctgggtccaagcagaaccgctggttgaagctttggggaaaagacattccatctctagttgaggctctgctgcaccccttggacctgggttgaaaccttcacagccccctgaacctcggggtgatagcgaggtgacatggtggggctttcatgtagctccatgatattataagccattaaatactaaacttaacaccactgccctttctttggtctcttgtcctaattttcttctgagagtaagctgacaattactttcattctatagcctgatataaagacatattggccagacacagtggctcatgcttgtaatcccagcactttgggaggccaaggcgggagaatcacttgaacccaggagttcgagactagcctgggtaatatagtgagactgtgtctctactraaaattagaaaaaaaaatttagccaggtgtgat

SEQ ID NO: 485146 - DNA, 590 bp, Homo sapiens
tgaaagtttccctcctggatggtccctgacttccctcctcccccaggactccacaatgcctgctccaatcttaccctccctgctcagcagccccaccctctgacacacagccactggataccactgtggggactgctgagtggctgcatgaaatctgggctcagattcacctttgggtatgggccctgcagggctgaccacacccttagatcctggatgtcaggttacaccacctcctcccatctcaggtgtcttcacctgaaacctcctgggctgcttcaggaggcggagaggtgtcttctgccatctcagctccccacttcacgaagggaaccccaagcttcagaaccctcactcgattgtcctctggtggtatttgctctttttcataggtgaggttctagtcctccatcctctaggggctgaatgaaggtagtctcgggtggtgccctggagagacaggattyctgtaagccgagatgaagagagcattctaggctgagggaccagccagagcgaaaggaggccagtgtggctgggagcagagagaggaacccaatcatttttcactgtgttggggcctgggcccc

SEQ ID NO: 485147 - DNA, 632 bp, Homo sapiens
tgaaagtttccctcctggatggtccctgacttccctcctcccccaggactccacaatgcctgctccaatcttaccctccctgctcagcagccccaccctctgacacacagccactggataccactgtggggactgctgagtggctgcatgaaatctgggctcagattcacctttgggtatgggccctgcagggctgaccacacccttagatcctggatgtcaggttacaccacctcctcccatctcaggtgtcttcacctgaaacctcctgggctgcttcaggaggcggagaggtgtcttctgccatctcagctccccacttcacgaagggaaccccaagcttcagaaccctcactcgattgtcctctggtggtatttgctctttttcataggtgaggttctagtcctccatcctctaggggctgaatgaaggtagtctcgggtggtgccctggagagacaggatttctgtaarccgagatgaagagagcattctaggctgagggaccagccagagcgaaaggaggccagtgtggctgggagcagagagaggaacccaatcatttttcactgtgttggggcctgggcccccacaggcctcactggaggttagcatgttccggggctcagcag

SEQ ID NO: 485148 - DNA, 602 bp, Homo sapiens
ggaggaccgatggtccgggaagagtttccagtatgtgccaggttgaycctcttgcccctggcctgagagctgggggagccctgggctgcccacccgcctccaccgcttggccgccagcttggctcccgtaactgggcgggcgcatagctggggctcagcggtgcgcgtcctgataaggagactgcgccttccagggctctgggaagagggccggggcaccgggcagacagatgcgcgcacacacatagcgcaggcacaccgctagcgagcaaagtacactggaacaccggcactgagggactcccacctggcagcagtcacctccgcaccttcaccgaccactgcagggagccccggtgacagaagaccccttcctgggcagtgtggacccctgctgttcagagcccactctccatcaacttgagttgtggccttggggctagtttcctctttgggcttcttttcctatatctaaagtaaagggttggagggaatctgcacaatctgagggctgatgtgcagattccaggccacacaggcctccgtcccctcccccactctgccccaggcttgtctcggaaactggggtcctcaggagggga

SEQ ID NO: 485149 - DNA, 599 bp, Homo sapiens
ttcacccctaacagacaggcctctgtgagggtcacagtcttagggcgcgggaacaagttactttcattccaccttgtcaatgaaagggatgggcttcttcccagtgcgcctgccctggctgagggtrtgtctggtggtcttggccaggacactcacccttgggtctccctggcagtgagaccctgtacaagatcctctgcagcctcaatgtttgtggtcttgaggccccatgaggtctagccagcccctctggaccgtaattggtcgctctgaaaatgggattcagccacaattgaccccatttttgggaaggagtagctgattggctacgtactccctcataatgaagctcatggctctcagggtcaccaccagcatttctgaccctgtccacaatcagcacccattcccaggccccgagctgtccttaaggaagccagggaggttggtggacgttgcctttgcttagactgcccgctgcgctccctggcctgaggcctggctttgtttctgggcttgggtgctcttactgggttcttcccttaatcttcagccccaaaatcttctccctagagtcccccacctggagtccagcattc

SEQ ID NO: 485150 - DNA, 563 bp, Homo sapiens
gttttcttcaggacaagcaagacagcaagagggagcaagcaacgtggaaggcacccagtcctttgtaaccggatcttggaagtgacaacccttcatttttgctcacttctgttcctcggaagtgagtcactaggtctagccacattcaaagggagaggattacacagggcatgaataccaggaagtgggggctttcttagaggctaactaccatgtgatgtatgtgacctttttttttttttttttttgagacaggatctagastgcgatggtgtgattacagctcactatagcctcgactaccggggctcaagcgatcctcctacctcagtctcccaagtagctaggaccacagatgcatgccaccacagccggctaatttttttaatcattattttttgtagagaccaggtctccctatgctgcccaggctggtctcgaactcctggactcaagcaatcctcctacctcagcctcccagagtgctgggatgacaggcatgagccaccatgtctggcctatgaccttaagttaaatgaagacaacaggatgcaaaactgcta

SEQ ID NO: 485151 - DNA, 679 bp, Homo sapiens
ctggttttcttcaggacaagcaagacagcaagagggagcaagcaacgtggaaggcacccagtcctttgtaaccggatcttggaagtgacaacccttcatttttgctcacttctgttcctcggaagtgagtcactaggtctagccacattcaaagggagaggattacacagggcatgaataccaggaagtgggggctttcttagaggctaactaccatgtgatgtatgtgacctttttttttttttttttttgagacaggatctagagtgygatggtgtgattacagctcactatagcctcgactaccggggctcaagcgatcctcctacctcagtctcccaagtagctaggaccacagatgcatgccaccacagccggctaatttttttaatcattattttttgtagagaccaggtctccctatgctgcccaggctggtctcgaactcctggactcaagcaatcctcctacctcagcctcccagagtgctgggatgacaggcatgagccaccatgtctggcctatgaccttaagttaaatgaagacaacaggatgcaaaactgctaacacagggtgatcacacctgacttaacaatacaataggaaaaaagatgggaagaaatttgttagaaacacctgtgtggagtgggggagcagcggcagggaaagtatcaggaaa

SEQ ID NO: 485152 - DNA, 618 bp, Homo sapiens
ggcatcttcagcagccagccatggggttccccacaagtggaaatggggggagaaaaatgcaaggcacgatcctgaaaatttctaggagatgagctcaggccaaagagccctggtgggaggtgctggctgggccagttccagacctgtcaccatcattatcatcgcttgttcccagcaccagcctccagccctccaaggcccatatccaaatctctgtccctccccacacctcygccctgcagaggtcccaggcagcaaggccactgccatgtgagatctttcagtttggaattgatgttttactgccaatgccagtgtctgcaccaagacaggaattcgtgtgcacgtgtgtgtgtgtgtgtgtacacatgcgtgttatacacgtaagtccatactctgtggataggatgtcaattcattccagatttactggaacaaactcaattccacatagttggacaccacaaaccatgaaaatgtccagaaaattccaatatgattatttctttgtgcagtactccttcagttttgttccaaaaaaaagaaggatttgagaaccagcttgcagaagtgtatgcatacctcagacaggtcttagaataatagacaaaaggagca

SEQ ID NO: 485153 - DNA, 618 bp, Homo sapiens
ggcatcttcagcagccagccatggggttccccacaagtggaaatggggggagaaaaatgcaaggcacgatcctgaaaatttctaggagatgagctcaggccaaagagccctggtgggaggtgctggctgggccagttccagacctgtcaccatcattatcatcgcttgttcccagcaccagcctccagccctccaaggcccatatccaaatctctgtccctccccacacctctgccctgcagrggtcccaggcagcaaggccactgccatgtgagatctttcagtttggaattgatgttttactgccaatgccagtgtctgcaccaagacaggaattcgtgtgcacgtgtgtgtgtgtgtgtgtacacatgcgtgttatacacgtaagtccatactctgtggataggatgtcaattcattccagatttactggaacaaactcaattccacatagttggacaccacaaaccatgaaaatgtccagaaaattccaatatgattatttctttgtgcagtactccttcagttttgttccaaaaaaaagaaggatttgagaaccagcttgcagaagtgtatgcatacctcagacaggtcttagaataatagacaaaaggagca

SEQ ID NO: 485154 - DNA, 645 bp, Homo sapiens
tgaaaagtccttctcgttttctctaataggaacctgccccctcctctgcctggctccggaagcctcccctagaggaactggggttaccaacagaggcttaactctcacccatttactagcctgggggccttaggtaaatctgtccrataatcagtgtccttatctgctcctctataaaatggggataatattagcaattgacagagctgtgtcgggggtgaaataagacatgagctatcttaataaggggaagtgtaagtaaagagatgatcattgtggtggcctacactggtctcattgcttcacacaggatggctcttctttatccccaatattctaaagtattgagagaggagaggaagggtgagaggggatgctacttcctgttattcatctgtaccttcctcccctctcattcctccccatctgtccctgctcattaagcctagtaaaatggtgtgcagtctatcagttcttgcaataacctaaagtgattaggcgtaggggcaggggaggggactcagtgactcctccaggtcctctctagccagagaattctggagataaaattccctgaaagagttctcctgaagcttcttgcttcagccagtgggcagggacttttacatcactgtcccacttaac

SEQ ID NO: 485155 - DNA, 517 bp, Homo sapiens
tcctgctgtgcggcctggttcctaacagcagttgggacccctgctgtaaggggcttctgcccctggcctgggccctgtgctactgtcctcctcaccctcacctccttcagaaatccctcctcatggaccccccacttgactgaggacctccttggcacccatatgcctaaatgtgtaatatcttagtaacatgtatttgttgctttgtggctttgtaaatatcactctgctgtcttaagtgctgtgaggtcctcagatacagactatcttttacacccaaactgcaataaaatgcttttgttttagttttattattactggtcaattctgtaacataaggttgttgagggctttcttgggaaagaatttattttacctgaaaccagaccaaaaatgcttctctccccattttcyttaagctccatgaaggcagggaattagtcagccttgttcaaggctgtgtccctgttacctaggaggatgtctcaccacacagagtccccaggcgggttggcag

SEQ ID NO: 485156 - DNA, 533 bp, Homo sapiens
gacatacatgtgtaattacatattagagtattcaggagaaagtgatgaaataaattctaaattactaccaaatcagcaggcaggctaatcttagaatttcatggtggccaaagcagtactgtttgatgtaaatgcctcctaatccctaattcaatatgactgctgtctttattaaaaaggagggtttggacccagagacagacagacagacagacagacagacagacagacasacacacacacacacacacacacgacacacacacaaggagaaagccatgtgaagatgagggcagagattgggcaatgtttctacaagccaaggagctcgaaagattgcctgcaaaccacaagcaggggagcagcatggaacagatcctcacagagctcacagggaggccatccagccaataccctgatctcagacttcagcctccagaactgtgaaacaacacatttctgtggtttaagccacagacctctccctcctcatggcgccccttccctgaggggatgtaccctttgcctttcac

SEQ ID NO: 485157 - DNA, 533 bp, Homo sapiens
gacatacatgtgtaattacatattagagtattcaggagaaagtgatgaaataaattctaaattactaccaaatcagcaggcaggctaatcttagaatttcatggtggccaaagcagtactgtttgatgtaaatgcctcctaatccctaattcaatatgactgctgtctttattaaaaaggagggtttggacccagagacagacagacagacagacagacagacagacagacagacacacacacacacacacacacgacacacacacaaggagaaagccatgtgaagatgagggcagagattgggcaatgtttctacaagccaaggarctcgaaagattgcctgcaaaccacaagcaggggagcagcatggaacagatcctcacagagctcacagggaggccatccagccaataccctgatctcagacttcagcctccagaactgtgaaacaacacatttctgtggtttaagccacagacctctccctcctcatggcgccccttccctgaggggatgtaccctttgcctttcac

SEQ ID NO: 485158 - DNA, 526 bp, Homo sapiens
ttacatttcaaattatttatcagtctaaaagagactatttgtttatatagagagtatttggaggtgtgagaaatgtaactgaggccagcatgctgtaagaaggtggtttgatctgtgcttcatggaaactcagtgcttcccccagagctgagatggacaaggagtgggtgaggctatgaattcccaccttacttcagtcacagtccttctttcttagatgtttcatatatgttgcagttatgcatgcaggattccatttaaatctaagctgtcactgcacaggttgaaaaccactactccattctagctctatgatcttgaaaacaaaaatcccttcctttttttagtgctcagttccctttacctgtaaaatgaakgtgttgaactaggagtttttgaagcttccttccatctttgacagttcatgattttgtgacttttaccattggccaaggtggaacttattaatttcatgaaaactgactaaatgactgtctcagaagttattaattcagcacagcttcct

SEQ ID NO: 485159 - DNA, 646 bp, Homo sapiens
gaaaaggggacacagaagagagacctctgctccctcagccaagattcatgtcaccaagaagcagctggttctggggctcctggaaagggctgtgtattgtggctggcatgccaaaggctttggtccctgcttaatatttcaaatgagttgtgtaggtggagtgctcatgagatctcagcatggccaaggcctgtcggagaccttcttttaaacagttaaatctcagggrggttgctacagtatctcaaaaacaattacacagctttcctcccccgagagaatttttctgactctctggctctggtctgagacaggaaactaaaattgtttgtcagatttattcttctggagctaccccaaatgttccattataactttagttcacccataatgaagggagagctgacacagggaaagtggcattaagggtacaaggaacttggcttctctaattctgcagggttaatattgacagctggagagtggtctgctttggaaagacgcacatgtttaagtcaagcaggggaagtactttattagctgaggttttttaggttgacataagctttctcatgtttttgaaaggggcaggaagcctaattttgcatctgtatagattgctacatttttgatgcttgttattatt

SEQ ID NO: 485160 - DNA, 646 bp, Homo sapiens
gaaaaggggacacagaagagagacctctgctccctcagccaagattcatgtcaccaagaagcagctggttctggggctcctggaaagggctgtgtattgtggctggcatgccaaaggctttggtccctgcttaatatttcaaatgagttgtgtaggtggagtgctcatgagatctcagcatggccaaggcctgtcggagaccttcttttaaacagttaaatctcaggggggttgctacagtatctcaaaaacaattacacagctttcctmccccgagagaatttttctgactctctggctctggtctgagacaggaaactaaaattgtttgtcagatttattcttctggagctaccccaaatgttccattataactttagttcacccataatgaagggagagctgacacagggaaagtggcattaagggtacaaggaacttggcttctctaattctgcagggttaatattgacagctggagagtggtctgctttggaaagacgcacatgtttaagtcaagcaggggaagtactttattagctgaggttttttaggttgacataagctttctcatgtttttgaaaggggcaggaagcctaattttgcatctgtatagattgctacatttttgatgcttgttattatt

SEQ ID NO: 485161 - DNA, 646 bp, Homo sapiens
gaaaaggggacacagaagagagacctctgctccctcagccaagattcatgtcaccaagaagcagctggttctggggctcctggaaagggctgtgtattgtggctggcatgccaaaggctttggtccctgcttaatatttcaaatgagttgtgtaggtggagtgctcatgagatctcagcatggccaaggcctgtcggagaccttcttttaaacagttaaatctcaggggggttgctacagtatctcaaaaacaattacacagctttcctcccccgagagaatttttctgactctctggctctggtctgagacaggaaactaaaattgtttgtcagatttatycttctggagctaccccaaatgttccattataactttagttcacccataatgaagggagagctgacacagggaaagtggcattaagggtacaaggaacttggcttctctaattctgcagggttaatattgacagctggagagtggtctgctttggaaagacgcacatgtttaagtcaagcaggggaagtactttattagctgaggttttttaggttgacataagctttctcatgtttttgaaaggggcaggaagcctaattttgcatctgtatagattgctacatttttgatgcttgttattatt

SEQ ID NO: 485162 - DNA, 522 bp, Homo sapiens
tgaaaccacgtgaaattgtgataatttgcttgatatcaaaaaagaatatatgaaaataaatatctaattgataggatttctggcaggaactgaagtgaaaaatttgggcttagttggrggaaaatatttgggagtggggagggggctttcattcagactttcaaatctgggtaaggcctgctctattcaaaacattaggactctctgaaacagcttcttccagcttacaaggctcaaaagggactggttttgttttataaactcccagtccaaatctcaggaagagactgagcagcatttggttcctgtgtgattctcagcctctatttttactctttttccttccctctggtccagggaggagaagccatatgttggtagtagtagattcttgtgatgtctcccatcctctcagcctattggattcagcacaccttggtgaacccctccatgaactagacaacatcacacaagtgcagagaggggtggctctctactgtctccaaaaccaccaaaggctac

SEQ ID NO: 485163 - DNA, 617 bp, Homo sapiens
tggtgattctggttagccagtcatgtaatagaaacctggaggacagcgttcacagtgtcacccacaaagttggtgccttaattaagtggcagtccttggctagatatttccaggtaattkggcatttggtagaaacagtggcttatttagacatgtgtccattattgcatatactttactataaaacgattctttttgtctgaggcaataatatgtgaaatttcatgtcaatatatcagttactctctaagcccttggatagtggtaactgcagaaacatttggggctgggaaataaattcgtatctggagtgaggcatcaattccaacaaggaacactgttgcccaggtcaggatgaaagaggtccaatataatcaatttgtccctaatggtaacttattctccttcagggcccagtgctaatgaaacattacacatagcagtcattggatcagcctcagtgaggggaagcacatactcttgacttcatctttaccaacattgccacttccttcatgagtccattgtacaaacaatgctatagctagacacagaggctggttagcatacgctagaaaagccatttgttcaccaggtggtggaattgtccttctgct

SEQ ID NO: 485164 - DNA, 300 bp, Homo sapiens
agcttcattgtgcagcctcatacataatcacataatccattggcagagacacagaaatggaattgaaataggattttgtagggttaagctggtttcttgaacatgctggaaattatagctaagtttttcaaaactatttgagactaacaattgtatgtggttgaaagaatttttttatccatgtacaatgcagataccttagtagcccagtgaaagagatgkttatgtcctctttatttagaatgatgaatttgtttattttctccagatccataatggaattcgatgttatctgtataa

SEQ ID NO: 485165 - DNA, 629 bp, Homo sapiens
cattcccattaccatattttcaaatattttaagtcccatgttttctatatgaatttgaacactctaactcttattgtttcagcatgttaaaatgctttatttaaagaaatttttttctaaagccccatgaacttaaacctttcttcaaaatttcaaaaacaataatttcagatttctctgtaggcttcataaagccaatatgcattcgttaacatggtgccattatgggagtttccaaggttcccattacyatgcagtgctctaaagtgcatttttagacaagtttgatttgtgaataagtcattattattactatgtgtaacatcagaaaaaattaaagtgaatttttaactttttagaggttacacatagaattattactcagtgaattatttagagaacattttgtgtgttgcagcactttaccaaaaagtgtaacctattaacccattcagaagaaatattaggattcgtttggatttgccaaaacagtgggcgacctcacatttcttttttatccacctccctcctgctcatttaaaaaatatataatatgaatttgtcatctttcttggtatgtatctatgtgtaacgtgtatgtgtatgagggggcacttgtggtgaagcca

SEQ ID NO: 485166 - DNA, 629 bp, Homo sapiens
cattcccattaccatattttcaaatattttaagtcccatgttttctatatgaatttgaacactctaactcttattgtttcagcatgttaaaatgctttatttaaagaaatttttttctaaagccccatgaacttaaacctttcttcaaaatttcaaaaacaataatttcagatttctctgtaggcttcataaagccaatatgcattcgttaacatggtgccattatgggagtttccaaggttcccattactatgcagtgctctaaagtgcatttttagacaagtttgatttgtgaataagtcaktattattactatgtgtaacatcagaaaaaattaaagtgaatttttaactttttagaggttacacatagaattattactcagtgaattatttagagaacattttgtgtgttgcagcactttaccaaaaagtgtaacctattaacccattcagaagaaatattaggattcgtttggatttgccaaaacagtgggcgacctcacatttcttttttatccacctccctcctgctcatttaaaaaatatataatatgaatttgtcatctttcttggtatgtatctatgtgtaacgtgtatgtgtatgagggggcacttgtggtgaagcca

SEQ ID NO: 485167 - DNA, 629 bp, Homo sapiens
cattcccattaccatattttcaaatattttaagtcccatgttttctatatgaatttgaacactctaactcttattgtttcagcatgttaaaatgctttatttaaagaaatttttttctaaagccccatgaacttaaacctttcttcaaaatttcaaaaacaataatttcagatttctctgtaggcttcataaagccaatatgcattcgttaacatggtgccattatgggagtttccaaggttcccattactatgcagtgctctaaagtgcatttttagacaagtttgatttgtgaataagtcattattattactatgtgtaacatcagaaamaattaaagtgaatttttaactttttagaggttacacatagaattattactcagtgaattatttagagaacattttgtgtgttgcagcactttaccaaaaagtgtaacctattaacccattcagaagaaatattaggattcgtttggatttgccaaaacagtgggcgacctcacatttcttttttatccacctccctcctgctcatttaaaaaatatataatatgaatttgtcatctttcttggtatgtatctatgtgtaacgtgtatgtgtatgagggggcacttgtggtgaagcca

SEQ ID NO: 485168 - DNA, 626 bp, Homo sapiens
taggagtcctcattctccccattccttccatgagcatgaagcaccagaatggcatacatagaatcagtacaaatgttaattactaagtcatttcccaattgcagggctattaatatgagctattaataattgcagggctattagcaagagctattcattctgccttttgagctgaggtagaagttggtgaggcctgagacttaattaccttgtgttgactgacaacrgcatacccagcttttctgtgtccctggcgcacaaagctacttctatctataaaacattctacttcaggattatctagaggctcatcatttaaatccagccagctggaataaacttggtgcattacttgtatacgagaatgatacagggtgccagtgggttcaggcagataggtagctggatttaaagtctggcgtatcttaagggttgcatgaggaatgtttagcaacaaagcctgatatttcaataagtacctcctgtcatctactggtgtcctttagcttctaggactccttgtacttgatgtggggttaaaacttccagatgttgtcctaaagccattttattgacttcatctcctaaaagagcagttgctgcaactgccctgaggcattcaggtc

SEQ ID NO: 485169 - DNA, 561 bp, Homo sapiens
acccggaacatgccaaaagggtgtaacacatactcctgctcactgagttacaggagtgaaaaaaaccactgggtgccgcatgcccctatttagcaggtacaaatgagctgtaacacaacacacccccatcctccaagctgcaggcagcagggagagctgtaacatgcctccatcctccgagctgcaggctcaaagaagtgaagcagttaggcactattccctcctggccagcttgctgaactacaaaagctgcaacatttcttgggagcttagacctcaggattccccaggcgagagctgtaacatcacctggggctccacagttgctggcatctctgagttttcaggtgccactgcattcccctcatctagactccggctcccaatgcaaaagctgcctgtggcatgccaagtttagccacaggcaaaacacagagtccctgttcagatgtgggatccaagcaggtagcacaagctgagtacagcycatcaggctgagtgggaagagtgagcccagcaggccttggcaagactacaggcagaggtcacagcagccacaga

SEQ ID NO: 485170 - DNA, 553 bp, Homo sapiens
gatatccttaaggatgcaggattggaaggcaggagacacttgcaaatcagttaacctatccggcttaagatttctctgctccagaatgaataaactctattttttgtatctctaagtcctcttccaacattaaatgttattgctctgcctgtttcctgaattttatacatttgacacaaaccattaaacttttaatacacccttttcaacttgcctctttgtttgctgaattatatgcataactctgttacatatataactctgaattgtagtccccagcaacccctaccccacctcaatgaatgaggctttggtctgcaatggccactgagtccccctttttttcataacacattttctaccagaaaagctcctcgggtttgggggatttggcccctatcacatatagttcctggcttcggggcctaaggctaggccactgacatcaaaaatactgttgggaggccatggtctctccagagaggctgccyctgtttggtctctggtgagaccttgagcaaatgaatgctgctcagactactgggagatacaa

SEQ ID NO: 485171 - DNA, 571 bp, Homo sapiens
cagagtctgtcagtgtgaagcttgtcccaggccagaggcacaaggtcagagagaggccagggcttggagtatgagctctgtcrtataacctgaaacttgagacggtggttcagaaagatactcagacaaagaaaaaacaagagaggtttagagactagaaaaacgagagagagagagagagagagagagagagagagagagagagagacactttggaagttccaataggctgtcacaaaaaagcaaatgtttctatcatccatgtaggtcaaaataacatgcatttattgtatttgtgagcgaaataggaccttactaattgttgctaagcataaagatttttgttactaatatatgagtgtcaagaaaaaggccaggatacaagattttcataattaagaaaagaaccagaacatatattgtatatttgcataggactttacagtttgcaaatcaccttcacacaaattctgctctgatccacacaactatccccatgacattaaaagaaactgaggcttgcgagtatgatttacttgtccaagatgcccaaactgctatacatctgcta

SEQ ID NO: 485172 - DNA, 509 bp, Homo sapiens
ttcacgcagaactgtgtaaagttgtccttgggaagacaaacacagcagccagttcctgccaccaagcagcacacagtctgggtgggaacagagacttcacgtccccamcacgaatggctgtgttttagagttcattacctgaaaagaaacagggtgggaggcatgtggggaataaagtgagcaggctggaggaggtcttcttcaagaaaacagagactggcccagctctcttctggctccaaaatgctgtgtttattgggttgtctggatcagaggcaaattcttggatttctgacaatgttgctatgatgtaatgagggctagaatcttcttgaatcaggaaagtttcagggaggttctattagtctgttctcacacggctataaggacatactgagactgggtgatttataaaggaaagaggtttaattgactcgtagttctgcatggctggggaggcctcaggacatttacaatcatggtgaaaggtgaaggggaagcaaggcacc

SEQ ID NO: 485173 - DNA, 578 bp, Homo sapiens
ttcacgcagaactgtgtaaagttgtccttgggaagacaaacacagcagccagttcctgccaccaagcagcacacagtctgggtgggaacagagacttcacgtccccaacacgaatggctgtgttttagagttcattacctgaaaagaaacagggtgggaggcatgtggggaataaagtgagcaggctggaggaggtcttcttcaagaaaacagagactggcccagctctcttctggctccaaaatgctgtgtttattgggttgtctggatcagaggcaaattcttggatttctgacaaygttgctatgatgtaatgagggctagaatcttcttgaatcaggaaagtttcagggaggttctattagtctgttctcacacggctataaggacatactgagactgggtgatttataaaggaaagaggtttaattgactcgtagttctgcatggctggggaggcctcaggacatttacaatcatggtgaaaggtgaaggggaagcaaggcaccctcttcacaaggtggcaggaaggagaatgaaagcaggaggaactaccaaacaattataaaaccatcaga

SEQ ID NO: 485174 - DNA, 578 bp, Homo sapiens
ttcacgcagaactgtgtaaagttgtccttgggaagacaaacacagcagccagttcctgccaccaagcagcacacagtctgggtgggaacagagacttcacgtccccaacacgaatggctgtgttttagagttcattacctgaaaagaaacagggtgggaggcatgtggggaataaagtgagcaggctggaggaggtcttcttcaagaaaacagagactggcccagctctcttctggctccaaaatgctgtgtttattgggttgtctggatcagaggcaaattcttggatttctgacaatgttgctatgatgtaatgagggctagaatcttcttgaatcaggaaagtttcagggaggttctattagtctgttctcacacggctataaggacatactgagactgggtgatttataaaggaaagaggtttaattgactcgtagttctgcatggctggggaggcctcaggacatttacaatcatggtgaaaggtgaaggggaagcaaggcaccctcttcacaaggtggcaggarggagaatgaaagcaggaggaactaccaaacaattataaaaccatcaga

SEQ ID NO: 485175 - DNA, 596 bp, Homo sapiens
ggtaccaagtgcatggcagggctcagtcactattagtccagtccacattgcccaagcaggttttgaagtcagtaacatttctccctgattttattaaagcaatacaggttcattatagaatgaatgaactgtaagacaactcacaaccacgtctccagcatacaaaaccttcagaayatccaagccacagttcccaggggctccttcaaaacctcctccttgcttcaaatgccaaaagcctggccactgggccttggaatgctcacagcctgggattcctcctaagccgtgccctgtctgtgagggcccccactggaagtcagactgtccagttcacatcgggaggctgagggaggagaatcacttgaacctgggaggcagaggttgcagtgagctgagattgtgccattgcactccagcctgggcaataagagcaaaaactccatctcaaaaacaaacaaacaaacaaaacacccagggcatctcacacccatgcaagcacacttgaagcgctgagtgagtactgctactaatgcaaaatcaagcatgctgtttaggatcccccatttcctggagaccctaaattcctcactcag

SEQ ID NO: 485176 - DNA, 521 bp, Homo sapiens
tatcttctagaaagaattaaattgtttatccaaaatgatcataaaagagaattaattcgctgtatagattctaacttcttataaaactacacagttctaacatttgttttctgttgaactgaaggttgctggctggggccaggcttacccagtatgtaactcagcctctctttagtacagctctaggagtttctgaaatctagtttgaaaagagcaattctagaatattagcaaacttgtcctgcagccctgtgatatttggcagggcaaatatcatcattaccaatacttacttttatcctctaaaattataattgacctttataatttatatattataaaaatgatccgttattgtccatggcccttggatagtttcttaagatcttggatcattagcactcaaatacatckttgatattacttcagtcaatgtgctttttaacaattctgctctaaatagaaaaatcagcagtgaaccagggggatagtaattctctgagcagtaatcttgaaacagc

SEQ ID NO: 485177 - DNA, 660 bp, Homo sapiens
ttaccaatacttacttttatcctctaaaattataattgacctttataatttatatattataaaaatgatccgttattgtccatggcccttggatagtttcttaagatcttggatcattagcactcaaatacatcgttgatattacttcagtcaatgtgctttttaacaattctgctctaaatagaaaaatcagcagtgaaccagggggatagtaattctctgagcagtaatcttgaaacagcaatattacttcaaagcgcrtatagccatgtaaaatgaagttcagatacagttataggccatggacttctttagctctgaccacaactctcaataacaagaacaaagatgccttataaggtctagtggcagctgttcggtcacagacacagggatttagaagaccagtattaccattcaagtgccgcacagagttagaaagtttctaataaacaattttagttaatatttaaatatttgtagttcttttctacctcctttttagttttcaatgatatttgtaaccactttttattatgaccagatttcctttctttaatttaacatttttctgtattaccccaaaatctattgtgttgaaactaatttgtttacattgtctctggataaaatatggatcctgtttttttttcaagccag

SEQ ID NO: 485178 - DNA, 530 bp, Homo sapiens
ctgaaccatatcagtaacatatactacttaagatgcttcttttttttctttttcttttctttctttttttttttttttgagacaaagttttgctcttgtcgtccaggctggagtgcaatggtgygattttggctcactgcaacctctgactcctgggttcaagtgattctcctgcctcagcctcccgagttgctgggattacaggcacctgccccctcgcccacctaatttttattatttttagtagagatggggtttcaccatgtttgccaggctggtctcaaactccccacctcaggtgatccagccacctcagtctcccaaattgctaggattacaggtgtgaaccactgcacccagccaagattcttcttttaaaaaacgtactgaaaaaaattttaataagaaaataaggaaagctaagacttattagtagtttataatgtgttcagcactttatattgctttatgtttgatattttatttaatcttaataacccagtgcagtatatacttctttattgacattt

SEQ ID NO: 485179 - DNA, 437 bp, Homo sapiens
cactttaatggggatacagatattcattattagcaaatgtataattacaaatatatttatatatgtacatacatacatatacatatgcatatacatttttaaggtaattgaggtagtgtattagtcactttctatacattctcatattgaattatttaatatagtggatttctgtaactgtaactaagaggcttggaaacaatgacagcaaatgttcctgtagctgtggaaattatttaaaatgcatctaatgcagagtccaggtattggctttcttgtgatgcccacctgtaaggttctggtaaaaggctgagtcccatgatagctcaataaaggtgaaaatcagcatccaataaggaagggcaaagggtaggctacatctatgaaagggagtgtccatytgcacccatatcacctgtgagaagagggatttttgc

SEQ ID NO: 485180 - DNA, 591 bp, Homo sapiens
tgtagaatactacctgcatataatatagtaggtgcccagtacacatttggtaattaaataaacaaggttttgtttttgtttttgtttttgttttgatgaagtcttgctctatgtcccaggctggagtgcagtggcacgatctcagctcactgtaacctccaccttccgggttcaagcaattctcctgcctcagcctcccgagtaagtgggactacaggcgcccgccataatgcctggctaatttttgtatttttagtagagatggggtttcaccatgttggtcaggctggtctcaaactcctgacctcaaatgatccatccgccttggcctcccaaagtgctgcgattacaggcatgagccactgtgccagaccaataaacaagtttttataaataaatatttaaaggtacttcttggaaatgttcttcrtatttttcattgcacttagtcatagcattatgaatttttaacttttatttattcgttcatacatacagcaatatttctttagcactattaggcactgtgctaggaatttggaataggaggtgagacaaacaggcatacttcgtgttctcaaaatatttaga

SEQ ID NO: 485181 - DNA, 513 bp, Homo sapiens
aggtaaattaaaagcatgatcattttgttgataatcagcctttggagaattaaacagcctgcttactgccagtgctagttcagtaaatatgtttctcattttctatttggcaaaattagataacctaagcctaggaaaaataaaaaattagaaaaaaaaaagtagatttggggatatttaactcaaattgcccttactggtggaaactcgaggcagttacttagattatttccaaatggcttttttwaaatgtatttctatattgtatacaacagtctcagtcttcatctctcctgttcagctatccatacatcccttaaaattagatatttttaatgtttagtaaaccttcagtttgggtttatagacaacatttaaccttctcatgaaagggtcagaatactccagttgcaggcacaaacaggccatagtttagttgaaggagaaactgcgaactcaaaggagcactgcttctctgcaggaaagatcccgtcagtggacctgcggggcaca

SEQ ID NO: 485182 - DNA, 513 bp, Homo sapiens
aggtaaattaaaagcatgatcattttgttgataatcagcctttggagaattaaacagcctgcttactgccagtgctagttcagtaaatatgtttctcattttctatttggcaaaattagataacctaagcctaggaaaaataaaaaattagaaaaaaaaaagtagatttggggatatttaactcaaattgcccttactggtggaaactcgaggcagttacttagattatttccaaatggctttttttaaatgtatttctatattgtatacaacagtctcagtcttcatctctcctgttcagctakccatacatcccttaaaattagatatttttaatgtttagtaaaccttcagtttgggtttatagacaacatttaaccttctcatgaaagggtcagaatactccagttgcaggcacaaacaggccatagtttagttgaaggagaaactgcgaactcaaaggagcactgcttctctgcaggaaagatcccgtcagtggacctgcggggcaca

SEQ ID NO: 485183 - DNA, 515 bp, Homo sapiens
tgtaggaaatacacactgaagtaagagagtcctgaaatttgggagattccctgcaaattggggctactcaccttcctgtaagcaagaccaagtgtctatcgaaggtattctctgctggcaaatgatttatggcgctggcttttgggaatccgtattcgctcaccgactcccaccccgcagagtgcaccacgtgcttgtcagttgcatggagcctgagaacaatgtaaaaaaatactcctggcaggatacctgcttagatattttcaagcttagaaaaatcattttttcacacctgtaatcctagcactttgggaggccaaggcaggtggatagtttgaggtcaggagttcgagaccagcctggccaacgtggtgaaaacctgtctctactaaaaatacaaaaattagccagttgtggtggtgagtgcctgtaatcccagctacttgggaggctgaggcacrataatcacttaaacccaagaggtggaggttgcagtgaaccgagagcatactact

SEQ ID NO: 485184 - DNA, 496 bp, Homo sapiens
actttctacaaagttagtacgtaattacrcacttattttttaattcaacaaagtaatttgggagagcttcatggggagcagcactgaggtttaaagagctgaggatacaattatcttcatttaactttctatgctaaaatatttcttaaaaataaagttgtgcagctattactattcaaatatttccttaaattaccaaatatttgctagattgacatatgttgtttaacttttcctaatgagactaaactcctagagctaggatacgcagtatttcttccaagtttcctctcaatacctagcagatagattaaaaacacactttttgtgagctatcaggtagatacttttaattatcctacacaaagaaacaatcttgggatgatttggatggattatctatgtcttcatcattggcattcacattgcttgccattcttacttgccagtgttacagaattcagggtatactgaggtggcagctcggtgatggaca

SEQ ID NO: 485185 - DNA, 594 bp, Homo sapiens
gaagccgcccagccttacaattatctaaagcttgtgtgtatrctaacacaagaggctaactccacaacctagtgaaccgaacaaaactttggcaggcccaccattcagtctgcagcagagggctcaagacatatgtgatgtgtcttggatctagtccgtcctatggtgtcctccatatgacgaaaagacgagaggattttccaatcatttcactgcaggacatgtgcgctgtgtcagtttcccaaggctgccataacaaattacagtaaacttggtgccttcaaaacacacacggattacctgacagttctggagtccagcacaggcctcactagattaaaatggagttttctgcagggctgcatgcctttctggaggctctgggggagaatctgtccctggtgacacttttagggtccagaggctgcccacattccttggctggtgcccttcctccatctcccaagccggtggcactgcctccctctgcctttgtccacagtcacacctgtttggctctcatctcctccctcatccacttcttgtttgtttgttggttggtttgtttctgagacagaatctcactctgttgcc

SEQ ID NO: 485186 - DNA, 613 bp, Homo sapiens
gggtgctaggcccaggtttatccctcggggggaaaagaccaggtaggtggagacttcactcttctgggtctgctccaaagaaatggtgactctgaccttggagaacacatgaagacttggggcttgaggaaaacttcccaaaaaggcttggatagggaataggaacctgacttctgcttgtttatacaaatagaaataaaagccattttaaaaacatccccagcaatttcacccaaaatcaactattcgtggacttgaagagggcaggaggtgaagcatgtgtacaggaaaaggttttattccactcacagcccccagcccagarttttcctgaagtccaggctgagtggaatgtgaagggaccatcgactgaggggctgtcccttcgcagggaaggcagcttctctttctggggtgatttcagtgtggccttactagaccgaacaccaatatcccaggtgggctgctttcaaactcattgagccatgagacctgaggactaagctctgatttttttatcttgcccaaattcctttctaaggggtctggacgcgcatgacacacaacgtttggcagtagcacacagaacaggaaacgccaactcttttgacag

SEQ ID NO: 485187 - DNA, 560 bp, Homo sapiens
aataggcataagagagagaacccagtatcagaagaaggtattgatacctagtaggtggttatccaggcaaagcagctagtgtcaaattgcacttggggttggatataagatgagacctttagttcggactaggaccacaccctgacattaatatgtggcaggttttggaggcagggaaacaagagtagagtgcgaagaaaaagactgagttactaaacctggaatttgtgaaaatttgagccagagataagtcagtcatccagttcgttgacttgaaggctgcctcaacttgttccccaaccyacacaatggtagaagccttattgacttgaggtatttgagcatctctgtctactcattggatgactattactaggctacacagacacacatgggatgacccattgagcactaggctaaaaatttaaattaggataaaaaaagtactgggtagagctgtatgcaattacactttatggcaaaaacacattccatagattgaatccagacaagataccaaaataaagtaaaacccaaaataaaagaaaaactatccagaa

SEQ ID NO: 485188 - DNA, 493 bp, Homo sapiens
gatattcaaagcgatatgaggaaccagccttatagccattrttctgtacacattcctggcgagcctgatgtcccctcagctttcttggctatttgtcactccacacctagctgcttttaatctgggggtgtgggggtgggcctttaagaccttttgtttcccttaaaatagacttaggcagttgctgcgtatagctgttttttgtggaaatgcatttgttacttttgagaatacagtgacctcttgcagttctaggagttctcttgaattcagaagagcccctacaacaccgaacctgtgattttaaggatcactgatgcttccgttgaagggcaggttccctgcattctcctctcctgggccttcccctccccatgcattgcactgtaagtcttctatctctttgtgcagaagggagtaacagcaggaattgtttaagcagctctcgtagcccttccatatgcacatttttgtagcacaccaatattaacca

SEQ ID NO: 485189 - DNA, 535 bp, Homo sapiens
gagatgtcacatctgctattagattatagaaagactgtgactttcctctgtctctccctctctgcacctacctctcccctaaagtcttcacagctcacctgctctactgaatcacactgccatgttatgagttgcccatgtggaaaggggctgatgtcttttgccaacagccgtgagaacccgagcacctgccagcasccacatgcgtgacctcgggagcagatcctcctgaggaaaagcctcgagatgactgcagcctgggcccacaccttgactgtggccctgtgagcgacccagggtcagagacacccagctaagccacacccagactcccgacccacagaaatcaggatataataagtggttgctgctttaaatcgctaagtcctggaggcatgttccacccagcaataggtaactaatacaacctcttgtggaatttttcctccatctcctctgggtagcacgttagaattgtcctggggcaggagattggttaaaatacacacgtttgacaatacccttagaggcgcca

SEQ ID NO: 485190 - DNA, 541 bp, Homo sapiens
ccgacacaggcccggcccagctctgccagcctgcctgggctgaagtacagcctccgggcgagctgctttcctcacrgtcagagagtttctgcgtggtagctgaagtattactctcctaactcatcgcctgtcgatattagcttcttctcccacacataaatctctctctcagaacaagtgctccagcactgtgtctctgcggctccccaggcctgaggacagcgaggcggttgcaggctgtcagtggggcgtgcacactcttccgagtggcgtacctggagccttggaggggggcctcccgcaggcatacctggtgcctgtcaccccgtgattcccaggaaggtgcatgcttgagatcacacacagacacccaacccagccgtgaatgctcactgaagcccagggtgcaggctccgaggagtgtgctgtccttgactgtgtctaaacggatgttctggatgaatgacagactcgttttcattgttatttaaaaaacacataacataaaacttaccatcttagccattttcaagtgcacagt

SEQ ID NO: 485191 - DNA, 541 bp, Homo sapiens
ccgacacaggcccggcccagctctgccagcctgcctgggctgaagtacagcctccgggcgagctgctttcctcacggtcagagagtttctgcgtggtagctgaagtattactctcctaactcatcgccygtcgatattagcttcttctcccacacataaatctctctctcagaacaagtgctccagcactgtgtctctgcggctccccaggcctgaggacagcgaggcggttgcaggctgtcagtggggcgtgcacactcttccgagtggcgtacctggagccttggaggggggcctcccgcaggcatacctggtgcctgtcaccccgtgattcccaggaaggtgcatgcttgagatcacacacagacacccaacccagccgtgaatgctcactgaagcccagggtgcaggctccgaggagtgtgctgtccttgactgtgtctaaacggatgttctggatgaatgacagactcgttttcattgttatttaaaaaacacataacataaaacttaccatcttagccattttcaagtgcacagt

SEQ ID NO: 485192 - DNA, 541 bp, Homo sapiens
ccgacacaggcccggcccagctctgccagcctgcctgggctgaagtacagcctccgggcgagctgctttcctcacggtcagagagtttctgcgtggtagctgaagtattactctcctaactcatcgcctgtcgatattagcttcttctcccacacataaatcyctctctcagaacaagtgctccagcactgtgtctctgcggctccccaggcctgaggacagcgaggcggttgcaggctgtcagtggggcgtgcacactcttccgagtggcgtacctggagccttggaggggggcctcccgcaggcatacctggtgcctgtcaccccgtgattcccaggaaggtgcatgcttgagatcacacacagacacccaacccagccgtgaatgctcactgaagcccagggtgcaggctccgaggagtgtgctgtccttgactgtgtctaaacggatgttctggatgaatgacagactcgttttcattgttatttaaaaaacacataacataaaacttaccatcttagccattttcaagtgcacagt

SEQ ID NO: 485193 - DNA, 631 bp, Homo sapiens
ggattggggctcaggatgggaaaggactaaagggaacttcaaaaacgtcctttgactctctcagagcacactaaaagaaaagaggattctgctgaggatgtagaaacaatggctaggcagaaggtcggggtgctgacattgagtggttggttggtttaaaatgtcttgttttgttaaaggaagagtttgatttctaatgagctttgtcagctaaggctgttaagggcaatcctgggtttgggttatgaagatcagttgaagtgttaccttcatcagaaggtacctggagtagtaaccctactaagttagtttagaccttgaaggttggttgatgttttgtgtgaaatccagccccttctatgtttccttacttctgagccaataagctagaatacaccaggtgtccacttaaaactacagatcctgtttctttcatttcttttgcagtaaaacttgctcaaaagtttataaagtttcagtaaactggagcaaggttccccggagtgagtatgtatttcagagagaaatcaataggcaaattmcagtgcagagatggaattgcagagaaacattggtctttacacttttgtgacctgagcttgtattcaaagacctccctcctgataatgac

SEQ ID NO: 485194 - DNA, 551 bp, Homo sapiens
ctgcaatgcattcaatactcagggaatttggaaatgattttgaatttggataaactggtgcactgaygcctggagaaaattctaaggtctgtacagtaccctgagacaatggcgtagactgtaattattaacctgatcaagggcaaaggggtattgaatattgagcaaattccaacccattcataggactgtcatgtgctgtggcccactcattggtaggctctgggttgatgaggaactccaaagctctggggcacgtatttcttgtataacttgagtagttctagacatgtgggactcagaaatcacatcataagaaagttgttcatttctcaattcttctttaattctgattcttcccagtaaaaagactcagtctggtgctagtgtgcttctaacacttccattaattatgaattccctttgcaacagagagtgaagcgggagcaccaaagccttctgcaaacagtatctagctataatttgaaaacatgagtttgttcactgtttttacagtaaccttctatttatggcaagtaatactggccttt

SEQ ID NO: 485195 - DNA, 551 bp, Homo sapiens
ctgcaatgcattcaatactcagggaatttggaaatgattttgaatttggataaactggtgcactgatgcctggagaaaattctaaggtctgtacagtaccctgagacaatggcgtagactgtaattattaacctgatcaagggcaaaggggtattgaatattgagcaaattccaacccattcataggactgtcatgtgctgtggcccactcattggtaggctctgggttgatgaggaactccaaagctctggggcaygtatttcttgtataacttgagtagttctagacatgtgggactcagaaatcacatcataagaaagttgttcatttctcaattcttctttaattctgattcttcccagtaaaaagactcagtctggtgctagtgtgcttctaacacttccattaattatgaattccctttgcaacagagagtgaagcgggagcaccaaagccttctgcaaacagtatctagctataatttgaaaacatgagtttgttcactgtttttacagtaaccttctatttatggcaagtaatactggccttt

SEQ ID NO: 485196 - DNA, 551 bp, Homo sapiens
ctgcaatgcattcaatactcagggaatttggaaatgattttgaatttggataaactggtgcactgatgcctggagaaaattctaaggtctgtacagtaccctgagacaatggcgtagactgtaattattaacctgatcaagggcaaaggggtattgaatattgagcaaattccaacccattcataggactgtcatgtgctgtggcccactcattggtaggctctgggttgatgaggaactccaaagctctggggcacgtatttcttgtataacttgagtagttctagacatgtgggactcagaaatcacatcataagaaagttgttcatttctcaattctyctttaattctgattcttcccagtaaaaagactcagtctggtgctagtgtgcttctaacacttccattaattatgaattccctttgcaacagagagtgaagcgggagcaccaaagccttctgcaaacagtatctagctataatttgaaaacatgagtttgttcactgtttttacagtaaccttctatttatggcaagtaatactggccttt

SEQ ID NO: 485197 - DNA, 594 bp, Homo sapiens
atgtacgtagaatgtgtttatgtgtcttgagtcataataacatacatactcagttcccagtcctctctgtgcctgtggatcaacaaaatcagatgctgccaatacctgacagagacaataaatgcccagtaccccaaagcaaaagagcccatgtggtgaacaaagcatctaagtgtttttgcattgatttccaaaaaagggtgctagcatttctcagtaaagagaaaataaaagaaaggaaacatttagagaaacaggaattactgagaagacccarcaaactcagaaatacaagggaggtcaagaagccatttgcatttaagaggccctggctatgtttttgatattttaggcagaacaggggaaaaaaaaatattcctttcattgtaagaaaaggaagagtaattttcattttaactttgaaggaatgtttacaaaagaggatttcagccaggaatggagtttaaatagttgtacctgctgtgctttcatgaaaaacaaagctaaagagaccacagagtaaaagaaactgctcaatgacaatgaagaaaaataagtcttgtctctatggcttggtacatttatgtgtgtctc

SEQ ID NO: 485198 - DNA, 570 bp, Homo sapiens
tggatttcataattaccgttctgtgaagtttcagaatagctaaattcattggtcttttacaactttgagcttcaaatatgaattagcagtcacattccaattctgaaatttaggtatctgtatttcagaaagtgccatgtggactgaaaaggcaaacataggttcaagtcaagccactgatttcttatgcctaagaaataaaaatgaagtgtgagtctgactatcttttgaaagaagccaggaaaccracacagaaaaagtatttcgttctccatgtatcttagattttaaattttgaggagcagaatcccatataattagcctaatttgatggggtgagaatatatttttagctgtaccataaatagatctgcccaaattcctacttccctataacattggctgtgcattttctcaagcaattatggcttttgccttaactaatttgatcattcacaacttaattcttgcacaaatgtttctccttttaaaaatattatcctgtcccttttccactctgcttttctcatctgaaattttccctctgaaccacaaaacagagatgatttc

SEQ ID NO: 485199 - DNA, 590 bp, Homo sapiens
atgtctaaatacatattctcaccttatttggcgccatcgatgttcacagacgcagtcattgccacaagtagtgtctggattaatagtaacttctttaattactccattattatttggtggcccaacccaatcattaacatccttaagtaggggggaaaaagccaaattttactatgcatgtatttrcctcttccttctcctttacaccaaacccaaccaatcctgttacttgtgtctctgcattcagtgactttatctagaatccaatgccttcattaatgtttatagccctttactgggtctttatcatctctctatcctctggttttcttctggcatatttcaaacaaggtaacaaatttttatcctctccttttcattccaaagaactgcaaaggcttctttgctctgtcacccaggctggagtacagtggcatgatcatagctcactgcagccttgatctcccaggctcaagcgatcctcccatctcagcctcccaagtagctaaggctgttggtgtgcaccaccgcacccagctaatttttaaaaaattttcagtagagatgaggtcttgctagcttgcccagat

SEQ ID NO: 485200 - DNA, 590 bp, Homo sapiens
atgtctaaatacatattctcaccttatttggcgccatcgatgttcacagacgcagtcattgccacaagtagtgtctggattaatagtaacttctttaattactccattattatttggtggcccaacccaatcattaacatccttaagtaggggggaaaaagccaaattttactatgcatgtatttacctcttccttctcctttacaccaaacccaaccaatcctgttacttgtgtctctgcattcagtgactttatctagaatccaatgccttcattaatgtttatagccctttactgggtcttyatcatctctctatcctctggttttcttctggcatatttcaaacaaggtaacaaatttttatcctctccttttcattccaaagaactgcaaaggcttctttgctctgtcacccaggctggagtacagtggcatgatcatagctcactgcagccttgatctcccaggctcaagcgatcctcccatctcagcctcccaagtagctaaggctgttggtgtgcaccaccgcacccagctaatttttaaaaaattttcagtagagatgaggtcttgctagcttgcccagat

SEQ ID NO: 485201 - DNA, 590 bp, Homo sapiens
atgtctaaatacatattctcaccttatttggcgccatcgatgttcacagacgcagtcattgccacaagtagtgtctggattaatagtaacttctttaattactccattattatttggtggcccaacccaatcattaacatccttaagtaggggggaaaaagccaaattttactatgcatgtatttacctcttccttctcctttacaccaaacccaaccaatcctgttacttgtgtctctgcattcagtgactttatctagaatccaatgccttcattaatgtttatagccctttactgggtctttatcatctctctatcctctggttttcttctggcatatttcaaacaaggtaacaaatttttatcctctccttttcattccaaagaactgcaaaggcttctttgctctgtcayccaggctggagtacagtggcatgatcatagctcactgcagccttgatctcccaggctcaagcgatcctcccatctcagcctcccaagtagctaaggctgttggtgtgcaccaccgcacccagctaatttttaaaaaattttcagtagagatgaggtcttgctagcttgcccagat

SEQ ID NO: 485202 - DNA, 550 bp, Homo sapiens
ctgacaaagagactaaaccagttcatcttccttctagtcttatgcctgggccattcgccagtgaagagagtgaatagattgcagggcaactgctttaattacatcctcacagtgctgaatgaagcttgttcaacaattgccaagctgatcatcaaacatattctttgytattgcttacaacagttcctgacttctaaaattagatttgcgtatagcctcaaagcccagcatatcccagtacctcactgttcaaactaataaatattttgttaggtctataaggctaaagatctcaaaatttctaagaattttgtgccatagacaaaatctgttggttattttctttatatatcagtccagatttcactgtattagtatttctacatgctttttttttttttttttttggagacagagtgtcactctatctcccaggctggagtgcagtggtgtgatctcggctcactgcaaactccacctcccaggatgaggccattctcctgcctcagcctcctgagtagtgggactacaggcacccgccactgtgcct

SEQ ID NO: 485203 - DNA, 526 bp, Homo sapiens
aaggcatatattactcttttattcagatcactctcgtaaaaaaattacctgagtagcatcattgtagttctcgatatctccacttccagttttacatttaccatcattgaaatcccatccagaatatgggactgctggaaagtccctacttccagggttgaagtaacttccacaggtactgcttgttcctgcactcacagcgttaccacacatatgattaattacagcatccacataaatacgaacctagaaaacaaagtttctacttcagtgtgacttacagagaggtggaaatttaaagcattattgatgcaagtttatagtatgtkaataaaactccaaaatatttcatgatatcttataattattttcctacaagatctaattcctatctctagagtgcttactttccctacctcactatgtggtaaaagttaagaagctatgattcataacagcatttttacacaagagctgagtctttttgggcagagcctctaagtaaaggtgtaatcacagcctcaag

SEQ ID NO: 485204 - DNA, 526 bp, Homo sapiens
aaggcatatattactcttttattcagatcactctcgtaaaaaaattacctgagtagcatcattgtagttctcgatatctccacttccagttttacatttaccatcattgaaatcccatccagaatatgggactgctggaaagtccctacttccagggttgaagtaacttccacaggtactgcttgttcctgcactcacagcgttaccacacatatgattaattacagcatccacataaatacgaacctagaaaacaaagtttctacttcagtgtgacttacagagaggtggaaatttaaagcattattgatgcaagtttatagtatgtgaataaaactccaaaatatttcatgatatcttataattattttcctacaagatctaattcctatctctagagtkcttactttccctacctcactatgtggtaaaagttaagaagctatgattcataacagcatttttacacaagagctgagtctttttgggcagagcctctaagtaaaggtgtaatcacagcctcaag

SEQ ID NO: 485205 - DNA, 540 bp, Homo sapiens
ttctttagtgtggggcccctgtctagcctcatttctggctatttcccaccttgaattctattgcacaccagtcctaagaaacaatgtaaaaattcaaaatattccatgttttttttcatcttcatgtctttgaatgggcctaggatcaattagcctgttcttctcttccattttgcttggctaaatctgctcatcatttagagcttatctccaaggttatctcacaagttgtatgtgtctctccttctcactctccaatctagstagttatctcttttatgcactggatagcccccgaagcataattctattatagtgcttatcatactgcatcataatacctgtttttctcatactaaacagtgagccatctgagctaggggcactggtttttagctctatgttccatttttttttctgcttagtacttgggacattgatggtgctctgtaaatattttactcaatagttaatgattgacactttggagtgaagaagggctcaaaccattcatcaacaggtattagagtcaagaaagta

SEQ ID NO: 485206 - DNA, 595 bp, Homo sapiens
gatgttcatgatggtgacatttgtaaagccatccaatggaatataatgaggcctgcagtcaatcaataaataatgttgacctgaaaagaatagtgaaaacacaacttatacccacaagtaactactgactatgaactgttctgcaaaatatcatgaaaagaacactgtgtccatgacaacccagcagktgagctctgatggtgttctgttgggtttttttttgtttttttttttgctttttccatcttgggaggggggtgagtgtgcattcacatgcttaacagagttaataataacttctaaatctggcatttcctgataatactacaagcttttaaaacagctttcatccaaggacctttaaaaggcctaaaatcaagctagtactatcagcatttgaaagataaagaagccccaaaagattatgcaatttgcccaaggtcagtctgaaaaacttgctaaagcaaaaatacaattcaaggtaaccaactcccagtctgttgttctaattattagacaatcctctcttgtgtcaggcttgaagctttgccttagattctgaaaacgttcaatggatcgctgaagtccagggaat

SEQ ID NO: 485207 - DNA, 595 bp, Homo sapiens
gatgttcatgatggtgacatttgtaaagccatccaatggaatataatgaggcctgcagtcaatcaataaataatgttgacctgaaaagaatagtgaaaacacaacttatacccacaagtaactactgactatgaactgttctgcaaaatatcatgaaaagaacactgtgtccatgacaacccagcaggtgagctctgatggtgttctgttgggtttttttttgkttttttttttgctttttccatcttgggaggggggtgagtgtgcattcacatgcttaacagagttaataataacttctaaatctggcatttcctgataatactacaagcttttaaaacagctttcatccaaggacctttaaaaggcctaaaatcaagctagtactatcagcatttgaaagataaagaagccccaaaagattatgcaatttgcccaaggtcagtctgaaaaacttgctaaagcaaaaatacaattcaaggtaaccaactcccagtctgttgttctaattattagacaatcctctcttgtgtcaggcttgaagctttgccttagattctgaaaacgttcaatggatcgctgaagtccagggaat

SEQ ID NO: 485208 - DNA, 595 bp, Homo sapiens
gatgttcatgatggtgacatttgtaaagccatccaatggaatataatgaggcctgcagtcaatcaataaataatgttgacctgaaaagaatagtgaaaacacaacttatacccacaagtaactactgactatgaactgttctgcaaaatatcatgaaaagaacactgtgtccatgacaacccagcaggtgagctctgatggtgttctgttgggtttttttttgtttttttttttgctttttccatcttgggaggggggtgagtgtgcattcacatgcttamcagagttaataataacttctaaatctggcatttcctgataatactacaagcttttaaaacagctttcatccaaggacctttaaaaggcctaaaatcaagctagtactatcagcatttgaaagataaagaagccccaaaagattatgcaatttgcccaaggtcagtctgaaaaacttgctaaagcaaaaatacaattcaaggtaaccaactcccagtctgttgttctaattattagacaatcctctcttgtgtcaggcttgaagctttgccttagattctgaaaacgttcaatggatcgctgaagtccagggaat

SEQ ID NO: 485209 - DNA, 705 bp, Homo sapiens
ctccgtccatttcccagaagaaggatttgctgattagcctagcttgtgctcttgacatttttcctcttggccttagatatttcccaggaggttcttcagttttgaataaatgcagatttctgtcttgcttattccacccaccacttcaccctgaatgctcagacttgtctgatcggagagctgtgtaccaatagacctgttgaaaggacagacaccatttccgaaaaaggagacttccataggattcccaactctttattttgtcaagtatggcattaaaaaaagcagccaaaaatactcttataactctatttattatttccattatttcataaataaggcattttcaaactaaaaattaaaagtaagagtgacrttgtttaaagaaaaaaattttctttttcaaagacgtgcaactgaaatgttatacctatggacacaaaaatttagctgtacctaaaccagactgtatatcataatatacatatattcacatggttttcagacataatctctagtgatgttgattcaggattgaggatctataaacagtatttacaaagctctccaggtgattctaacgcagccagtcagattagtatctggactatttttctctttttcttttccttttttttttttctcatgaggtagtgagaaaatcaattgcagatcagtaatggtctatggcctggctcttgggac

SEQ ID NO: 485210 - DNA, 705 bp, Homo sapiens
ctccgtccatttcccagaagaaggatttgctgattagcctagcttgtgctcttgacatttttcctcttggccttagatatttcccaggaggttcttcagttttgaataaatgcagatttctgtcttgcttattccacccaccacttcaccctgaatgctcagacttgtctgatcggagagctgtgtaccaatagacctgttgaaaggacagacaccatttccgaaaaaggagacttccataggattcccaactctttattttgtcaagtatggcattaaaaaaagcagccaaaaatactcttataactctatttattatttccattatttcataaataaggcattttcaaactaaaaattaaaagtaagagtgacattgtttaaagaaaaaaattttctttttcaaagacgtgcaactgaaatgttatacctatggacacaaaaatttagcwgtacctaaaccagactgtatatcataatatacatatattcacatggttttcagacataatctctagtgatgttgattcaggattgaggatctataaacagtatttacaaagctctccaggtgattctaacgcagccagtcagattagtatctggactatttttctctttttcttttccttttttttttttctcatgaggtagtgagaaaatcaattgcagatcagtaatggtctatggcctggctcttgggac

SEQ ID NO: 485211 - DNA, 705 bp, Homo sapiens
ctccgtccatttcccagaagaaggatttgctgattagcctagcttgtgctcttgacatttttcctcttggccttagatatttcccaggaggttcttcagttttgaataaatgcagatttctgtcttgcttattccacccaccacttcaccctgaatgctcagacttgtctgatcggagagctgtgtaccaatagacctgttgaaaggacagacaccatttccgaaaaaggagacttccataggattcccaactctttattttgtcaagtatggcattaaaaaaagcagccaaaaatactcttataactctatttattatttccattatttcataaataaggcattttcaaactaaaaattaaaagtaagagtgacattgtttaaagaaaaaaattttctttttcaaagacgtgcaactgaaatgttatacctatggacacaaaaatttagctgtacctaaaccagactgtayatcataatatacatatattcacatggttttcagacataatctctagtgatgttgattcaggattgaggatctataaacagtatttacaaagctctccaggtgattctaacgcagccagtcagattagtatctggactatttttctctttttcttttccttttttttttttctcatgaggtagtgagaaaatcaattgcagatcagtaatggtctatggcctggctcttgggac

SEQ ID NO: 485212 - DNA, 705 bp, Homo sapiens
ctccgtccatttcccagaagaaggatttgctgattagcctagcttgtgctcttgacatttttcctcttggccttagatatttcccaggaggttcttcagttttgaataaatgcagatttctgtcttgcttattccacccaccacttcaccctgaatgctcagacttgtctgatcggagagctgtgtaccaatagacctgttgaaaggacagacaccatttccgaaaaaggagacttccataggattcccaactctttattttgtcaagtatggcattaaaaaaagcagccaaaaatactcttataactctatttattatttccattatttcataaataaggcattttcaaactaaaaattaaaagtaagagtgacattgtttaaagaaaaaaattttctttttcaaagacgtgcaactgaaatgttatacctatggacacaaaaatttagctgtacctaaaccagactgtatatcataatatacatatattcacatggttttcagacataatctctagtgatgttgrttcaggattgaggatctataaacagtatttacaaagctctccaggtgattctaacgcagccagtcagattagtatctggactatttttctctttttcttttccttttttttttttctcatgaggtagtgagaaaatcaattgcagatcagtaatggtctatggcctggctcttgggac

SEQ ID NO: 485213 - DNA, 438 bp, Homo sapiens
tcttctctctgagtcttctttacatggtcttccctctgcgtgttcggtggcctcatctctcctctccttataacaaacaccagtcatattggattggtgttcctatgacctcatttaaccatawtcaccccctcaaaaatcctattttcaagtatagtgacattctgaggtagtaggggttaggacttcagcatattaatgggttagggagacacaattcagctcctaacaaaggtgattgtataataaaatgcaatagtgctagtaaagcattcccagaatatatggactttttgatatgtctccaacatgtagagtatttcctggcacgcaatatgttcttcgttaattaatatctgttgaataaagaaaatgaaataaagtaaactgttttgctaattaaatgctaattaaatattagctcctttctttctctcc

SEQ ID NO: 485214 - DNA, 438 bp, Homo sapiens
tcttctctctgagtcttctttacatggtcttccctctgcgtgttcggtggcctcatctctcctctccttataacaaacaccagtcatattggattggtgttcctatgacctcatttaaccataatcaccccctcaaaaatcctattttcaagtatagtgacattctgaggtagtaggggttaggacttcagcatattaatgggttagggagacacaattcagctcctaacaarggtgattgtataataaaatgcaatagtgctagtaaagcattcccagaatatatggactttttgatatgtctccaacatgtagagtatttcctggcacgcaatatgttcttcgttaattaatatctgttgaataaagaaaatgaaataaagtaaactgttttgctaattaaatgctaattaaatattagctcctttctttctctcc

SEQ ID NO: 485215 - DNA, 608 bp, Homo sapiens
tagaaaataattctattccattagaagtattccagttgaaggtgcaactctttccacaagagttaagtttttgggaaggttaaaaaacaactttcatggctaaacaaagtctccgattcatcacacaagaataaacattatgtggatagatggccggcccacagtaacccatcacatgtattgaaaacaaaaatcatacaaacaaaggttaatcaatattgtatattcaaaagacaggtgaccataaatatgtccataaagatattataatgctattgtgtcatctttacttaaaatggcaattaccactgaaaaaattttaaagttgattattccttatgaggtaagtcaattaataatctatttaaagtctattaataacagacatgaagagatgaagacatttaatgcccaatgtgaaagaaagcaatgytactagatgtacaatctaaatacctttcaattatttcaatgtgtccttagacgcgtgagcacataatacgcagatctaaggtaacctaggttctatgatctctaccaagtagttttatgccttttgttcagaaaggacctctctgtatcatctgtaaaatggggaaaatactatt

SEQ ID NO: 485216 - DNA, 608 bp, Homo sapiens
tagaaaataattctattccattagaagtattccagttgaaggtgcaactctttccacaagagttaagtttttgggaaggttaaaaaacaactttcatggctaaacaaagtctccgattcatcacacaagaataaacattatgtggatagatggccggcccacagtaacccatcacatgtattgaaaacaaaaatcatacaaacaaaggttaatcaatattgtatattcaaaagacaggtgaccataaatatgtccataaagatattataatgctattgtgtcatctttacttaaaatggcaattaccactgaaaaaattttaaagttgattattccttatgaggtaagtcaattaataatctatttaaagtctattaataacagacatgaagagatgaagacatttaatgcccaatgtgaaagaaagcaatgctactagatgtacaatctaaatacctttcaattayttcaatgtgtccttagacgcgtgagcacataatacgcagatctaaggtaacctaggttctatgatctctaccaagtagttttatgccttttgttcagaaaggacctctctgtatcatctgtaaaatggggaaaatactatt

SEQ ID NO: 485217 - DNA, 185 bp, Homo sapiens
acacaagtctcccgaaaatgasattaaaaactcacgtacaaaggaaatattattaactgtataaggaaagaaaagggagtattttctaaaggcagaaaaatctaggtaacaattacacagcaggtaaacaatcataaaggtttatctctgttacggttttcttactgagaattcaaaagcaacaa

SEQ ID NO: 485218 - DNA, 573 bp, Homo sapiens
tggtatgtaaaatcgtgaacacagatgaaatcaccaaaaagtaaatattaaagagtagggaatgaggtctgtagcatcccaacattaagatgtaggggagaagaggcgaatccagtaaaggagacagaaaaggtggaagggggatcatggagraattacactttaaagaagacaaaacctgttggtctatcctactagtgttttactcattcccctcccccatgtcaactacatcttaaaaagtatacaaagagcaaagaaggagcaagttaggagaagaaagaaacgatacaagcaaaataacaaaatgtatcttataagatataatcgattcctgttgagactggagggtattaaaacacttcctctgatatttctcagaattagaattctaacgaaagagctgtttagtctctgatcgtcatagcacatgatataaaacaacgataattagagatttttggtttactgaagacttttgactgcatagtagtttcctggggctgctgtaacaaactaccacaaactggttggcttaagacaatggacatttctcttacagttctggaggcc

SEQ ID NO: 485219 - DNA, 308 bp, Homo sapiens
gataagatgtgcaaagggcattaccaccattaggggcaacatgggcaagggctcagagaacaaggtgggcgagagtaagcaagtggtccagtagaccaaacggaaggagaaacttgcttggaggcagtgtagtgacagagaagtttacagttatttcgaagccaatactgagccattaaaggcctgttggaaacaatctgaacaaaataatgtttcaggaaagttaytctgatgccgcagtggattggaattagttatcaggcttctccagtagtctaggagtgatatgaaaagagcacgaattaggg

SEQ ID NO: 485220 - DNA, 646 bp, Homo sapiens
tgctgcctggcacagaagagaagtagataggctcttgcttccccttgcctgcaggggtagccccacaatactgagcagagcagcggacttgatctgaaaacacataggccaaggattcttgcaggctaaagtctcagacttctattgcctggttgtggatatgtaactactgtgataactaacacagaaagtttggaagagtcttacttccccctgttgctagacctctgaacaatagcagagattcacaggttgctgtgccccagaaggtagaatttggaaaaagcagtggaaaaccctcgaaagctgtaagaggcctgtctctggcctttttctcacattactttctagcaagtatctgagcagccagtgccttcagtatctggggatttgtggtctgatgagacattcccaccctgccgtttacctggctaacttctgcagaattgagtatagactgaacttccttgggcccctataggtgggttagctgcctttgtggcccctcctgtgatacactgatttccctgcactgaaatactccatttaggcttccrtctccttcccaccagactgtgagcagggacttgtcttcttcatccttgcatccccaagcatttgtactcttacttcctgtattgagcta

SEQ ID NO: 485221 - DNA, 590 bp, Homo sapiens
caatgtgttcatgagccctaggaacgggagtcagcagcaagggggcttcagaatcaaaccaacccggtgacccccgttccagtcccagctctgaccctttctagcagtaagccttgggcaggtcacttcaccrtgctaagatttcctcatctgaagaatggggacaatagcccttttacttcctagagtccttgagaatccaatgagataacagtcatgaaaaaaatgtactaatgatgagacactgcgaatattccagcaggacaagtacaggctttggatttcacttctggctcctctgtccattagctgtgtgaccttggcttggttatttaacctctctgaacttctgcttcctgttctgcaatagttgtacccagcttctggggactgtaaggattcagcagagtgttcaccaagctcaaggcagcagcctggcacagagtgagcacccaattgataagagcctgtgcctgcctcctccgggtattcttattctgttacttacaagtagattccagcaagaggcacagagtcaggcgtcagaccctgagtttgagtgccggtccccagacaagtcatttcatcta

SEQ ID NO: 485222 - DNA, 590 bp, Homo sapiens
caatgtgttcatgagccctaggaacgggagtcagcagcaagggggcttcagaatcaaaccaacccggtgacccccgttccagtcccagctctgaccctttctagcagtaagccttgggcaggtcacttcaccatgctaagatttcctcatctgaagaatggggacaatagcccttttacttcctagagtccttgagaatccaatgagataacagtcatgaaaaaaatgtactaatgatgagacactgcgaatattccagcaggacaagtacaggctttggatttcacttctggctcctctgtccattagctgtgtgaccttggcttggttatttaacctctctgarcttctgcttcctgttctgcaatagttgtacccagcttctggggactgtaaggattcagcagagtgttcaccaagctcaaggcagcagcctggcacagagtgagcacccaattgataagagcctgtgcctgcctcctccgggtattcttattctgttacttacaagtagattccagcaagaggcacagagtcaggcgtcagaccctgagtttgagtgccggtccccagacaagtcatttcatcta

SEQ ID NO: 485223 - DNA, 590 bp, Homo sapiens
caatgtgttcatgagccctaggaacgggagtcagcagcaagggggcttcagaatcaaaccaacccggtgacccccgttccagtcccagctctgaccctttctagcagtaagccttgggcaggtcacttcaccatgctaagatttcctcatctgaagaatggggacaatagcccttttacttcctagagtccttgagaatccaatgagataacagtcatgaaaaaaatgtactaatgatgagacactgcgaatattccagcaggacaagtacaggctttggatttcacttctggctcctctgtccattagctgtgtgaccttggcttggttatttaacctctctgaacttctgcttcctgttctgcaatagttgtacccagcttctggggaytgtaaggattcagcagagtgttcaccaagctcaaggcagcagcctggcacagagtgagcacccaattgataagagcctgtgcctgcctcctccgggtattcttattctgttacttacaagtagattccagcaagaggcacagagtcaggcgtcagaccctgagtttgagtgccggtccccagacaagtcatttcatcta

SEQ ID NO: 485224 - DNA, 590 bp, Homo sapiens
caatgtgttcatgagccctaggaacgggagtcagcagcaagggggcttcagaatcaaaccaacccggtgacccccgttccagtcccagctctgaccctttctagcagtaagccttgggcaggtcacttcaccatgctaagatttcctcatctgaagaatggggacaatagcccttttacttcctagagtccttgagaatccaatgagataacagtcatgaaaaaaatgtactaatgatgagacactgcgaatattccagcaggacaagtacaggctttggatttcacttctggctcctctgtccattagctgtgtgaccttggcttggttatttaacctctctgaacttctgcttcctgttctgcaatagttgtacccagcttctggggactgtaaggattcagcagagtgttcaccaagctcaaggcagcagcctggcacagagtgagcaccyaattgataagagcctgtgcctgcctcctccgggtattcttattctgttacttacaagtagattccagcaagaggcacagagtcaggcgtcagaccctgagtttgagtgccggtccccagacaagtcatttcatcta

SEQ ID NO: 485225 - DNA, 606 bp, Homo sapiens
ctgtttatggtcctgctggagtgatctggaggcagcctatgtgttttcagggtccagatgagccagtctggggccgagagaggacagtgcagggctccagggtcagatgccctgggttctaaccctacttcttcctagctgggtcatcttggacttttcccctcaatttcctcttctgtgaaatagggatgaccttatctaaccctgtagggtgactgagggccagtggatactgcttgtatcagaagaaatcagaagtggaaggcacaaaggcatagacctgtccctgccacctaagaggggtgtgacattggccaagtctcagtttcctagtctgatgagaggattcaaggaggtgactgggcaggaacggcccatccgggtgagcatttggtatgtgcrgtgtgggacagactgggggcttttctctctagccagaggtcagccagggtggggaagcctccttccctgaggcttccttattcccgagccttcgtcctgggactgtgttccatcctgccttgcatcgcttgataggaaagcacctcgtcattcaaggcccagacccgggtctcctcctctcccaagaagccctcctggttaccc

SEQ ID NO: 485226 - DNA, 606 bp, Homo sapiens
ctgtttatggtcctgctggagtgatctggaggcagcctatgtgttttcagggtccagatgagccagtctggggccgagagaggacagtgcagggctccagggtcagatgccctgggttctaaccctacttcttcctagctgggtcatcttggacttttcccctcaatttcctcttctgtgaaatagggatgaccttatctaaccctgtagggtgactgagggccagtggatactgcttgtatcagaagaaatcagaagtggaaggcacaaaggcatagacctgtccctgccacctaagaggggtgtgacattggccaagtctcagtttcctagtctgatgagaggattcaaggaggtgactgggcaggaacggcccatccgggtgagcatttggtatgtgcggtgtgggacagactgggggcttttctctctrgccagaggtcagccagggtggggaagcctccttccctgaggcttccttattcccgagccttcgtcctgggactgtgttccatcctgccttgcatcgcttgataggaaagcacctcgtcattcaaggcccagacccgggtctcctcctctcccaagaagccctcctggttaccc

SEQ ID NO: 485227 - DNA, 641 bp, Homo sapiens
tgctgggagctgtgtcgaacaaggcagaggagagactgtgcttgggacaagaagagggtcgggcaggggaggcaaggctgccaagcaggtggccccatcccttggctagattcctgggctgacccagaggccaaacactagaggattccatggcccagagaaggaggggccaggaactgacatcctcatcgtacgggtggaaacttgggctcaaggagggcaaatggcttgccaaagtcacacactaaaagttggtgctcatactctgggctcccaagaagcttagggtggggggccccactgtccccctgtgtcttctacctgtcctggcccaaagcagtggcccaaagcagtgggaggatctcagaaggactggaagtaaatgggctggctggtttgcagacacaaagggaacgcaaaggacatgaagtttgcagatccccttgggaggrggtagagggccggcatctcctctgctcccttctcctgtgccactcctggctttgcctggaggcctggctctgggaaacgtgtcacccctctgggttgtggcaggaggcagcacaagcatgctctctccccaacctggtcttttgcttttcaattttaacccctccctctacctctgcacaaaaggcaaa

SEQ ID NO: 485228 - DNA, 613 bp, Homo sapiens
ctgctgggagctgtgtcgaacaaggcagaggagagactgtgcttgggacaagaagagggtcgggcaggggaggcaaggctgccaagcaggtggccccatcccttggctagattcctgggctgacccagaggccaaacactagaggattccatggcccagagaaggaggggccaggaactgacatcctcatcgtacgggtggaaacttgggctcaaggagggcaaatggcttgccaaagtcacacactaaaagttggtgctcatactctgggctcccaagaagcttagggtggggggccccactgtccccctgtgtcttctacctgtcctggcccaaagcagtggcccaaagcagtgggaggatctcagaaggactggaagtaaatgggctggctggtttgcagacacaaagggaacgcaaaggacatgaagtttgcagatccccttgggagggggtagagggccggcatctcctctgctcccttctcctgtgccactcctggctttgcctggaggcctggctctgggaaacstgtcacccctctgggttgtggcaggaggcagcacaagcatgctctctccccaacctggtcttttgcttttcaattttaacc

SEQ ID NO: 485229 - DNA, 503 bp, Homo sapiens
tggggagtgggatgtggcactgcacggggcaggggggaccttatttcttctaagcgccttctcctgtcatccttctggcagccctgtcaggttgaaatcagcattgccaagaggctcagagaggttaaggcacttgcctgaggttatgcagccggtagcagatggggctttaaagtcaagtgggcctgactccaggttgcggaaagggactgctggaccgaaggagatggaaaggtcagagcctggggggaggacaggagaaaccgsgctggcaatgatgatgggctggcacaggcaggaggcagttaaaccagatgagttgtaagccctaacccaaggctgaaactcggtggcttttgaaatgggctagaaccagcactttcccactccccctgcccctggcttccccaggaagcccaagtcctgtcagtaccctgctccccaccctctctccccaccaactggtcacagctctccaccccttgctgcctccaactgacaga

SEQ ID NO: 485230 - DNA, 597 bp, Homo sapiens
accgggcccccagccatccctggcatcccgggtatccctgggacacctggccccgatggccaacctgggaccccagggataaaaggagagaaaggtaccatgggatttagcaggacactggtaatactgaccaaatttcccgtctcctgcctcccaagtcacagttgcctacctttgagactgcaaaagcactggcaaatccagcagcttgctgaacccttgcagtaactttgcaaggagggaattctgattcccattttacagagaggaaaactagcatctagaaagtctgctgacttactcaaggtagcccagtaaatgttgaggctaagaccagaccacggatctcttaccattaaaytcaggtggagagggagtgccgctgtggccacagagtcctgtgtttaaacttacctcctgggcaaatgacttctctctgaattgctatttcctcacctgtaagatgggggcaatggtacttttttggggttgtcatggggttcaaatgagactcccagccttgaaaacccctctgtaaaatttggtttattcattcatttaacctacggttatagagcaactgtctgtaccagtcac

SEQ ID NO: 485231 - DNA, 474 bp, Homo sapiens
cccatggctgttctttccccacgaaaacacttggctatctacaacaaagacgagaaattaagaattgtacacatattagaataccaaattcaaatagaaactactaattctacaaatcttttttgtggctttaatgagggataattgacaaataaaaatttcatctatttaaggtatacaatatgatgagctgaaatacatatacattgttaaatgattgtcgcaatcagctaattaacatatccatcacctcacatagttacctttgtgtgtgtgtgtggtgagaatacttaagatctaccctcttagcaaacttcaagtatacaatgtactattattaactatatagtcacatggctgtacattagaaattactcaccttataactgaaagtttataccctttgacccacatcttctgatttcmccccaacccccagcccctggcaactacctttctactctctgtttttat

SEQ ID NO: 485232 - DNA, 572 bp, Homo sapiens
caatgctaaactgcaggcctgatgaatttgctcggaaagagtttgtcctgtgaggccacagaagcttcatttgtgttatcaccacttaggaaaagcaggacacttatgcccaaagtgtctttatagcaaagccccctcatagcgtgcaactatggcaaaccgccaaattgcagtggtctttctaggcttctyctaagagttttaattaaaatgttttttctggtgatatatatatgtatatatatatatattttctagtgacatatacatatatacatatttatatatatgtagcatgcttgataaaaagtataaagaaataatacataatctccagtcatatcacaccaacaaaaaattatcaccatttagatgcatgtatccttacaatttttctaatcatatatgccagaaatatcataaagttctatattctacatgaattttcaacttctaataaatcatgaatattttccatgttaataaataatcttttataatttttaataattgtacaatatttcattgtatgcttataatagaatttaaattcttcatgttagaatattagt

SEQ ID NO: 485233 - DNA, 572 bp, Homo sapiens
caatgctaaactgcaggcctgatgaatttgctcggaaagagtttgtcctgtgaggccacagaagcttcatttgtgttatcaccacttaggaaaagcaggacacttatgcccaaagtgtctttatagcaaagccccctcatagcgtgcaactatggcaaaccgccaaattgcagtggtctttctaggcttcttctaagagttttaattaaaatgttttttctggtgatatatatatrtatatatatatatattttctagtgacatatacatatatacatatttatatatatgtagcatgcttgataaaaagtataaagaaataatacataatctccagtcatatcacaccaacaaaaaattatcaccatttagatgcatgtatccttacaatttttctaatcatatatgccagaaatatcataaagttctatattctacatgaattttcaacttctaataaatcatgaatattttccatgttaataaataatcttttataatttttaataattgtacaatatttcattgtatgcttataatagaatttaaattcttcatgttagaatattagt

SEQ ID NO: 485234 - DNA, 507 bp, Homo sapiens
tgtgttgttacggggtccccagaatgggaccctcccagctaaggccccaggagagccttgacaggcagctgaggactcctacyaaagaccggggcagagcctctcttaggcagctcttgggctgaataataggtttctgtgggtccccaggcaagtgggagttcagaaagagagatccccactcagggtaggggtggcctgatccttggcttcaaagacctcgtggggaggctgagaggacctgggtgggcagtcccggggcacaagcagcagtctctgggttcactgctcagccaccccctaagcctgggcagtaattaaatgactctgagggtcacagtggctgaattcattaagaaatgtcagctccctcccatctcagatgcaatgaattacacaggaccaaggtatccatgagagtcatcactcaactactccaaacaccaacctgcctcaactaagcaagatctctgtcccctcagagaagcaggggtcccggctggggcc

SEQ ID NO: 485235 - DNA, 507 bp, Homo sapiens
tgtgttgttacggggtccccagaatgggaccctcccagctaaggccccaggagagccttgacaggcagctgaggactcctaccraagaccggggcagagcctctcttaggcagctcttgggctgaataataggtttctgtgggtccccaggcaagtgggagttcagaaagagagatccccactcagggtaggggtggcctgatccttggcttcaaagacctcgtggggaggctgagaggacctgggtgggcagtcccggggcacaagcagcagtctctgggttcactgctcagccaccccctaagcctgggcagtaattaaatgactctgagggtcacagtggctgaattcattaagaaatgtcagctccctcccatctcagatgcaatgaattacacaggaccaaggtatccatgagagtcatcactcaactactccaaacaccaacctgcctcaactaagcaagatctctgtcccctcagagaagcaggggtcccggctggggcc

SEQ ID NO: 485236 - DNA, 397 bp, Homo sapiens
tacattttttaagtatagttgccctactctgctacaacacattgaatgtattccttccttctttattttttgagacagaatcttgctctgttgcccaggttggagtgcaatggcaccatcttggctcactgcaacctccaccttccaggttcaagcaattctcctgtctcaaccttcccagtagctgggactacaagtgcatgccactacgcccggctaatttttgtatttttagtagagatggggttttaccatattgaacaggctggtstcgaactcctgacctcgtgatccaactgcctcagcctcccaaagtgctgggattacaggcgtgagccactgctcctggcctagtaattaattttatgtgatcacatttattgtaaacctacatctt

SEQ ID NO: 485237 - DNA, 681 bp, Homo sapiens
tacacactgatatttaatacctctgtaagtaataaagcttataaataagtcatgcataatttattttcaacaaagacatttctatgtaatttcattccactattgcaagctataaatgttcatttctactaagaaggtaatggcatttattatttccataagtgaaagagtatgcttgatgtcatctaggaaatagataagtaaaggtagtgctttcatggtatgctgggcctgcatgttcccttttgaaataacaccctactttcttaagtttcaaagtacttgacatgatactcaaaatttgcaatgtggaacaccattttattttttattctcataacctataatcactgtatattgttcttgattcaaaaacagtgttgcaattacgttattcagctaagctgaaatacactgaacatctactatgcttgccagtcatgtggttcaaagtaaacaagatattgttacccattagagagatgtaatttaacagggagacagacatctaactaaattataactataaaattatatgtgttatagtaaaaatatattaaaaattacagtataaatgtgggggaaaaaacccktaaactttctgtggtagtttatatcagactttacaaaagaaatggattttgagttgagacgtgaagtgaaaattcatgaagagcatga

SEQ ID NO: 485238 - DNA, 619 bp, Homo sapiens
atttatatagtcaaaaacactagcccttgrtcatcccaaaggagtcatttggaatgagcaatccatacttctgttgaaaggtgaatgtaaccctggataattcacctttaagctgaattattccaaaggttgttgactttggcacatcaataaagatgtagctatatagctgagataacactcagggctgtagtattttccatttggtatcccatttgatgattgagaacagttgtatccagaggtcctgcaactccatgaatttcagggaactggcatggggctatgtaaggcgctgacaaaagcaaaaggataacttttctgcttttctcaaaaagagcttatttctgcatgaaagtttgatgagatagtgcattactaaccagagtaaaggggctcatgtccttcttgaactcttctgactgcctcactgacagactcactaatctctggagcagatatttcaatagttaacaaggaccttcacaggatgtaccataatttgaaattgttaaatgcacattgtttctcctattcaattgcaaaagccccgagaacaaacttgcttatgtatttattcattgttgtattccaggacctagaaaagtgcatggtacat

SEQ ID NO: 485239 - DNA, 643 bp, Homo sapiens
tgtattcacatccacaactgtagactgcatctacttcaattaaaatagatggactagctagataatcaaaaccctggcgtctctaaacaaaagttattttgatacttctatgtaatgctatttactgccttcaatcaatcagtagagaattagttaagcaactgacaataactgtgggatttgagagtggcaaatatctcatttacacccagtagyaaacaaatttgctccatgaaattgccatgcagtggccacaggcccttaaaattcagttggattcctaaaacatttgtagtaccatttctcatgttttaatatccagaaattagtcaaagtgataaatatgacctccatgtacacaaaagcaaactacacactaaacaggggaaataaaatgaaaacagaaaaaaattaaaccagcttcagagagaaaatgcctgattatttaagaaatcaggagtgggcaagggtggtgtacccaggagaggcaaaagattcgtactttttttaacaggctattataaaatgacttgattggatcaaccaacttttaagccaaggcatctttgagatattccatgtcactgtgtgtttgttgtgatggaggcacaatcataatctccaagtcccaatagcctaacgt

SEQ ID NO: 485240 - DNA, 564 bp, Homo sapiens
tgcaaagcaaaaaaaactttaaaaccaattggtctagcccccacctctgagcagagttacacgtaaccattcaatattcttagattaaatgactttaataagctctcgtgattctaccactctaaccccataaaccaggagtgaaatcctcaattctgagttcagatactaggaaatcctttttctgcagcacactttatgacttttatgcattttaattctaaaatgctactttcctaattaaatgtagtacaatctttcctaatcttatgtagtacaattgcagctcaatcatatttttggggaactctagaataccctggaatatataagccacagctatgcataaatatatatatatatataaaaggatacagtaagttgagactcctgatctataaataagtctgttcacttgcataattatgaggactgaacaggataaatttcactcttgtaaaaaccaataggcctaggaaagactcaaatctctatctcagtttcacagggagctstagggaagcacattcccaaagcagacgtcgttgggtaaaagccaatgcc

SEQ ID NO: 485241 - DNA, 620 bp, Homo sapiens
ctcaaaacaaccctaggaggcaatgggtgagatattatcataaacctgcatatgaggcatgtttaatgatttgctcaaggttacatatctagtaaaaggcaaaatagcatctcaaaaatggttcttcaagttagacagaaggagtaagttctgaagatccattgtacagcatggtgagcacagttaataagaatgtattgtatattaaaaattgctgagagtagattttaaatactctcatcacaaaaataagtgtgtgargtgatggatatgttaatacagtcatattaacatatatatgttaatacataacatatatatcaagttatcagtataatgatataaccattccacagccatatacatacatcaaaacatcacattgtacaccatatacacacttttcatttgccaattaaaaattaattaattaagattgaaaatcaaaaattgaaaacaaaaatggttcttctgaccaagggcaccccatcatctacaggctctaggacaagagtgtaagtggaggcccacataccataattctgaatgtttaaaatttataaatcaagctaccaaatttttaaatgcaatatgttcaagactcctatcttaacaaatat

SEQ ID NO: 485242 - DNA, 672 bp, Homo sapiens
tgacatgtgggaattgtgggagttacaattcaagatgggatttggatggggataaagccaagccataacaggtgcctactaaatgcacactgcaagaacaaatgagtgagtgaatgctggtggaataaatgctgaagtggcctggggttagtggctgtggcttagtgtctgggtataggattctggggcccactgacaatcatctttgtttacactgtggtcagaaagctggtcagcttggacttgagcacagtggaaggggctaggctgggagaacatcataggatgtgctctcccagagagtggcctaaatgacttcagactgctccacatgtctcccaatgagagcatatggcaaagragggttgctccctccacagtatttttactcctttggtgctcttttcaaaaaaggaagttccatgagaacaaaagggctggcaaagttcctattgggggatgaggaagccatgccacatttttacaaatgcaacctaatgccaagctcaaagacaaaatactgtaaagtacaatctctgcttgcataaatttattctcttgactgggagacaagactaataggtgagaaacaaatatggcagcatttttctaacaaagattccctgagaacagaggagcagatgctggcaattgcacacagagctgccttgt

SEQ ID NO: 485243 - DNA, 638 bp, Homo sapiens
ccccctttttcgtggttctttctcaaagcctcgcagctctaacccttgacccgttcttacacccctgtgtgtggagaaaaataaccattcctctcctgtgctctgakgcctctctagaactttccctctgggcacaggaaagagatgaatagtaacagaataatcgggatggtcttgttagacaatccaaagccctctgggctgaagcagaggtttttcacctcagggacaccccagcctgggcccctaccgtgtcagcgtccccaggcacaggcaggagaggtgacgtcacctgcatttacatgatgtctgtctgtgtggcgtgggtcactgggtggctttactgagagcagggacatcagggatgggtgttctgggatgacttaacaaagggaaaactgagattgttcctactgaagccccttctcctttcagcccccaccgaggcggcctgtccccaagggacttggagtggagacttgagccaccaccagtcagaggtgcaagtttcacaggcacagctggaaccaagcaccctggtgcccagttgtctgcgactacagctggatcaagggttccactgtgggaacggcttggcccagcggggcctttcctccaccacctgcagcttctcagcc

SEQ ID NO: 485244 - DNA, 638 bp, Homo sapiens
ccccctttttcgtggttctttctcaaagcctcgcagctctaacccttgacccgttcttacacccctgtgtgtggagaaaaataaccattcctctcctgtgctctgaggcctctctagaactttccctctgggcacaggaaagagatgaatagtaacagaataatcgggatggtcttgttagacaatccaaagccctctgggctgaagcagaggtttttcacctcagggacaccccagcctgggcccctaccgtgtcagcgtccccaggcacaggcaggagaggtgacgtcacctgcatttacatgatgtctgtctgtgtggcgtgggtcactgggtggctttactgagagcagggacatcagggatgggtgttctgggatgacttaacaaagggaaaactgagattgttcctactgaagccccttctcctttcagcccccaccgaggcggcctgtccccaagggacttggagtggagacttgagccaccaccrgtcagaggtgcaagtttcacaggcacagctggaaccaagcaccctggtgcccagttgtctgcgactacagctggatcaagggttccactgtgggaacggcttggcccagcggggcctttcctccaccacctgcagcttctcagcc

SEQ ID NO: 485245 - DNA, 638 bp, Homo sapiens
ccccctttttcgtggttctttctcaaagcctcgcagctctaacccttgacccgttcttacacccctgtgtgtggagaaaaataaccattcctctcctgtgctctgaggcctctctagaactttccctctgggcacaggaaagagatgaatagtaacagaataatcgggatggtcttgttagacaatccaaagccctctgggctgaagcagaggtttttcacctcagggacaccccagcctgggcccctaccgtgtcagcgtccccaggcacaggcaggagaggtgacgtcacctgcatttacatgatgtctgtctgtgtggcgtgggtcactgggtggctttactgagagcagggacatcagggatgggtgttctgggatgacttaacaaagggaaaactgagattgttcctactgaagccccttctcctttcagcccccaccgaggcggcctgtccccaagggacttggagtggagacttgagccaccaccagtcagaggtgcaartttcacaggcacagctggaaccaagcaccctggtgcccagttgtctgcgactacagctggatcaagggttccactgtgggaacggcttggcccagcggggcctttcctccaccacctgcagcttctcagcc

SEQ ID NO: 485246 - DNA, 434 bp, Homo sapiens
ccagcaggagatcccagtgagatatcactgcttagcaatccctccagactcagccatcaggtggacctgacaaaaatgctcatttgattttttttctctctctcccctacagataccaaatactgctggaaggacgcaaaggatggcaggatgaaagaatgtcacaaaaagcagcttttccacttgataaaaacaactaaaacagcaaagcaagtttaagtccaaacacaatactgcaggggtccttcactgaggattgaatttcagacacagaatactcttgatgacttcaagccactatgctcctttgatttgagaagccacattccatccccctccaattgtgaycaatacctagggagaccaatgcccagatggacaaatagcattgaccggcgttagccctgtttctcaattcccatcgtgtagagaac

SEQ ID NO: 485247 - DNA, 586 bp, Homo sapiens
gaacccagctgcgctctctacagtatgggttacttttgtgtctggaaggtgtctgacatcctgagacctggacccatttcaaggagctttgggaagagcccagatcactgatggaattggacagtgcgtggaaatggttcagcaggaygagggtaagtgcaggatcacggccaggtcattctgagagacaatgagtggcactgatggggtcagacaaagattaaaaacaaaagtttgtgcttcgacttcagaaactcaataactaatttgctcttataagtaataagcatttttctatctacatgagaatttaatctcaaaacagaaatcagaaaaaatatcaagtccagggcataaaacctaaaccagtgcttagattattcattttaaatagagctaagagtaaaatcttctccataaaatacatattgtatctatacataaaatatatgttgtatctgagttcagggtgtgatgagtgtgaccatggactacccagcattcatgtggaagtgaaggaagaggactggatcaatcccagtggaaagcatgcctctcagcagcccacaccatcctccacctacac

SEQ ID NO: 485248 - DNA, 586 bp, Homo sapiens
gaacccagctgcgctctctacagtatgggttacttttgtgtctggaaggtgtctgacatcctgagacctggacccatttcaaggagctttgggaagagcccagatcactgatggaattggacagtgcgtggaaatggttcagcaggacgagggtaagtgcaggatcacggccaggtcattctgagagacaatgagtggcactgatggggtcagacaaagattaaaaacaaaagtttgtgcttcgacttcagaaactcaataactaatttgctcttataagtaataagcatttttctatctacatgagaatttaatctcaaaacagaaatcagaaaaaatakcaagtccagggcataaaacctaaaccagtgcttagattattcattttaaatagagctaagagtaaaatcttctccataaaatacatattgtatctatacataaaatatatgttgtatctgagttcagggtgtgatgagtgtgaccatggactacccagcattcatgtggaagtgaaggaagaggactggatcaatcccagtggaaagcatgcctctcagcagcccacaccatcctccacctacac

SEQ ID NO: 485249 - DNA, 586 bp, Homo sapiens
gaacccagctgcgctctctacagtatgggttacttttgtgtctggaaggtgtctgacatcctgagacctggacccatttcaaggagctttgggaagagcccagatcactgatggaattggacagtgcgtggaaatggttcagcaggacgagggtaagtgcaggatcacggccaggtcattctgagagacaatgagtggcactgatggggtcagacaaagattaaaaacaaaagtttgtgcttcgacttcagaaactcaataactaatttgctcttataagtaataagcatttttctatctacatgagaatttaatctcaaaacagaaatcagaaaaaatatcaagtccagggcataaaacctaaaccagtgcttagattattcattttaaatagagctaagagtaaaatcttctccataaaatayatattgtatctatacataaaatatatgttgtatctgagttcagggtgtgatgagtgtgaccatggactacccagcattcatgtggaagtgaaggaagaggactggatcaatcccagtggaaagcatgcctctcagcagcccacaccatcctccacctacac
